United States Patent Application Publication US 2015/0240253 A1 - sequence listing, part 23

SEQ ID NO: 106824 - DNA, 455 bp, Zea Mays
ggcggggccgccgcctgggccgccgtcgtgccgctcgtcaccctcgtcccttccgccatgctcatctacatcggcaccgtcttctacgccttcacacgctagtcggtggcggatcaaggaacactctgaccaaagcacccgtttttcgatcagatctttatctgtgtgatccctcctcagtctttcttgtgtgtgattggtggtgatggcgtgagagaacttccaggggggaacaatgcagctgacttttgtagatttaagatatgtaaaatccatgcgatattatgattgtgttttggagttttggagcaaagtgaatctgctgtggttttatctgcaattggcctttgtatttgcacttgagaagttggtcagatgtgcctagaatctttaggtccgaagcaatggtgagatggagctcagctgctggttggtctctcaacttgatatgaaac

SEQ ID NO: 106825 - DNA, 314 bp, Zea Mays
ccccatcttctgaaaggttcagataactatcgatttgggcagattcgagacacaccgatccgggttcatatccgaagaaatgaaccctacaaccttaacaccacgaatcctctggttaccaaccaagctgttgctcgattgacctcgccaagaaggcttactcttgcctgcgaaatcgaagaacacaagcaagtgcacggagaagaaaccaaatcacagaaagtattcgattcaactcacggatgggggtggcggctggataaaggagtttggggcgtctatgaccacctggtcgcaaccctaggggccaagac

SEQ ID NO: 106826 - DNA, 294 bp, Zea Mays
atggtttctcatgtaaaaaataactgttttctcccttttctacttggacatctcattgacacctctggaatgcacaataacttgatagtttgcgtcatacaatgcaaacaaataaggtcaagaatttacctgtattaaaaagttcattttcacttcttcaacgggtgtattgttcattcatcttgctcccgatctttcgatcagtggaatcgagtgtaaagctatgtttcctcactcccattaggatataatgcaaacaaataaggtcaagaatttacctgtattaaaaagttc

SEQ ID NO: 106827 - DNA, 471 bp, Zea Mays
tatattgaagctaccagcgatgagctgcttgggacatattccaaggccgaagatgatgccttgtccgcagccttcgggggtcagggcaagaaaagattaaacagggtgtttgacgcaattggcttcgtataccctgattatcgctacccgctgcgaaggcaaggaaagaaaaggaaaactaccgcttcggccaccactgctgtgccgaagggcaagaaaataaaggttctgacccaccggacgtgatatattaaaccgaccatagtgcctgaatttggcgaagggacttcttcaactgccgaaacaaaacaagttgcttccgtcgtgcagagcgctgaagaatcgattgtagcgccgaaggtgcctacgatcgggctagccgaagccaaggatgatacggccagagaaccagaattggggagaatgataatgccaaagattttgagcccatcggtagaggcagaattgtcg

SEQ ID NO: 106828 - DNA, 2676 bp, Zea Mays
gaactaagctatctagataagtatgaactatgggccttgggccctatcctaaggccctgttgcgcctattataggcctggccgtacataacaacttcactgtccctgtctaacacattagtcctttttcatctttgctatggttttttaatcatagtttttaacacataatattatgattgatcttctccagatacacctgcattgcgtgaaattaaaatagataaaatcagcccatggaagccatttttgaagatgcgccaaaatagcaggcttaatctggatttctcattcagtggtggactcaattcgagaaaacagagatttgatgaatcatttggcttgagagtgttcaaaattggctacgaagtgtatgccgatggtttaacaagagttttacgaatttgtgaacatgcagataatcccaaaattgagaaaattcaatggccaatagcaaatatacagttcagaatttcttatgtgtgtattcatcttcttgacaaggaccaggtttgttccttttgacttccaccaggcctaagcatgagaccgttttttaatgaattgtgccagtaatctattcatacttgcaagtcaaattcagtctcaaatatcattttcttttcgtgttcaccttgttgaagaatggggaaaatgtccaattgccatctacaattttagcagcaagacttcagcatgtttcttctgattcagttgtcacaaatagattcaagcaagtatctgttgcaattcatgtaagtattggtccctctgcaattttgtgtttcagtgcaaaaatgcatgtaactagattattggctggaacgaaatttgcagttttggacttattttttatttacacattggagttcatgatgacagtgtacctgctgccatgtcgtcaccaccactgaggctgattattaggaacttgcttactgtcttatataatttgcatgcattaacaattatttacatgttcaatcatttgtacatgtaattgttttctctgttgaaagccattgcaatgcatgagcagttttggtagtatgtaaataatgaagcatttttccccaaaacaactgcagtcattgaatgtggatgaaaaatgggaaggggcttcaattgggacaattcttaggaggaacaagcttcaggatgctactctcgatgaaaatattcttcgtatgatctttgtactgaattcaactgactccagtgtcaaacaaatacagtattgtgccatcatcctacaggtaacttaaatggcgtgcttgctccttgctaacatctacaacagtatgttcttaggcttgctggtttggacattgttaactagtgcaatatcacaagaataataaattatctaatgacgatatgaacagcctgttgatcttaagattgatgaggaaacgttaatgaagctagtaccattttggagagcatctcttgcaccttcaggcacgacaagcacacaattttatttcagacgttttgaagtacatccaattaaggttccttgctctcgttttgtttcacatttgtaattatttcatatagtgttaagtttgaaatactgattgggttttttatgaaatttaataatgtaaagatcatagcaagctttcggcctggtggccgacgcacaacatatagttctgctcaagaggctctgagggcactacttcatagtgttataaaggtatatttaaaagcatatttcatctattattaaagtggacccttttttatcataaaaggacctctttctttacttcacatcacagtttcatctcttacctcttcattttcaggtgcctgaaattagcaactcagctgtggagctcaatggggttctcctaaatcatgctttagttacatttcgtgagctacttctaaaatgcgctcagcactactcatggtatggtacacctttcccatttattacattgtcatctggtgaatcttgatatcccaaactaatgaataacattcaagtaatcaataggtatgtattaagggcaatttatgtaacaaagggaagcaaattgcttcctccatcttttgcctcaatttttgatgactctgcttcatctgttcttgatgtcttcttcgacccttctgatggatcgctcaacgtccctggccttaccataggtaaacaataaatatatgttcaaatatttgtaggaatactccatggttattgactgttaggaaaaatactccattggagctctggtcttgtagtttggaagatgttcactatgataattgtacaatagttattagtgtgttcattgatgttgtgttatttgaactactgtggtattatggctatggatgatcggttatcaggttgcatctaaaaatagggacttcttttctctgttatagatttgaactgtttgttttacttatttctggattatgcaggcatgtttaaatttataagcaagaacatgaagtcgggtggtttttctggaacaaaacggtaccttggtgatctcgggaaaactgtgagcttccgaaacataccatcaatattttcttccaacgggtcaatataatgctgggtcttctgtaggttaaaactgcaagttcgaacgctctctttgctgctgtcacagaaatttcagatagtgttgttagaggagcggaaacaaatggtttgaat

SEQ ID NO: 106829 - DNA, 401 bp, Zea Mays
gcggtctgaactctaggagcatctggaaggacggtctggactctcgactctaggggcatctggagaaggacgatgtgtgttgttcttttgccgttgcaatgaaatccaacggttgagagctggcaaaatgacgtggacaccctagtttctcgtctttgcgtcacactctattatatagaatagcacaggagctcccttacaaagtgttcagttgacgcacgcggatgcaaccagagttgcccgatcagccactaacgacccagattggatcttattcatactgagtcggtacacgaccgaggccgtaggacccaagatcgatgactcacattaacctatacgaatcataagctccaccagatcctggccgctcatcccatgctccacggcacacactcctt

SEQ ID NO: 106830 - DNA, 400 bp, Zea Mays
ggaggatccatattacacaattgaattgattagtgataacggtctaggtgttctcgatgagcatgattgggacaatgcaaagaaaaaggctagattcttaggtcattttgctgatataactaaacaggtttctgcatcactaagtgtcattgctcacacaatgtttcatgagattggagagatcattgttttggtgaatgattggctgaacaacaatgatgtggttcaagtagcaatggggaaagaatgaaagagaagtttgacaagtattgggggcagttgcatgacattgttgagaatgaaaatgagaatgataaggggaaggaaaaagggaaggaaaaggagaacatgaacttactgatttttgtggttgttgttcttgatcctaggtacaagcttt

SEQ ID NO: 106831 - DNA, 321 bp, Zea Mays
aaatcgacaccacacagagctgaacccgagtgaaatggaccatggggaaagaggaactagaggaggtcgatctccagtcaaggtggccgaaggagatcgccctctcttagagatattcttcttcgatgtctcctattacaaactatggtgctttatatagctagcacctctttctcttaaggaaacattacttgaggaaatatactaacagggaaacaaactagatcatatctcttaattgagggaaacactctcctcatttattcttaagcaatctgctagtataggaacaaactaaatcatatctcctgattccttttg

SEQ ID NO: 106832 - DNA, 321 bp, Zea Mays
ctgaacacggtaattcaatcagcacggtaccaacaaactctgaggcgctatcacgataagaccatgcaacatcgatccttcgcagtaggagatctcgtcctccgtcgaattctaacgggggaaggacggcacaagttgtcaccgctatgggaaggaccattcatagtagcggaagtcactcggccgggatcatatcgcctcactcagatggacgacacggaaattgggaactcatggaacatagaacacctcaggaagttttacccctagctgtatttcaaaagctattgggacgacaatggactctgtaaactgggaaat

SEQ ID NO: 106833 - DNA, 384 bp, Zea Mays
gtggatgtgggcaatccttctatataccaaatatatatactttgctctccggtattgctctccgttactttttctccaaacaccaccttaagttagaaccccggaggttagcttagcatgtgcatgtctgccccttcgcatcgtttatactaattaacattgtcccacgaccaaattaatctgataccatcgacgtcatcgtcgcaccagtggctaatgctgctgagtgtctgatgccaatgttgacttgctgcagcgacctaagaaaagaaagaacgggagctcaaaagctccaaacgcaacgaccagacgcgctccatttccacgcttggacggtagtagcacgtctcgccaacgccaaccccaaccccaacccagtcgctc

SEQ ID NO: 106834 - DNA, 573 bp, Zea Mays
aaaggagacaagtttggagcctgttcctgggagatgactcagctgctggtctgctttgttgtcaacaactagagccctcattcttttaccccccgtgtccagcatgcaaaggcttacttcaacttgttcctgtgcttggggctggtgtgggttatggtgaaggtgtccacgtgcatatattcatgcactagctgggcctcaagtccacccctcctgtgaacatgtggaggccaatagagtttaccctttttacttcttgccaccaccctcaactcccataaagggctacttcagtctatgctccttgaccaccacttgatagagcatcagttgctatcacccttgtgcacaaggatggtcaactgaaaccatccctccacccagaaaccccaatgcctttaaaaaacctgaaagtggtgaccacacacttgttcctttcagttccccgtggccagcagttcccggggtgaatactatgcatttagttcatgtttcgtgatctataggttatggtgaagcttatgcgcttgcccatttgaactctactgcgcagggttacccggaacaccgttg

SEQ ID NO: 106835 - DNA, 499 bp, Zea Mays
ccccttgacctgcctaaagggggcgaggagggtcctcgtcatctccaccccctggcgctgacacattcttcgtgtgcggcatcctgacctaaagactgcatatgagagagataaactaagcacaagaagataacagccgataggatgacaaaagaatggatagctacctagaaatctcacacgagagggagagaatctaggcaggacaggagacggctcacaggcaggcgaggtcactgaaatgatagaagatgtgagcacgtattagtcacatagtcataagtatatgaaatgtgaataaatacatacacagagtgttatggcacagaaatcgagagatatggcgatcgagaggtcaaacgacgcgaaaaaggtgtttgaacgtgaaatagtgccataggaggtttgaaattgaaaatgaggcatgaaatgatttggaattgagccgatacttcacgaataggtttatatgggtaaatatgagtgaagtgtgtgcttg

SEQ ID NO: 106836 - DNA, 524 bp, Zea Mays
accgtagccctccgatcacatttctacggaacagatttaaagagtcaaaaggttatcgtcgatctaatcataggcgtccattatggatccaacgaccgcggacccatcttctctcctacttcactatcgcccagctaccctcaggcagtggcggcggcgattctcaatccacggcggtggcatcactggtgttcaagcaatccgggtacccgggctcgatactcgcaatttcttcgcaaaaggtggagaggaggtccaggcgaaccatatgggagggttccacattggcgacgaatgcggtgacggtctgtccatagcgcgtcacgacaacgcgatggtgagcaggagaaccggacgaacgagggggcggaatcgaggatggatgcgttctacacgtggagcgggtagaggcgaactcaaaggaggttttcttaccggtgattatgcagcagggacccccaaccacaccgcagggcggatcccgggcgcccatggattccggcgagaaattcgccaagatccgg

SEQ ID NO: 106837 - DNA, 625 bp, Zea Mays
gggacttaaacagcatgattggttgcccaggcaaccggcgcccggctcgctggagcctggcttgccgcgaacgccattttccggcgtttccacgcgtacaactgaatgtacttaatttggcctatcctgcatccgtgcatccaggttcgtccatctgcaaacaagcatccaatcaggtgctgctgagcagtcaacgcacgcacacatcctggctgccgagcagcaggcatccaatcacgtagaaagcaaatcgacaacacaacctctttgcgttggagatatattcttattttatttattacttcaatttgttattgttaacttatcttattttttagaatttatttgttatatgatttttgttgcaaatggattattaacacaatgatttgaagtatttttttcatattcatcgtttattttatagatataaactactttagagtatgttgtcaattttctttcattatacgttaccaatacatgtgccctccgccgctggctctctccggtctccatcgtgcgacctccgcgccagctgcccgcaaactcggtgccatgcttctcacgccacccgcaacctccataagctatctccagcaaagacctatatatggtcctgtac

SEQ ID NO: 106838 - DNA, 500 bp, Zea Mays
cggtgagcctccaccgtgggcgcaccatctccgccgctctcgtggtcgtgaggtggaaggcctcccatggtcgttagattcagatagacggtggagattagacatgggaatacctatttggaggataaacccgagtcgtagatctagatccaacggctgtgggcctatgtcggttccaagtcgtcccgatgtgatctgggccctccatctctaatcgggcagtccagatcgcgtaccccttcgtcgtctaatctggtccctggatccaggatcggacgactctaaatcaacgatacccctttgttgtttacgttttctaaaagagcccctagctttcttaaaaataaacccgccgtccgtgggcgatgatcactgagtctagggtgtatttgtagatcagtccctgggtttttcagaatttagcgcccaatccagagatcagaaagaattagaaaaataattatagaaatcgatttttaatacaaaacaatttcagaaac

SEQ ID NO: 106839 - DNA, 300 bp, Zea Mays
gtgcaggcagctcactcctcttcaccaggagtcctgtcctgggatgttttcatcaggcagtttgagaggaggttctacctggtcaccttcctagagaagatgaagattgatctgcagtcctacaagcaagagaagaagtctgtcacagagtatgaagtgggcttcaacaagatggtccgctttgtccctcatgtggcttataatgagttggagaaggcgagccagttccgtcagggcctgaaaccttctatcaggcatgccctgggagcctttccgttggtggatttccgtactacagtg

SEQ ID NO: 106840 - DNA, 529 bp, Zea Mays
gtttgtataggaaccgacacaccctctttgcttggttgatgcaagtgttgaagtacttaatcttcccaatgtcctccagcagcaaatccaaacaatgggcagcacacggtgtccaaaacaaatgtggaatcctctccataagaagcctgccagcagctttgaagtttgctccattgtcagttactaattgcactacattttctctgccaattttgtcaatctgattttctagcaaatctgccaacatgttggcattagctatctcacttgatgcatcaatagagcacaaaaagtgtgtccctgctggactgtttgccaaaaagttgattagatgacgtcctctaacatctgtccatgaatctgacatcaatgagcagccatactccttccacgattcttcatgcttcgccgtcattaatgatgtcctctcgacagccctttcaagccacggaaccctaatgtcgtggtacgatgggccacggtagccaggaccatactgccctatcgactccaacatgatctcccagct

SEQ ID NO: 106841 - DNA, 439 bp, Zea Mays
gcgcccgcgctggctactttacacagtggaccccggctattcgaatatttggttaagagtccatgcacactattcatctgtctcactggcgttcacacataagcccctgcacttctgtttcttcgcagaccaaggtccctgatggagaacagcggtgagcgcgccctacgacgatcttgtaccggccgggatgcgcaacgactgatgccctaactccatcgacacctaattccacccctggcgaccctaatccccccatcaattgcatgattctggcccgaaatccttctgtccacggtgacagcgaaaaccgagggcaacccgaggtgttcccggcgatctagcgtggtcttgttcaattggttgggcctataagcatccctagcatgcaagggtgctgaaacgagggtaaggaggatgagagcggacctggagacgg

SEQ ID NO: 106842 - DNA, 992 bp, Zea Mays
ccaaaacggattataattcagtctactcaagagtgttttagtgtcgacataccccatgttctggcggaaactgttagacacaatacaaggcaggctgctgatgaggacgatgaatttatgtcattatcgaagaagcgtaactttgatgacagtcctccaaaagtcttgaagaagatagttacaaagcggaggaaagtagtggaccccccacgacaggttagaatttatggtcaatggcaatatttcatttttatgcgtgaaattatgttgtgttgaggtttgatttaaacattgagttgtgattatgcagatgtaaatgtttacgctattcattgtatacattttttcagaagaggcttaatgtgagatgcaatccccaagacgtattagtaagcatccagatattaaatgacagatagcgcctagctattgcacggagggggttctccagtattcttgatatgagagttgacgcactcggcagtagatctcatttagcttggctgatggaaaagcttgaccataatgacatgacaattcgagccggcccagggaaggagctcaaaattacaaaggatacggtgcactttattttggggttaccaaatgctagtggagggacggccttgggcattgatgaagctgttgctgccaacaatttaagggctgaacttgctttatcgaaagaagattttggggttgcagctcttcaagatcgtctgaggaaagggtctgacgatgatctaaccatcagatccttctttctgatactgttcaataggttgttgttccctactgccagctggggaataaccaaccatgaggttcttttaactgaggagatggatcgtttccaccagatggactggtgccagcttattttcaatgatttatgccaagctgccaagaagtggcatactaggagcgttacaaacgtttctacaaccatttatggatgttccatcgtcattcttgtaagcatatcctttttt

SEQ ID NO: 106843 - DNA, 480 bp, Zea Mays
agatttggttctcaattgttgattaaactgcatcccttttccttccttaactcctgaaacatcatccacctccgcacctcctttgcctcctccaatcttccatgtgacgcatagatattagcaagcaggacatagttcccggtattacctggctcaatcacaaaaagcttcttggctacctccttacccatctcaaggtccctgtagttcatgcaagcccaaaggagttcgttaacatgttcaggtggagctttttcttgaatgaatgttcaagtgtaacttattgtttgatatattattacacatcaaatataccattatgatagttgcttctccagatgaaccacattttcatatttctattctcggggacatatcgtgtgcaatcactcatatctgtgcaatcgtgcaatcatccaatatgagacgttcaatctatatctgacggtagctatttcaggggggtttggcaaatttcaa

SEQ ID NO: 106844 - DNA, 386 bp, Zea Mays
ggtttctggaagtgatttctttagaattggattgaatggcttatttccaaaagatatcccacgaggggtacacatctattcattgagagttgagacctacaatgcagcagagcagagatcgttgagaagattctggacatgggaaatttgcgcaccctgatcattgatgagccttatggaaagcgtgtggataccaagcatgagttagaaaaatgtcttgggttgtttattcatgaggcagaagaggaaactgcaggtgctgatcatcatcatcgtagttacgagttgtcagtcccgacatgtatttatcagatgaagcatctacgttatctttgtttgtaggactggtgaggcgaccagaggggggtgaatgagagccaatcaaa

SEQ ID NO: 106845 - DNA, 271 bp, Zea Mays
aatgtttgccacatattgactttgcttataatagatccattcattccacaaccaagcttagtccatttatggtagtataaggttttaatcctagtgctccaattgatttgctacctttaccaacttctgaaatagtgaacttggatgctacacagtattctgaattcattcttaagatgcataaaacaactaagttgcaaattgaaagattttggagttagtcccacctttaacatttcagatttgaagccatatatgggtgaggaagatg

SEQ ID NO: 106846 - DNA, 433 bp, Zea Mays
gtttacaacggccgatcctttggaggagatcgatataggggatggtaaaactccaaggccgacttttgtgaacaagaccttggagatcgatcctagagatgaaatgatcggtctattgaaacaatattctgattgttttgcttggaactacactgagatgccaggattaagccgtcagatagtagagcatcggctgcccattaagtccgatttcagacctttcaagcacaaagctagaacatttcgtccagacctactcccacgaataaaggacaaaattcaccgactgttagaagctaattttattagaccttgcaaatacgtagagtgggtctccaatattgtgccggtggagaagaaagaatcaggtaagctcagagtatgcattgattttcgcaatttgaatagagcaactcctaaagatgaatatccc

SEQ ID NO: 106847 - DNA, 691 bp, Zea Mays
tctatgcttccatttggatcgaccccgatcaccagtggatgatgtttcgctttgagcgagaggatgtcactattcatgccagccagattcgccagctgtttggatttctcgagtcgacgactcgccttcacagcttgtgctatggcacttctgatcctcctcgacgccctcacggtggagtcgctctggcgacagctcacgtcgcggccttgttccgaccgctttcacagatgggtcgcgacgctctccagcagatttcactccagcggccaagtatctctaccagctgatgagacagacgctactgccccgaatgggttatagggaggccaccactcacatccagctctggctacttggtgccctgatctctcattcagggtttgatgtggttgattttcttatatgtgagatcgaggacacggtattggatggtcttcgtgcccggcgacaactgctgtatgctcattatctctgctacatcttcgcacagctgatccggccaccacagttccagggcactcttgaggcctcatgcctccactttggctcctatcgtccagcccctgaggaccttgtgccagtacctgatccaatgatagacactcaggcagaggatacgacattccataagttcgagactcagggcacaaccgttcctgatgatgatgatgatgattttgggattctg

SEQ ID NO: 106848 - DNA, 606 bp, Zea Mays
caggggagaagaggaagaggagggagggagatgagatgcccgcgaccacgagcgagcggaaaggagagggcaggctagtagcgtactactggtactgtagttgtagcagtagagctaggctagcagcactaaatagctagaatagggcggtgagggggcgggggaagaccggtgagcatgggcatccatcggcggcggtgaagtgaagtgaaacgctgctaggtatggcaggcagcaggctagatgaggaccaatgcaagaagatgatgtgagaaagagaggcgagggcggcgcgcggtgatggacgacgacagacagacgtatgtacgcacgcatgcatatcctcctccatgctcctcaagtcagcagtaataaaattaaacacgcacagagaatcagagatgtacatgtacaggccggctggtaatcagtggatcggaggaaattctaatcacccaccgccgtagacgtagacgtagaccgtacgtagtccgctccaccctcgcggtcgctaggattatttggctacagcacgtctgtgacaataatcgtagacagctcacgcatctctctctatatatatacacgcaatttaatccagtgaag

SEQ ID NO: 106849 - DNA, 639 bp, Zea Mays
gccttttgggctcgctcacgcgtagcagccagtgtatcatgtatacggattgatgaagtagcttagaaatggagactcccgatatttgatgatcgtggagatagtttgatttgagacgaaggtcaacttcagtgtttggcggtccgactatatgacactagcagaatattgtgtcttagccattggtgtgccaactttagatgatcaagacaagatacttcttccccctagctagagtgaggtatgcacccgtgtttgttttgggaaagccactttgcatgctcgagttttgccaaattaaaaaagaaaacaacagtgtcgaagaagttaaccttttcgccagattcccaggcaaaagatctccatatggagccatggaacgaactatccggagcgtacggcctttgtgtatcatcatcgacttggacttgcatcgtgcacgaggacagccagagaaaacaaatggcaggaggcaggaccacagcgtgcttgggagcgctgccaacaaaaccaaacgcatccatctgaccccaccccccgcgcgcgcagcctccagacgtcccgaaacgccaatccgccaccgaaaccgatgggccaatcctccagatgtcccccgtgagaccagggacatggagatgg

SEQ ID NO: 106850 - DNA, 797 bp, Zea Mays
ttgactcgttccgtttgtccgtcggtttgggatgatatgaggaactcatcttcaatgtggtaccagccaaatggaaaagctcctgccaaagcttgtgaaaatgcgatctcagtctgagacaatagcctgaggaagaccatgtagtttgtacaccacatcaatgaagagttgagccaccttcaaagcagaaaatgggtgcaataatggaacgaagtgagcgtacttcgaaaatgtatctactaccaccataatagtgttagcactgccagaccgaggaagaccttcaacaaagttcatactaatcacttcccaagcctgctcaggaactgacaatggttgcaaaagtctaggatatttactacggtctggcttggactgttggcatattgtataagatgtcacatatggttactgctttcattgatggacaggaaaataactgtttgatcctgcaataggtaacaggaaaccccgagtgtcttcctactaggttgtcatgtaaagcctccataacctgaactgaagagctgaattttttcctatccagacacgacccttataacgtataagaccacttttaagagtgtaatgccccgatctgctaggatcgacagatagtgctgtcagcaactgctgagcttgggtatcttgtttgtaggcatccattatctaaagcattcattgaggtgtaaccgaagtcaaaccaaacaattcagatgatggccttcaagacagcgcatctgctgctccattatcagcacccttcttgtagaaaactttatattgcagtcctagta

SEQ ID NO: 106851 - DNA, 305 bp, Zea Mays
tctttttcacaaaattttaaccttgtgcatatgttatgaactgtatgattgtaatcagttacagatttaaaatcttgtaagcgtaggtgattccactcatgctgtgcttcaggacatataatttccttttgttgttcataacgttcttgaagtgcgatccataggtttcgaggattttcttccaaaagatattctttctttagatctttatggatggaagtccttaacaagagtaatgcagtgtacttcgcaatatcagttatatttggattgtttgcgtcaggtgcattaatggtatgtaaaat

SEQ ID NO: 106852 - DNA, 346 bp, Zea Mays
attcatcctacccattttgacaaggtttgacatccattcttaggtgaaattaaccctttgacagtagcaactttggacttaattatctcttaatctagttggcaaatggctgagaacccttaatcaaacttgtagagtattgcgtgggaaatatctttgctacagtgacccatgtctgaatccaagcagatgacgccaaaaatggccgcccaatgtcgatactgtagcactcgccacgtgttcgacgaattgctgcaatggagaaacgtggccgccgtgctctggagcttctcctccatagatggcagcccacctctctcccttcttcccccacacgccacttctc

SEQ ID NO: 106853 - DNA, 384 bp, Zea Mays
tctgccaatgaagacacttgtcccaatctttaccatagtgtagcacacatgccctcaacatgtcttccaaaatctgattcaccctttctgtctgaccatctgtttgaggatggtaggctgagcttcttattacatgggtcccaagtgattcttgcaattgctcccagaaacgtgccacgaatggtgctcctctgttagacacaatagtccttggtattccatgcaaacgaactatctggtcaatataaatttctgcatactttttctgccttgtgggtggtatgtactggcaagaaatgagctgtcttggtcaacctatccacaatgacccaaatagaatcgtggtgctgggaggtattgggcaatcctacgataaagtccatg

SEQ ID NO: 106854 - DNA, 381 bp, Zea Mays
agaaaaacaacatgcaaggtcagttgctgacagatggagacaaataaaggacacagacaattgatgggtttcaaattgctgtaacgatggcactggaaactaaaacatgagttttatacctacagtgtgagcgctaacaattcgatatttgaatctcagtctgccggtgaggttgctaagtgctgaacatgagttagattatctttatttctgagtcaggcatctgtacaaacaaaaatccagagtctccaggctgaatcagttatgagcaataatattagttaaggatggattgagggcgtccacacgtccacacgtctacactgatgttaacgtcaagaccatttccttataaacaaatattctcgactcaaaccaaga

SEQ ID NO: 106855 - DNA, 487 bp, Zea Mays
tggcatccggctccatctccctccacactctgtgttttccctcgctgtttgacccgtggtgacgcagcagaagccaccggccatggagctcccaggtcgcactgttgcggccggaacaccaatggcaatggaggtcaccggcggcagaagttcttcctggttggcaccgtgcacggggtttctggcatacaattcctcaactacgacatccaaatcctgttatggaatggaatgagggagggtcacggcctggtgatttatttccaggagaatcggaccgcaaccacccgcgcaggaagcggagctgagcgagcgcattctgttaaacggagagaagagatagctaacagtgcggccccactgagcggtgaccgacccccttccccacttggtcgtgcgcagtggatgcgtaaatgggccaaacgactagattcagcccaaactcgagtttttccaattttctttccttttccatttttctttttca

SEQ ID NO: 106856 - DNA, 416 bp, Zea Mays
aaaatttctccaattatctcgttcagcggaaaccgcaatccagctttgaaaaagcttctgaaaactactacttcgtcatttttcggctgtggagtggtttcttcgccggcaaagcgaataagcttcttctcagtctccccgaagtaacccagcttcatcatcatgggcacatcggcctctgagacagtagattttccaaaatccaagtggctgggttttgacgggatcagaatgctataatcttattcttcttcttcatcagcgattttttcctcaacatcttgttcagtttcggcagcaggtgcaccttgttcaatggctccctctgtcacaaccaatcccgattgtctcatcactttggagatcggggcagtctcggtggcttcggcctcctctccgtcacgagtcaccctcgc

SEQ ID NO: 106857 - DNA, 483 bp, Zea Mays
tctgccttcaaaactatagtgtgaaaatcatctccaagatcctcacaaatcgtctcaagtatctaataggttcgctcattcaccttgaccgggctggtttcttgaaggggagctatatccaaaaacttcatctaggcccttgagctaatccaatgttgccacaaacataaaaaaaccccaccctagtcctcaagcttgacttcactaaagccctcaataccgttgattagggtgccttgcttgagattctggaagcccacaagttcagttgtaagtataggaattgggtcagaatgttgctcgactcttctataacctctgtccttgttaatggcaattctggctcctagtttccttgtaaatagggtctgtgccaaggcaaccctatgtccccctacctatttctcttggtggctgacatgctacagttgatcatcaggcatgatagacacatcagacatcctctgtctaacgaccaacctt

SEQ ID NO: 106858 - DNA, 671 bp, Zea Mays
agaggaaccaaatcatcgagcttcaggaaaccctaatgaagatgaaggattagagcttgaaaggttcgagggtgatcttgaccttcatgtgcttctgcatgcaacccctaagggcaaacatgggcacatggatcttattaagggtccctatgatccaatgcaaatgatcttaggtgagctattcgacgaggaggtctaacgacacatggtagtggtcatcatagagaacttgcaaggagtcatggtggcacaccctttgtcattcaggaaggatgcgcctgctgaccttgtaaatacttgttttgtttagagtttgtgggcatgggcctaggagagcatcaaagtttgacacaattattatgctaggcttggtagtttgaaggattcggtgccctagccaaaatacaaggtgatgagggctcaatgccatttggcggtggaggccaagtaagagaatgtctgccatcaaaattaggaggagaagaaggtctgcacatgacccatggggagagcatgtatgatagcaccaacaagcagcctgtgataatgccccaacatgtgccaccccaatgaagcggagagtgttgccctaggtcttcttgaactagtaaggggttcaatatttgagattggtcggaatgaggtcgcctaacctataacacccttggtgt

SEQ ID NO: 106859 - DNA, 588 bp, Zea Mays
atttgagggtatgccaagtgcaatctactaccaatttggaaggcgaaagtggagccaaaatgtcgtttcttcgcgtggactctactgcataataagatcttaacagctgaaaatctccagaaaagaggttggagtaatgatccgatctgcagactttgcaaacaagaaccagaagctataacccacttgttccaaaactgtatcttcactagggcggtgtgggcgcaactttctcattggcttgacctcgcattgctgccagggatggcacaatattcgtcaatatacacttggtggaataagtgcaaagccaaagtcgataactgctcaaggagagagtttgatggtttgatcatccttttctggtgggagatttgggaagagcagaaccgcagaccttccaaagcctagagaagtcggagtgtgtgactgcagggttaatcaaggatgtttttaggcagcaacgagttgctaattcttttgactttggttgctagggtctctgcttagcgttctttatccttttttctttctagagtacttgggtgactttttcgggggctgtttggctagttaagtgtttttaag

SEQ ID NO: 106860 - DNA, 656 bp, Zea Mays
tccgtcgactttctggttggtgatttcatttggtagatgcattttcaagctgaactcagattctgttggataccttctccaagctgccctgggaggttttgcggtaggctttgaggttcatcagctttttctaatcgggttttccgattttcggtttcctctaaggctgtgggttttcatatctacaattcaaagtgtattgatcctgcggaattcagagcctttttcaatctttggaatcatggtggccctaactagatgcatgagtacaagaaatttattggtgaagagaatgcttcctggttgactattcggggcaagaagagattatcttacgcagatattgttaagctccctctttctggtgctaatgcggtcccgattcccaacaaaaaggagatctcttgcggtgttgggcatccggatcaggctagaatttctgcgttcagacgcctgggatcttctattcgtaattcaggacttcatggctcgtggtattcgtcttctctgtggaggcttgggcctcggggacttcggattctatcgattgtgaagatcaagccatttcccatgaatgttcctcgccggggggcgtcttcttcggtgaattactttggtcttaatggaggtgtgcatggcagcgggcttcgtgggcg

SEQ ID NO: 106861 - DNA, 648 bp, Zea Mays
aagggtgcagccggactagcacaacaagtgcgcaaaatcgaggtcttcctcagaagactatccgtgcaaaagtcgcctaagggcgcagccggactagcacaataagcgcgcaaaatcgacgtctctctcaaaatactatccgtgcaaagaccaactacaggtgcagccggaccgacataaaaaacgcgctagacctagtgcacaagtcccctacgggcacgatcggatcagcgaaggcacacagcctcatcatacaaattatagttacatacgtacagcgagggcatcacacctcacattgcttcaaccttcgggacgatacccatctccctatagttaaacagcattatcctcagctcctcaccctcaaaaagacttcgcaactccccctcacctacactcgcaccaactggcgaggacaacaattcccgcttgccagccctgtccacacgaagacgaccaccctccacctcactcactctacgcttcgccaccgcccttcgtcacctacgcccagcactcggaccgggaataacttcagtatccatcagacgcggagaagcctccgcctcagccacatccaacgccgcgaaataatacaaatcctcatccgaagactcctccgtccacaccaccgaactcccagaa

SEQ ID NO: 106862 - DNA, 1310 bp, Zea Mays
aaaataccctcggggttctcactaactgggatccggtcttccaatgtttaacacagtcgctgacagtttgcataaaagtcctcccacttctatctattctgggtttaaagtccccgacggtgcatggcgcggcagagctccggcgagctcctagaccggtcgattggggcaaggataggtactattgagcggtctacaccaaattcacggcctatcaatggtttccccccaatcaatttcatatttggtgatctatttcgctctgtccacgaggacagcgaaagctatagacattagttcgtgttcccagtgattggtgggcttctagtttaattggacggtttggagagcatcaccagcatacagggacatgagaacaacgcgcgaattggatggtgccttaccagaacggactggccacggtggagtggtgctttacggtggcggagaccaatttgggggaaaaggggaattctccggctatggtgggcaatcgaggggaagaacgggtgtgtgggcttcgtgatgacttaacgcagctgcccgggggctcaatttataggcagcttcgtcggtggcgcttaatttggccgggccgtgcgggtggccggagataaggaagagcactgtcgttgcgacttcgtgtcccccgcagtggcaatctcaccggcgttgatgagacagcagtaaggagtcacgatgatacgacgaggtgctcggatacgtggcataaggctgtgcgacgacggtttaccggcgagcccatcgaactttccaccgcggcatacacggtacggtggccggacttgtttatggccggagttatccacggcgaggatatttatgtgacccaaagtgttatccaacttagccaagcccaaatcgcggcaacagcagcacgaatcgcggcggtaggtcaccggcggtgaggaccgttgagctggcgatctgatcccttttggtctactgtaccatcgcgaactgccatcagtgcgcctgacagtcaatgtttgggctcaattttctctcaaatttccatggcaacctatccgaggctctgtagcaaatttgtagagctacaaaccagcaacacttcgactataggggttgaactcatttgagcactggatcaaggttgaattcacactcaaagttgaccctgttacactgaaaagctgaatttcagaatgaaaccagcctgacagtcaagctttgagcataattatctctaatattttctcaacaactatgctcacacccttaagcaaagttgttctccttagtttggtctacaattttgatgtggtgac

SEQ ID NO: 106863 - DNA, 523 bp, Zea Mays
gcgagacaagctgttgaaagcatgtagatactctatcactaactgggtgtcctaagttaatctcatgaattccgacaccttcattgccattagaccaggcggaatataactccctcagaagctgtagtgaactattgccaagcgatgggtgcattttcagggtaggcggtgtggtaatgagaccattacattcctgcgggtccctataactgatgtgttgcatactcgatcttaagatctcccataagtctcaacaaatgaaacttctgctccatagtcttaatccactcatcttcctctaagggttctgctaccccttgaatataggcggtctagtgcccatgaaatccttgaaaatgctatactgaatgactccatatgcgtcctgaggctgcccatggctagtgttgtcaacaatgttgtgaagctttacttccatgttttgctgcaagttctccatattcctttgagctcccataaattgcgcaaaacattgctcagacgtgtatggtggaggtggagg

SEQ ID NO: 106864 - DNA, 643 bp, Zea Mays
caactctgtagagccggccagacgtcttggaagtgttttgcttcctagtatatgttttacaacgttgtggtctgacggtctgaggtcgttgctgcttctggttgtctgtgggctgtccgaccttcataaccggactgtccgcgcctatcccggactgttcggccttagtgtccgaatcgtccgacttacgcaggacaagtgaccgtgatcgggtgttcaatcgtgcttgcccccatcgccttcggtctatcttttgtccgaagccttctgagtaaccactctgcgtgacatatttagcttgtgaagatccccaatgacgatattttatctttgcttttatcggccgtacatggtcgaactaagacttttttgcttgtcggctctaatgtggcaataggaacatgtggcctctcaatcttcacctcttgaaatcacaaacattcttcatttatagccgattgtattttccgatggaagataacacaatcattggcgttatgaagaaacagacatgccatttacaatacacacacccttttagttcttcaaccgaaggaattatacgtgacaatttaatattaccatgcttaagtaactcatcaaatattttatcacacttagcaatattaaatgtgaacttaac

SEQ ID NO: 106865 - DNA, 361 bp, Zea Mays
actagttaagtacacatcaatttgccatggcttctatatagacaaacttagttaaaagggaataatcacttaatcgggttctaccattattcacaatatcctaatgcgagcacacacccaagagcacacacagaaagcgatagcctaatcacactgcttcttatactagtctaatgaggttggttatttagcaatattagctttgccacgcaagtattaaaaatggtaacgtatcattaattgtgtttctagtccatataatgacacttgctaaatgtttttaagctaagttactccttaggctttaaccaatttcgtgcactatcattattactcaaactcagtcaaaatccaaaacaac

SEQ ID NO: 106866 - DNA, 455 bp, Zea Mays
ccggttcttcttttctcctctgcttccagtcccagcactccagcatgatccgttaggcactcgctctgctggaccgcagggatgagtcgaggcagctacggatcgctcgagcaagtggatcctccgtccagggctgggatgccaaggtacgatgccaaggtacgatgccgttgttcacttcggaacccgtcgtttttagcttctctcttttgctccccttgttctgtttgacgaaatgcccggcctcgacgctctgttttaccaacgtgctaatgcttgcctgccttcgctatgggtgtttttatctgtgtcaatagtacaatatctcaaacgcgcaagcagactgccctattttaccttgtttgttttgcttgctctgaagtaaccacaatatagcatcatatttgtcttgcttgctatgaagttcccctcatgcattctaccctcggtatgcc

SEQ ID NO: 106867 - DNA, 616 bp, Zea Mays
catatttgcccatcgtccttgggcaagatgcattatagtggctatgacatctgccacgacactgcatcgatgattggagtgacttcagtcggcgtttcatcaccaacttccagtctctctccgacaagccggcgcagccatgggacctcaaatccatcaggcgccagggcgatgaaacactctggtcgtacctcaagaggtttcataccatgagaaagcgtatccccgaggtcactgaggaagcagtgattgaggacttttaccggggatctaatgactcggccttcgtccgagccatattgcagaaagcaccgaccacctccgaacaactgtttcgagaggcgaacctctacatcaccgctgacgagcgggcccaggacctcatcgaaggaataaaacctgcaccaccgcaccacggcacgacacgaaccagcaacccgacatacattgggagaagaggcctcgtgaggaggtccacgccgccggaccacccgtcgctcgtgctcgaggggcaccccgtggaggcgagcaaacactggacgacatcctcaacgcccagtgcccgtaccataaggacatgcgccacaccttgcggaactgctaggacttcaagcac

SEQ ID NO: 106868 - DNA, 313 bp, Zea Mays
gtacgatcaaaggatgcactcccatcaacccatctccctaaaggtatcctttatgcagtgcctatgccattaatggcggcattagccgctgtcttcgccaacctcgcctgatcctaagaaacctgggccaacgacttcatcaagaggtctattttggttgcaggtattgcatgaccttgtcatgttccatctacctattctccatctcatgtaacttgttcatcactatcccaagtccatccatcttctttgagagttccatgagtgtcgtggtcgaagcatccatcgcctgttgaaacttctcaatcaagtg

SEQ ID NO: 106869 - DNA, 842 bp, Zea Mays
atggcttcaattgggagacatgaaaaactggatgaacttgggcctcctctggtaactgaatcttataagccaccgcccctatcctgtccaacacagtatagggtccaaaatatttaaaggacaattttggacaagctctatttaccaccgaatattgagcataaggttggagtttaagtagcacctgctcccctacttggaactctccgggccttcttttcaagtcagcaaagtgtttagcacgatgctgagccttcaacaattgttccttgagcagcacattgtaagcatctcgctggttaacccactgcccagcttcagtatcctctgtgcccaggaaatctggtgcagcaagcacataagcctcatacccataaagggccttgaacagagaacatcccaatgaagagtgataggtagtattataccaaaactcagccatagccaaccaagacttccacttgtggggcgttgcgtgaacagcacaccttaagtacatttcaaggcactggttaaccctctcactctgcccatcagtttgtggatgataagctgtgctcaaagctagcttaatcttcagcatatcaaacaaatgtctccaaaatgcactggtgaacactttatccctgtcagacaccactgaattagggaccccatgtagcttaacgacattgtccaatatcacctgtgccaccatttgagcagagaatggatgtctcagaggtaaaaaatgggcatattttgaaaatctatccaccaccaccagtatagtatcatagccttctgactttggcaatttttcaatgaaatccatggtaatatccttccaggcccctgttggc

SEQ ID NO: 106870 - DNA, 381 bp, Zea Mays
caaatttgaagctttggtagcagagctgaaagatttgaggacactaacagagatgggtctgctttaggagaacatcactcagtgggaagtcccaggtgagaaaacttttccaacactcattgcaaatgaaattgtagttttctcgcatcttttaatgcacaggcttggcttgttagcctctcgatatttccatgaatttcttcaatactatcatatccagtttatgcactgtaaccccaactcaataatacacatttacatatttgttcatctatatatagcataccttggggatgacccttccctcgccctcttctagcatcttttctttctttgcgctcgcctaaaaaaagaacatccttcaatagtacggggtgttgg

SEQ ID NO: 106871 - DNA, 830 bp, Zea Mays
acaagttcttttgaatggggttccgggcagacgctttcactgcaggcgtggggttcggcagggggaccccttgtccccccttctctttgtcttagctgctgatctgctccagtcaattattaacaaggccaaggattgtggcatcctcaagctcccgatcccgctctcctgtggatccgacttcccgattatccaatacgcagatgatacaattctgattctggaagcatgccctagacaactcttctttcttaaagcaatgcttaattcatttgctgactctacagggctccatatgaattataacaaatctaatatttaccccatcaatgtttcagagcagaaaatggctttgctagcaaatacattccactgcaaggtcggggctttgcccttcacgtatcttggtcttcctttggggcttaaaaaacccaacttggaagctttcctccctctcattcagaagattgaaagaagactagcttcaacctctatttttctaccttaggctggcagactacaaatggtcaatgcggtattttcttctcttccaacctattacatgtgcaccctgaagctcccaaaaactgtgatcaaacagattgacaaacttcgacggcattgtctctggagaggggcagacataaatgcaaaaaaacctcctcaagttgcttggaaatcagtttgcaggccaaaaattcaagggggtcttggagtcatcaaccttgagtggcagaataaagcactccttatgaaatgcctccacaaattctttaatagagtcaacatcccatgggttaacattatctgggacactcattacagcaact

SEQ ID NO: 106872 - DNA, 609 bp, Zea Mays
gctgagcttcttattacatgagtcccaagtgattcttgcaattgctcccagaaacgtgccacgaacggtgctcctctatcagatacgatagtccttggtattccatgcaagcgaactatctggtcaatgtagatttccgcatacttctccgtcctgtgggtggtatgtactggcaagaaatgcgttgttttggtcaacctatccacaatgacccagatggaatcatggtgtcgggcggtattgggcaatcctacgataaaatccatgcaaatgtcctcccatttccaagatggtatgggaaggggctgtaaggtgcctgctaccttcagatggctggccttgactctctggcaggtgtcgcattcagatatatacttagcaatttccctcttctttctggtccaccagtacaaggatctgtggtcatgatacatcttgttactgccggggtgcatggaaaattttgaaaggtgagcttcatccaatattttctttctgagctctgggttcttgggaacaaccaatcagtccccaaaccatagaatccctttgctgtccttacggaagcatttgtatttttttgccttctgttcgatcatttccttaata

SEQ ID NO: 106873 - DNA, 317 bp, Zea Mays
agctattatatgcagtacttctaactgcccgcaagctgcgtcactactttgatgaccacaaagtcatagtagttactggttttccgataggggatattcttcacaacaaggaagccattggccgaatagccaagtgggcttgcgagctgggatctcatgacatcgagttccgacctcgaactgctatcaaaactcaagtgctggttgatttcgtatcagaatggactgaacaacaagtaccagataacccagagactgcagaagtatggcgaatgtatttcgatggctcgttaaaactgcagggagcgggagcaggg

SEQ ID NO: 106874 - DNA, 361 bp, Zea Mays
aaataatatgaagaatttagcccctcccccgttccctctcctattcttactctcgtacaatattattatttttcttcaatctcaaatcaggtacagggccggggtgaagccattgaccgatcaagcagaccaacacactcagcaactaatgggaacaagcttttatatccacggcggcgatgtcgatggcgatcgatcttaagatgaaaaacttaatgggcggttgagagtgaaagtgacaagagtaagcaacgttgatatccacggcgacgatggtgatggcaatgctgcaggagcagtagcgtgctggagactccacctcgtcacctcctcctcctcaactttacatcctcaacaccac

SEQ ID NO: 106875 - DNA, 336 bp, Zea Mays
cacacccaccgtattatattatgatttagttatgtctaatatcgtgcaacggtgtaaggttaacggtgtaaggttgtacatgccctgttaacagggtgaagctgttgcagcgtggacaggcaatctcgaggtgcgatcttggatgtaaaaaagggtggtggaggcggtaagacaagcttggcacaaggctagccattgcacgatgctccacctggcgcgaacggtggcagagttcctccatctcagcctcacatccttcccttttacataggacaataacggatgatgagtaataaggctctcattggataaaccttcacatgcaagatgtcagat

SEQ ID NO: 106876 - DNA, 443 bp, Zea Mays
gtgaagtttgacacctcctctagaatgtatgcctctgcaatggaagcctcgattttgcatttatttctacgtttcttttgattagtctttaaacatctctcgattggatagcaccaacgtccatgcatgaccccattcgtgcctcattagggagatgaagaatcaaatgctgcattggattgaagaagccgggtggaaagatcttctcaagcttacatagtaacacaggtgccaatctttccaagtctgcaaccatggtccgagataactcttttgcacaaagctgacggaagaaatatctcaactctgaaagcactagccagacatgctcacgaacatagcctcgaaccatcgcaggaagaatctgttcaattcatatgtggaagtcatgactcttcatccctaagactagcagagtagataagttcaccccctactcaggg

SEQ ID NO: 106877 - DNA, 583 bp, Zea Mays
tggagaagttgaatctggggatagtgcagcaaggaattttgacaaatgtgaagcttgagtcagttcttctgcaaagaattattgacgctcaaagaacagataagggtatgaagtacattcatgagaaaatggaagccggtaaggcaaattgcttcaggaaagataatcaaggagtaatatggtttaaagatctcatagtagtgccaaaagatgttgaagtccaccaacaaattttggacgaagctcatctcagtcgatattccattcatcctgggagcactaagatgtatcaaaacttaaagcaacattattggtggactaaaatgaagattgaaattgcacgttaagtggcaaagtgtgacacttgcagacgagtcaaggccatacatatgaaggttgctgggccattacaatctttgccgatttgaacctggaaatgggaagatattagtatggatttcgttgtgggattacccaggacagctaaaggatttgattctatctaggtcataattgatcaactcacgaagatagcacattttctttctgttaaaacagatcacccacttgctgtctatgccca

SEQ ID NO: 106878 - DNA, 687 bp, Zea Mays
caaggattagagccagatgccaggcgtttctgcaatatgcacaagccattatattagacgaaggcaactggaaaagagcaatatcaaaataattttggctgctacagcttcgtacatcgggccgaggctagctatcctgtgccgacattttggaaaaagtggccaggctcctagatgcaagaatggttttatgtgaaggttgatctgagtgagagggaagatataaaaggggtcatttagtgccttatatggtctcgcttcggcatcaggagaccggccattgcagttggaaacgacgtgcaagcgtgccagacagcttttgatatagtgtgtacttacattggcacaagagacttggtccaagaacatattgcttacagaatgtggccacttgctcatggatgcgagatgccgaaggaggctaccgctagctccaaccaaaatggtttggtgtatctgaagtatacctttccatacaggagccagtttgataaaccgaatgatgacttgctagatgccagaggcaactagtgatgagtttcttgaagcatattcaaatgccgaagatgaaggcatgacaactgccttcggagctcggggcaaaaagaggttgaatagggtatttgatgtcatcggatttgtgtatccagactattgttatcctttgcggaagcaagggaagaagag

SEQ ID NO: 106879 - DNA, 276 bp, Zea Mays
tatgcccatgcggtcgaaggcattgaggaaaatgatgtctgcctggctgccattgtcgactaagactttgtgcaggtcccagcctaccacgctacagttgataaccatggcttcaatgtggggggtgctgcgtagatcgacgtctcaggcatcgaaggttaatggcacatggaaccacttcgtccgcacgactggaccggtgacggcgacatggttgatgctgcggtaatggtccctcttctgtcgcttcgtatcgaagtcgacgctggatccccc

SEQ ID NO: 106880 - DNA, 450 bp, Zea Mays
ccccgccgagagtcaccgggtgcgctccgcctacacggccaccgataacgacaccgaccatcgacgtttccacgttggccctatttgcctgctgcagcatcccttccgcatcatcgccgccgagaagctccccggccttatcttctatgcccagtacatatgatctgtattgcacgaagcattaattaacgctcgactgacatgtagtttgctccaccctaaacaacatggagattctactcgtcggtggggagatcatggtggatggccacatccccactgctgctgccattgacgacaccaagcttcgatgtcgcgtgcgctcctttaccaggcctaccgtagggaacatcttctatatcggatctctcggtacgtaacgcccactaactcctcgctcgacatccatctgaacatggagtgatggagaagatgtaagatgatcatgtg

SEQ ID NO: 106881 - DNA, 292 bp, Zea Mays
agagatgtcgggcaagatgtcaagagggttcttaagatggttagtcttggacaacacgcttgtttttgaggtggccctcttggaggttcctcaaacaccccctctctcataattgagtggcaaagttgggtggagtgaaattgataggttaataactggctataaatttctttgaaggtgttaagacactatggtcaccaaccttcacataataatcatcattcccattcctagaaacaaagactagccctggtctaccaattcctctcgtaaactggctaactatcattcc

SEQ ID NO: 106882 - DNA, 415 bp, Zea Mays
aaatgatcgaacaaaaggtggacaaatacaaatgctttcgtcaggacagcaaaggaattctatggtttggagaccgattggttgttcccaagaaccccgagcttagaaagaaaatattggatgaagctcacctttctaaattctccatgcatcccggcagtaacaaaatgtatcatgatctcagatctttgtactggtggaccagaatgaaaagggaaattgctaagtatatatctgagtgtgacacttgccaaagagtcaaggccagtcatttgaaggtagcaggcaccttacagccccttcccataccctcttggaaatgggaggatatttgcatggattttatcgtgggattgcccaatacctcccgacaccacgattctatttgggtcatcgtggatagattgaccaagac

SEQ ID NO: 106883 - DNA, 308 bp, Zea Mays
gcggctcaagccgagaaacagatgttggataatcttgctgatcgcctcaagggaagtgagtgagaaaaatgatactataattatgttagtacaatttatttatcttgactttgttaacttattttgctcattatgtttgcagagattggaggtggcgtaaactatttgaccgatgaggcgcatgcaagatatgttcaggataaaatggcgacggttgagctgatggaggaggaggacgacgacacatctagattaagtgagcttatcgctctcgcagagacaggattacatgaagaagaggaggacga

SEQ ID NO: 106884 - DNA, 1357 bp, Zea Mays
aattgatggcagatcgtcagtgagggtacatcatgcacccctttggttctcggctaactctggtacaacttgtctaaggttactcggccaaattagaaaattaacctaacgacagatcgttaatgaggtacaagatgcatcccttttaggtttggcaggggcttagacgatcaccgtgagttcaggatcccacggagacttggggcactttgggttaatgggagagaacgtagtgtggatgaatgtaggatgcatgaagtacactagatttagagaggttcggaccgttggagcgtaataccctacgtcctcttggttactagttgtattgctcgtaagtagaaaatggtaagtgttcgtttgtacgtttggacgtgtgtgatcagttatcccttagaagggatcccctcttccttttatagtccaagagataggggttacatgatgtgtgagttggcttagcaccagacgtctcctattgttgctattgaaggtgtaatcgtccatccatagctttttggcagcgtcggctccacatcgtgggtggtcgttgtctcccgtacgtcgtggatggaggatgttgtctctagacgtgacggtcgttgtccatgtgtgcacccgcaatggtgcactattgacacacctaggacgatcgagcctaacaccctacatggtgtgggatgtgggcacgatcatgcttatcttgtcacacaggcacaatcacactctaactccaccaactccttgactatccatgcttggtagcaaggacacatggcatgcctagatcccccaggggcgctggggggcctggggcatgtaacacccctaaatcccattgtgatcaatggagtgcgtcaacgtaggagggcattggttccaattggagacccaggacttgtggcacgaccggaccctgtcaaggacgagaattgctagtgatatgtgtcgtaaccatactttcataacaaattggctaggcctcccatagggcgggttttggtagccatgtggggggggggtaatgtccacatattcttttcctcatagttgggtcttctcgatatgacacatgatggtgggggtttcaactctaactctgtgttggtcagttatgttgtagcacatgggttacctgtacctaggggcgctgacagtggggccagaatcaccaacaccgaccacgtaggcgacgatgtgaaggaagctaaactatcatgcatttcttgatttcttggggctcaggtgccatctttgagtcttgtgtggttggacggttacaagagtagccatatggtcatttgagaagaatctttcaagtgcttgagcactcacctttcctcctgcccaagcaccc

SEQ ID NO: 106885 - DNA, 434 bp, Zea Mays
aaaacattgaaggatacaaaaaaacaagcaatgtactccatggaagcagaaaaataatgtacataataaagaactgtgtgctcataccataagttgctgaagaaaacaaaatgttcatggacagatattgtgaaaaaggtgagggttgtacacattactacaacaaaacataaagtagttgttgtaacaatatacaaaccaactatatgaaggtccacaatatttatgtatcctccagtcgtatacaagggtgacaaaaaatttgggatgaagtagaggaatacaataagggacgacatacacctaacaattataatgaacatcattcatactaactaaggaagtaatggaccctctgatatgttcatgacagttttaagaagtttaataaacaatgaacattacccttggttggctaaggtaacacattttgc

SEQ ID NO: 106886 - DNA, 451 bp, Zea Mays
caacgtatagctgaattgtcagctgacgtcagccgcttgcagtatgagatatctaaacaggattcggccattgattgggtcgtcaactcgcgtttgatcgctggggactgtgaagcaaaagtttgagctcgtgtggtagagcttagtgcggccctagatagcctgcaagtgtactgtaatactttacatgaggaagtacatgtactgtatgctcgactgcacccagacgtgtctgctgacgctgttgcaataggagccggaccatcagggacagcaagtgaaggacctgatggggagttggacctttttaggcctcccccttccatgaaccttgctaacgaacggtctcctgcagtaggaatgaagaaaccaaggacgatgaagactagaatagtatagtttaaatgtgatacttatgtaaaataagtactaaagtcaagttgtacgctgg

SEQ ID NO: 106887 - DNA, 444 bp, Zea Mays
cttcaggtggtatcagaacccataggactggccgtaggtcgcagccctgaccctaaaaacttactttaaaaagaaaatacctcttacctcaagaaaagttttctcttcccttccccggttttaacaagacccttcttttcctattccagatggaagactctctggccattaagtcatcctactgctcggaagtggaagggttcccacgcctcttgcgaagctgtgcgctccgcatgggaatccgcaagaaaacggaatacgtctggacggagcatatcgagggcggaatgatgagatgctctatggcagtctacctgggggaaagccaaagctatccaaaccaacgttccttccaagtcacttttaccggagaccatttcctagatgcttgccaaaatgtcgcccgaaaagccctccgacaactgtgtcagaactacaacaaag

SEQ ID NO: 106888 - DNA, 314 bp, Zea Mays
gcgtcgctctgtagggcgtgaaggctgtacagtgcgctcatacactgaacattgatcctcccaacttggtcgggatgcatggcccacacgtcgttcacgtggatcactcagttgcacaacatgaggtcatccctcttcttagcggggaagagtcccagtgggtgcattaccatctccaagggatggtatccgtagaaagtcgtcagggtcttcatagctgcagcctcgatggtgtcgtccgccctgaatccaatagtcttggagtcaagggaacgccaactcgtttgtagagggtgagcctccagagttagcca

SEQ ID NO: 106889 - DNA, 839 bp, Zea Mays
atggcatgtgctcatctagatagttatgcacaagcttgttgctgggatattgcttcttgatgcagggtgagtcacatgacaatagctttgtattttttaggttttgcattttgcagtaatgatttgatttcgaataactacactccataaatttaccttgttggctggtatttgtgtacaaataaaagcatactgtatcctgtatatagtcacctcttctttgcactgaaaattataaatgggaatggaagtgttttatctattataattggtggacatcattttcattcatatcagttagtcttagccaataccttaaagtttttttcttgttttatgggtcccgtagggtcttcttctgaaatagagctgagaagagtcaactatttcagcagcaaggaattgccacaagtattggaaaggtaacctccacaacaaagccatagttcgtgagatacgacaaattccacagagagtaaagaagataatagagctcttacctcatcaagaggtacaatttcatcatctgaacctgctcatcttctgatttcatttgttgtaagtctattgatattcaactgttataatgaaacttagcttgcacgtaaatttcttgcactttccatttccatattcaggataatgaggaagaagcttcgctttttgtcatactgtatttgcttctggccagtgttatttttctaccattatttcagaaaatcgctggaggtgagatacatattctaatattgcttgtgcatggcatgattcagcaacatctgtagctttttgaattattttggtcactcgagaaagtttgcatcaacttttactgtttt

SEQ ID NO: 106890 - DNA, 656 bp, Zea Mays
tggaagttggttgttggggtcaattgggggaatgccaggtgtgacagttccttgcttcttcctaggcgccaccagacctagcagacgagcggaatcaatcgcaatcacgagggcgaacatgagttttaggaaagtgtttgcgacaaaaaacagagttagggttcgctaccaggaagctgccagcgaggatgtatatgcgtgcgctaagtcaggcacatcaagacagacgaagtaacccggaccagacctcaaccgagtggagtaagtcggatggacatgtcagtcggacctatcaaattaagtcatcagccgaagttatcagttgggtctgtcaacagaactagtcagtcgaaattgtcagttgggctcactcgactgaggttttcaagcaaagcaaaagtcgagcagaacaataagcacaataccaaacacagcaaacaaagggttccattcatcagaaagggttcattacaaaggaaaagggttggctcattatgaatcgaccctatcatccctcacccctaccaccaccactaccactaccactacccacacaaactacctactactacactataataatattcatgccggtggcgccctgccaccgacattgttgtcgtcgcccttgctccgtcatcgcccctaccgccgtc

SEQ ID NO: 106891 - DNA, 453 bp, Zea Mays
ttttgctcttcggctcagctggggtggccgaaacggcagtctttctctttttcccttgccctcgtagcgggtagtggtaatcagggtatacgaagccaatcacatcaaataccctgttcaatcttttcttgccctgacccccgaaagctacggacaaagcattatcttcggccttggagtatgccccgagtaactcatcgctggtagcttcaatacacttcagccagtcatcgtctggctcatcaaacttctccctaaatctgaaggtatacttcaatcggaccagaccacccgcattggaatcagcggtggtctccttcggcatatactagctctccacaagtggccataccctaaaggatatatgctcttgaatcaaatccctcgtgccaatgaaagcacacacagtgcaaaaggccttctgacatgcttcaacattgccgtcaatttcca

SEQ ID NO: 106892 - DNA, 950 bp, Zea Mays
cagtgatctatggaatcttaacttaattgactgggtcgagaagcatcaccagcacacaaggatgctaaaacaagagcaaggagggcatgatcggacctgtgacgggctgaccgcggcgagccccctcacacggtgttcttgaccaaattgggggaaattccaaattggagttctctagtgactaattggagacacgagtgggtgcgttgagttcgtgataacctggcgcaatagacctagtcgtcaatttataggatcgctgagcggtggctgggaatttggatgaagatgcgcggcgatcggaggaacaaggagttactggcgcaaggaattcgtggcatctaccgtggcagcctcacaggcgatggacagagggttacaacgagttatgatgatgcgatggatgtgctaaggcacgtcgcgcaaggccgtgaagcggccgtcaacggtgagctcatctggagcgatcctagcgagctcggtacggtggccggagtagtttgatgaccggagtttatccacggcggtgagacttactccaccctgagtgttgtccagtcgatcagaacgcgaatcacgacggtgaaggcacgaatctgcgcgcggctcgtcggcggcgaggaactgcactggcagtctgatccgatcactataccatggaattcatcttcagttgccctgacagagcaacttggagtccaattttctcatgatttcatgtaacaagatgatcatctgtctgtacaaaagttgcagcccaatcaactgtctttatctttgttatagcatctctaaccaaattcttaccggatcatacttaaattcgagccccaagtttggctaataccactggtgtcatgtttgagtccaataatcgactggcagcccatctttgggcccaattttctcaaaattcttcatggtactagggcatgatttctatagcaaag

SEQ ID NO: 106893 - DNA, 369 bp, Zea Mays
ttgggattgggacatggctttcaggtgctacgccgacgtcgccgagcagatggaatcatcgtggtgactggtgagccgttggcgtcgtggcactgctcgccgctgcagccgcaggtctactcgagggacgtacaagctcacctctggtctgctcgaggtagaggagaggatgagaagcactggttgccaccgccatcgtttttctcgagggcgactcggtcggagtagacgagagggtagggttctcgaggactagtgctggttcttgtttccttgaggattccctgttgtctgccttttgggagttgggactcccaatttcggcctaatagaaaggaagttgtgtttagcaacctcaatgcaaaagcc

SEQ ID NO: 106894 - DNA, 737 bp, Zea Mays
gggagatagttcagctacatcatagtatgtgattgttaggtccgaagctaaaacagataatgaagctagaccacaatagatgtacctataatcctggcgcgctcagcagcttcttcagctcttttggcttcttcttgagcatcgtgagattctttttcatttttcctaattgcttcatcagctacctcacgaccgcccttcatccatactttggagtaaaatttgccacctaatgcagaagcttcgactgaagggtttttattgtcgtcgactgagaaaacaaattttggttgaacaacagccttggcatgatcctagccgaccttttccagaattgatacagccccacgggcacccacgaaggcacaaaaatcccctctgtcactaagaatttattaaaaagttttggcctccccactgatccactggataacttcagcagggtcaccgcggatgaatttttgctcagaggagaaggctccaactttagaaaatagttttttagatttttagcacaatccatggatatatcatagcatttttccttgcctgcgcgaagctcatcgacattcttttgcgctattgatctttcgatttcgcatatctcatgcttcaccacttcaacttcaaacttttcagttgcttcagcaaccttcctctttggttcttgtacttcggttttgtgagcttctgcttgagcagacatcttggcttcactagacttcagtctctcgacc

SEQ ID NO: 106895 - DNA, 316 bp, Zea Mays
catctctccaaattttccatgcaccccagaagtaacaaaatgtatcatgacctcagatccttgtattggtggaccaagatgaagagagaaattgccaagtacatatctgagtgcgacacttgccagagaatcaaagccagtcatttaaaggtagcgggtaccttacaacctctccccttaccatcttggaaatgggaggacatttgcatgaactttattgtgggattgcctaacacctcccgacaccacgattccatttgggtcattgtggataggctaaccaagacaactcatttcttgccagtacataccaccc

SEQ ID NO: 106896 - DNA, 777 bp, Zea Mays
ctgaatcacttgagtccctttcactatcagaagaagaagacatctgtatacatcaaaggaatgagacaacaacaaaatatcttaaaaacaaaaaccagtgaaaaggctagcaacaaaatagataacaaaaaatagggcagcaacaaaattgatacaatccatccacaataatgtcacaacatgttcaaaccggagtaaaaaggattaaacagatacatagtatcactgaaaatgggacatagtgctacaaaaaattacagatcctagtgaatcatcctagtgacccaatcatgtttcattgtaagccagttgaagcgttcttccggtgtgtccaaagtcataaacatctccctctctgccctcttgacaaaaacttgagatgctatgaagtgttcttttgttcctggaactgtaccacactccttcaccaatgccatgacatctctaatggagcacccattgtcctcctttcttgccaaagactcaacggatgttgtgctcttctcacttgctatcacaagtttgctcaattgatcttgcacccaatgtcctcccaatgacctgggctttttacccttgtcctttcgaccaacagaaacatgatgctttcctttagcagttgtaggggaaacctcttcacattcttcatagtcttcatccttgtcatcattggcctcatagtctccatccttgtcatcagtgttctcagtggtttcaccctccagaatttgtggtgtagtaccacttgacggagcccaatgatcatctcctctgttc

SEQ ID NO: 106897 - DNA, 440 bp, Zea Mays
ctgatggtgcctgcactgtcctggtgaaaatcgtcgagagagagggcgaaaaggaaaaagacggggatgggtcttggaccggctgagcctgacctgtgctgtgacctcccatcctccctcactcatcactcactcactcactttcctgaagatcagtcagtgctcagtggcgacggaggcagagtagcgtggatgtgaatgcgatgcccctctccctcctcccatccatgaaccatgatccaggcgctcgtgcagatttcaagtcctcaacgcttgcgtggcgtgggtccgatcgatccaagcccatctccatccctgatccgtccttgattctctcatgtgaaaaacgccggaggagaggagaggaacacgtctacacacagggatcgtctctgtcctctgcagtggggacggacatcgggacatgggatgggcctccg

SEQ ID NO: 106898 - DNA, 664 bp, Zea Mays
tattatgtgtaggttaacctttccagtttggatatttttcttagttgagttttggatgaagtatagtgacattgattaagcaagtattgtgttgttgttgtatagtcagtgctctttgtggagttttggcatttcttcgatgaactgtgccgcacagaatgttattggcttcttgtcggctttattgctccattagttctgtagactttctcccttttgtggggtgcaaagaatgtgagattacatgattatcttttcatgatggcaagaacaaggtttaggaagattaggagttttgtttcaatagaaccacttgttttgtggtgctttgaggtgaggtgtttgatcttcttatacattcatatggtgtggatgtttcaccattgaattgaaatgaattgttgaatctggtaagggttgtgcttagtgcatattatcccttcataaaagagtgttgtttgaagacattgatgttgatgtatagctgcatccaaattcgatggtgtgaaatcgtagtgttgattgcatctatgacttgctttgagcttcattgcatgttgattcatgctggatatcaggttgtgtagtttccttagacaattagtccgaggtagaagttcttgtgtcaattaagaccaataatagacccatgttttgaatggtg

SEQ ID NO: 106899 - DNA, 480 bp, Zea Mays
tagcactgtgtgtgccttcattggcacgagggatttgattcaagagcatatagccttcagggtatggccacttgtggagagttgggatatgccgaaggagaccaccgccgattcaagtgagggtggtctggtccgattgaagtataccttcagatttagggagaagtttgatgagccggacaatcaatggatgtagtgtattgaagccaccagtgatgagctactggggcatactccaaggcccaagataatgctttgtccacagctttcaagggtcggggcaagaaaagattgaacagggtatttgatgtgattggctttgtataccctgattaccactacccgctacgagggcacggaaaaaacataaagactgtcgcttcggccaccccagctgagtcgaagagcaaaaaggtgaaggttctgacccaccggccgcgttatattgaaccggccgtagtacctgaatttggcgaaggg

SEQ ID NO: 106900 - DNA, 476 bp, Zea Mays
taggggccaagtcatgctgaagtttaatctcagtggactcatcaccatgctcataagtttttcccttttcttctcgtctgctttcacgtaaaaccattcgctcgtccaaccagtcggccacttggtgcggtagcctatcatggggccttcgtatcttttcggtatgcaaagttgtatcatttgaagtttttgtgcaggccgtcagcccttgcctttgtctagtaatgaaactcatatacctggcagaacccttcggcattagcactctttccttggcttcagagagcccagatgtaaacgctgagccagacaatggcattcgagattagctcatgggggtagatctcaaacttctttaaaacttcacctatcatctcataaagagggaaccaaagtcccaccctaaagaagctcttgaataccacaacttcatcttcctttggctctggaattatttcctctccagcaaagcgaac

SEQ ID NO: 106901 - DNA, 914 bp, Zea Mays
gtggggtccttacggcagtggcgtcgttcgagagagagccgaccgggcgctggcacatgtatgcttgtaccattggcggggacatcccttatattttctttgtctaatgcactgttgtattgtcctctcaggcgatgagggatgaagaggtcgaagaccttgcaggcttggagagctcgatagcccgacaagatgccgacgctgaggtgggagctgaaaagcagtcttcgcttacgaaggtcggcgttgatgacctggggcggtggagaatgcacaggtgtaataattagagtaggactggtatgacaatatttttactttgtttgatacttaaagtcggctgctgtgcaggttccaacgtatgggcctgcacaagcatattttggtgatattaggaatgatatattgttgatgtgccgaagttcaataaggtttagtagcagggagtctgattttgatttgtggtctttgggaagtgaggaattactgagtccattcgttaggatgaacgatgagtcttcgaaagatgacttagattttttgtggcattagatttgtctatggtggagtctatagcggcggagtcttcatctagggtttccccaactgcggcatggtgcaagagaaggattggagtgctgaaatagagaatgggagcctttggcgagacgttacaaggcaccagaggctcccgaaggtgtcaccatatgggaatggagaggccttgcccacgagcaggaatgcggtcggaggaagtgactcgctggatcatccttgcgccgacaactggacgacatttcaaagaggtagatatgagggctctatttgacgacgaggagtttagacttatcttgtttaatttttgggaggatggcctgatcccaaaagtggagcctatgtaagtgttggggact

SEQ ID NO: 106902 - DNA, 403 bp, Zea Mays
aatttatgtctccagtattatctaacttgtttaagtaactcattttggattagatcatgcttgttattctaggatgggataagtatacttattaggacaagttgaatcctttgaagtaggagagaatcttttgagatcagatagatctattaggataaggtagaatcttttttaagataaaatgggtctacaagatagatctatttgttttgctatatgggtctataaggtaaaatgggagcacacctggacgacgactacgtggaacccttgaagcttggcgctttgcatggaaagcggggtagccgcctcggccgatgcagcaatggcgccattgcgagcaaacgaaagctctcgtacctaggcctcagccacagccttcatctcctcggttgtcctcttg

SEQ ID NO: 106903 - DNA, 660 bp, Zea Mays
aaaggtccaatgatgtccaacccccagcatgcaaatgaccattttatagggatggtctgcagcagctgtgccggtaaatgttgttgctttgataagaattggcaagcttcacaccactggactaactaggcggcatcactcttcgttgttggccaatagaaaccagacctgaaaactttcccaaccagagttctggatgctgcgtgtactccgcactatcaagcgtggatttcatccaatagctgcttcccagtagttgaggaaatgcacttcatgaggactccagtcgcaccccttcggtacagtgcgccccctatgagggtgtagtgagccgactgtctcgcgatgcgttctgccgcagccttatcatccagttcttcttcattctttatgtacctgatgataggctctctcaagtcattggggtccaactctggctgattcaaggtgttgcattcttctgcctgatttgagagaatacttgggcgtggcacttcttggacgaagatcccgggtgggacctgggcccgattggatcctagcttcgacaacgcgtctgctgctgcattgcggtctttttccacgtggtggaattccaacccttcaaatttgtcttctaattttcggacggctgcatagtacttgcccatagaatcagtc

SEQ ID NO: 106904 - DNA, 418 bp, Zea Mays
gaacttgaggataccttatctttgaggacccgaggacttgctgatgaagtaaattggatgctgtaccgggtatgcgtgtccctcttccacccgctcgactactaatgaggtgcttaccacgtgagtcgtgcacgagatatacaggagcaaatcttctgccggctgaccgggcgtagctcagcgtgatggcttgagtactggcggagtggtcaagatttccttcagtgcctctagagcctcttgtgcttctgtggtccactgaaatttgtccaccttcttgagcaatttatagaatgtcattcctttctcacctagccttgatatgaacctgatcagcgctgccatgaacctagtgagcctttgcacctttttctgcgaccgcggcgcttccattctcatgatggcctcaatcttctct

SEQ ID NO: 106905 - DNA, 341 bp, Zea Mays
aagatggaaggaagatggcatggatggagcccagctgatggcatcatttgggtatgtttatccctagttgatgtactcattattgccactggctgatccggaattgttaattgcttgctgctgtgctcagtgctctgttgaggaggtgtggtgcaggtgagagagaacatttcttcctcctcggtaaccccaagttctgaactttatcccttgttaataagtacagtgtttctagcgcctgtgaaagcttgttcttttgtactgcactgatgcagggtggccagaactcacaagctaataacacctgctgctgctggtgtttgtttactactaaattcaca

SEQ ID NO: 106906 - DNA, 377 bp, Zea Mays
gtccggacatgtgcagatcagctaatttactgctgatgtgcgtaggaggctgtggttgctcagggtatgtgtccatcggcatcccataaaggggttgtgactggtcgtgacaacctgtagccgataaattatgtgtgttttccgccaattcaaactcgtgcgaaggaaaatttgcaacagtggatttatcaaacgcatgtactagccttttataatccttttgtataccccctacaatatgttgaattttctcctgctgcttatctatataatttttaagagattggagctcgtttgtgttacttacctcgggagtagtcgtggaaggtcgaagcgaagccagatttgtcgcccgttgccgaacgactttgttgttc

SEQ ID NO: 106907 - DNA, 418 bp, Zea Mays
cctgccatggaattcggcagtagcaaacgataagccaggctacccactcgggctaagatagtgaacggtccaatgtatctcgggctgagcttcccagagacaccgaaccgaacaactcccttagtgggtgataccctgagaaggacttggtcacccacagcaaattctagatcccgcctcctcacatcagcataactcttctgacgactctgagctgccaaaaatattctgacgaatttcccgaaccttttcagaagtttgctgaacccaatcaggaccaaccagggatctctctcccaaagtctcccaacacagaggagagatacatcgcctgccatacaaagcctcaaatggtgccatcttgatgctagcctgatagctgttgttataagcaaactttgccagtgcaagatgatcc

SEQ ID NO: 106908 - DNA, 497 bp, Zea Mays
gaaatactgatgaagaagaagactacaacactctagtcccatcaaagcccagccacttagattttgaaaaatctactgtctctgaggctgatgtgccaatgatgatgaagctcggttacttcggggagacagagaagaagcttcttcgttttgccggcgaagaaaccatcccagagccaaaagatgatgaagtggtagttttcaaaagctttttcaaagctggattgtggtttccgcttcatgagatgattggggaagttttgaataattatgaaatttatcttcatcagctgactcctaacgctatcgttaggttcaacatcttcatttgggcccttcgaagccagggaatggatccaaatgctgaaggcttctgccgagtacatgagctacattatcagacgaaggccagagaagatgggcttcatgagaattttggctgttacaactttgcttaccgtaaggatatgaaggccccggtgctaagctaccgcacc

SEQ ID NO: 106909 - DNA, 330 bp, Zea Mays
accgaggcctagctgactccacccgggtcaccaatagaagaattcctgctgtggatttggtgagccggcttgaaatgatacttaggggcaaggtgtcaaatgttggtgctcctgttgcctattcggcctggaacttgcctccttccaagacctttactcaattcgtgtcaaatcctcctgctggtgatggcggtttgggccttagagtgcgaccctctgccgaagaagttagtgctttggttgctttgcttggagaaattcctgatgatgaacggtaggttcactttgaggtgcctttggatcccagtgatgcagagataagtgctatgc

SEQ ID NO: 106910 - DNA, 724 bp, Zea Mays
cactcacagcccaggtagacactggttccacacacacattcatcacagaggcaatggtgtctaagatgtaacttccactagaaaggcgccaaggcacagtgaaagtcgccaatggggacaaggttaccaacctaggattatgtacatggttatcagttcaaattgttgaagaacagttctccctaacttgctatgctctaccactggaaggctttgatgttgtgttgggagtacaatgtgatccttaggtctgattccatgggacttcgaacgtctatcaatgacattctggaagcaagaccacaaggtttgttggacagggatgtgtgactataagccacgctgttgtgcattttcagaagggaaggaattggtggacaaattattgtactcctacgaagacttgtttgcataaccctgcggcctaccaccagcccgacgccatgatcaccacatcaaattactgcctggcacgacaccaatggttgtacgttcgtaccgatacccctagctcttgaaggatgaaattgagaagcaatgtgaggacatgctgcatcgaggaattataagggaatgcacgccaacattctcttctccggtgctccttgtgaagaagtcagatggaacatggagattctgtgtggactaccatgaactcaatgggaagacggtgaatgaccatttccccataccagtggttgatgaattgttagatgagctttag

SEQ ID NO: 106911 - DNA, 510 bp, Zea Mays
ccgaattcctgccctgaagaagctcttgaatactacaacttcatcttcttttggctccggaatagtctcctcttcagcaaagcggattattcatcatcattctctccaaaatatcctagcttcttcattagaactagatcttcagctttaattgtggatctcccaaattcaacatggctgggcttagtcggacatagaatgctatcatcatcttcactttcattatcactctcaacttaagtcacggcctctttagcttcggtattaggggtacttttggcaatagttacttcctgcacatccagcccggagcacctcatcatttctgagatgggagctatcttagttgtttcaatctcatctccctcacgggttacccttgcagtcgatcttactctggccatttttgttgtttagattctcacagatgaagtcgcgattaagcagtgaaatgcttgttcgaagtacaatgtagaaagcttcggcttcagtgaaaattttcaaccgcac

SEQ ID NO: 106912 - DNA, 303 bp, Zea Mays
cgcccaatcatgagcacgagttcgcgatggcatctgaagaagaaaaacatcctagattattacatgccaaaaaaacaccatctttattacattgctagactgtaataattatacatactcagtattacaactcgaatttcttatttattttacatgagcacattacttaaactatactactctaattctcttcgttcgtagctgctccactgcccgcttcaggagaccgttcatctgcaagattcatggaaggaggggctccaaaaaggtccaaccccccatcagatcctccatttgttgttc

SEQ ID NO: 106913 - DNA, 408 bp, Zea Mays
gtctacagaagctttatgaaggcgggtcttcggttcccattgaacaaatttttggttgaagtgttgaagatatttcagatatttcttcatcaaattactcccgaagctataattagaatgggtttgtttgtttgggctgtgagaagccaggggctagaaccgagcgcgaagtgtttttgcaatatgcatgaactgttgtacgagacgaaggccactagcaaagagcagtatcacaacaacttcggttgttatggattcattgcttgttctaatgcaagctacccggttccaacatttcagaaaaggtggcccaggtcctggatggagaaatggttttatgttaagaataatctgattgaaagggagaacataaaggggattatccaatgccccatctggtctcgcttc

SEQ ID NO: 106914 - DNA, 663 bp, Zea Mays
ccacacaagaaaacccatatttaggtttcctctctccctgcatccaaaatgggtatcacctttgggtcacccgttggagaggtataggtgtcggtacaatgctcaccgagtacctattttgagtttgggtgtctatttaggtgctccattggagtagccttacagtagacagtaagagtagtgcagctgtcctgacagcctgcagtggtagtcgatttgactttgtacaactcttgcagagctgctagaaatagcaggtcgctgtgcaaagcgacttaggtgctgcatattcaatatgaatgtcaacttgtcaagccagtttgcttcacaaagactaaacctgtgttctaaccccagtcccagctacttccctctgctcatcctatagctgctgcacatctaacagatactattagatttgtaatcaaaggcactattcgataatcatatattcatatgcttataatcataaacaatatagtataaaagaaatgaatggtcaaagtgtcatttaagaggcatgccatgttagaagacaccttatgttatgaccagcctggtctaccagaaggcgactagacccaccatagtaggcgcatgagatcaggagataagtaatcagtttagttggataagtattagcagtttatctcctaatattat

SEQ ID NO: 106915 - DNA, 325 bp, Zea Mays
gagaaagtcccattcctatgagctctccacacgaaagtgtccctcaccggagtcagattaaccgtagccagtaagtgtatcatggtctgccattctacaagcttaattccaacaatggatctccggaaagaaagatttagattttcatgtgacagcacttctgcaaccagcgaggtcttattgcgtactatattaaaaaggtttgagaattgctatctaagaggagaattattaagccatttatctttccagaatcttgttgcttgtctgttccccaccttaaaatatccccacttgaggaatttgtccttgacgttcattagac

SEQ ID NO: 106916 - DNA, 559 bp, Zea Mays
cccttcttttgttttgtcctttatgtctagcaaggtgccaattatgctttcaaagaagttattctgaacgtgcataccatcgatcacatgccacacatataactctttccagtaaggcaagtactcgaagaaaatagacttctttttgaatatagtcccaggagctggtttggcatccttccttgttttcccatcttttgtcttcttctcgaaaacaaagttgatattcctgactatttcaaaaactctatgacctcttttgttacccgatggaggagcagaatgtagttcaccattattgtcgaagtacttatccatctttcgcatgcggtacctgtgtccttccaataaaaagcgtatgtgcctcatgaacactattttcttagatgcagtaagggacacgtaagcagttccatcaatacataatgtgcaaccaatctttcccttaaactggcctgatattgtgaagagaggataatcattgatcgtaacaaacataattgctctcagtgtgaatgaatatttacgatactcatccaacatttgaacacctgtttcc

SEQ ID NO: 106917 - DNA, 445 bp, Zea Mays
gaccactgcggcagaattttggttcttccgcttgggcgccatcgcaatctcgttagcggatcgaagggaagcgaaatcagagggaagcagggtaatgtttggaggtagaaaggtgaagttagggctcagaacgcagaggcgtgcggcgacgtgatataaatgaggttttcccgggtcagacaccgtttctaaaaagtgccaagtcatcactcggaaaaagcaaagcgtcctgacataacttggcagctacctctaaagcgtcgacgtggcccagcataactcggcagctacctctaaagcgccaaagtggcccagcataactcggtggctatttctaaagcgccgacgtggcccagcataactcggttgttacttctaaaacatcgacatggtccaaagcaactcgacagttatttctaaaaaacgccagcaatacataactcag

SEQ ID NO: 106918 - DNA, 421 bp, Zea Mays
tgttaaagcaagcgattctcaatgagtgttcatactttaaagcatttccctataggaatcatttggcataacccggccgtcatcagtatctactttcctaaaaactgatgaaaaatgcttcgcaactgaaaatactttcagagataacagaagtgaagaacaatgttgcgcaaattggcactggtttagatataccaaatattgagaatcaaatggaagtcatttttcacagctatcttcagtctccacaccaaactagctaacactagcagccattgataccagccctgtgtaaacaatgctcttttacttgcaagaaaaccccaacaaccaaacaaagcttcaccagcatatagcctgctgcctgctgccgggtatccatcatggatacagtatattcaggtgcgcatttgcagaatca

SEQ ID NO: 106919 - DNA, 608 bp, Zea Mays
ctattcattgtatacattttttcagcagaggcttaatgtgagatgcaatccccaacacgttatagtaagcatccagattttaaatgacagacagcgccaagctattgcacggagggggttcaccagtattcttgatatgagagttgacgcacttggcaatagatctcatttagcttggctgatggaaaagcttgaccataatgacatgacaattcgagccggcccagggaaggagctcaaaattacaaaggagacggtgcaccttattttggggttaccaaatgctggtggaggaacgacattaggcattgatgaagctgttgctgcaaacaatttaagggctgaacttggtttatcaaaagaagaatttgcaacagttgcagctcttcaagatcatctgaggaaagggtttgacgatgatctaagcatcagatccttcttcctgatactgttcaataggttgttgttccctactgccagctggggaataactaatcatgaggttcttttaactgaggaaatggatcgtttccacgagatggactggtgccagctaatattcaatgatttatgccaagttgccaagaagtggcatactaggagcgtta

SEQ ID NO: 106920 - DNA, 470 bp, Zea Mays
cgacacatgacgtttatgtccttttcgtctaggagacgttgtcaggttgtttgtctcaacatcctcagccaccaatggagtaggaacaaatggtgttgggatcaattcaggaatagccatgtgctcggagctaaatagagacccagtaggtgcttgagcatctatggaactccacacaagctccggggtaaaattagggttctcaatggcgattgagtcctgacttagcatctcttgttgtcttattctatagttttgccttgcactcttttgacatggtttcatattacgcaacgtcctttgttccctagtttgagttgcacatcgagctctttctcggattctcttacgttcctttgcctctaacacttttgaatactcatggtgtacaacattttctttgttgcatgacgcacgacgtttcttcaattcattttttttttatcactcatctccgcgtatcgtgctcg

SEQ ID NO: 106921 - DNA, 428 bp, Zea Mays
caaaagtctcctaggcctcatccagatcatcctcatgctcatcatcgatgatcatgtcgtgcaatataacacaaacccatatgattagactaagagtacattgggaataagagtgattaggaactgctattacgctaaatcgtgacttcaaacgtcaaaaatcgtactcaatatctttgttccaaacaacatgcatgcatgtgaagtactgtcgcgcttgggtttgtgtaagtgccctccctttcatgaatacagaccatgaaggatatatatcgtccacgaggtagtatcccttgttgtaccatgaagatcaatataggagcttcacctctaataacatcaatgaagattgattgaacatattgctattattattagagcccaccactacgaaaaatgcccgccacacacgaattattggagctaaa

SEQ ID NO: 106922 - DNA, 595 bp, Zea Mays
aagggtgcagccggaatagcacgacaggagcattaatcgaagtcttttattcaaaagacagcgcacccggaataacgttaatcgaagtctatcattacaaagacactccgcacaaagccgcccacgtacgcagccggaacaatacaagtgtacgaatacggccaacaagccacaacaccattacaattacacacacacggcgagggcatcgcctatcacatcggctcaaccttcggaatgatacccatctccctgtaattaaacaacattatcctcaattcctcaccctcaaaaaactcccgaagatccccttcgcctatgcccgccccattcggcgaagacaataattctcgcctaccaaccccgtctactcgaagtcggccatgctccatccccatgcgacggcgcctgccactccgcgaaaattcaccctcacactgttttcccaccacccttcgccgcctacacccagtactcgtaccaggaagatcctcggcaccctccacacgcggtgaagtctccaccgcagccacatccaacgcaacaaaataatctaagccttcatccgaggactcctccgtccaaggaaacgaac

SEQ ID NO: 106923 - DNA, 524 bp, Zea Mays
cgatgccatagcgacgtcgaggacttggctctggtaccaaatgttagtaatccggcctctaggatgatcaacgcagacgcacacacacagtggacacgaaggattttggtgctgccgaatggcttgcttttctctggtgattgttgtatgtatataaaggaaatacatgcatctaaatatggctactaagaaatcagatcgtcacggcatgatcgtgatcaagcactgccatcccagtgctctgggccatgccgtgattacggccagctctatttcctaagaatggaaaaacagtataggaaagtaatctgggcttgctataacagctagtggcctcctctgattacggagcccgtggcggtgtggctctgcccctcgcccatcttacctccattggatatgaaagcttgttgggtctttcccatcgtcgatggtgcctccctccctcaactgcggagctcgtgttctctcccctccactagaggcacggtgcgttcagtggcaccttcagctgcggagccccc

SEQ ID NO: 106924 - DNA, 646 bp, Zea Mays
gcacaccacgcagcgccattgccatgctcacgatccatcgtcatcaccgcactatcgtcatccctctcacctcggtaagctttgtcgggcataggaagccatagacacgtgatcgttccctcttcacctcactgtctcgccttgcctccgttcaaccccctttcccctgtgctaaaccggagttgtcgtcaccatcccaagctatggtcgcattcctgtcattgaggagtggccttcgagttgcaccttgaggtaagaaagcacacccgctcctcccgttcactaatttacacccccctgtgcccaatttatcgcaagagtcgtgctccacgtgaccactgcaccctcaccgtcgtgcacccacgtcgacctcatggctgcgacatagcctactcctatcgaatcgactacaccacactagacttgtcccacctaaccccggccacacctgacccctcttgcaaccccgattactcgctaaagctattttcaccctgatagagctgccatgccatcatccacacgatctcgggcaccccgccatgactgggaccctcaccgtcgagctcctcggaccaccctccacctccctagcccaccttacatgcgtcaaactctctggaacacccacatgcctcaactccgg

SEQ ID NO: 106925 - DNA, 718 bp, Zea Mays
aaaaatcattttccaatcacttttactgaatttctaattccctgaatagggcgccaaattctggaaaatccaggggccaaatcccaactctcccaagacacagagcacagtcaggcaggactgcaggttgttttctgataattatggggtctcttatgcaaagttacaaggccgaagaggtatggaatactactggccgtccgatcgcgcaccaaccgcccagattagatgctacttccattgaaccggtatgcgctatcagcccttggatctaggatccacggtcagagcatcacgtgacctaaaaaccatccgatcgaagatctgcggtcatgattcaatgccgcgaatggttatcctcttctctaatcacatccgtccgttaagatcagacggccgaacggccttgctcctattctccggccgacccgacggcctcgccgccagaccccacggcggaggccattaccggcgatagcgttcctgcgacctgagatccccactcgccgaccaactagcgcaaatcgaatcagggaacatggagaatctaaagaagtaattctcaccgcgatcggagcagtgggatttcctgcccacggtgagccacggccctgaagatccgacgagcagttcgccgcgcgcccttgcaccgttttgcccgcgaagacccgaaggagaaacttggtggcgtggtgaagctcactgggtcgagctcgtg

SEQ ID NO: 106926 - DNA, 348 bp, Zea Mays
ataggaactggaatgggtcaatttggagttcatatgcattttctacaatttaaacaagttctaacatttatttatgcactaaaaattgatttctgatattaatttctgattttcgatgctctccggattgcgcctcaaattccagaaagcgcaggggctacggtgtaaaatatcctagacacagtgaacaacaatatgggatggcgggttgttttctgttttagtcagggtctctttagcaagattaccgagccgaaggggtatcctagattgccagccatccgatcatcaatcgagggctcggattaaatcgtgggtggtcatgaagtcgtcatctcccgaccaaat

SEQ ID NO: 106927 - DNA, 792 bp, Zea Mays
gtcattacaataaggaatgaagctctcgagaaagataagatattgttttccatagtagacaagctgaaaactagcaaagccaaacttagtgcacaagccaaagctcacaaggccgaagttgaagatttaaagaagaaacttgcagaaacgagcgaaaaaattgaagttgcaatggcgaagcacgagataagcgaaattgaaaggttaagggtccaaaaaatgtcgaagagctccacgactccaaagagagatgctacaaaatatccttggaatgcgccaaaactctaagggatagttttgcaaaggtgggagcatattcttccgagcagaaattcattcgtggtgaccccgatggtgtcgtctagtggatcagcggagaagtcgaggcctttgacgaaatcttaagtgatcgaggagacttctgcgcattcgctggcgcacgaggggttgcggcgaccttagagaaagccggttgtgaacatgttaaggctgtagctgagccagatttgttttctcggtggatgacaccaaagacccttcggctgaagcttctacgctgggcgggagattttactccgatgtgtggatgaagggcggtcgtgagatggctgatgaagtgattagaaaaaatgagaaagaatctcacgacgctcaagaagaagctaagcgagctgaggaagctgttgagcgcgcaaggtttatgggtacttttactgaggtttagcttcgaagttcgttttcagcttcggaattaaccgacatttttttattgtagctgaactttcacctcca

SEQ ID NO: 106928 - DNA, 477 bp, Zea Mays
ccacggctgccattgccacgaccacgattcaccatgcgggcatatgagccaccatcttgcagctccaatctggtctcgaaactgagcaattgtgaataaagctcaggaatcgagatgggatccaatctagctgtgaccgaggtcacaactggattgtaatcagcatcaaggccattgcagatatgcgccaccagttcttcatcatctagggccttgccgacagcagccatttcatctgcaaaacctttcatcttggcaacataatctgtgatcaacatggtacctttcttcgtagtggcgagggcaagcctcacattcattgtcttggcgcgagtctgcgcagagtacattttctccacggccgaccatgcttgtgccgccgtctgggcagcgacgatctgcgcctgaacttccttcccaacgtttgagagaatgagcccgaggatctgttgatcccgagcataccatgtctcaaac

SEQ ID NO: 106929 - DNA, 274 bp, Zea Mays
gttgtcccaagagagttcaacaaaggagacctcatactcgtccggaccacccggacagagtcacggggcaagctggagccaaaatgggagggtccattcatcatcaagtcgaaggcatcccccagcgcgtacaggctatcgacgccattcggcgaagacttagagcattcctggaatattgataatctccgcaaattttttgtttaaaccctcagggcccacgcgcccttgtaatccaccaaacaatactattccggcccgcactcttttcctc

SEQ ID NO: 106930 - DNA, 479 bp, Zea Mays
gccatccgcagcgaagttaagttgagtttgcacacctgcaccaagagtctgccctaccttcttcaaacaagctttgaaatgtcgattcagatgtccagtgccaccagcagaatctgcactcaactcagttttacaataattacatacatcaatataactttttataccattgtcgacaatctcccgcttatccatatgtttccagcactctgccctggaaatagatggtttaggagcactttgcactagcacatcagctcgtaaggaggaactaccactacaaacaggtacaccttcacccccgtctgctggtaaggaagaactaccaccatctactggtaaggaggcattagcaccagcactacacacatgtacacctactccacaatcagatctaccttccacggttggggcgagttcgcaaggactggtggaaccatctaacctcctactagcataaggttttcgagtagctgtcc

SEQ ID NO: 106931 - DNA, 813 bp, Zea Mays
caaattgttgtctcattagtgcttttacatcagtccaagtttgtggtttctcatagtcatgcaaattattccaccaaactaacacatcattcgttaaagtactagccacaattttaatttttcgcctatcacatatacgacgtcgtgcaaaaatcttatccattgatatttcccattcagtatattcatttgcaatatttgcatcaaaagaagagaaagatggatatatagaacctgagggagacgaatcatcatcaatggtgtggctctgaaaagctttagtcaatgcgcgcatcatctccttcaattccagatgagagacacactcatcgtcgttaagcttaggttccttctccttgtccgtttggttctttggtcctgtcattgttagcacaaaacagagacaaaaaggcaacaaacaaagtgaaccctacaactatctctcagggtggtggtggtggaacacaagttatgaagcgtcttaccctgctcttacaaggttcttactagcactgcaggtggcaaacggtgaccggtgtgactgtccaacgagcgtgagtgtgattgcaaaggagtacctgttctgctcgagagaaaggtggagctttgggaaggctgactaaatatatatatgtggcacacaagtcagtaacagatagcaatgctgaataagtgtcaaaagtactcgtcctagttgctggcctagagaatgtattagcacagttggaggaagacacaaaggaggtgacaaggatctaggaacaacaaggtaacaagttggaatgaaaaaacaatcacagaggtgcacagatc

SEQ ID NO: 106932 - DNA, 809 bp, Zea Mays
acatggagatggagttgacaatgctaggctgagtgcatcaatggtgttgatggcaggagagggggagggagagggagaaaaggtattatttttctattcttatggtggttagtaaacttgtggatatacgttgttataaactagtattttatagatgaactatacaatgttattcagttaaattatatatagaatatttaaatgactatagactgcttttggagcaagcaatttccactctctgcctcgcctggtggttccgagttccgacgacatcgcccatatccagagttccagacacacgcggctgtcgtactctgctgtatacactgcacgtctgcacggctccgaggactatatattggcacttgctacgattgatgatagaagaccgcaggcacttcgttattactactactacagatacatacaccgacagcgcagagagccggcagtaatagactaatagttgcgctgaaatcacacctctttcttgattggctgtatatgacccggccggcctgctgatttcaacgctgctgaatgctgacactgtgcacatacagatacagctgcacgacgtacgcgcgatagatcctgcacataatgtgcggacactgttccgaattttctcgcctcactgtgcttgcatgaaaatatggttggcagagtacgtaggagaggccggtgctagctagctagctagctagcattgaatcgtcgatgatagccaccttgacaattttctgaagttgcaagtagcagcccatctatctatctatctatgctactatatatgacaacgacag

SEQ ID NO: 106933 - DNA, 439 bp, Zea Mays
gttggttgtgctctcgatttcgagtaaacacatcgagtggtcaagtaggctcataatacaagttgtgtaatggagttagttcattttagaaagaatgttgaaaggctccgttcatgagatgaacatgtagggttattttgaatcgagtcaatttggtgtgatgatgatattcgtgattaaactggaagtcatgtgtttgcgtagtaaagctttgttttaagttgcaagcgatgcgggaaaggttttagtaaagatatatgtgaaatgtgaatgatttgttctgagtatgcggtatgtggtgtagtggtggtatgaaaaataggttagcacgcaattagctagttggcgagttcgattggaattgtttagttaatttggattgtaaggtgaagtgatggcatgacttcgtaaccatcacgccatcggttaaataactata

SEQ ID NO: 106934 - DNA, 570 bp, Zea Mays
aactgtttgccgttgtcgactgtgagttcggacgggactccgaatcggtagacaatgttttgccagaagaacttttgggcagtcttcaacgttattgtggatactgctctggcctcgatccacttggtgaagtactcgacggcaacgaaggtgaatttgaggttcccttgagccgtaggcagtggtccgacaatatccagcccccagcgttgaagtggccatgtgtgggcgattagcttggtgaattgcgaagggttgctcgagcgaggggaaaacttttagcatgcttcgcaagacctcacgactcgattcgcagtacagattattgcgggccagtaaaatccttgacggatcaccttggcagcgagggccctgggtcctgagtgggagccacaagttccgctgtggacttcgcgaaggatttgaatgccttcggtttcggtcacgcactttagcatgggctgactgatccccttcttgtacagctggcccccgactagtgcaaagtcctggcttcggtgcttgaggcgtttggcctcattgatatcacttgggtggtaatgtccttgc

SEQ ID NO: 106935 - DNA, 536 bp, Zea Mays
aagttcttgatgtctaggcagaatggatggttaggagggagaaattgtcgatgtttatcgaaggacgaatatttgccaccctttttcaaccaatgaacctgagagcttccttgcaaactgggcatgggaacttaccgtgaacacaccaggcgcagaatagaccatataccagtaagtcatgcatggagtactggtaccaaacatgcattctgaagtttgtctttgtagctcggtcatacgtccataccccttcctcccaggcatgtaccaattcatcgatcaaaggctccatgtacacgcccattttattccccgggtgtccgagaattatcaacgacacgaatatattctgcctttcaaagcacacactagggggaagattgattgggataacaaacatgggccaacatgtgtacggggcagcgctaattccatagggattcaacccatttgtggccagcgcaacacgtacattacgagcctcttcggctttctcatggtgaatggcatcaaagtgtttccatgcttcaccatca

SEQ ID NO: 106936 - DNA, 862 bp, Zea Mays
gtcgttgtaacggccatgccttttttcccttccgaaccggattctgcgccgatattaaacccaagcgcatcgctcccctggccataaaagctccgttcctcgcgccacagaagaaatgggcgggttggagtcctcgtcgtcaatcatgtcgccaccattgatccgtgcctttgggctcgtggtgcacctagggtgcggcctcgaggaatctcctgcacatgtggactctcgccataacgtcagtatacgataaacacccgtggcgctgccataattcctcaccgaagttatggctctgccgcggattgtacttctccgtggatagaaatcctcggcgcatcaatcgtcggtaggtatgtgcctccttgcttcacttttgtatccgcaacgttttgaaccattcgtcatcgagttttggtcaccagtgcgtcgggcggtgtcgctccggtgaactccatgggcagatcccgaccgcgctaccatgcacatatggcgggggagggagatgaagttcgtgattagatagggagataacctttcaatggattggatccgggccatcaatccagatcggacggatgaaaatcgatcgcgtgactttaaaacttggacgttgatctgtgatcctatggctgacgttgcgtaccgattcatggggcttcgatctaatctggatcatcgattgtggatcatacggataggaataacctataccccttcgacgtgcgacttttgtgaaagaacccccaaggtatttacaattcaacccgccatccacccgtagattataaacattacagagaattccaaatattagcagttttaaccctagggttgcatgaattagtggccgccacccctg

SEQ ID NO: 106937 - DNA, 478 bp, Zea Mays
ccgttgaatgattattcagcttgcttttgtaactaacgtggtactagtgtattatgtgcttcagtccacctacaactctacatatttcgactacagtttgacatgtcgtgttgctgcggcaccgatacacttattccacgattgcaaacttgttggttgctgaccctcctgttgagcaaggtaagaattggtaagagcttgtgtggcagtttgagagtgagcgccttgcagtagctacatcctaatagttgtagagtttttattccttcattttttatcttgttgcctctgttcgtctaaccatggcaggattggaggttgatgatgcttctcgtaatatgccacactctcctcgcaccaagggcatcatacaacactttgtaaggctggtgaagacgcacacggaaggtcttgataatgacttgcaggtgacgaatgaaaagatggggcaattggaggccacacagatcgacacaaa

SEQ ID NO: 106938 - DNA, 346 bp, Zea Mays
acagaacagaaattgggaactcatggaacatagaacatctcaggaagttctacccgtagctacatcacagaagctctcggaacgacgatgtattctataaattgagaaaaatatcatcaataaaaaggtttcaaaggcactgagattgttcgctgtcaattggcacgattacttaacttggggtgaccactatgccctactaacagagcaatcggcttaagtcagcaatgacttaaggcggtgcgacatgctcacgcatacttaactcggggtgaccactatgccctactaacggagcaatcggcttaagtcggcaatgacttaaggtggtgcgacatgctcacgc

SEQ ID NO: 106939 - DNA, 636 bp, Zea Mays
ccacgtgtcctcaccgtgaatcatccgctgccgccgtagcaagccaccagacgctctggccgtccacgcagctggttggaggctcgcgtaatgcaccgctgtagaaggttcacggtaaacccgccacgttaccggcctgtggacaccgatgaggctaacgtggagcttcttgggttgtcgccgccaccgtgagtcagcaatcaaattgcccaccgtcggggtgacttcctttaaattgagcttgcgctcagcctcgcctctccgttacgcacccaagccaccctcggttcccgctattccacctttgatagcccagaacgccggttttcccccatcggtggtcactagcacagatgagcagtgcaaccacgtggccaacccttcctaaggttagtcataatggtttaactcgtgtttcaaagtctatagatcatggtgaagctcatgcgcttgcctgcttgaactttaccgcacatgatcaactggaacaccatcgtgtcggtcggtgaacgtcgccaaagacactgtccacgtcgaccggccaacccatagctcctccagacaaacttaggtgagcatcgtatgcctgatgcactactgatacttgtagtaaccttgaattgaaccctaccgcac

SEQ ID NO: 106940 - DNA, 321 bp, Zea Mays
ttgaacataggtgcattggagtgatgatgaggacatcccaagcaacaccaccggtcactcaagtgaccaactaaacaacacatttcaaggaccaatcataagaaatcgagctaagaaaatacatgattaggtgaacgctaacctaagttatttatcacattatgatttggatgtacttcccacttccttttctctagaacttaggtgtgttggatttgaagaaggaaaagaagaaacacgtgctactagaatagcacgtattgctaaaagcggcacatggcagatcagtgacagattggagcacctaaagataacatcaaa

SEQ ID NO: 106941 - DNA, 461 bp, Zea Mays
gcgcttccgagttggcctcaaaatatgctaaggttcgattcattgtcgccatcattgtaacgagggggtggattatgcacgcttggcaatttttcaccataataagttgttgtgaagtttgagacctcctctagaatgtatgcctctgcaatggaagcctcgattttgcatttatttctacatttctttcgaatagtctttagacatctctcgattggatagcaccaacgtccctgcatgggccccccattcgtgcctcataggggagatgaagaatcaaatgctgcattggattgaagaagccgggtggaaatatcttctcaagcttacatagtaacacgggtgccaatctttccaagtctgcaatcacggtccgagtaactcttttgcacaaagctaacggaagaaatagctcaactctgaaagcgctagccagacatgctcagggacatagcctcgaa

SEQ ID NO: 106942 - DNA, 871 bp, Zea Mays
tctagtatggtctatacttctctcaatctattagatctgatctcactcttgtgcttgcgacatctttgtagatgccccttgaccataacattcttgtccttttgggattctttcctctttcgtcattaaattgctaccatctagcgaactctagtcctttggtattcacatgcttgtatccctttaatactcttatttcaagtacttacctctgaatttctaatgcctacttaaacatttcagtttatatgtccatgatcatcctgtcttttgagaccctttcctattctgttgttaagtcgctatctttcggcaattcgtactcccttggtcttggtatgctcgcaccttcgtaatcttgcatactcttactttttatataaatgcttacctttgtaccccaatgtctgtttaaaacatttcagtttacatactcttgaccacctttgtttcttcatgatccatgagctatcgttccattcctcatatccttaatgatctcatcgtttgcatataacttccctcggtaataatttcttttacttcaaccattctgttggaaccttacctaccttacccatgattgttttctccatttcgccatttcgtgagtcttgccttaactccatcctttcctatgctctttgttattatcacctttaccctcgacacttctatatattgcattgatgttcatcttatacctaccctttaaaatcttctctcttccatctcaatctgagagttgtaacttaccgacttttcccttggtcgtatcctcttcttttcacctgtgagtttttaactctatcttttgttgtgttttgtttgttatttcctttacccttctcatcactttatcctaccttgt

SEQ ID NO: 106943 - DNA, 582 bp, Zea Mays
atagccaaaaaagattggagaacttaggctcaaaagtggctgggttgtgctggtctggacctcaccggaccagtccggtggcgcaccagaccaggtccatgagggacctagacttgttcgttggtcatcacccgagagttggtcatcaccggagagttggtcatcatcgaagagttggtcatcatcggagagttggtcatctgatccatctcgtagagttggtcgacgtagttggtcgtttttgaagggcctattttgggtaccaagttcctaagtacttgacaacttatatccccgtttgcaaagaatctccacaaagttggagtctcttatagccttaaaaagatcagagtcataaatcagaggaagggagggagagagtacaagcacaatagatcaaaaccatcaactcaacataaaagagataaacacaagcgcacaatacacaaagtatgaagaaaaacactaagacgacgctcggatctcactagaatcgcatagttcagttgtagtagagtgtcggagtgttgagaatctcttgggatgcttgtgtactgaaggaggttgccaaggggatacttt

SEQ ID NO: 106944 - DNA, 275 bp, Zea Mays
ttatatctgcacttcaatactcatctgtggttcaagttatatttgaagtgcagggcattttgagacaggatcttctattccgctgcaacctactcgaagggtctttcattctactacgatctggtcttcgagtagagtaagaatttaagttttcaaagtgataattattattcgcctattcacccccctctaggcggcatccagatcctgttcccgagcaaagggaactttcaattggtatcagagctaggcctctccagtgtgggcttagccgt

SEQ ID NO: 106945 - DNA, 507 bp, Zea Mays
tttgaatataggtatgtgaatgggtaagccgcccgagatagtctaataattaactaaagcacaaattaagtggtagtgaaggatcctgttgtggtatggtaggtgcggtacggtacggtagactgcaatagaccggcgctgatcgatgctgatactgagcaaatcgagcaagacacgcacatgccttgatttcatctgatttggtttgcgtggaaacccatgcacgcaggcaggcaggcagaccaatttggactcccatgcacaccacaccgaggaggcgactacttggtcccttgctctgaccaaattattcatacggaggacagcagtctactattgcgttttggtggtggtgtccgatgcacgcaattacacacacacatcgttgcaatttgaacaccttcccaagaaaaaaaaaaaggctttttcagtttctcgagagagtacgacagattcgtctgaatgcagcaccactccgtcccatcgacgcattcacacacttcaccg

SEQ ID NO: 106946 - DNA, 525 bp, Zea Mays
gaagtattcttgttctgatttttagaacagtttcctcctggtctttgggagttggagttattttgtcgaggatagggacaatctttaatgaaatgtcccgcttttccatagttgtaacaaggatatttagtgccagtgggagcaggcaagcggggaacttgggtatttgcaggtggaagctggtttggccagttggtgggatgaatataagtggggtttttgaaaggatatgtagttgaacggtaaggaacgtttgtagaaccagcagtcctgattaccaccttctggcgtttcgctgacgactcagaaaaccctgacccagaacctttccatgccggcttcacattttgatgtactcgtcccttttcttccacagctatagcctatagccacacttattgagcaattgaaggtaagatcatagcaagtggccatcttcttttgcaattttgagttgaggcctctcataaatcaatctcttttcttgatatcagtgttcacatgctcaattgcatactgagaaag

SEQ ID NO: 106947 - DNA, 451 bp, Zea Mays
tctgaagatgctggtaaggatgttggagctaagaaaggaggaaccttggaaggggagcttgctgaaggcgttaggaggagcagcaggttggagtctaatgatgaaatgaagattgcagataaagctacagcaagagcaatggcgaaagatgctttcatcaacaaagatacgtcttacaatccattttctgttcttaatactgataatgttgttcttatggatgttgcgcacaaaataggggttgaattaggttcttctgttaatgatgctgttaatgatgctgtggaaaatctaaacctgattaaatccttagagctctctagaaaaaatctggttgtgcaatctgttaaatgtaatgctgataataccaaggcagacattcttgattctgagatggataatagtatccataatgaaggagatgattttgctttgactgatcttgaaaatg

SEQ ID NO: 106948 - DNA, 283 bp, Zea Mays
ggatgaaatgatcggtctattgaaggaatattctgattgctttgcttggaattacactaagatgctagggttaagccgtgagatagtagagcatcagctgcccattaagtctagtttcagacctttcaagcagaaagctagaacatttcgtcgagaccttctcccacgaataaaggacgaaattcaccggctgctagaagctaattttattagaccatgcagatacgcagagtgggtctccaatattgtgccgatggagaagaaagaatcaggtaagcttaga

SEQ ID NO: 106949 - DNA, 709 bp, Zea Mays
ggataactcactcaagaatttctgtttttgctcattttgagcagcaccgtaaacattaataaaattccaaataaaacctgactcttttttaatcaccagcgtctgaatcataaattcacccaactctttttctctaacatcaaacatgtccgaatcaaatccaaccaacaaacctcccgacctaccattagggggagaccaaacccagacgaagtttctattaccactaatgaaattcaaccatgattcttcaaaatctttcttgttggtttcttgtaaaccaataaagttaaccttctctttcatgataatatcacgtagaaattcacttttcacaactttaccgaggccctgacagttccaaatcacaccaatcattctgaacaaatcggggcctgaccaccagactggcctctcctcttaatagggattttcctattatttggagaattaccagctttattattttttttcctcacagtttttttcctgtgctgaattttacgaccttttctaaggaccataacatcatcaagatcagaaaaattatcatccagactatcattatgaatattattatctacatcagaagcaatgcaatcaacattggaattatcaacattaatcctaatagattgaacaactaaatttttcctagatagctctaaagatttaatcaggtttaaattttccacagcatcattaaaag

SEQ ID NO: 106950 - DNA, 494 bp, Zea Mays
ggaccgacgaacgggaggagggccaagaagccggagcagcgccgctatgccaagacttagctaagaccttgtaaccacctccaccacaaataagagacttaggagcctctcctccctctctctcgcccgaactagtataaatcttgcacccaccgcgcacagcgttcgaagcccgtaacacgcataataaatagacttgtcggagtaaggttcgaaacgccgacaaacatgttccaaacctttacaatgagcgtcagaaagtcctaaaagactttgcgaggatggctggcagcgaggtcctggtcgcgcctctcccctcacacaatcgaacaactacaatctcgaaccgaatcaaaactaactactcataaatttaccaaaatcggagacctatgtatctcaatcgataacctagcatctatgttgtgctgacacctattagccctatttacacgggtcattatcttgatttcaccaccactgttgcttgcctg

SEQ ID NO: 106951 - DNA, 1429 bp, Zea Mays
tgtagggaaaaccccctcccctagtcatcgaggaggggaggtagcttattgaccaactgtatagggtaggcaggttgagttccctttcgcttgatgcaatgtcaattctaaatcaagcaattgatggaatcaaaagagggaacgaaagtaaatgagaaattacttttcactcggaattctttattcatttgaaaatgaaactctcactcgcctttttcttttcttatcccctaatctactacttcaaagcagtgtttctgcagtgttcctaagatgagctatgtctggtttagtgtcaactaatctttaaccctttgatggtagaggggagtaactcgcttttagccctctacaactgaagttctcatgtacttaaataacaaacaagattgaataggccacaaggccagagaaaaggtaggttaattgttctaggattggttgtctcattgacaagtgatgggagtatcagggtttcgatacccatggcaacgtggaacaagcgaaagaaagatccatgaaagcctaaacctgaactacatatcctagaagaatggtagcgtagtcttgtggaaatatgccataagaattccaagaacaatcaaataagtagtgaattcccataaggaagagaatacaccctaaactctgaagtactaactaaactagatcaagataaagtactgactaaactagataggccctagccttcgctaggttagggttgcgattgtgataatccaggtcagtcgaggatggtaaagtaactaagttgcaaagaaaacctcagatagactagcttaggaaatggtgaagctttataattaccaatggataaactgatatgggactgaaatcgatttcaatagttctgaggcatgggagaagtggattcaatggggatgatgatggcccgagataagaatgggaagttgatcaagagtgttggtcgtgttgacgtcgttgagttgccagagaagagttcattgcccctaacgggaatttgcagaaattctgcgatacctgatacttgaaactcgatctatttcaccgtacttctactaatactaaagctaagcctaatattgcaatgaagctaagaatgagtcagttgtgctacttctttcattcctcgcattcagcttgaagagccatattgaaaaactataaagagcatctaccactgctcggattagcctccctcctatcattctcataaggatgggcttccgcttactttaggtcttgacttcctatcaggatagacacctcagattacatgctttagattggagctactgctcctctttctttcattagtgcacctcttattcttcatcctatccaccatagaatactctcttccagtcctttgatcatatagccatccatctttcatcaatgaaatttttctatatgggtaacaaat

SEQ ID NO: 106952 - DNA, 308 bp, Zea Mays
tccaactcagatcgggcggactgagatagggtttgtggtttagaaatctggaccactaatctagggaataatgatcctgagtataagtgtatgttgttacgctcaattaaacctaagtcactaatctcaaatcctatggttgtcgttgcacatgggtttggggaggacccagatctattcctgaccgcacgcgtgtgatcctgcggtcgaaaaccaagaataccccttcgcccggtcggtttaaagaatgagcccctcggtttttagggaattaacacgcggtccatcgcgggagagttatgagtctt

SEQ ID NO: 106953 - DNA, 448 bp, Zea Mays
cgcccgcaatgttatgatttggatctaagacctaggaccacatgtgttctctccttaccactatgttgtagagctatttataactagaaaaaacataattgtcttttattttaactctagaacaacctttatattctcggttggtacaaaacaagtaatggacaaaaactgatactaaagaagatagatgtccgcaatgttatgatttggatctaagacctagggctatgtgtgttctatccttaccactatgttgtagagctatttgtgactataaagaagataattgtctcttattttaactctagaagagcctttgttgtccgtttgcagaaaaacatctaatggacaaaaagtgatactaaagattactttggtaccagttttgtcatcaaacgctagtaaggctatctccaacagcttactcatctttatctttcattttaaa

SEQ ID NO: 106954 - DNA, 300 bp, Zea Mays
gtattaggagccctgggcttccatcaatgcagggagcccctgccaggctaggtgtgccgggcgcgggtcgacgtggcaggtggtcggagtaccgcgcacatgcaccgagtgaaggtgggtcgtacgtgcgcaccctctattaccatttatgcatccgtttcactcgaattccgtatgcataaacgcgtaactgccacggtgagtccgctcgttccgcgcgggttctccgaagtcgtggtcacgtcccgcgttgaaattgaccgcgtttatacttgcatattatgactccaacggttacat

SEQ ID NO: 106955 - DNA, 281 bp, Zea Mays
tgaagtttgcgcttccgacaatactattcctatgcaacatctacactaagaatcaaacatcatacagtagcttcggcgaagaagggggatttctttatggaagcgtgaaaagaagggaaggtgttttttcgccgtcggctcaaaacggtgtgtacgaaggttacacgcttcataaagaaatatattacatcaacatacatacaaattgtttacaagtgtttcttacaaaaccaggaatcatgttcaaggacattaaactagcaaaaatacaaagttttagt

SEQ ID NO: 106956 - DNA, 416 bp, Zea Mays
gttcttttgtaaaacggtttcagcgaaggggtacgggtgaatggtggccgtgggatcacaaatcaagggtgcggattagaagcccaggctccgaaccggtgtccaacgtcagtggtcggatcccgatctaacggtcttcccttaaagcaccgatgcgagagccccagccgatggatccaagatcaacgaatctggaccaatccatcgaagggggtatccttgatataatccaggccgtccgtcatcgatccgacagccacaaccacctttctaatctagaccgttaccccgcagatcaacagcaccagtacatctcctaccttacgcctgtagccgagctccccacggtggtgttgtagttcaccgacgcacagagatccagccacccggcgcgcccaacccataaccgaattgtc

SEQ ID NO: 106957 - DNA, 444 bp, Zea Mays
tagagatgaggaattatggtgtaggtgtgttcagaattttagactgattatcacgattaagatcaagaagttcctctatgcatacaagttagcgacaaagattagtagcagcaagaagagggaaaacagtgacacgatgaaaaatgaagaaggcaagaaagaaaaaaagaatagcgcacagtagataagtaccttccagatttacaaccgaggaacagacgaaccctagacagagcactaatggtgtcccaccttgcactaatgccatcgtgttccactcttccatcagttcgccctgaaccagatccacgcaacgtgagcggtcactgcatccacaaagcaaaacatcaccaccgatcaatcagacaacctcctaaaggaaaacccccaaatcgaagccccgactcccaaatgaatccagtagcctgttaatcactatcaaat

SEQ ID NO: 106958 - DNA, 616 bp, Zea Mays
ccttcatgaagtagcttcgcctcaatgcaaacactacaatgacgctaggtgccatctcgaactctaggattttggggcccaaaccttgcaaaccgttcaccggtggttttgaaaaacaaaccaccaaaatcttgctagagaagcctgtctgctacatctcctccatgatctcgacatgtgtcgctatccgtcctctactaggcaatcaccaagtctattgtgccccacttgacttggtcaacatgatctacaatcccacatgtacacttggttgttaatgtccccaagtgttagccacacatgttcgaacttttggccattggtccaagtatcacatcctctttcaccattcctagtccactgatacaaatacgtttgaccttctccattgttgttgattgtcttagtgatctaaacttgagcaccacaagccaggagacatgttacacaataccatactcacattatagttagtacaaaatgaaaggatcacgattcccaagggggtaaattgggtttctttaagcaaaatcccaacttcaccctagaggctagcaaggtaagcgcaataaaataaatcctatgcaaccatgacgatacttgaaatgtacatgtt

SEQ ID NO: 106959 - DNA, 538 bp, Zea Mays
atcaccacacaatttgacatctcttgctagctttacaaagtaagagaatgaggttgggaatgggaacgagaacgatcaagaacacaagcccatgttcgtaactcctaaagttactagaatttctcgtctcttgatctcctacggtcataactctttgagttatggtagttttttgtctcatgatctctcgtgccctttcgattctcctggctctgagatataagctttatcatgtcatcgttcttcggtttgcctttgtttctactatcagacaaatttccctattttagttcttgcgcgcacaagcaatggaagagtaagcctatgaagcgagtgtcatccacgagttcacctgctcaggtgaaggccgacaaatatgtttttaggagtaatcataagtggcacaactgctcacttcatcatcttcttctcgacgtgatcggcacggctactctacattgcaccaagcggaaccactgtaccggcaagcactatgtcaagtatattgtgctttgccgctggatatatttctcttgcc

SEQ ID NO: 106960 - DNA, 572 bp, Zea Mays
ggacaaggcaccagaatgtgtccttggtgctgacaaggacaacgttcttttttcctggagtactaattgtttcgttattagggtataacagtcaccctgaacaattgtgaaagtaaatgtggcgtgttggttttgaaactttttctgacttaagctgatcgcttggctggtaaggcatagtggtcgccctaagataggtagatgtgatcatatcgcgctgacttgagtcgattgtcccgttgtagggtatagtggtccccctaagtcgagttagcacgagcatgttgcgccgacttaagtcgtcaccgacttaagcctatcgctctgttagtagggtatagtggtcaccctaagtcgagtaagcgtgagcatgttgcactgtcttaagtcatcaccgacttaagccgattgctctgttagtagggtatagtggtcaccctaactcgagtaagcgtgagcatgttgcaccgtcttaagtcgtcgccgacttaagccgattgctatgtcagtacggtatagtggtcaccctaagacaagtaagcgtgagcatgttgcaccatcttaagtcattg

SEQ ID NO: 106961 - DNA, 308 bp, Zea Mays
cagaagaggtgagcacgtattagtcacatagtcataagtatatgaaatgtgaataaatacatacacagagagatatggcacataaaacaagagatgagacgatcgagaggtcaaacgacgtgaaaacggcgtttgaacgataaaaagtgccataggaggtttggaattcgaattgaggcacgaaatgacatggaattgagccgatacttcacgaataggtttatataggtgaatatgactgaagtgtgtgtttggtttgaatttaggcgaagaaaatgagatttgggcactcggctcggaaacgatcg

SEQ ID NO: 106962 - DNA, 415 bp, Zea Mays
atggcccggaatgccatatcgaacaggaggattggaaacgaaatcaaaaaagggactctacgggggcagattccaagcagaataagacaaggaggcaccaacatttgaaaccttagcatcaagccaattcgactcagcaggtcctcatcagaaatctgtctattggtaattctggtagggtcgttgaccccggtgtacagataagttgggtaaactctgtctttcaagggctggatgttcttgaaaacaaagtcagcgaccacagcttcatcagtcatgcctttgtattacagcgagcatatctcagcaagcagcaccttggactcgattagctctgaaccggtgggggactctgtctagctgggcatgcgaacgtcgggctgcctccccgattgaggaggagggacttgttgtg

SEQ ID NO: 106963 - DNA, 591 bp, Zea Mays
cgatggtcgttgattcgtgaatgtgcggcccatattagcctaggaataacccttcacgtgttttagatcgggtccatggatttggggatgaacgcgggcgattgagtctggccacaccgcgttggcagtctgatctggaccgtgcattgttgatccatcgagttctagggtgatccgctctccgtcgttgatctggggatcgacagtctcggtgtaagcgcggcggccgtcgtattgagttaatcggggccctagatttctgatcgggcggacgcggttcgatctgatcattttaaatccgaatcacccatcagggattcgagggccagggattcttggtggatccatctaatctataccattgattgatcatccaacggcttagatcctattgtaccccttcggcctggccattttgctaaagaacccatattgtttacagaaaataacccgcagtcctatggcagggttatctgtgtctggaagttatttgcgcctgagtccctgcccttttatgaatttgaggcccagtacagagagcatataaaatagttaaataaatacagaaatcgatttctaatataaaaagaa

SEQ ID NO: 106964 - DNA, 555 bp, Zea Mays
tctagatcatgagtggggtagttcagctcgtgctgcctcaactagcgagatgggtaggcaatgacatgtccttcttgcataagaacacatcccaacccctaacaagatgcatcacaatatatatcaaatcctttttgtagatctggcagtaccaacactttaggtaacatcaacttaagcttcagcttattgaaattgtcctagcaggcctaggtccacttgaattcctttcccttttctagcagcgaggtcatcgactttgctattttggagaatacctcgatgaaacgtcgataatatcccacgagtcacaaggaactctagattccgtaaccaactccagtatcttccatcccactatctcttttactttgtatggatctactatgattcctctgttgaatataatacggccaatgaaaggtatttcatccaaccaaaactcacatttactgtatttggcataaagctagttatctctcaatatttgcaatactagccgcagatgttcctcatgttctccaccatccttggaataaatcaggatgtcttcgt

SEQ ID NO: 106965 - DNA, 293 bp, Zea Mays
tgagttctgtaaacaaggaccaagggttaatgcccgaccacatgaacaagggtgtttctcaagaacattcaagtgatgaaggatatgaaatgtctaccgacccttgtcctagcatagatagggccgctcggcgtcaattgcatcgtgacccgaattatgatccacaagagtgtgaggtaaagtacacatctttagtttcgtttgtgtatacctaattagttgatttcacaatgtctattacacatgaataggaggtcctgtctcaatatcgtgcgatgcttgatgaagccgtg

SEQ ID NO: 106966 - DNA, 349 bp, Zea Mays
tctgcagcctttggaggtcggggaaaaaagagaatgaacagagtttttgacgccatcggcttcgtctaccccgactaccgctacccgctgcggggacaggggaagaagagaaaagctgatgctttggccaccctagatgagcctgtgccaaaggctacgggcaaaaagatgaaggtacttacccaccggccgcgttacattgaaccggttgtggtgcctgagtttctcggggaggcttcttcagctgctgaatcaagagaaattgttcctcccatgcagaggactgaagagccggctataatgctgaaggcaccttcggttgagctagttgaaacgaaggttgacaaag

SEQ ID NO: 106967 - DNA, 431 bp, Zea Mays
ctcaaatgtgataaatggtctatgagaaatattttggctgtgtgtttgaatgttaaattctgacagcatggaagcacacatagtctatagagaaatccaaatcacatctgttatacacctatacaaattttgaatatgcgacgactgtactaatgtgatgttttacgtgcattgtccaaaactgttgtaatgtggtgatttactatgaagcctagctgttgttattcccttgttagtagtaatgcatacctcatcatactaatttttattccagacttccacttagacatgtatcatatgcatgcttgtatgagggacacatttcttggtcagttttttcagaaacatgagaggattagtttcttctttaattgtgcacacttggattgcatcttagcaattttatgtctcagtgattgttttcttaataa

SEQ ID NO: 106968 - DNA, 513 bp, Zea Mays
ctttagttaaaaataaaaaacacaattgcaaaattgcttaagtaccaaaattaatctacagatacggtttgcaatgcaggtaaacgttacaagcattctagttactctatgcatacgattgtaacacatggtaaatgttgatatgatcgtatttactctacgcatacggtttgcaacgcatgttaaacgttgccagtatcattgtaattcaacggatgtaggttgcaacgcataacaagcgttggacctaatcacttccaacacatataactatacgttgccaggtatatgttgctataggggggtttgttttgtagtgaaattattcatgccgcctgctttcctttgaaggggtgtcttcatgctctattcattatgaagatgattgaggtcgtgacccagttcagatttgacaaaggtacccgacatcaatcatacacccctttctggattgatcccaacaatccagctgggcgcctcaggaaagccccctccagttctcgtggtcattca

SEQ ID NO: 106969 - DNA, 497 bp, Zea Mays
cggcgagatcgaggagaagggcctaggctgggcggcttggctgccgaacctatattgtgtggttgtagaacctgtacggtgtgctttagtttctgaaagtcgagaaggccctgggctgggagacttttcatgcatatagactataatgtctcgtagtgaggatgtcacatattcttttcaattcaggttggctgctcccctagagcagtacaacgctgtatctctcagggtacactactgttaaaatccaaaagcaagaaaagttcatcatttgatgttgttgtctcaggttagctagctttcaaaatttcaagcccacggttttgcatgcatgttgccttgtgctttcaggaaaaaagtattggcactttcgaggagtaatatatcttgttgaataaattattgaaggtaatttgatgttcaaatagttactttcaaaaaggttatgtcgttaagtgtcaaataacaagtataaatatttgaataatgaatttaga

SEQ ID NO: 106970 - DNA, 430 bp, Zea Mays
atcaaagaccctgttcagtcttcgtttcccccaagcactaaaggcggtatacatagcttcatcctcagccttcgaatagccccctagcaattcatcacttgttgcttcgatggcatctaaccaatcatcatctggctcactaaatttattcctgaatcaataggtgtactttaggcgaaccagactgcactttccgacttctgtatcagcttcaacaccattcgacatttcccattcgacagtcaggggccataccttgaaggctatgtattcctgcactatgtctctagagccaatgtaactgcatacaacattgaatgctgccaggcaaccttgtgatttctccgtattcacaatagcatgcctcctcagtctgaagctggatcggataagccactggattacatccttaatatcacttctttgactt

SEQ ID NO: 106971 - DNA, 1342 bp, Zea Mays
taggatatcaccatccattgtggccaggatatcacactggtggggcagcgaaccagtctggtgcacacgaggaaagaacagtttttgctggtttttatcaatggctaattgaggggtttggggctgtaaataccccactaacaggaaaattacaagaaacaagagttgtgcaaacattctcatacactagtgcaacacctccgcttcatcccaagagatcaaagtgcctcaattgagtataaatattcttactagtgaaagagaaggctagtgtgcttgtgtgatctgagtcttggtgttgtgttgtgctctggtgctattgtgttttgtattatcttgtaaaggctagcaagagtctccgagtttgtggagtgccttgcagagacaaagttttcacatctcaagatctagagggctcaatcttgatcattgtgatcgcttgagagggttgaaagagaccctattctttaggacacctcaatggagacatagattcttcgaaatcgaactccggtaaaaaagaaaaaaaaggaaaaagagcttttgtaggccgaaacctgctaggcccgctcgcctccgcccaccgctggcccaatagcgtccagtcctccctcccccacacaacccacctatttccatatctggcacggccatgtgggcgtcctcaccatgtggggcccgctagatagactctcacttaccttgcacgcaaaaactaagcagctgatgggtgggcccgcgttgttagccgtttgttttctgctcataaaaaaacttcggacagttgggatcctccatgatcttcaccgttgtaataaactttaggacacagttgggtttcttttccgctcacaagaaaccgaagcagcaagttgcctccatgagaacacactccactgaccgtagagaaaaacagtgggaagttgtcgctctgaggacaaatcgcgccattgacgacgacgtggttttgacgagcacagggggatcatcgttaatggaactgtgacctcagaaaatgacgagaatgcaggaggcttctcggcgaggtgggagacctcggcggagagctgccaccgtcgacctgtggctgcaacatcgaatgaaggaggatgttgggccgccatttcacgtagccgctgactttcatcactgcctcgatcactggtaatctggtgcccatcgaattcgccccattctctagctttgattacaccaagtcttgtctagggcgggtcactagggtgtcagggtgtgtgtctgtgagggtgcttgctgctacaggtcaggggctaccgctgtaggtgttgaggtggggaagagacgtccctgatcgttgatccag

SEQ ID NO: 106972 - DNA, 457 bp, Zea Mays
gtttttcagaccataaggcatcacaacataacagtatagcccatctaccgttacaaaagcgatgtgcttcctgtcctccctggacatccagatttgatgaaaaccggagtaggcatccaggaaagacaaaaagtcgcaccctgaggtagagtccacgatctgatctatacgtggaagtggatatgggtccttggggcatgccttattcaggctggtgtagtcgatgcacattcggagcttctcgttcacttttggcacgatgaccgggttggccagccacacggggtgatggacctcttcgatgaagtcggcgtgcaacagcttccgaacctcctcacggatgaagtcctactgctccacagactgcctccgaggcttctggcttaccggcttggcgtccggatagatcttcagatggtgctcaatcaccttcctagggatcccaggcatctgcgac

SEQ ID NO: 106973 - DNA, 677 bp, Zea Mays
cgctccgcctcagcgtggttagctgcaccgtcgaacaacatctggccatccccgtcggccgaggacactgctgacgcagtggaatcccaccgcatgatcatccactctagagacgccacctcctcagcggcggatcccgccatgcttgtcgtggatccctccatgctgtttcaagtttggacttttttcatgatttctggttcttggagcatgtgtcatgagtaacattctacctaggcatgatgagttgagctgtgcaaccaacatctctgctcttgccgatttcgcattggtctgtcggtgcttggttctctaaatcgagctttgtgtgatgttcatttagaccgtgtccagcaattcacctatattattaccaaaacaccattttacgtattgttggtagagtgtagcttgaatataggtatataaatgggtgctgaagatagccttatcgagccattgatctaactccccacggaacattttcagcgtacagatgcgattgccgtcctttgtctataatggcgcagaggaacttggctcagattttgatgccgcaaccaccttttctttctccagacaagctgcactctgaacgcgacgctttctttttctaatccaacaaggtcgcagcaaccttaccaaagttgacagtcttagcggctgcccaacagcta

SEQ ID NO: 106974 - DNA, 386 bp, Zea Mays
aaaaaacaatactttcagtagcctttttcaattctttagatttatctttggaaacctttgtagcagtaggtgttaccacttttgaaggtctcaaaatagcttcaagcacgttagccattctccttcatctcttaggcattcccactggagtagttgtaatttgtggtttcgcttgcgccttcggcaactcttgaactttcggctaatctggcagttcaaaatgaataggtttcggggcattcactgtagtttatagaaggattccttcgacctttttggtagtctttgtttctgaggtccctgtgtcaggcagttgtgcagccctctccaagaagtacgactttggtcggtgggttaaaaccttcaccctcttttgcttcggtgca

SEQ ID NO: 106975 - DNA, 720 bp, Zea Mays
aataactggaaaagatcaaggattcagagcacttcgccaccgatgatcgtgcgccatgatctgcgtgatggttgagatgtgtgcgtgctgtaacgtgaaaatatcgatggggagggtgaaaagaccatcgagggcgtgaacttgggccctgaagcaagcctgacgtacccacttgccgacgacgtggtcgtgcgaccgtcgccgtggtggccgccgattatcccggccatgccacgccatagaccaggttatcacgttgtcgtaggtcgtagtggacaacccatttactaccctgagactttaccccattgaacgccacgttagatgaactccactgactcatctcgacatcaccgtgagttcatccccgtccaaaattcggagcaaccgcagtcggcctctataaattgagtgccctccctgcttcgccttcttattacgtgcccagagcaccactccttgcctcaaatcatccaccatagctcgcgaattccggatttcccccaaatcggtcggaacgccaccgtgaggcatcgcaccgtggccagccgttcttaggttcgttcacgtccctctgatccatgtttctacatcctctagtgctagtgaaactcctggcctcagccaattgaacactaccacaccgtagcctagggaacgccgccgtggacatggcccatgtcgaccggccgttcctggttgtctccatccaagtttgcg

SEQ ID NO: 106976 - DNA, 845 bp, Zea Mays
ctcagctattgtttcaaaggtcagcctgggcgccccaaagatcaaatcagcaggtagcactgccttcgacccatacaccatgaagaatggggtgtttccatgcagagctcggctgggctgggttcgtatgctccagaccacgtatggcagttccttgatccacttccgtgcaagcttctcactcttgtcgaatacctttttctgagtgcatccagtatcattctgttggctcttcccacctgcccattagctcttgggtgtgccactaatgcgtacttgatctggatgctcctttgttcatagaaatcaaagaactctgagctggtgaagttggatcccaggtcagtgatgatgctatttggtattccgaatctgaacattatctcctggatgaattccactgcctttgttgaggtcaaggaagcaatgggcttgtattctatacacttcgtaaatttgtcaatggcgaccagtatgtgagtataccctccttgagcttttttgaaaggcccgatcatgtctagcccccagcatgcaaacagccaggtcacaggaatagtttgcagctgctgcgcgggtaaatgctgttgttttgacaagaactggcatgcctcgcacttatggactaactcggcagcatcactcttggtggttggccagtaaaacccggatctgaaagcttttcccactagagtccttgatgcagcatgcacaccacactgccctgcatgaatattatctaacagatgtctcccggtagctgagtggatgcacttcatgaggacccctcatgcgcctcttctgtacagcaagccccctatgatggtatagtgggctgactgtct

SEQ ID NO: 106977 - DNA, 506 bp, Zea Mays
tggaattattggagtaaggagtgaatccatccgtcgacaaaccaagacgaacactcctagggtctcttgcaaattctggatcaaaacggccgagagcctcccaggccttgccatctgagggatgcacaatgacatctggatcttgaccctgacgatccccttttttatgccacctcatttgctttgctgtctcttgatttagaaagagacgcttaaggcgtggagtgataggcatgtaccggagttgcatgatcggcacctttgtcgtaacctcgtttccatcctcatctagcaccactgcatatcttgacttactgcagtggatgcaatgtgtggtattttcatgctccttccagaacaacatgcaattgtcctcacaagcatcaatcttttggtagttcataccgagaccagctacgagcttcttgcaatggtacaagtctttcggcatgttatgattcggtgggctgatatcaataatcagtttcacaatatcgttgtaacag

SEQ ID NO: 106978 - DNA, 718 bp, Zea Mays
attagatataggctccatacaacagcacctcatgaatctacacaatccatacatagtctaggggcataacgtagaattgaaccaatggaacacacttaaaattcatgaggcacacgtgatgaagcgcgtcaactaactgaattgctgagaaaatcaagctatgagtgtcttcttgcagaccccaccaacaataataacctatgaaggggaaggctaagcattagacaaatgtagtctagaatcaatttataggaataacatggaaccaaaccgatcatacacgctaaaaatccacgaggtacaactctgcaagcatgtcaactcaccaaattgatgaaaaggaacatgcgatgagtgtcatcttgcagaatcctccaatcgtcgcctagctagcaaggaaagagccagacattaaaacaagtagctcaactgtaattataaatggctcgctcaaatccaaagtgcacacaacaacaacaacataagcatcaattgaaagcaatctagacatcgacatatctttatttgggcccatctttatttgaccacgaagctaaagatagcagaagggaaaaaacagatgggacataatcaacaaaaaaaatacgtggcaaacaatactgtagataaaagccactcatgattcatagcacacatccatggcaaaacaaaactaatgtccattcgtccacagcaggtcctaaccccttcgcgacca

SEQ ID NO: 106979 - DNA, 595 bp, Zea Mays
gtgtatcgaagctacaatgatgaactgcatggagcatattccaaggcggaagataatgcactgtccgcagccttcgaggtcagggaaaaaagagactgaacagagtttttgatgccatcggcttcgtctaccccgattaccgctacccgctgcggggacaggggaaaaagaggaaaactgctgcttcggccaccccagttgagcctgtgccgaagggcaaaaaggtgaaggttcttacccaccggccgtgttacattgaaccggccgtggtacctgagtttggcgagggggcctcttcagctgctgaaacgagagtaattgttcctcctgtgcagaggactgaagagccggctataatgccgaagttaccttcagttgagctagtggagtcgaaggctgataaggataaggctgaagggtcaaaaattaaagaaataacaaaaatgccagagattttgagcccttcaatagaggtaacagtgccgaaggcacaaaagggttctaccgcactcctaagaggagaaggatggcaaatgtgctagatgttgtgctagaaacagcaaaaaccttgagtcctgctcctacaagaaaaatt

SEQ ID NO: 106980 - DNA, 556 bp, Zea Mays
ccggcgttccgccatggtgcacctcggtcgggtcttggccagcaccggtggttcaacgggagagagagtgttctgggggccgacgcatgtgcctgggaggctggaggaggaagagggacagtggatcgtcgatttcaccttcaacggtcgcgattagattagaaataacctttcgctaaagggaaaatctgaccgctcaatttgaatcggacggccatggtgagtcgaaacctaataaaatctggggcgttggatcgggattgggcggttcggcgttgtccgcgaattcataatgcgcaggatctaatccggggcatcggctgttgatccaacggccagatccattccgtaccccttcggccctggaaacttgcttaagagtccctgtgtttttctagaatcaacccgcagtactacaaatagtattctgagtcttgaaacaacttgcgcagaggcccctgtagttccctggtttattgcgcccaatccagagcctattgtaaattgaataaattaattagaaaatagattttaatatgaaaataagtgctagaat

SEQ ID NO: 106981 - DNA, 395 bp, Zea Mays
gagactaaacatgatctaaacacagttaatgcagtatacaaataccaaaatgccctcacatgatgtgttgcttctatctttacccaccaacatcaaccggcgccaattaaatacctgccagcagcctggcgctaccaacaacagcccatgaatagcaatctggcgccaaattactcagaatttcttcagtttcaaaatattccagtacaaactcatgttttgatgaatagtaaccaacacaaatgtatagtactagccaacacgaatatatttcaaatattccaaatgccaaactcaaagcagccaatagtaaaagaactggcgccaacataaatgtatttcaaatattcgaaataccacatcaacacaaatgagtttcaaataatagaacagtc

SEQ ID NO: 106982 - DNA, 363 bp, Zea Mays
gtcggatgttcgcaccccaagctggaccgagtctcccacagatcaggaggtagccgaggcaggtgtgttgctagctgaagttggactgctgaaagagaggggtctgactgctgaagctgtggttactgattttgttttcaagaatattcagccattgaaagacagggcctacccggcttatctgtatcgagggctagccgactcaactcgggttactaacagaagaattccctctgcagacttggtgagtcgactagagatgatccttaggggtaaagtgtcaaatgttggtgctccagtggcttactcggcctggaacctgcctcctcccaaagccttcacccttttttgtgtcgaatccac

SEQ ID NO: 106983 - DNA, 670 bp, Zea Mays
ctagtgttttgtctatagttctaaacttggtgtgcataatcaacatcatcaataccctaaagtagtaacagttttcacaattcacaaaagcaaaatgaaattgaaatgcagaaaaaatgcaaccatgcacctcatgctacggatatgattatccgtgggtcaggagcagtatctgacctcactattgcataatataacactatttgttgcaaacagatacacttaaaaaggttgaaccagttgctattgatggtttcctaagatcgacatggaaccctagtaagactataaatctagaactaatcatgtgggatcaacccactactgcaagcctaacaatgaagcaaactgagctgggtgtaaaatattctacacaggatagaaaggctagtgctttcaagacacattgacaaaatatattgatttgttagttgtaaaacatggaatagtatctaagacttcactggatcaaaacatctaaaggctagaaaagatgactacaactctagaactgaacatgtgcgatcaaaccactactgtcagcccaatgatggactgaatggagctgggtgtaacacatttcatgtaggacaaaaaatagtgctctcaagatgcatgtccaaaaagtagattaataatgagttgggtacatggcattctgcaacatctt

SEQ ID NO: 106984 - DNA, 849 bp, Zea Mays
gagagagagagagagagcggcacaacattctgtcgcgcgaattcaaatgaacgctgcaaccggactggcacgaatcggtggaagtaaggcgggacggtgtacaaccttgattgggagctccagaggcggcgaaggtttgcgccgtggagagggattttttcgcatgcggtattttacggataccacatagaaaactgttggagacaattttttcttttttttcctagaataaggattggacagagggttttaaggatctcttggagatgatcttagatcgaatctcacacgaactcctacttgaaccagaacgaagtgctgaccatcggatctaagtttgatggtcgaattttaataaacagagttctaatgtaccccatttgatccgtgatcaacggtccaggatctactccgaagcggtacgcctcggttctaatctggaccgtctgcttacatatcgacggccacgacgcgcagcctcatcatcctggcttgccctggcggcgccatccccggcgacaagtaaatcggccaccccggcatacaacttcactcacacaatcgctactcgaagaggaaggtcgggcgaacgacatggttggcttcttaccggctgtagagcagtagcagaccttgaccacgaaacgaagcggctccacggcgatgatgtactctggcgacgaattcccaatcactcactgatcctctatgctaccgatctccaccaatggatctgtgatggtccagcgattcccgagagctaccaatcgaggctccagtgatgcctttccgcgaggatgtggccggcggcggtcagggtccctcttttgtgcgagctcacgattcgtg

SEQ ID NO: 106985 - DNA, 647 bp, Zea Mays
catcggcaccaagctcgccttcgcctctgtgtaccacccgcaatccaacggcgtcgtcgagcgcgccaacggcaagattttcaccgctatcaagaaaagacttcttgacgacaagaagggtaaatgggctgaccaactacctgaagtagtctgggccctaaacacgaccgaatgtcgggcaaccggattcacacctttttgtctgttacatggatcggaggccatgacgccgcaggaaataaagcatggatcgccccgaacaaacacatcagcaatccccgacatcgacaaaccaaaatctaaagacctcatcgatggagaccacgtcttcgcccctgtaggccctcaacaaataccaagctcaaaccaaggcctagcacgacaacgcggtcatcccaagagagttcaacacaggagacctcgtactcgtccgaaccacccagacagggtcacggggtaagctggagccaaaatgggagggtccattcatcgtcaagtcgaaggtatcccccagcgcgtataggctatcaacgcccaccggcgaagacctagagcactcctggaacatcgacaatctacacaaattttttgtttaaacctcagggcctacgcgcccttgtaatccaccaaacaatactattctcggc

SEQ ID NO: 106986 - DNA, 397 bp, Zea Mays
tttttcccgaagcatgtcatataatataatcaagaacttcggaaggtgcttcgggagtaggagtggcggcttcttcaggcagaatttgttctacaacttcttttttcgttgccttttctccggtttccaaggatttctccttggtgggctctgaaggcccagcttcggtctcggcctggctctttgtagcttcagcttcggtcagctttgtctcagtctgcgcttgtgaagccttggctattttccctagagtagaacatgaaatttttatcgtctccagcacatccagaacactggccatccttttcctcttgggggtcgctgtaagacctttttgtgccttcggcactatcacttctgtcgaagggcttagaacttctaatatttttgtcccttc

SEQ ID NO: 106987 - DNA, 2423 bp, Zea Mays
atggaaatggttttaagactagcacaatgcggcttggggcagatgttattgttttcagtcgctgcactaagagcaggtaccatatacctcacttaaatttctttcctttgtgaaccacttttcttttatcaattgaaataatgccaagttattacttgttttcagtgggcctacacaatccattggtctcctctcttacactttcttggtggaaactggacatacagatgttgtagttcctgtggtacgctgtgtgattttattttttaaactgcacttccataatttctggtgatatattttctcttcctaggtggattataaatgcaatctaatgaaaggacaaactcaacgactggagcgtcatggttcggaacaattcttctcaaatttgtcagcattgttgaaatggtccccttttgcaacagaagaagagctgatgcagaatgtatgttaaacctgccatccgtttgaagtatagagatacaatattttatttactctaacaaaacattacattattaaaccgacaaacttagacttaagttataaactagataaattgttttttctatatatatacatgacacccatgtatagaaaaaatatactccctccatcccagaaaacagggctcataaatatttaggttttatcccaaaaaacaaggcgtattagttttttatctcattctagacgcatgattctttgcacccatgtgcatgccagttttcttgtgtggctgcgtgattaatttcctaccctgctcatgcatgttttccttttgtgctgagtgacaacgtcatgcacgattccttcccacccatgcatgctttgtttcctggtttgcctacagttttttctgccagccgatttatttgggaaccgagaatctctccttgcatgtcgtattgcctgcaacgtgattaaggccaccaatgacgattgccttccattccatacagcttgcgtgctgatctgctaaccaaaaccatgggtaccagaggaaataaatatagcgtcaacacctgcgctaatattcgtgaaaaaatttatacgccctgttttttgggatggagggagtatatataatagtaaaattcaacaatttgatgtagctactacaacctcatctagtatttgttagtaatatataggttatatgatatgaaatgctaatggttattccaatctatggttgatgaacagttctgtgacattggtccacatggcaccaagattatagtgttcaatctgtggtccaacgacgatggtaatttggagctcgactttgacacagatccggaggtaaccatcaaatacatcacttgaattatttaacataattattgtttttattgttaaagtagcattcttaagtccgatgattgtgtctattggaatactgttgcaacaatctaaaaccattcttataaaatttgctgtgttttgttgattgtttttcaataaataggaatttattttcttgaagttatttgttgtatactgttagagtgcgctttgtcagttttttggtgttccctgctgggttgctcatgaaagtccttgttgtttgtttgtatttcaggatattatgattagtggagcgccaaatccagaagaaattagaaattctgtaaaaagggctaatgagaaccatttggcaaatcgactacgctattctcttagggtgagtatcatatagtttaacattcctgcacaataccagtgagctggttgctgacatagcattgtgcaggtctatgcttctgtgttgtatctgcagctaccagattactttaggatcatacttcgagggcaagaagttaagcgtcatcgcattgccgctgacctaatatatcctgaatgcatcagttataaaccacatagttgtggaataaaagaggtttgccttggtttatctcttcttagcctcaccacataacttatcggttttttctttactgtatgaattaagaatttcatactcttgttcttgtttctccttttgcatgcactctctttggttgacttaggctacggttcttacaaccattggattcttaaagggtgccccaactattagcgtgcacggatttaatatctatcataaaaatcgccttattttggtgagcttcctgaccccttgcattggttcactttgtttaaggatgcataaacacaaaagataagatttacacgattatctctgtctgaaatcttactgcagccatttcatagagttctgaatacttcaagcagcaaaggtagaagcgtctctggggtgttggaggtagacttcatcaagcccactcatgacaaacaggactttgagaagtcacagctgttccagaagctgatcaaccgcctgaaggagatgactaacgagtactggtaagttccaggttcttgatatctgttcc

SEQ ID NO: 106988 - DNA, 508 bp, Zea Mays
gaaatagagacttcaaggaggttttagcagatttattaggggtcccccccccccacacacacacatcaccacccaattagagaattggatattgtgaagcacgtcaaagaaagaaatcacagtccattctcaatgcaaataccaaacggtaagctcttgcagacatccccatcaacaagaagctctacatattcagctatgccagctttacagtcggtgcagcaggaatagttctcagtttctacatatcggtatagtagatgtttacaccatagatatgaaacttattcaatttcatccgttctttgacgaagtaaaccaaattgatggccctagactcctagagtgggtgcttgaaaattccctatacaatttcaccctttgttgcggcctaattacggtgctggatcccattgcatttttctgtgtgtccaggaagggaaacaaacaataattgttggcacatgaggatgatgaaatagcgaaagactggaatgctggaattgtg

SEQ ID NO: 106989 - DNA, 461 bp, Zea Mays
gcaaggaaggtgagtatctcttggcatcttgtacaaactacaaagtgcaggtgagtatatttgcttctttaaattgatcttactgtcctaaaactactaattctcgacttcatgtgaccagactcgatttttttcaatccagttgccaccacatcagcaccgctacaacggaaagtacctccagaaaatgtgaccccaactttcatgattatatgttattcttagccttctatgtagtcatcaattctagataggacatctcaatctatgcaagccatgtagcaattaggtcaatcgaagttgtatcttacaagcatgtcctcgagacacatgacaacactttttcatttaaagtcatatgttactcatctaaatgcactatagggatgttcttctgcatgccagttgtgtttgaagagattgtgtaaacaaaacttaattattacggttgttagttctta

SEQ ID NO: 106990 - DNA, 2150 bp, Zea Mays
gtgtgattaatatctgggattcctgtggcccgagataccttgatacagtttccaagaattttgcacacgacactttcaatgaaattcttcattggcagactctcaatagtttcaatcaggtgtgtgtggcaggtaccatcgacaatactgttcgcattttaagagttataaacgttcatacaatgccagagagaaatatgcaaatataattacatcagataagcaaaatcacctgtagtcaattaatgattcaacataaagcctaatgaatttctcgatgttgtattcactggataatacagaaagtataccagaaaaatccctgaaaaaagtttaccataggaatttaacacttcaacaccaggagaaacagaaaggagcaaatatataatgtgtatgctgggaaaacaacggtaaacctgatgtctttcaaaaccatcagtggcttcttagggaaaacatggacagattgggactgtaaaattagcagacatttatcaatacttctacctcagcatcaccaatattgagttcaatgatttacatagcaagccagaatttcctaaggatatgaatgacaataagttaaatccaaacctgaacaagacttataagagccatcactgaaacacgaagccatggcaagtcaactgactcgaatgcatcatgttgtgcagtccttgcaacgaaaagaatcaaattttgaacaagtttaggcgctagagtcgcacgggttccaagtactccaacaatcataagagcgccagcctggtcataaagatacaacataactgtagttataacattgctaagaaagcaggatgtcaatagttcttcaatgggaagtaaacccatatagcacaataaaagattcataatgttcgaaatagtgtacacacagtatccagttgagggttgcaaagtaaaagggaaagaaaaaatataacaaatatgaccattgaaaaggggccaaaaaaactgcaaatcatttgaggtaaccttatattcctggtctcgcgtcactgcaggattaagagagtcaaacacaaatcccaacaccctctgcactacatctgtgtcaagcttagggacagcacccaaacactcaacaatcacagcagtgcaaaagcagacgactgtcttcgagtgactgaattcctttgttggtgtagcctgaaagtaaaatgaattatcaacaaaaaaatatcaaaaatcatgacagaatcctactgttaaaaggattattaatttcggcgttacatagttgcatagggtctccagcacagccttatcacggatgcactgttgcactagaacactcctgggtggcggtgcacctgaggacttgacaccgccaagaaatgcccagttactattcctgaaagcacatcaaccagcacaagttgatattgaagacaaatggagaaaataagtatctatccagaccagagccacactcaccctaagttgaccaactgcacgatccgaacaaacgcatgtgtatcatggtatggcagtgcgctcagcagcaactcatccgaattgtatacatgcaccctacatgaaggttcccaccagaaacaagagaataagctagagctcgtagggccatcggcaaaattagctgagctaaattcatacaggtatctgcggataaggtattcaagggtcttgagggcagagggaagatgcaaatagccagctagaaggcgaaggtaggtggagatagacttgttgagtttgtcgttctccttgggagtcaactgttcgcggttcacctcaaggctagtctccctgaacagagtgttgctgtattttgcaaatctctcgtctacgctggtaaggtgctccaaccctgaaaagcaatttgattcaggtaccgtagaggaagagaagctcttcgaatgaaatacctcatatgcaaaactaaattggttttgtttttaaaaacttcattcaatttgagctattagtgaagtttcataaaatcgcatgcataattgcacaagcataaacaactaggtgtactatgtagacggatgggatcaacctgcaaatagcagcaaaatccagagggaattccgagaaagctgatttagatattatattaaatgggagctaaaataagaatcaaacgaaccaaacaaaat

SEQ ID NO: 106991 - DNA, 892 bp, Zea Mays
agaggctggcagtggtggcgtcgtgctcacctaagagctccgcgaccgcatctttaagctggtacgttctctgtggaccttctctgcgcaacttctcttcctatatgctctgttccttctcaatacgtttcctaaatttctctgtggtcgtaaaggcttctacaacttcctacggacgagtttctgttgaaatatgtggaaaaaaaacaagaagggctttggtaagtattcgttgcattaggttataaattttagcatagacactgataatgcaatgctgactagttcagatattctagttacttagctgtgtagagtgtgactatgagactgtagttcagtagttgtaacagagtgcctggattcctggaattctttttggtgttcagtattcaggatgtgttttactgcgtattttaatttgttccacatcacaattttttccctctaaaatccttggattaaaatatccggttcttcagcattgatcaatgtgcagcccttgttctcctgtagtgtttttccctgcatttaaaacaccagtggttaaatttgctctagcaatcgtacatgcggaatggagatgaaaatgatgaaatatgacaggtacttatgatgaggcctttgctttggtactcctggtgcagctttctttaagttgtgccgagaagcttgtttagatctctgtgaatgccaaatttattgatttctgattcactccgttccactaagaaaactatggaccgtggaatcttttgattgagcaatcacatagtgcttgctaactatttctagccctttgatacttttgcatgtgtgttactgagacatcctatcttggttttgcgaccattaaaatatgcaaatcttaccccataagtgacaaacgttg

SEQ ID NO: 106992 - DNA, 336 bp, Zea Mays
atttattagactagactagagtagtcatggggatcaacgacaccccttgagatctcccacatgcaaacgcgctcgattaacctttttttactactttcccaaacaaaagtcgccctcccgaccaactatatcaaaatcaaatcaaatgctttcaaaccaatcgaatcaccaccgggcggtccttgcagcgcattcatttcaaatcgctttccccaaactacccctgccttccctcaatgatctagtctacaggtgtgggtttcccgtcatttcgccgctaaatcccagtcacctaaaccccacgcccctatcgctcccctccttccccttctccgc

SEQ ID NO: 106993 - DNA, 552 bp, Zea Mays
cacattcctaatcttcccttagatattttatgctaaaccacttaaccctagaggcacaatggtctaagttctcataggtgcatccaatgactataggctcttcattactttgcttcagctcgatgtaagcttcgtgatgacgccacatgcatgtcgcctcccattcatgctataactcaagtaggattttgaggcccaaaccactaaacccctcatgagtagtgtatctaatatgctccctccacaatcttggcacatgtccctccaatcctcgaccacctaatcacttctataaggtccctacttgacttggtcaacatggtctagtccatatacaattgcacttgtcaatgtccctacatgtcataatattctaaatagtgggctaaggcatttagcgatcacccttattaaatagctaatagtgggttgaattgggctatagcggtgtcggtgtttcgaactagcaccgatgagtaaatttttgtatgctcgttttaggctcggatagtttgctcagtgcgtgcaagaattatattggtttggacaaaa

SEQ ID NO: 106994 - DNA, 610 bp, Zea Mays
tggaaccaaatgctagatcttgtttttagctcgtgcttcaaatagcatccatagcatacttccaatttctatcttctaatgcctcatacatatcttgaggttctctagtagaagttagacgcccatactttattcgtttcagtgtgccatcttgcagccttgtacggggctttggtctgtgtaaaccggtgctgtgacctgtgggtggttctagttctgatactattgttggcgtatggaatgactctggaggtgctgcttgagatggctgcctcttaggtcgacgcttataggttataagtggtgtgctagccttctattgtattttgctcctggacatcagactgttgctgtatatcagctaaaatcaacacaagttcctgctgcaacacatattctatcattgtggttgaaatatcaccagattcgacccgttgttcatcattagcattttcccttgagtcatccttcatacaaatatgagatcatccagaatttcaccattaacaatagatatttattgataatgtatatcaaaattcaccatattttagaagtagatgaatggagtaagttgggaaggcaaaagattgatttctaatcacagcag

SEQ ID NO: 106995 - DNA, 608 bp, Zea Mays
cagagctggatcattaccggtgacacccttgggggctaggtaactgccagcaccaccctcgggggatgggttttctgcaacagccacctctaaggccgaaggatcctcagtcacctccatgggagtcgggcaatcctgaccaacttcttgacatcgaagactgccttccaaagtcgacgatgcgtgagacactgctcgggatacctctaatcccacgtatggaattttagagcaaacatccatcatatcgccaacagtcggctccgatagcatatcttcaggaacgacatcctcaagggcctgatcaaaatcttctatggacaactcttgaagactgacaagagcagacagagccggagaaggaatatcactatccccctactacctctgtaacgccggctattcttatgaattagcagaacttcttcttcctcttcttcgtcctcatcaaaaatacgaacaatagccggtgcacggtcacacctattggggtcagcttcaggacggatacacccattgggatcagcttctacacggtcacacccattggggtcaacttctggacggtcacacccattggggtcagcttctgcatggtcacactcatt

SEQ ID NO: 106996 - DNA, 520 bp, Zea Mays
agatgatgaccatgcactcattactggattgcttgaggcatttgagaccaaaggtaaacttagtcttggctcctgtaactgaggttggacatactgtggtatataaggtggaaagtatgatgatgtactgaacacctctttttattggtagggttgagtggctgacgaagcaagttccttctgcttgttgattgtatgatggcatgttcttatggtgtggcctttgttctcgccacaaaacaagcataatggtttccttataggtgcattgaatctaccatcaaaacttcgacatccccttttgccgcgagtggacgaactgtgttgtgtgaaggttgctgctgagagcttgcttactgttgagagcttgctttctgctagcccgactgacctgagattggaccattttttcctcacccttcatcgggatgtgaatgcttcgaacatgcctggggtggaaccttcccccaaagcccctggctgcttcagtgtatctgtgtagctcctcccttctttggtg

SEQ ID NO: 106997 - DNA, 610 bp, Zea Mays
gcgacagcaaatggtggttcgtaaccataaagagctttgaagggtgagcatcccagagtagtgtggtaagacgagttgtaccagaattctacaatcgaaagccaagacttccatcgttgaggttgggcatggacagcacaacaaagatacatctccacacattggttaactcgctcactctgaccattggattgaggatgataggacgtactcattactcaagttcaacttggtgcccagcagtttgaacaagtgagtccaaaaagcaccggtgaatatcctgtctcggtcactgaccatcgacttgggcagtccatgaagtctgacacttgatctaacatcacctgagcggccttagctgctgtaaaagggtgtttcagagccacgaaatgagcatattttgtaaagcgatcaaccaccaccaagatcgtgtcgtacacttcagatttgggaagtttctcaatgaagtctaatgtgatctcttgccacgccccttgaggcataggtaggggttgtaataaccctggtggatgaagtgtttcaaccttagcatgttggcagacctgacattgattcacgtaatcctccacatcaactttcagacccctcc

SEQ ID NO: 106998 - DNA, 462 bp, Zea Mays
tgattgtctctatgttttcccaatgtatagaagagtcatcactcgcgaccagtccttgttagagcatccacaaaagagtgtcgatcccccttgattggtatttgcattcttacataggctacgacatgtgcgagtgggagtgggactgaacctgctggaacagcttttgttgacacccttttcacataccctcctcctggtgatggcagcgaccaaagctcaaaccatctaaatgggtgtccctaaatcattatatactccttttatatttatatttgcgcttcattttggttatgggtgatatgggttgaactgaaatttatgtgttttggtgaacaaaagacttgtcgagttgttgtgatttgaaatggatatgagctctatatgtttgtttgagaaatttgtaatgcgaagtatgtgacaatgtgaagtatgtatgttgtgaatggtgtttgtgttgta

SEQ ID NO: 106999 - DNA, 609 bp, Zea Mays
gtagattacatacactcagcgaagggtcactagacccaccgcacaaataaatacaattgtgccctccactaccgccggacaacgcgagggcaccacacactacatcggctcaaccttcggaatgatgcccgcctccctataattgaacaacattatttttaattcctcaccctcaaaaagatcccgcagatccccttcaccaatactcgtcccaatcggcgaagacagtagatcttgtttgccaaaccgatccactcgaaggcgggtccgctccacccccatccgacggcgcctaccacttcgcgacatctcaccaacactatgcttcaaaaccacttttcgtcgccgtcgttcgatcctcgcgctggggagatcagacacctcgccaacctccaaccgcggcgaggactccgccgcggccgcatctaatgcaacaaaataatccaaatcttcacccgacgactcttcgctctaggaaaacgtactcccaaactcatcatcaaacgaaaaagactcagattcagaaccagacacactataatcagcaggcactacggtagcggccaccacaaaattcgtatcgtcagcaagggttgtctgcgcaggccc

SEQ ID NO: 107000 - DNA, 335 bp, Zea Mays
aaagcatcctttcttattaccctttggaggtttcagctcagtgattttaggtcagcaaagcgactgtcagcctcaagtcccacccaaccgtgcaagtgacagatgaggatgtcttgcactacatccatgtagtgttcattatctgttgtaacatataaaagcttttagctgaacctaaaataagataaaaacaaattattggttaactgcacatgtagtgttcatgctgccttcccctatgcaccaatgcttttatcgatttggttcataaacgtcttttatgcgtcgacaaacaaagagttgctcctaaatgctgcacttatattgtctttgat

SEQ ID NO: 107001 - DNA, 410 bp, Zea Mays
ttcatgtctgaggagaagaagatggacgaggaaaagataacttaggagaagaagcttactgaggagaagaaagttgtagatccttttaatgctgggttttatgagtctatggcaaaaacgaatacagagaaaattactaaagagataatggcagatttatctgaagattctgatgacagtgatgactttgatgtagaaagtggagatgaagattctaaggaccagccctagcaaccaagccatacaatcttcaaaaaatcgactattaaacaaagtcatgttgacgctatgaggggaagatactttcgtgacatgtcaattatgagggttggaggagacagtaccgcccctgcccctgaggaaaatgaagttgttatttaccgaagtttcctgaaggtaggccttcggtt

SEQ ID NO: 107002 - DNA, 327 bp, Zea Mays
cctgttgtatcctctctactccaaacgatttcttcgtatgagagcagtactatctgttgttgaaaacggatcctaggcagataccagtcttgtttcgttcttgccaagcagttatcatcatttgtttcatgaaaagctagttatatggtgatttttcccagataaaatgaattcttggccttgtctgttctattccaaagcttctctttttgctgaacaatgaagagatcgaaataatgctatatagaacaatttggtatataatatgaggagaaatgtttgccctgctggcaacaccacaaattaataactattgttataaattct

SEQ ID NO: 107003 - DNA, 545 bp, Zea Mays
cttacttcgattgtcatcgacgctggttgcccaggaaacacccctttaggagtgataagaaaaactttataaagaacactgtggtcaccaaaggaccgcctaaacgtcttaacgcagcagaaatatatgctcagctgaacaaccttgtcttaaatgaaaagggggacaagtacaaaggattcggagtggaccgcaactggacacatatatgtggtctctgggagctcccttatatgtcgtcattgattcttgtgcacaacattgatgtcatgcaccaagaaagtaatgttgttgaagccctcatacacacctgcatgcattttgaaaaaacaaaagacaatatgaaagctcgaagagatctagcaatgctttgtgaccgaccaacccaagtgctcaatgccaatggtaagccgccacgtgccttgttctgtcttacctctaaagacaagatcgaggtaatgagatggatgaaaaaaattaaattttccgatggatatgatgcgggcttgaaaagagctgtgaatttgaaaacgggaaaactaact

SEQ ID NO: 107004 - DNA, 536 bp, Zea Mays
aacatgcagggccaaaggtcgtctatgggtgctgagttgaggcaaggagacaatggcttttcctataggtttagggcattttctaggtatgatgttaatggatactgttttcgcaacaagctacgactaaattcggtccaatcgaaaaaccacatgttcttgagtttttactcccaggcttgatgaggtcgagtattatggaagaattgaagaattatatgaactcaattttcataggtccaaacctcttactccagtgatattcaaatgacattggtttgaccctgaaatgacgatatgtacacatactaatattgggccagtagaaattcgacaagattccatcttaccaggagacaatgtctatatcgtggcccaataggccacacaagtgtattatctctcatatgcgtgccaaacgaaagagcatcttaagagttaggatgttgtgtataaggtatcagcgcacggtaaattacccgttccagactatgaagattataacttagacccaaacacatgacaaagagttcttt

SEQ ID NO: 107005 - DNA, 434 bp, Zea Mays
taaaagggctagtgaagatgaacaaattagtggggtggtgccccatcttattgatggaggcttgtcggtcctacaatgtgtagatgatgcaattctgtttatggaacataatctagatagagctcgtaacatgaaacttttactctgtgcattcgagcaaatatcaggactaaaaattaattttcataaaagtgaattgctttgctttggagaggcccaatcctcaatgcaacaatacttggacctttttggttgcataggtggagacctacctttgagatatctaggaatctcaatccattttaggaagctaagaaattgagattggagaaaggttgaagaacgttttgagaagaggctcaatagttggaagggaaaaagcctttcaattggtggaagattgacacttattaattcagtgttgactagtcttc

SEQ ID NO: 107006 - DNA, 291 bp, Zea Mays
aagagtgctatcgttgtataaaatttatcggaagcaagtagcattcataagtcggtccttgttgaaattgaagaacaatctgataagatatgcacatacgcgctttaggtgcttcagtagtaaaatgtagtcttatggagttttatgccatgtgttaacgctcttcatgttagatctcctaaaatgtggtgttttaggtgacttgtgtgttatccagtttaagttgagaaatggttaagaaaagctaattaatctgctcctacccatgttttgagttacaatgtctaaaat

SEQ ID NO: 107007 - DNA, 421 bp, Zea Mays
caccatcggtcgtgacaggatcaacaatttcaagcttaaactccctgggaatggagttcgggctggaacaccaggcggtaaccttgaacacctcacgctgccgctcacaatctgggtgaagatcaacaatccatcaccactcgttgaggagagcttgcacagttgccaattcccaagcatgggcagggatgctagacacttcaatctcaacttgaaaaggcagagacgccgccgcagatgagttaagaattctgctccatctcataacatggattttaattgtgggagacaaattcacaattcttccccatcaaaagcatgatccgccatttctaaacttggaaggataagaagaaaacttgcaggacccagtcgacacatagacagtgagtcatgtacaagctccagcctccatgcaaag

SEQ ID NO: 107008 - DNA, 894 bp, Zea Mays
gtgtgctagcatttgatagaagtagggaatccagtctaccctacgcagagttctcatacaacaatagctatcaggccagcatcaagatgtcgccattcgaagcactgtatggacggaaatgccagacccctctcatgtggtccaacgtagggggaaaagcactagaaggacctgcctttgtcaaagaggcagaagagaaggttgcactgatccgcagaaggttactcgaagctcagagtcggcagaagagttatgcagacaacaagtggagggaactctgatttgaggaaggagacttcgtctacctcaaggtttctccaatgcgtggtgtcaggaggttccaagtaaaaggaaagctagccccacgtttcgtcggtccctatcccatcattggcagggtaggatccgcagcataccgcctggaattaccggaatccatgtccaacatccacaatgtgtttcacgtatcccagctccacaaatgcctgcaagcaccagaaagtcacctcgaagaagagacagtgcagattcagaaagaccttcagtaacgtgagaagccagtgaagattcttgattccacagtcagaaagacccgcaccttggaggtaaagctctgtaaagttcagtggagcagagaaggagaagaggaagctacctgggagagtgaggactccttgaggagggaatacccttatcttttctcaaatccagtctaaatctcgagggcaagattcctttaagtggggtaggtttgtaacatcccaaaatcccaaccaaggtttgaaaccctaacctccaaatccccccttattttatttttctcccttaaactctacccttagaaccccttctcatgtgcatacacttgaaataattagagcacctcacatagac

SEQ ID NO: 107009 - DNA, 313 bp, Zea Mays
aagattgaaggatttgagcacataccaaagggctttttctacttcggggaatacatggaggatccaacaacagtaggacatccagtggcaatgcaaagattctttgctgacacaaatattttcttgttctggtcttatggaaattcagcggacatcaaggagtcatatgtggctaaatgtgtaaccaatgttgtgacatctatgggaggaactgtccagagagtgcttttacagcgacgatttaaatatttccctcatgtcagcagtgaaggtataggttggcagggttgcctctgattatcaagtaattcaa

SEQ ID NO: 107010 - DNA, 741 bp, Zea Mays
attacacagatccaaagtgcaaggattggagaagaagcttgatgaagtaactgaaaatttcaatgtggaacaaacaaaatgcgagatatctgatatggaatgattaagagtttagaaaaatgttgaggagcttcgtcatgctaaagaggagtgctacaaggttgctatggaatgttgtaataatttgaaaaatagtgttgctaaggttggcacattctcttcatagcagaactttatccgtggtgatcctaaaggggttatccggtggattagcggtgaaatcgaagcttttgatgagatactcagcgatagaggagacttctgcgccttcgccggtgcccggggtgccgtctcactcctcgagaaagctggttgtgagcatgcaaaggctgtaactcagccataattctaggtctcggataatgacattaagaacccttcagccgaagccactgcaagtggaaaattttatcccaaaatctggttgaaagatggccgagagatagccgatgaagctatcagaaaaaatgaggagtctcatactgccttggaagaggcaaggaaagctgaagaagctgctgagcgtgaaagacttatatgtatacttgtcatgatttagcttcgtaaattgttttagtttcgaaactaataaacacttatactattgtgcagccgaactttctccccctccggagccgtatgaccctgaagccaattcatctctgaagggggctcttgaag

SEQ ID NO: 107011 - DNA, 365 bp, Zea Mays
gtttcttaaatttgaatcaatgaaacattgcccattgcgggactgcagttgtgcaacaaaagtctcatctgctgtgcatatgcacagtactgaaatttaataaggatagatccatccattagctagtatagtatgtgtccatctgcagtgtatgtatgcgcaagcgcatgtttatattggaaacaaagcatggtaggtatcagtcatgtcctaaatcctagccgaaacgaacaacattcagtgaaccaccgtgttttattttagagccagatccaaccctaatcaagtttgagtgaaccagccggatccattgaacttggcctaggaacagaaccgtgtgtgtttttaattccagataatcgaac

SEQ ID NO: 107012 - DNA, 565 bp, Zea Mays
aaacctcacttatcttatccttgattgttttctccaccttgccatttcatgagtctttccttaattctatcctttgtcgtactttttattgatatcatctttacctttgtcatctctacatataaccttgttgcttattgtatacctgccctataaatttcccttttccatctcaaattgagagttgtatttggcccattttcccttggatgtatcctattctttgccgcttgaactttcaactccatcgtttaatgtgttttgtttgatatcgcctttacccttgtgaccctaccttgcagcttgatgtatgcctgccacttaaaacctcccttctcccctctcaattcgagagtggtgttttacttatctcgcgcttggtcataacctcatccttgccacgtgcaaatcttgtcttagctccattattcgttgtactcataccactggcccttcaatgccttcatcttttctctcatacccttgtctgttaccgcgtctgacccttgcaatatttatgtcttctacctaaattctcaccttaaacttatcctttaaaagcctc

SEQ ID NO: 107013 - DNA, 643 bp, Zea Mays
ctctaacgcccccgattagatcgaaggctgctcaacactcccgccgcccgattaggatccaagagcccgaatcgtcccagcgatacatccgtcctacggttgatccgggccgttcccttgcaatctacgttctggatttaaaacactcaagaccgcatctgcaccaactatgatcaatccagtggcccagattacttctacaccgtgtcatgctcgggaccgtcgatcagtccatcaaccgcccacaatgtctcttcctaaccgaagtgcccaggcagcaaagctccgcccaatctccgatgagctcgccggagaaatccaatccgccgcgctagtggataattcgcgcccgcatccacgtagaaccaaattcactactacccaatccgattgagatgagtgttatctcggattgcggtcacagcgacacggaccaccatgatccgcgactatggtgtagcggcggcggtgccatgaacattcgtcaacccggttcgctaacgagtgaatctctacgcgaagtacgctaccaagaacggaaatcttaacgagactgtacgaggggctctcaccttaacggcgaggttcattgacgacgaagcactgactgcggcgaggtccggcttcctgcacacacaccgcc

SEQ ID NO: 107014 - DNA, 328 bp, Zea Mays
tagatgtcatcctagggatgaactggctagataagtaccaagcaattatcagctgtgataagaggacagttaagttggtgtccccactaggagaagaagtggtagccgagttaatctcacctgagccaaggaaaggaagttgtcatcagatggctattgatagcaaggagccagattcactcgagattatcaaggttgtgtcagaatttctagatgtgttcccggaagacttaccaggtatgccacctaagcggaaagttgagtttgctatagagcttcttcctggcaccgcccccatttctaaaagagcctacagagtgtctgggcc

SEQ ID NO: 107015 - DNA, 522 bp, Zea Mays
aagaaggtaaacctgttgcctacttttctgaaaagctaaatggtccacatctgaattactcagtttatgacaaggagctttatgcgttagttcgtgttttggaagtttggcaacattacttgttccctaaagaatttgtaatccattctgatcatgaagctttgaaatatcttaaaagccaaggcaagctgaaccgtcgacatgctaaatggattgagttcattgaaacgtttccctatgttgtcaaacataagcgtggtaaagataacattgttgttgatgccttgtctagaagatgtgcgttgattacacaactagatacaaaagtgcttggtttggaatccattaaaacactttatgctgctgatgctgattttaaagaacctttctctcgttgcattgatggaaaaggttgggataaatattatgtgcatgatggcttcttatttcggactaacaaaatatgcatcctagcttgttcgattcgcctagttcttttgcaggaagcacatgaaggtggac

SEQ ID NO: 107016 - DNA, 613 bp, Zea Mays
gtgagcaattggagacatggcttggtggtttggtgcttgactaccctacggacccgtcggtgtgcttaatttatagtgtgcttgagcggtggtgcttaatttggatgaattgcgctggcgaccgagaggggaatgagtcacgatggcgatctactgtgacaatcgcagagcgactgaactacgactgtcattggatggtcactacggctcataccgacgcgataaacttcctaaggcgtggcgtcctcacggtgaacggcgaacacgccggtgattgccgctcggccacgtcgccggtgtgtactgatgaaccatcaagcacacagtacattccagcccatccgcggcaagatctttcaccccgtgatcgttatcatcgtttaatttagcgtgaatcacggcgatagcacgaatccgcgcgcgtggtcgctggcggcgaggtctctgacctggcgatccaatccggtcactgtaccatcgtgaagcttcatcagctggcctgacagagcatgcttgggatcgattttgctctatattttatgtgatgactcaaccaatactctgcatcaaagtcgaagcctgataaaccagctctaactttgttgcattgtgc

SEQ ID NO: 107017 - DNA, 481 bp, Zea Mays
gtagtagcttcggctgcctctttagcaggggcaggagtcaatacccttgttgtttccaggacggcgtccagcgcgctagccattctcctcctcttgggagttattgcgggagcctttgataccttcggcaattctggctctgctggtgggctcaagatttttggcagccctactgttttctctagctctgtctctttggccgccttttctttggcttcggcaccatgtcttggcgtttcgactggcccggctgcaggaaccttcggcaattcagtcagttcttccctaggggtggcaggagcgggttgttctgcctcaacagtggaagatgttccttctccaagttttggcaatatggttgtttcgatgtatcttggctggtgcattaagaccttgatctttttgcccttcggcacaacagagatggccgaagtggcagttttccttttctttccccgctttcgcgagggatagctataat

SEQ ID NO: 107018 - DNA, 420 bp, Zea Mays
cgggtccttaatctagtgctagttctcactcgagtcctcgaactaaaaatgcgaccacctgggtcctcaatctattgttgcactcgactataggtccaaaacaatgccatgccactgtcggttgttggccatgccgactaaagttgcaaaaaaactccatctctctccccttgcaaccccttctctcttgcacacctctcttggtttgttccatggccattgagcatgtgccttcagagcgcatgcacagctacaaggccagcgggtggtgcagacaaagcatgcaggtctagccacgaggcagaagcatgatcattgagagacagaggagggagtggacatggtggatatataggagggaggtgttttttcggcaagtttcacctggtctcatccacgtttgcacaaccacattggcca

SEQ ID NO: 107019 - DNA, 583 bp, Zea Mays
atctatgcgctgagagcttcggcagaggcaggagctgatgtctttatggattccaaaacagcgtctaacatgctagccatcctcctttttcttggaatcagtgcgagaacgcttgatggcttcggcaatcctattgtacctggtgggctcaacaactttaactgatctgctgccttctctaatttcagctcttcggccgggtttgtactagcctcgactggcacagcatgacctggttctgtggcagaaggggcaactcttgaacgttcaataagctctggcacatcggctgtctcaatgtgtcgtggtctacatgtcaagaccttgactttcttcaccttcggcgcgctagaagatgccaacgtagcagttttccttttccccttttgtttgcgaacaggaaaacagtagtcagggtagataaatctgataacattgaaaaccctattcagtttctttttccctcgagcgccgaaggcgactgtcatagcttcgtctttagccctcgagtaggctccaagcagctcatcacttgtcgcctctatagcatccaaccaaacatcatttggctcatcaaaccgat

SEQ ID NO: 107020 - DNA, 652 bp, Zea Mays
cgcgctcaagattttttgtgtgccagccaatcgaaactggagagggagaacggacctgctggaaccgtttcctgttcatgttcctgttccttgtctctgtcagaccaattaacgtagcatgcaacgcccctccgtcctctgactacaagctctttctctttctctgaggcagcaaaacgataatctttttgtagatcctcttttttatctcctttttttttatcgcagtttgagagaggtttctacgaacaatgaatgccaccttcagtatcaaacccttgatcacatcgtggaggcatcaaaaggtcaactggaaacggtcttcaccttccggtaacacggagtcaacgacgctactcgcattgtgttgtgtggctctccccatcccccagaaccccagccggtgtgttgaaccagcagaccgattcagcggcggtttactagcacggttgacccagtgcacagtttgtatatgtatgatcacatatctccacccccccccccccccccccccctcctattaggtgctaaatttcgggagttttttttgggtagagctaatgtctagtcgactaaaaaaaatctattggttgatttgctaaaaatgactaatagccgaattatcagctagcatgtttagatatcttcgtta

SEQ ID NO: 107021 - DNA, 418 bp, Zea Mays
ccagtgcacccccttctctccgaccgccaccgcgcgatctcaaattcacgggccaccgctgaagggccctataaattgagcacaccctcggctccgctatgtaattgtgcactcaacacacccacccgtgcctccaattactcaccagagcccccgaattgctcagttcccccaaatcagttttccgccaccgtgaacaagctctcaccgtggcccgtgcactccaggtccgatcttgtcctctgctctcttgtttcagcacccttacatgcccctgatgcttctcgaaccgaccgattaggctagaaccccttagatccccggaaacacttcatgatgtccattgtgcccgccgtcaccgtggacagggtgatgtagagctcaaatctagcaattaagtgaggggaaatagtcgcgt

SEQ ID NO: 107022 - DNA, 617 bp, Zea Mays
tccaggtggcggggccgaggtgcctctttcagtcagtggtctttctctgatgcagtggatgggcatgaagttggattcttttgatggcagtggtactccggtcgaggcggcagattggttgacttatgtggaggataagatgaatgtcttcgagattgcttatggagatcaggttcgctttggcactcagctgctgaagggagaggctcagatttggtggagaggcgtgcaggcagcgcactcctcctcaccaggagtcctatcctaggatgttttcatcaggcagtttgaaaggagattctacccggtcacctttctagagaaaatgaagattgacttgcagtcctacaagcaggagaagaagtctgtcacagagtatgaggtgggcttcaacaagatggtccgctttgtccctcatgtggcttataatgagttggagaaggcaagccagttccgtcagggtctgaagccttctatcaggcatgcactggggcctttccgttggtggacttccgtaccacggtggagcaggcgctgggtgtggagatgcaacaccactataccatggagtcgcagaagtcttcgggtgttgatcagcctcgtagccaggacacaag

SEQ ID NO: 107023 - DNA, 395 bp, Zea Mays
agctcgtggccaatacagaaggtggttttgtgggatatggtgagcagcatatgtggacacataagtctggcttgactcggctcccctattatgacgacctgtcgttccacacaacaatgacgtgatgcacactgaaaaaatgttgccgaggcaccgtgggcaacaattatggacattcctgataagccaaaggataacgtaaaggcaagagtggatctggcagcgttatgtgatagaccaaacctagagatgaagccgccaagtggcggaaagacgtggagaaggcctagggccgatttcgtcctaagtagggcccagaggaaggaagtacttcagtggatcaagatgttgatgttccctaatgggtatgcagctaacctgagtagggggtgaac

SEQ ID NO: 107024 - DNA, 395 bp, Zea Mays
caaatttacgcaaaagcggcccaaacgccgtatcgggagatgctacacgtagctaggaatctagtgagcttggcaagatcttcttatcgagggattgcgcggcacagaggaccactgccgatgtcttgcggcccggcggtgctttcccaatcctggcgagcaattctgcttgtatagaccgcacgtaatcaccaagctcttcctcacgatgctcgccgtgttgcctcgaacgctgagggcactccacgaaacggataaggggaggagacaccgattcctagtggaaggtttatcctcggaccgcttcacggctgggagggtcgacggctgggtaaacagaggacggggtgttcaaggggaatgcgtgaaatgcccaagagcctcggcttttaatc

SEQ ID NO: 107025 - DNA, 295 bp, Zea Mays
gccatggggggcattctggaatacaggccacttaccaaaggatcaaaaaactgttctaatggaaggggctgaaggtggatgtcactcactttgtccaacagtgtttaacctgtcaacaagccaaaccagaaaggacccatcccacagggctactccaacctcttcctattccacagggtatttgggcagatgttacaatggattttatcgacgggttgccaaaatccgaaggttttgatactatcatggtagtggtggacagattcactaaatatgggcattttcttccactcaa

SEQ ID NO: 107026 - DNA, 441 bp, Zea Mays
cagagttggataagtttgtggtcgttttcattgatgatattctggtctattccaagaatgaagatgaacatactgagcacctgcacatcgtgcttcaacggctgcgcgatcatcatctttatgctaagttgtctaagtgtgagttttggctgaaggagatcaaattcttgggtcacacaatttctcaagatgggatatcagttgatcctgagaaggtgcaggaggtgatggattggaaacccccgtccacagtaaagcaaattcggagttttctgggcttggcagggtattatcgacgatttattccggatttctccagaattgccaaaccaatgactgaactgttaaagaagggagtcaaatttgagtggagccaaaagtgtgaagatgccttccataccttgaggcagcatttgacaacagccccagtgctagctcaac

SEQ ID NO: 107027 - DNA, 840 bp, Zea Mays
ggtctggttcgattgaaatataccttcaggtttggagaccagtttgtcgaaccagatgatgactggctgaagtgtgttgaaaatactagtgatgagctacttggagcatactccaagtctaaagataatgcactatctgcggcattcgggagctgaaaaaagaaaagattaaatagggtttttgatgctattggattcgtgtaccctgactatcgctacccgccacaggggcagacaagaaagggtgcaacttctggaaaggttgctgcttcggctgctccaagcgagcttgcgccgaagaggaaaaggttgatggtccttacccacccacactacattgaaccggccatagtgcctgagtttggcggggaaacttcttcagctcctactccaaaggaaccaattccttcttcacagaaagctgaggaaccggccaccttgccgaaggcaaccttagccaagttagctgagccgaaaactgataaagctgaggagtcaagaatcgaggggacaaaaatattagaagttttaagcccttcggcagaagtgacaatgccgaaggcacaaaaaggtcttgcggcgacccccaagagaaaaaggatggccagtgtactagatgtgctagagacgataaaggcttcaagctctactccagggaaaattgccaaggcttcgaaagtgcaaattgaaaccgaaataaaaccgaccgaagccgaagcttcaatgagccaggctagcgacgaagctgggccttcagaacctgccaaggagaaacccttggaaactggagaaaaggcaccagaggaagaagctatagaacatattttgcttgaaaaagtt

SEQ ID NO: 107028 - DNA, 367 bp, Zea Mays
tgcggctccggttcctcaacggcgagcgcgacaccaacctaatcggtcggcggccttagcacaaaacaagagaggactagcgacggattagtggattagagaggagaggaagatggagattggagattacctgcgcagccggagcactggagaagagaggaagatggagatccaccgacgacagttagggttagggacttagggttagggttagccgttagcagtagctgcttggggttgggagtagccgagtagacagtagaggtagatccacaaccacagtccacagaacataggagggagagaagaggctctggttcggcggttcctcaatggctcaactcaactggcgatgcgacgaccggac

SEQ ID NO: 107029 - DNA, 982 bp, Zea Mays
gtcgatgctatcaagggcgaggccatgctcgggcgagacgtaagtcgtaccgaggccatgaccgagcctgctctagggcatgcagtcatgcagggaacagttaaaggagtggcctcctatgggattcgtggggagttgttgccggggcagttggttgaagccaggctcaggcgagacgaagttttctctgaggctgaggctgaatgcaggcgaggcggagtttcctcccgagggtgagaccatgcccttacgtacacatgccccgtttggagttgtctgagtttagtagaggacgtggaggagcagtggccgttattctcgggcatgcgtcatcgtagttggtgaaagcagaggggaccgcggtcctgtcactcctgtttgactgcggcgtcacgtggggtaggtattcacattgaatgctcatgtcttcgtggttcccgtgacctttgactgagggcggactcagggttgtcctcctgtccaagatgagctcaggcaagacggaaacaaccattccgtgaagaggggacctcgggcgggacgaggatttcctagagtgcaggctgagacgaggtgaagttttgagcgaccgccgagtggggtttcaggcgaatcatggctcattcttttttgatctcggagaatgtgtcttctatagtttaggggttaagcgtgtttaggatcgtaatccagatacctctaattacgatacctgacactattcatcattcattatcattttttcttaactaacaaataatggcgtgcacgaaaatcgagtaaagggtgtcgtttagcacaccccttgatctggcagttccagtgcctctccatagcactgtagaccatttaggggcttgcgctgcggcgtttggcggggcactataggacctgattggttcatttccccgttgagtcttgctcacatcccaggtataagctctcatggaacactcgaagcatgcaccaccttcttgtttgg

SEQ ID NO: 107030 - DNA, 451 bp, Zea Mays
ctcgcgacggagaggaagccgaagctgctgaaactgcgtctatctccgaagttatgaagcggtcaggattgattgtgactgaaagcccttgtgacgaagaagcacccgctgctgaagtcgacagacagatattgaaaagggtgatgctagagaaggagatattgattatgacattattatgccatcgaagcccagccatctggattttgggaaatcaactgtgtctgaagctgatatgactatgatgacgaagctaggctacttcaaggaagccgataaggggttggttcgctttggcggggaagagactatcccgaaaccggaaaatgatgaagtttttttaagagcttcaaagcagggttgagatttcctctgcacggaatgattgcagaagtcttggaaaaattcgggatttatcttcatcagctgacccccaacgccattgttaggc

SEQ ID NO: 107031 - DNA, 494 bp, Zea Mays
ccaaaaccgaccgtgcagcccactaacagcggaggaactggccccgcgtcggcgctgtgcaattttgcgcaattaccctcgttgcatcagccaaccgaataaaggtcctatgttctatttaattgtttcactgaccttagcactaagatccctgtcttttttcttattcacaaactcaagtcacgatagtgactccggcgaccctaagccgggcacgaggttgcgcgctcacgacaagcccacgccggccatctccggcaaggatttacattcttaaacatcacccgagcccggcccgacctaacccgtaagcgattcggatttaaatagtctaggctgcccagatcacggcgacggcggacataccaaactctggcgtgcacgaaccagggtctaggacctcgaagtgttccattcacggttatggtgagtctcagggattggtctagtgcactatgcccacatagatttatccagggagagtacagtttaat

SEQ ID NO: 107032 - DNA, 920 bp, Zea Mays
tggagctggcaaactagggaaaagagaaggaagggaccaagaagaagggtagcaaggtggtaccgttcaaggttgctatggggaactgagtcattttttaatattttggtgggtttagtgcgtttgtctgtgggtcgtccagtttgtaatgaggactgcattgtttggcagtttggcgtctgggtagtggatcccaattccttggctaccactgcatgtgtatccgtctgttttcagtttggttgtaaggtgtgtgttgttcctttctagaacaatgatgcatgttgtctatggaaggatggtccgaacctgtgttcgttttactgtcttcctattgtgacatttttttaagtagaggagccccttttggttaatgagtaccaactgcactattctctcttggaacataagggggttgaatgacccagctaaacgggaaaatgtgaagcaaccaatcctctcatcaggagcaaccatcgtttgtctctaggagacaaagataataaactggaataacaacttgctaagggaaactgtgggctgcaagctagcatcttagactgtccatttgccatctctcggatcctcgggtggaatcctaattgcctatgtgccgattattttgacataaatattatctcttatgcatcagcttgttcaatatctgttcaaatcagttcccgcttggaggacgcggagtgggacctcatatgagtatatggccctccacatgaaaatgagaaaatagctttcattgctaagctatggaatatccgtaatatgatgaactctgaaggatgattctaggtgacttcaatatgataaggagagcgagggagaaaaacaaagggtcaatcaatagaagagtaatgagatggctcaactccataattgactctctacagctgctagagcttgat

SEQ ID NO: 107033 - DNA, 298 bp, Zea Mays
cacaagagaaatatggcacatgaaacacaagatgagacgatcgagaggtcaaacgacgtgaaaacgacgtttgaaagataaatagtgccataggaggtttggattcgaattgaggcacgaaacgatatggaattgagccgatacttcacgaataggtttatgtagatgaatatgagtgaagtgtgtgcttggtttgaatttaggcgaagaaaaagaaatttgtgcactcggctcggaaacgatcgctcgaaacggggaatttggtgaaatttaagcctggaatctcggattggcgtga

SEQ ID NO: 107034 - DNA, 457 bp, Zea Mays
ttctattccaattttgtgattgaaaaattgggtgatttggggttctggaaatcgcctctagacagtcgtggacagtctgcccgggtggcacagaccatcctgctatggttgtgcggaccgtctagccccctagcgcgaaccgtctgccttttggctgatcaactcattcaacttgcaatatttccagtgcttgtctactgattgctgggattcttttatatgttattaacagtggtattggtggtctgaaaagaagttagcgaggcagtttctgtccaagcgccatcgtatagatgacacaggctacaatcctgccactgattccgaggcccaatcttcagttgggggccacgtttctttggataccgaggatgcacctcatacccatcctgactacccgattgacatcacaggttggacttatccaaagatgggattttctatggctgaatattcc

SEQ ID NO: 107035 - DNA, 653 bp, Zea Mays
atgagatcaagtagtacagagatgcaaggtgggtgactcctccagaagcgttagggaggatatacgactttgagcttagtcagaactctccacatgtgatgcaactgcaactccatcttccaaacctgcatatggtggcatttcacgaatgacaaatggtcgagcgagtcgtcaaccgtccaggtgctgataggtcaatgctcacggcatattttgaagcgaataggctacatgagggggctcgtggcatcctttattgtgacttctctgagtggtacacttggacacttggtagagtggtaagggaaaagtatggcaatggaggaagcgtgatacgggtggacaagtcggtagaatagtctctactcttcctgctaagggggagcgctactatctccatgttctcctaaaccacgtgacttgcgccacctcctatgtggatctaaggacagtagatggtgtcatgctaccgacttttcgtgaggcagaagagagaaggggactgcttgagtcggacaacacactagatgagtgtctcactgaacgtgctcttttccagatgccatcggcgctgcaacgactttttgccataatactagtgtactgtgagccaagcgacgtggcagtactttggcagaaacaccgagatgtta

SEQ ID NO: 107036 - DNA, 562 bp, Zea Mays
tatgaaactaaggccaatgttcttccagaacctatttttttcacttatcaggtttgttcctcttggtcgccttcttggaattgatgttcgaatcagaacacaagccttatatcagattattttaaaaaaataaattgaagcttgtcgaaaaaatagtgctagaataccaggaaaacactttagactgctttgacaaagcttcttgcgccggcaaaggcaacaaataaaagatgtttagcgatgtcaagaaccaaatttagattatacaccagaaacaacataagcagctttgaaaaaaatacattcagatagttttataggccatacactctgaattaatttagcactgaattatttcaatagtggattaagcatactaaaattgctttaggcactgtagtgcaacccaatttaaaatggttgcgactactcatacctttctgcaaaaggggaaccttcaatgtcgactctcggttttaacgtgtaaacatggtagttataagtgtaaaacatcctaaagtacatgccattggtctgacatctttttaataattttagcttc

SEQ ID NO: 107037 - DNA, 317 bp, Zea Mays
ttaaaaatctgtttctcctgaattggtatgtgggccaccatgtggtatccgttggtggaatggcttatcaaaaggctgtcctgtttttggcttaaagcctaagttatatattttttatattgccagttttttaagccgccagaggcagcggtccacatacccctgcgatgatttttaggttctttagtttgtaagctatccatacgcaagatactaaacggtatgcaaggttgtggctattattattttctcccactcatctgtcgctgtctgatgggtggggacgtaggatagataatggacgcattaattgtggt

SEQ ID NO: 107038 - DNA, 463 bp, Zea Mays
gagatcaatgcatatacaagggccaaggagagagcttcggtttcgctttaccgacttatgggaaaatgaatagaaattgggggtatggttgtaatcttgtacaaagttgtacattgagccaccactataaatagaggaacaatgacatgcaagagggtggaatgacagattccttggacctataactgtccatctcggaagtagtattcttgccttcgaattacaacatctgtagcttaaattattgttgtaaccattcttaagcaacaaggaaggcagtataataataattatttacatacccatatctctttaccttgttttcctttaaaatgttactctcgaaaatgaatcttttgtcctcacaacctatcatcatgagaagataaaaagagagggatgaaggtttcaaatcataaatcatgttgtcttgttttgatcttctttagtaatctaaatagat

SEQ ID NO: 107039 - DNA, 384 bp, Zea Mays
gaattatggaaaacttggtatcacaaaaggtcattagctagcccaataacgttttcatctagtagttatactctaataccctctcgtgcgaatacaatgccctcaatatcatagagacactggtttaaatttcaaatgtgttctattgttttgaattttctatattccaactttttagcaaatgtatggtggaaaaaggtgccatacaaccgtaacctatgtttggacaattctctcatgaaatttggctaaatattccacggtctttattttattttggaaaacgatgtaccataatgatgtgtggtgttttacttgagtgtgcacaaataccgtctaggtatggcctgaatagaggggattatgggaaacttgttatcacaa

SEQ ID NO: 107040 - DNA, 669 bp, Zea Mays
gcattaccatcctggcaaggccaatgttgtggcagatgtcttgagtagaaaggcccagtgcaattgtatgaacatggatgcaagagtcaccaccctgtgtgatgagttgtgcaagctgaacctggaagttgtttcttcaggtgctttaaattatatctcggtggagcccacactacaaaagcaaatagtcagggcacagattgaagacaagggtgttcaggtaattaaggaaatgatcaagcagaaagtagaaaaatacaaatgcttccggcaggacagcaaaggaatcctatggtttggagagcgattggttgttcccaaggaccctgagctcagaaagaagatattggatgaggctcacctttcaaaattctccatgcacccgggcagcaataagatgtatcatgatctcagatccttatactggtggaccagaatgaagagggaaattgccaagtacatatccgaatgtgacacctgccagagaatcaaggccagtcatttgaaggtggcaggccctttgcaaccccttcccataccatcttggatatgggaggacatttgcatggatttcatcatgggattgcccaatacctcccggcaccatgattctatttgggtcattgtggataggttgaccaagaccgctcatttcttgccagtgcatac

SEQ ID NO: 107041 - DNA, 429 bp, Zea Mays
ctaccaccatgcagccagagtgcggaggcgatcccgcatgaacgtccatggaagtacaagagggagaccccactcggacaccctcgggggctgggtcacggttcgcactgcccacttgagccggatcatctccggcagtaccctcgggggctgggcagtggcttgcgcttcccacccgagccgagtcatccccggcaacatcctcgggggatgggcaagtgtcaacaccgtccttgagaaccaagttctccgcaatagccgcctctaaggctgatgaaccctcagttacttccatgggaccaggacgatccaagtcagtctcctgaccctcgagatcgcgctctaaggtcgatgaggcacgggatgacctcaatccagcgtcgagcacatcagcacaaacctccatcacaccatcatctgccggctcgg

SEQ ID NO: 107042 - DNA, 494 bp, Zea Mays
ccctcccccgttagaattcggcggaggacgagatctcccactgcaaaggatcgacatcgcatggccttgtcgtgatagcgtctcagagtttgctggtaccgtgctgattgaattactgtgttcagccgttcttcttcgagtacatcaacatcctccagcctagtagcctcggctttcgctatgctttcaaagaccaaccttggtgctccaaacttgagatcagcgggcagtactgcttctgacccatagaccatgaagaaaggagtatttccatgcaaagctcgactaggttgagttcttaggctccaaacgacgtggggtaactcccttatccactttcctgcgaacttttcatttttatcaaatacttttttcctgagtgcctctaatatcatcccgttagctcgttcaacctgcccgttggctcttgggtgtgccaccgaagcatacttgatctgaatgctcttttgctcgcagaaatcgaagaactctga

SEQ ID NO: 107043 - DNA, 382 bp, Zea Mays
ctgaatctggattgcctcttcctcgatgagactttctggtacttgcaggcatttgcggagctgggacacatgaaacacattgtgaatatcggacatggattctggtaattccagatggtacgctgtgggtcccactctgccaatgatgggataggggccgacgaatcgcgatgctagctttcctttcacttggaaccttctgacaccacgcatcggggagaccttgaggtagacgaagtctccttcctcaaaccagagttctctccgccggttgtccgcataactcttctgccgactctgagctttaagtaatcttctgtggatcagggcaactttctccttagcctctttaacaaaggcaggcccttccagtgccttttcc

SEQ ID NO: 107044 - DNA, 306 bp, Zea Mays
acaaattgaggtctatgatccgacactattgtctttggaaccccatgaagactaagaatacgagcaatatataattgggcatagacaacaactggatgatatgtcttgacgggcagaaaatgagcaattttcgtaagccgatcaattataacccaaatagagtcaaatccttttgccgtcctgggtaatccccacaataaagtccatgcttatgtcctcccatttccaagtcgggattggtaaagattgcaatggaccaacagttttcatatgtatggccttgacacatctacaagtgtcgcatct

SEQ ID NO: 107045 - DNA, 668 bp, Zea Mays
agaaatcaaaactttgtcatcaggagcgccggcctctaaggcgacttcctgacccgaagcttgagctgctgccatgcaaccagaatgcagaggagaagaccctacgtgaacatccatggaagtgtgagagggagaaccaactcagacaccctcgggggctgggtcatagctcgcgctacccatccgagccggatcatccccggcgacaccctcgagggctgggtaagcgctagcgccatccttgagggtcgagctctctataacagccacctctaaggctgaaggacattcacccacatccatgggagcagaacaatctagaccagcctcctgacccttaagaccacgctctaaggtcgacgaggcacggaacgctgctcgagataactccagcccggcatcaggcacatcagcacaaatatccatcattccaccatctgccggctctgacaacagatcttctgggaccatatcttcaagagtctgatcaaagtttgtcagagacaattcttgcagaccaatgagggcagacaaagctggagaaggaacaccactgctttccccgctagctatgtagcgtcggctgttcttccgaactagagggatttcatcctcctcttcctcatcttcatcaacaatgcggatggtacacccattggggtcagcat

SEQ ID NO: 107046 - DNA, 813 bp, Zea Mays
gggtgagctcggacacctccttaggcattactgagggtttgaagatgtccctggcgaagactttcaggggaccgtggtccgcccgaggcgattttcgccagttcatcagctacctcattgtacaggcgtgtgacatggttgagctccaggccgaaaaatttatcttcgaggcgccaaacttcctcgcagtaagcctccatcctcgcatcatgacaactcgagtttttcatcgcctggtcaatgataagctgtgaatcccctcggacgtctaggcgtctgactcctagctcgatggcgatgcgcaaaccattgaccaaggcttcatactcggtgatgttgttggatgcagcgaagtggagacacacgacatatcgcaaatgtacgccgaggggtgagataaaaagcaatccagcgcctaccccggttttcatcagcgatccatcaaagtacatggtccataactcgacctagatcggagccgtcggcagctaggtgtcggtccattcggcccaaaagtctgccagggcttgggatttgacggccttcttaggggcgaatgagagagcccctcccatgcgtttgatggcccacttggctaccctgcctgaggcttccctattctggacgatctctcccaaagggaaagacgataccaccgttacgggatgggactcgaaataatgacacagctttcttcgagttaggatcatcgagtacaacaacttctggacttgtgggtagcacacctttatttatgatagcacctcgctaactaagtacaccggcctttggaccagcaaggtgtgcccttac

SEQ ID NO: 107047 - DNA, 419 bp, Zea Mays
ctcttttgcacaaagctgatggaagaaatagctcaactctgaaagcgctagccagacatgctcagggacatagcctcgaaccatcgcaggaagaatccgttcaatccatatgtggaagtcatgactcttcatccctaagactcgcatagtagataagttcaccccactactcaggttagctgcatacccatcagggaacatcaacatcttgatccattgaagtacttccttcctctgggccctgcttaggacgaaatcggccttaggccttctccacgtctttccgccacttggtggcttcatctctaggtgtggtctatcacataacgctgccagatccactcttgccttcacgttatcctttgacttatcaagaatgtccataattgttgcccatagtgcctcaacaacattctttt

SEQ ID NO: 107048 - DNA, 429 bp, Zea Mays
tgttctagtttattgagatctctgaattcctctatcatgtctcccacagaggaatcagatgatctttgtgtgatggcggaccctccggtcttgggggccggatcattcgtaatactgtctttacgctatggtagaagttcggtcttgaagtccgaactgttttgtgaaagaccagaccatccagccttagaagtcgaactgtccgtgaccaaggactcatgaattttgtgtgtactcatcatttaaactttatttaggatttagccgattctccatcggctctagcattataggaatgaaacctttcttatctatacttataaactgataatcagaaaaatctactcctgtgagacatgtagcagtctcataagtccagagtacaggggcatcgaccacagcgatacaggccgatacatcagcatgtac

SEQ ID NO: 107049 - DNA, 810 bp, Zea Mays
gtgtatgggccatacgggcgcgcgaggctgctgttggtatatgggcaatacgcgggacaggcgcggcatgcttaaccgtagctactagctagggccctatttacttaagattaacgctagctgtttagactgatgcagaatgattacccctcgggccatcaccgccccacgccatccgccacaatagatacgggacagctagacagcctcgggtcctactagtatgcgtgcctcgcgggataaaacactgattttacccctaccttatggttccttcccagggaagccaccactggtcgacctctgtcccggtctataaaacgaagagaccgacctccaggcattggggcgaaggagagagctcttggacacaatcgaacaccttcaggcaaagacgaacccacaaggacgaacaggaggaggagcgccgacgaggatcaggaggctagagccccgccaagccaagacttacctacgactccactttacagcttctaagctccacttccaccccaataagagacatgggagcctctcctccctctctcgactgcctgtaacccctattacccgtttgcagctcaccgagcaccattgctagaccatcgagtaaagtgtggttcgcctcacctcacctcatcgttgtggaagatgtgtgcggagagtaaaacaaaaagacaagacgacccccagacggatctctgcatcgagcagaggcttgggggctcgcctcacacgggtatgatgaatgggaaaagccgcacgtatagcgcccctcggaccgagagtaaacctaggaccaaccagggt

SEQ ID NO: 107050 - DNA, 531 bp, Zea Mays
atccctatagattcatcttgccatagttaatatatttatcccactttagaataacaaccatgatctaattaatgaaatattatcaagtctatctagtcatatccaatctaatctagattttatctaatctattatgatctaatctaaggtaagttacttaatgctggtacaaaagataaggccatatccctcatgcacttaaaactaaaccggtaccttaaaccaactcagccacatgcatgagatctgacccaaccaataaagtcatgaagaattgtataatcattccccacctagcgtcaaaccaacttctaacctacatcatgtagtctatctcacctatatctatcttaactatatccccccaacttcgatgatatacactgaccccgactcaatgagacaaagactggaaaaggacaatatcaacctcgtcaaggaaggagagaagtcaagtcaatcttcagatgcattaccactcaacacggaattctttcctaccataaactttcttacccctggctattcttg

SEQ ID NO: 107051 - DNA, 366 bp, Zea Mays
atcccggccgagtgacctctgctactatgaatggtccttcccatagaggtgacaacttgtgccgcccctcccccgttagaattcggcggaggacgaggtctcccactgcgaaggatcgacgtcgcatggtcttatcgtgatagcgcctcagagtttgttggtactgtgctgattgaattaccgcgttcaaccattcttcttcgagtacatcaacatcctccagcctagtagcctcggtttctgctatgctttcaaagatcaaccatggcgccccaaacttgagatcagcaggtagtactgcctctgacccgtagaccatgaagaaaggagtatttccatgcagagctcgactaggttgagttctta

SEQ ID NO: 107052 - DNA, 396 bp, Zea Mays
tgctgaattttgtttcggtgactgaaaacttggttcagttttgggagcaaagagctctccacattgtagttatgctccccatgtgtcagtaatttgaagttgtggttgcagacgtgaagagctggtagttatgggggaaatttcaagccgattcatttgggcaagtggaggcaggctggattcagtttaggcgtggataataataattttaggaaccaaaattaggttttacgttttgtgtcacgttaattcggactggtatggatttaattaaagatttagattcaaaataaagtcaaatatgaattattcaaaacttttgtagtgaactctaataaagttgcgtcgcaataggtagggtgagagaattgtgttggctcatttagaactatttcg

SEQ ID NO: 107053 - DNA, 468 bp, Zea Mays
tccccatcggcttgaccaaaaacagacggggattatgttagccgatgggaatgatcagtattcatgttgtgagtgcaacataatttggtggagaatgagtaaaccctagagttgagccattatgattgcttaccacatgcttgatattagcacgtgtgcttacctatgatgtttaggtaatgaacttaatgtggctgctaaaacttaattggaaaataaagatacactcttagttatgctttcatgcaaaagtaaatgaacgagcaaactaaatggcctacacatccatgggagttaagaaaatatccccaccaaatcaggcaagtcttgtgtagtacatcttgtattcaaggtttgttctacctagttgttgcagatgttaaccctatgccataacatggtgttcgtcctcttgtggtgttctcttgaaagagtgttcttatgtgcttcttctgcttttgtttggtt

SEQ ID NO: 107054 - DNA, 376 bp, Zea Mays
gagaagcgcgcagtcaccagaaattcctcgccgaggttggaagatccgccgtgcgtcgtgggtggcttcattcggctcccatctctggtgagtaaacaccacaccacgttcgctcctcccttactaatgcgtagcacccaacagaatcgtgtttaaggcgctagaaccgagggctccggatggccggcgatggcgccgccgcgcccctatgtggcgccgccgtcgggacagcctgggattggggagctgatcgcggcccgtcgatcgaatgatcgatggctcagattagaagtaggaaacgtttcgggtcagcaaatctgcaccgtacgatctgaaccaggggctgtgattgaaacttacctccattaaaccctga

SEQ ID NO: 107055 - DNA, 785 bp, Zea Mays
gccatatatatgttcaaactccggttcgttgaagcacaaccccattaaatacgaatagctatttgtgtcgtgccaggctgctcaacgagcttaaactcctgaacaagcacagtacgggacgaccaaaatttctaaccatgcctggccaacatggcaagcacgaccagcccaaccctgctaagcggcgatcaagtggccttagggttagtcggttaggttaagccgccgcttccctacccctttcgactgtgccctctcgaaattgggccaagtatataacctaattagtaacagttcgtgctcaagctaactcaacagatataaaacctaaaacaggcacacgtttcttgtgctggcgagggctaggcccacatagagccaggtcgggtcgtgccaggctcaaatagcgggcttcgttttgggttcgtaggccacatgcttgttgggggcatgtataccgtctattttgtgcgagaactataggtgaccagatgtgatcgagctatatgggtcagcatgatgcaccgttttggcatggcacggtcacgaacgacacgatagtaaccgtgctcgggctggcacgagacccgtcatgggtcatgcttgggcttgagtacaaacccatcgaacggctcgggcatgacccatttactgtcggcctatttagcccgatgctagccatcgatagcctatcaaaccaagcacgacctaacacgacatgtttgtgggccaaccttacctgtcttaatctagcctaccatatatacaaatatgaccaagtcgac

SEQ ID NO: 107056 - DNA, 478 bp, Zea Mays
cgatcaccggcgtgaacctcgttgtggtcatgggggcaccgccgcgccgctgaacaaggtagggggaggttgcgttaaccgtggatcgaatcgcagacggttcggatctagccatgcgtgccttctcgcacgatcatatccggaccgtaggattttaaatgggcggcgtagatcaggtcttgtgtaccccttcgtctcgaaggattcgggcggtcggatctgaatcatgctgtttagatctgggccctgctttcataaaatcgggaccatcgatccgtgtttctgcggctagtgatgctcaccatttcactagggtttagatctaatcctaggcgtagaatcagatccaacggctgtagtcgcttcataccccttcgtttgccttatttgctaaagagaccctgacatgcactggaatcaacccgcggtccattgtgactattcactgagtcttaggaatcttgcgacttagcccctg

SEQ ID NO: 107057 - DNA, 397 bp, Zea Mays
cctacatcgaaggacagaaggaaaaggaatagcttcagaaaatacccaactattttggcaaaagaattggtgcatagacaaaatttccatttgtacacagatatgatgttcaagttcctgtctgttggagagctgaatcaaagcttgttttagttttttgcctcagcaaaatattccctgtctgttgagtgcgttgcaatcttgctgggctttgctggactggttgctgctgcttggcattggtcagcttctaaaaaatttcaaaatgaaggagatggttattggtactaattcatgactaagtttactgctgacgtattttagctgtcagagagttcattttgtcactttcaatcattccattgcatttcatctccttcagtgcacagtatggcag

SEQ ID NO: 107058 - DNA, 405 bp, Zea Mays
ctgaacagacaacacaaacacacaaacagagatgcacggttactactgggtattgggctactgctatcttccgggcgctgcagaggtaacaaagggaaagggaagggagactggaaataatcagagaagggagagcaagtgctaccttcagatgacgagctcatcttcaattcttgactagttgagtagctgacagacgccggagcactgacgccgctggacggctggagcacttggaggctggaccgctggagcagagacgtcggcaaggacagaggagaggagtagggttttctggcggctgggaaatgttctggcggctgggagggtttttgaaggggcggctactgtagatgggccaaaaaccagagggaagcccagtaccaaaagtccaaaactgcaacg

SEQ ID NO: 107059 - DNA, 304 bp, Zea Mays
gtgcacattgctagtttgggattaggagtcatcaggacaacatattccacaccagaagagcattccatgacaagttgccaatattatgtggcacctaagacagcatattccacaccaagagagcattctacgacaggttgcccatgtctgtggcactgagtaccttcacaacaagatgtgaatgttcatggtgctaagaacataagaggcatatagtcattgccacagtcctagagctaaaaatgcgatcttccatgtcctcatttcatcattgttaaaaaaaatagtcgtagtctgatgcatg

SEQ ID NO: 107060 - DNA, 978 bp, Zea Mays
agaaagaccataaatttgtgtggaccccaaaatgtgaaggaagtttccaaatcataaaggagaaactcacaacggcacccgttctatcactgccagatattcatcaagattttgtcgtcttctgtgatgcctcgaggcaaggcttaggttgtgtgctaatgcaaaacgagagagtcattgcttacgcatcacgcctactcaagccgcacgaacagaattaccccacccatgatttggaattagcagccatagtgcatgccttgaagatatggaggcattacctaatcggaaacaaatgccacattttcaccgatcacaagagtctgaggtatatattcactcaaccagatctcaacctccgtcagcgaagatggttagaactgatcaaggattatgacctagaaattcactattaccccggaaaggccaacgtggtagccgacgccctcagtcgaaaaccattcggaataaagggaaccaactttctagaagattggaagaaagaatcagcacaactaaatgcatgtccgggaatcaacgacgatctcgaagtcaaaccaatgctagaagacctcatcggcaaagctcaacgtctagactcagagacagcaaggcttgtggagaaagcccgcaaggaacaactcccggacctcaggacagatgaccaaggagtcgtttggttcaaacaccgtctgtgtgtaccaaaaggggaggcccgagaagtcctactcaaggaagcacacgactcggcgtactccatccacccaggaactaccaagatgtacctggacctcaaaaccagatactggtggaaagggatgaagaaagaaatagctcagtatgtggcccgatgtgacatctgccaacggacgaaggccgaacaccaaaaacctgcaggcctattacaacccctcccgatacctgaatggaagtgggaagaaataggcatggacttcgtaaccggactgccccggacgc

SEQ ID NO: 107061 - DNA, 347 bp, Zea Mays
gaatcctaatgaagataaagtggatgatgtcaacgataagattccaacctcgacagtggtgaaaaggaaggatgagtcacatagatatatgctgaatggaatgaagaacaacaagaggaccagaaaaatgtttgggtacaagattaaaccacctcaatcgcaagcagaagcgccaaagctcgtgaatacccaaacaggagaatcaaatcaagcttagttgttcaacatgcacgcaaccgatcaaccatcatctgctagcaatcaagcaaagctgactcgcagagaggtcaaagtaagaggtgcttgtttctactacaaggaagaagggcacttcatttgccaatgcc

SEQ ID NO: 107062 - DNA, 438 bp, Zea Mays
tgcgggattcgactctcctgcattgaacttatgaactccatgtattcaggatcatgtgtcttgttgcattgtaattgattcttttcggtatccttcttaaaaaattcatgattatgatccaagtgcaacagatcaatatgcactgatataactgtctcttttgcatcatcataaaattttttaagtttcataccggccttgcattgtgtccgcttcgagctggtattatgtacttttgggtttgatattccccttactgcactcttgccttccatcgagcaattcaaccacttacaatttttccgttccttatactttttcaatggaaatccaacatcatacgcatacctactatacagtttatatgcttcatccacaccactgaatgtcataccaactttaggtaccaacctcggatcaattgtaacttcctgtgca

SEQ ID NO: 107063 - DNA, 558 bp, Zea Mays
gggaattctgttacaagagacacaccagagctagcctcgaggacgcgctgggacagtgatggctcagactcggagtggatcgtgcctgtgtactactaacctggaaagaaggatcggagcagagtagccttcaggctcatcagtggtagatctacataagccagttgctgtgaggcagtctaataatgtgaacatatgtggttagtctcggtcttatgtgactcatacctttgttttgttaaataatagtgccatccatgttatgcttctttactcatagttttatctgtggttctcgtagctagggaatcgaatgcctacgatgcatacaaatagttttcagtagcagtattcaactcgtacttccccaagagaacatgattctagcgagagagcgagagggagagagagaaaactgaaaaaggggatgccattccaagcacatcagcgatcatcatcaaccgttattttcgtctcaccccccctgctgctggtgctgctgccgcctaacccgaaacatgccgactaggggtcgcggtcgccgttctcgatcgtcaa

SEQ ID NO: 107064 - DNA, 792 bp, Zea Mays
aatataaatgagatttagataaattcaatttggtttcgattaaatcaaaccctgtcacaagtaccgtcgacccgtatcgttgtgatctgatccacttataccctgttcaaaccctaattttagagctcaggtttgtattcttttgttgaagaaaatagaagaaagatctaatttctcttttactaatcaccagccctatctccagccgcttgaggcttctagccttttctgtagccggcattgtcctctcaagaatggatcacataactccttaatggccttatcctggtgtaaatcactcaacaggagattctctccccatccttatcctttcagccgccatggagcccagttttcctcccccacacgtgagatcccttcaccagcatctctcttcctcaagcgccatccctgacttctcccatgctgagcgtctccaatgcccaaacctccatggccgacgtcgccctgctcaggtccaactagctccccttcctgttgttgtgtctagctgatgcccctccctccatcttcctctctgcaacaaccctaccatggttgtgcccctacttccatggtgagctcgccccagccccaacgtcggacatgtcgtcgccctcacgtccagctcttccatccccctggttccctccctgctccgaccaggtttgccaggtccgaccgttctactcgtcgcgccctccccacgccagcacgcgagcgccccctcccgtccctgctcctctccatcgacgcccaggccgatgccgagctcccagcccctcccgatgg

SEQ ID NO: 107065 - DNA, 803 bp, Zea Mays
aaaacaggcaagaaatctaagcctaagcccctacctagctcaccaaatgttggactaagaacaagccaatggcataggatttggcgctagaaggagggcacgagggaacacaagggttagagtggttcgggttgctagagcgtaataccctacatccactatgagttgtattgcctgggagtctctgtgtttgtcagtgttcgttagagaagccttagttggccctctacgagaccgagttctatcgtgtgtgtgccctcccttttaaaacccaagcaaggcacgtacatggtgaccaagccccgacatgtgggacaaataatctattgctatatatggagtaagtggagtggcagttcgtggacaacgaatatcttctcctggtcttcgtatagatcttctgtcttgtcatgtccttgcctcgtctaatcggagcagtgcgcagaagtaggttgtggcgtaggttgatgcgctacctcatgtaggggtgctcaagcgatgttgtcctgtcttcttcgactatttccctttacctcggtaatgtgcaggttatagtgggagtcataatgacagcagcccaagcgacacagagagtcaatggtcttgcctcagtaacgtgcgagttactgtgcgggccgtggacgcactgcctgccactgggttgggcatgtatatgtctcgtccacagttaatgcatatgtgcttcacacttagaggcagacgttaggcctgccctgatggcttacgtcacgcgtcataaaacacgtggcagcaccaggcctcgccttgtgtggggagtagtg

SEQ ID NO: 107066 - DNA, 640 bp, Zea Mays
aatcttgggaccttcacctacagcatgttcgaacagtcttttcccttttgcagcaacataaatttaaagtcaagctttcgaagtgtacctttgctcaaacaaagttatattaccttggacatgttattagtcaagagggagtggcgacagatccggaaaaagttgctgcagttcagtcttggccgaccccaaccaatgtcaaagagctccgcagttttttgggtttagctggttactacagaaaatttgtaaaaatttttggcatcatatcccgccctcttacgaatttgttgaaaaagggagaactttacatctggcatttcgatcatgaccaagctttttagatgctcaaacaagctctggtgaccgccccagtccttgcccttcccaactttactcaaccatttgagattgaaaccgacgcttgtgagcgaggagtgggtgcagttttacaccaagctggacaccctattgcttttatcagcaaagccttgggacctcatcataggggtctttccacttatgaaaaagaatgcctagctatccttatggcagtggatcagtggcgatcatatctaattggtgatgaattcattattcggactgaccatcgcagcttaattcatttggatgatcaacg

SEQ ID NO: 107067 - DNA, 394 bp, Zea Mays
acccgatccagatcggacggtcccgagttaaagaagcgaaagggtatgtttgatctaatctcggccacacaacactagatctgcggcccccgaccctcctcctatctcgcgacggacgatgggcaatggagcgcccggcgcagtggtgacctctctggagtaccgcacgatggcaaccccagtgccccaaactgacgctaccaagtgaacaaaaatagcaggaatgatggcgatcctgatggagtctcacttatcgtgattcgcacaacgcggggtcctagcagcggcgctaggcggaaatcagattatggcgagcaatcgccggtcctaggtgcctccttctttgctatgttcattgcccgttggcttcaatggatgcctacgaacgcccctg

SEQ ID NO: 107068 - DNA, 744 bp, Zea Mays
tgagcctgttccagccggatactgccatggcaggagctcccgagcgacagagatcgaattagactcctaccgaacacttcccctcaaccaatttcaccattgggactatgaatcaaccggtccacggtgacagggcggatggtcatacggatggaagcgttccgaccaaccgacggcgtgaacgaccaaattgaagcttgggaaagcttcacagacctaccagaggtgacgcacatactaaattttggactgggcacgaaaagaaacgtggggctacggagagggtgtcacggcggtgttctacagagcagaggggtgttccgatgatgagactcgggtaaactccaattggtcggctccgagagcaacagggggctacaaacaagcaagaactcgaatcaattgggtatgcactaacccgaggagtgctgatcacggtagagttcctcgcggcggagtaagaacagagagaaaggggatttgtggactgcgttagttctgcggcgtactcgattcgagtgcttagttgttgaggtgcgggatgtgatgaagaagcggagtccgggctcaatttataggctgtcgaccggagttggagaagaagtgcggatttcagatgtgctggcaagctttccacgcggcggattccggtgatggcacgggggttcgccatttaaccggagcctgccacctcagtgaccttctgccatgacgccgaggatatttaccgtggccaccgacgac

SEQ ID NO: 107069 - DNA, 571 bp, Zea Mays
aaggaggtcaatggaggtagttgattgttggcatgggatatagtgacacgacccagtgcctaggtggtcttggagtgccaaacctttggttcatgggttgggcgctgcaactcagatggctttggttctgcaaaacagacccttctaaaccatggtacggtttagattttaatgtccaaaaacaagttcgagactttttgcaatctcagtggtggccatagttggcaatgggtagaacacattttttggaaagatcggtggcttaatggtgagaccattagtgagttagccccagtggtggctactattgttgcgcttaaggtggctatttctagaatagttgctcagtgtcttactaaccgaagctaggttgcagatatcaagccagtgttgtccatcaatggcattcattagtatcttctttgggacttattggagaatatggttctcactgaggaagctgataagcatatctagaggcatactgccagtgggaccttctcttccaaatcctgttattgagcattgggggtctattgctttttaaccctggaaagactttggaaatctt

SEQ ID NO: 107070 - DNA, 433 bp, Zea Mays
agaagaattcatggatgtatttcctgaagagttgccaggaatgcctcctgaaagagaagtagatttctacattgacctcctcccaggcaccgcaccaatcgcaaaaagactgtaccgcatggcacccatggaattggcagaactgaagcttcagatcgccgaacttcaacagaaagggtttattcatcccagctcatcaccttggggagcaccagtattgtttgtcacaaaaaaagtatggaagcatgacaatgtgtattgattaccgatccagaaatgtagttacaatcaagaataagtatccactacctcggattgatgaccttttttcgaccaacttcatggggccaaatatttctcaaagattaatctgagatcagggtaccatcagttaagaatcaaggaagcagatattcagaagacaacttttgtt

SEQ ID NO: 107071 - DNA, 555 bp, Zea Mays
agctacttggtgtcctaatctcacattcagagtttgatgtggttgatttccttatctgtgagatcgaggacaccgtgttagatggtcttcgtgttcgccgacagctgtcgtatgctcattatctctgctacatcttcgcgcagctgatctggcctccttagttccagggcatcctcgaggcctctcgcctccattttggctcctatcgtccagcccctgaggacccagtgcttgtacctgatccagtgcgagacactcaggcagaggatgcggcattccatgagtatgagactctgggcacagccgttcctgatgatgatgatgattttgggatcccgcctccgcctcctgtgcctccacgctcacatgatcatgaggtcgggagttccagtgctgctcctgctggccctcctgccgttgacactgctttggctgcgatactccagtctcttactcagcagcaggctcattggcagcagcccaacaaaagatgtccgagagaatgctctccaagtttcagactattcaggacaaacaggacgctctgtagcagca

SEQ ID NO: 107072 - DNA, 403 bp, Zea Mays
tagcatggtgggataccttcagcgcggccgtcagggacgctacctggacagaatttgaaactgctttctgtgagcaccatgtaccccaggggatcgttcaactcaaggaagatgaattccgggaactaactcaaggtggaagatctgtcagtgagtacatgcacaaattcacagagttggctcgttacgcgcttgacgatgtcagcacagaaaccaagaagatggctcgttttctgaaagggctaagaccagaactcaagaccatcctcgccagccaagatttcctcagcttctcgcacctctccaacaaagccatacaagtggaaagggcaaaagaagaagaaaaaggtcacctcaagaggaaattccaagttctccgagctcagcagcaagactgacacca

SEQ ID NO: 107073 - DNA, 439 bp, Zea Mays
aatggtatcaaattgaaccctaagaagtgtgtcttcggtgtcctaaggggcatgttgcttggcttcttggtttcagagcggggtatcgaggccaatctagaaaaagttttggccatcacaaatatggtgcccatacgagatctcaagggagtctagcgagtcatgggatgtctgacctccctcggttgcttcgtgtcatgcctcggagagcgcagactaccactatataagctgttgaggaaaattggctgctttgaatggtcaattgaggcacatgaggccctcgacggcctcaagagtctcctgacctagacccccattctggtcccgccagaggataaggagccgctcttgctctacgttgcggggactactcaggtagtcagtttggtgctagttgtcgaaaggcaagaaggagaaggtttgcgcccgcttcagc

SEQ ID NO: 107074 - DNA, 821 bp, Zea Mays
tgctctcatagcctctgcaataccatcttcagatgacccacatgctcttcctcactgatgatatatgagaatgtcgtcaataaacaccaccacaaacttgtctaggtcatccatgaacacacagttcatcaaattcatgaacaaggcgggcacattcgttagaccaaaagacataactgtattctcatatagctcgtacttgctgataaaagtcgtcttcggtatatctgaaggtcgtatcttgagttttcctgagttgatgataacctgacctcaaatctatcttcgagaacacactggctcttcttagttggtcgaacaaatcttctattctaggcaggggtagttgttgttgatggtgacctcgttcagagctttgtagtcgatgcacatcctcttggtgccatccttctttcccacgaataggatatgagtggcccaatgtgaggtacttggtttgatgtaacccttctctgactgctcatctatctgcttcttgagttccaccaactctagtttagataccttctaggctcttttgggaatgggggcggtgccagggataagctctatggggaactcaactttccgctcaggcgatatacctggtaaatccttagggaaacatctagaaattctaatataaccttgatggcctcgagtgggtcagcctccttgctatcaatagtcatctggtagcaacctccttttttgactcgggtgggactagctcagtcaccacttcttctcctagtggggacaccaacttctccgttctcttatcacaactgataactgcttggtacttatctagctaattt

SEQ ID NO: 107075 - DNA, 1317 bp, Zea Mays
cggggatggggaggtattcctcgacgagaaattccccattgtcatccctcccccaacttgctcgggactaagaggctttgttgttgttgacttcgacacaactaccagtgttattaaaaaggcgcttaagtgctaaagcgctactgaggtggtaaagcgttgtaacgtttcacgaatcgacgtaaagcgctcgttttaagcgctaaagcgccactttttagcgttaaaacgctctagaccgtaaaaaggccacgttttgtcgcttttcagatttccaacccagccaatttctcctaacctaaaacaatgacgtccttctccaaacgtcacggacgcgccccagccatcacggaccacgagtttgctccgtcctcaagcgtccctgggcttcgctgcctccctcccctcctccctgcgttgctccctgcgttggccatgctcgcttcttgtcctgctcaggctcggcgtcgccgctacctccctatgctgctcggcgctcgccaccatcgctccgtatctggctaacagccctgctcagcgctcgtgctcgccactccagtgctctagcttgttgtctctgctcgttgtccctttgccgttcacgctcgccactgcctccctttgcttcccctgcccctgctctcatccttctccccttcccgattgatctgctcacattctcctctgattttggttatgatgatgaagcaacaaacaatagtgttggctatgatgatgagcaagacaaagtcaagaatgatggtggtatagatgatttggatgatggttattgagatatgatagagggagattgaataacgcttgtgtgcttgcaattgtggacattgtattctactttagttgcttttgtgctatgtttgtgcctttgtggttgtggacattgcatttcactttagttgtttttgtgttatgcttgtgcttgtggactattgcacatttcattccactttgtttgtgagtgtttacttgctagttgctattagttgaacacagggccgggcctagggcatgtgcaagccgtgcgctcgcacagggcctcaaaaattgagggccccaaaatttagcagatgtatatattctagttttatgatcttctacacatgttaatatgtagcacatatttttctttctaccatacctctgcgctgaaacgaaactaccgagcgctgcactaaagaataaatcttcatagaatcttaacatatctgtccgcgtgaacaaagttctctaaattaaagctactaaattcatatttgtgttctactatgataaaaaaaagacgtattatttagccac

SEQ ID NO: 107076 - DNA, 466 bp, Zea Mays
aattttattatttgtctacacattctattttattatgtgcagcaagtagtagatggtgcaagggtgggcaactgggcttgcgttaacttttgtcaagagttgcgtgcagatggtgttggtaaattttgctctcatctggttaagtggtctcgcactactggagtggtaatatacatttacgtttgcttttgatttccttatcatcaaagaattttcttgcatgcctcccagtttaccattccactctggtttcaggacatggataacttgagacttccaatatataccgctcgtcctgaacaagctgaaactgatattcgtaggctctatcaggatgcttggaacaagctaagagggcaaaagtttgatcttttgcttgctatactgccagagaaaaatggcagcttatatggtaatatttattacagcaaactttgtttattccctgattatctctactaactat

SEQ ID NO: 107077 - DNA, 457 bp, Zea Mays
acatgatagcgtaaaccatgcaacatttaaatctcccaccggtttgagataaggaaagacatgccccacgatcgcgtaaataaaggcacagttacgggaggaaaccaattctaatttactgccgctcatccacgttcgtatctgtgatcttggcggaggttaacggcggcggaaggaagagcaccgggcggcgattcacggcgagaaaatgtccagcaccggcgctgacgatgacatgccacctgtagcatctgtgcatagatcaacaggtacgtctattttaatggacatgcatcctgtagcgtctgcgatcaccggttacacaaagggtgtatctgttactccccccgcggcattgagggcacctggacatattgatgagcacacaaaaacggcagacgtggtcggcgcagataagcacatccccatgagacatattgggccgcatgaacaggac

SEQ ID NO: 107078 - DNA, 425 bp, Zea Mays
cgaagatgcggtctccatcgatgagatccttcgaagtgggttcgtccacgtcggggacatctgacgagactgtccgtggggacccatgttttatttcttgcggggtcatggcctccgatccatatagaaggcggaaaggggtgaacccagtcgccctgcactcagtcgtgtttagcgcctagaccgcttcaggtaacaaatcggcccacttgccctttttctcgtcgaggagcatcttcttgacagttgtgaaaattttgccatttgcgcgttccacaactccgttggactgcgggtgctatactgaggcgaaggcaagcttggtgccaatggagaagcagaaatccttgaagtcttggctgtcaaactgcttgccgttgtcaactgagttcggatggtactccgaagcggcaaacaatgttttg

SEQ ID NO: 107079 - DNA, 777 bp, Zea Mays
ctgaaactgaattgaatggttgatactttgcattggttgaagaacctctcggtcttgctactaccagaattttcacttgttcgttttcctccatcttcagcaaatcccgttggataacagctgaacttgcaacagtcatgccatgacagagaacttgcctccaaaatttggatgagcgatgcaagagaatagcatttgaaaatctgagcgccctgcgagccccggggcggggaggaagccgctcgccgacgatggcccaggttctcctgcttctcgtgtccttccctccggtcttcttgcttttccgctatggatttctccctcctggactttgggccaggattggccttcacggaatccctctgggatgccttggaagcttcggtttgccctgctcgtccgtgtttgcggtcgcccttctggctggtggtttccttcggtagatgcatcttcaagttgaattcggtttcgattggtcatcttctccaggctgcccttggtgggctcgctgaggatttcgaagtgtttcagctggctgaccgcgtttttcgattttcggtttcctcgatggcggtgagtttccacatctataacttgggctccattgagcgtaaagagttcagagccttcttcaacctctggaatcgcggtggacccaattggaagcatgaattcagactctttttggaggaggaagatgcctcctggtcgagggtccgtgtcaggaattctctgtcatatgcggatgtggttaagctccctctcactcaggggcgg

SEQ ID NO: 107080 - DNA, 390 bp, Zea Mays
tttgggatgaaaggatctcacggacggaagggaggtgagtcaccggagggcaactgtcgtggcgctcggtgaggtaaggcccctggcggtaaatgggctgtccacagcgacctattgcgacgtggtaacttctccaagcatgtcgcatcctcgaggcgagcggaggatgccaacgaggacattccggccggtcgcaaaacaagtggttacggtggctagctcacaaacttatccgtagtcgcaatcttttcacttgatcggtaatattcgtgttgatccgtgcacgaattttcacggcaagctcgaatcgtggcgcccgttcaccggcggcgaggtacactgcaccagaatcttcttcagtgtactataccatggcaatgttaattcagc

SEQ ID NO: 107081 - DNA, 313 bp, Zea Mays
tccacaagtgccaataccttgtaggctatgtgctcttggatcaggtctcttgtaccaatgaaagcacaaacattactgaaagccctgtggcatgcttccgcatcattttcaatcgccacggtcggccttcgaaggccgaagcgagaccagatggggcgttggataatcccctttatatcctccctttcaatcagattattcttaacataaaaccactcctccatctaggacccgggccaccttttctgaaatgttggaaccggatagcttgcattagagagagagatgaatccataacaactgaagttgttgt

SEQ ID NO: 107082 - DNA, 478 bp, Zea Mays
gaattccactgccttagctgaagttagagaagcaatgggtttgaattctatccacttagtgaatttgtcgatagcaaccagtacatgagtgtatcctccttgagcttttttgaaaggtccaatcatatccaatccccagcatgcgaatggccaagttacgggtatggtttgtagttgctgtgccggtagatgctgctgttttgacaagtactggcaggcttcgcacctctggactaactcggctgcatcactttttgctgttggccagtagaaacccgacctgaagactttcccaaccagggtcctggatgctgcgtgcactccacattgcccagcatggacctcatccagaagttgctttccagtagctgagagaatacatttcatgaggactcctgatgcgccccttctgtatagcgtttccccaatgagtgtatagtgagctgactgccttgcaatgcgctcggctgtattttta

SEQ ID NO: 107083 - DNA, 469 bp, Zea Mays
agttccaattgatatgcagcctccctcactcgctttaagatcaagaaaggtccaataaagcgaggggacaacttccctttaactttgaatcttctcataccccggattgttgacacctttaaatatacatgatcaccctccttaaactctagtagccttctttgggtatccgcatagcttttctgccttgactgtgcagttctcatattcacccttatttgatggacttgttcttctgcctcttgtataatttcaggtccaaagaactacctttcaccagtttgatcccaatacagtggagttctgcactttctgccatacaaagcctcaaacggggacatcttcaaactgacctcgtagctattattgtaagaaaactccgcatatgataaactcttatcccaactgccaccatgtttaagagcacaagttcttaacatatcttctagtacttggttggtcctctcgg

SEQ ID NO: 107084 - DNA, 449 bp, Zea Mays
aaaaaaagagaatgaacagagtttttgacgccatcggctccgtctaccccgactaccgctatccgctgcggggatagggtaagaagagaaaagctgctgctttggccgccccagctgagcctgtgccgaaggctgcgggcaaaaagatgaaggtacttacccaccggccgcgttacattgaaccgactgtggtgcctgagtttggcgaggaggcctcttaagctgctgaaacaagagaaactattcctcccatgcagaggactgaagagccggctataatgccgaaggcaccttcagttgagctagttgaaacgaaggttgacaaagataaggctgaaaggtcaaaaactgaagaagtaacaaagatgccagagattttaagcccttcaacagaagcaacagcgccgaagacacaaaagagttctgccacaactcctaagaggaggatg

SEQ ID NO: 107085 - DNA, 373 bp, Zea Mays
ccttggattgtacagcagcacactgatttcaactccaggaattattagaatgccaaacttgtaggctgttgtcagtgactacaacaggaggtcaggacttcagaagcatatgtagagggctgccggagcacaatagggcgataggagaggagggcggcggcgatggagaaggggcggctgcgctggagaagggatggccctggagaagggcgcacgcggtgcgctgcgtaatgtgtaccgtattggtacaggtagggcaaaatagtgtttgtgatgtgcagatggtgggctggcccatgtaacagagaccggattagtggcccaaaacaggcataactagtcgaccattacccctagtcggatgactaatcac

SEQ ID NO: 107086 - DNA, 640 bp, Zea Mays
atctctgttcccttggcattgacgtgcttgtacccctagattcttcaagactcttgtttcgaatacttacatctaaatttctactgcatacttaaacattttagtttatatgtccatgaacttctggtcttttgagatcccttcctattccgctgttaagtcgttatcctttgccttttttctatccccttgtctcggtatgcccgtatccttggaatcttgtatactcttatattcttatgtacacttattttcataccccaatgtttgtttaagacatttcagttaacatgcccttgaccacccttgttttttaatgatccaggagcggtcattttatttgcacatccttggtgatcccgttgttgccttgtaacttccctcggtaatgaatttttatttcaactcttttgttggaacctgacttatcttatccttgattgttttctccacttcgccactttgcgagtcttgccttaattctgtccatggaatatgcttttcgtcattatcacttttgcccttatcacctctatatcttactttgatgtttatcttatttcggccgtttaaaatctcctctttaccatctcaatccgagagttgtatgttttacccatttttctcttagatgtatcat

SEQ ID NO: 107087 - DNA, 596 bp, Zea Mays
gctgcacagcgatcggttcgaacttgatttgatggtccagatcccgcagatacttcctcaacatagagacatgaaataccgggtgtacccctatcatggattccggcaattgcaagcgataagccaagctgccaacctaggcagagatagagaatggtccaatgtacctcgggctaagctttcctgagacaccgaaccgaacgactcctctagtaggtgataccttgagaaggacttgatcacccactgcaaattccaagtcctgcctcctcacatcagcataactcttctgacggctctgagcggctagaatattctgacgaatctcccgaactttctcagatgtatgctgaatctagttaggaccgaccaaggatttctctcccaaactctcccagcacaaaggggagatacaccgcctggcatataaggcctcatacggtgccatcttgatgcaagcctgatagctgttgttataagcgaactcagccaaggcgagatgatccttccagctacccctccatgaaagaacacaagcacgcagcatgttctccaaagtttgaatagtccattctgactgaccatcagtctgaggg

SEQ ID NO: 107088 - DNA, 2697 bp, Zea Mays
gatcttttctatctctggaagatattcaatcttcagcttctttccaagtgaaacctctgtcctgttccgacttgaaaagagtttttcctacacagcaaagaacatgaaagtagccaatataaaaaacagataagaatacaaacaactgactaacattccataccagcattttcttccaagcacactatattcagtagccaacctattgttacttgattgaagcttacaactaaaagttgatgcactattgagtattgatacattatttagatgtcgatggatgggttgcatgacatgattataacatggctggcatgaacagtcttacaaacaagtgtgttgtgtagacagcgaaacacttgatggcaccctaggaaatggttccaataagttcaactattaatgtacatgtccatgtgctactgcaatgtattataaaccagtcacaaccgcaaagttttccctttttatcttgcatataaatcatggattattaattaaaacttaaaaaaatgaaatgggcattgataagatctaagcacgctggaaaaaatgctctagttcaatacaagaaatagaagaaaggaaaactccagcaagataaatactggcgtattttagtcaattattgtatttttcctctaagttgatttattagtgtttgtgcagactaactttaaaatgtgaattttggctaacacaacaaggtctacttccactattgttcctctatattggtcatgtccaagatttccactgtagtagtagtagtaacacaaattttgagcagaaaacaaatagcactctttgggagcagatatgaggaactcaaaagtcaaaacttactgccacatcatcaaactcgtcgaaagtggacgcaacagtttcccactggtaggacacgactgaaatagctgaagatcctccttttcccctagacctctttcctggctccttcttgacctgctctactcgtctaatttcacgatacaatctatgcccgagaatctcatcatcttcatacctgttttgcatggccttgcatgaaaataaaataatggaaattctttacattcaagataaataaactagtaccagtatgagattccaagggaatcccctccaatccgatctttacgaaaggtagaaaagttctgtccatgcttaagagaactgtcaatgaagttccgaatatcctcttgctgcaaaataaattcataataagttatgttgccaaaattaacttgcagctaatgtcaaatacaaatttgtccatgtccatacacataccaatcagctaatgtcaaacgcacttaatacacatgctgtaaaatttattctgatagagacgctttttctagcgacatcctctccaaacacaggtttgtaacacaggcactagccagcaaatattgttgaaattccaataaatgaagcatggaggaatttatctaatctgtaggctaaactgttaaataattttgaaacaatgcaagcgtatggatattgatcatactgatatttacccattatatggaaataagctttccgaaaaactgaactggtgacactgggaggctgagactcaattgaaattgatataaacaattatgactgtagtaggcttcaagaaatgaggcaagagtatacagatggaaaaggctaagtgtccattttgtcaaagttcttttggttcaccgttacattaaaataaaatcagcacatacctcaacacggatatcacatatcgctttcaagattagtaaacgaatagctggttctatagttttgtacgtctcaatttcagttctgcaagatggaacgattggaaaacttgtcaatttgaagttgcagtacaaggtttactcaagaatatcctgtgtgcaggactaacccatgagatgcaacaattggcagatcaccttctgcaacctgtagtttagatccttattaggtccaaccgaatggaatactgttattcatacttatctaaaattgtttgcaacatgggatatattgcatacccaatgccaccaatccttcagctttctgcacaggacagtcacccaggttccacgtcccatagccatgcgagttacaggaggaattgactgcaggtatgataaaaaaaaacatgagaatcaaggacagtgttggcatggcaaaaatgtaccatataaaactgtctaagggtatctaatcgcagctagtatgtatgatcagtaacaaaaatgcaattttgggccatgaatctatcgagcaagtgacaaaatcaccaaacaagaataatggtgcatgatgctaatattgcaggtgtgcagtaaagcataaaaaacagcagcaagcttctataaactgaaggcagcacagcatcccattccaaacttggtaacacaatacaggcaaacctagaaaatgaaaaaaaatggtaattgcaaaaaaaacttaaagcgttttggtatctgttcatgaagcaattaacagcatgcagcaaaaaaacatacacctcttccacacacacatacacagcgacatcgaagaaggggaaaacaagctcaagttgaacaaccaaggagcccacctttagcagtggcatatgcacatcatctagaatctcgttgggagtgataagcgccacctcgagctcctcagccgtgaaatcaccagtgatgttcagcagaggccggaacacctgcg

SEQ ID NO: 107089 - DNA, 825 bp, Zea Mays
ctttggatgcgtaattatcctacggagctcacggtgtgctcaatttataggacttggggcggtggctggtgaatttgagttagcgcggtggcggtcggagagtgaagagagtactgtcacgagagatcggtggcatctaccgtggtgacctcaccgacgacgaaccagtagcagagagtggcttatggtgactcactgcaacgtggtaattgccgaggcacgtggcgttcgatcggcgggtggccaacaccggtgaattatctgaacaggccgcaaagcagaaagggggtgcggcggccagttggaacagtgcccatactcaacagcggtgaagatctttctaccctggggtgttatccgggcctaagcgagcacgaatcacctcatcggcgtgaatccatgtgtgggggtcactggcggccaggggatctgaatctgctgatattttcgtttctgtaccattgcaaactccttcagtcagtctgacagagcgaatggcagagaggtttgctccaaattttatgtaatgactgaatcaactctctgtatcaaagttatatcctaataaaccagctacaactttgctacattgtgcacccctaaaaagtcacaggatctagcatagaattaagccctaagttcatgcaattccacagttagtctaaattcagacttaaggcagtctgacagctcgactttgggcacatttttctccaaatttttcatgtgaccaaggtttaattcctatagcaaagttgttcaccttctataggtctacagacttgatgtgttgaactagggcagaatcttcattatttggaagat

SEQ ID NO: 107090 - DNA, 438 bp, Zea Mays
cagacccctctgatgtggtccaatgtaggggaaaagacactggaagggcctgccttcgttaaggaggcagaagagaaagttgccctaatccgcaaaagactactcgaagctcagagtcgacagaagagttacacagacaacaggtggagagaactcaggtttgaggaaggagacttcgtctacctcaaggtctccccaatgcgtggagtcaaaagatttcaagtgaaagggaagctagctccacgattcgtcccccgtatcctataattggcagaataggacccgcagcctaccgccttgaattgccagaatccatgtcagatatccacaatgtgtttcacgtatcccagctccgcaaatgcctaaaagtgccagaaagtcacatcgaagaagaggcaattcagattcagaaggatctacagtaccgagaaaagccag

SEQ ID NO: 107091 - DNA, 520 bp, Zea Mays
ctaatattacatctaagattaggttattggaagacacactagcagtattggcactaggatcgactccttacaaaaacagaaatcacgaaagacattaaggaggattgccttccacatccgaccatgacaccctaggaccaaacctcgtagcagcattagaagctacacctgtctttgttggcccgacattgatgactcccacacatgactccaacgtagcttctcctactctcgcaccacatgtaggagaagggtcatctatcaagcgtgttgtctagccttcggtgtcaaataactcaacttgcatgtttttgactattgcacgtctggtgctggcccgacattgatgactcccacacatgactccaacgtatcttctcctactctcgcaccacatgcaggagaagggtcatctatcgagcattttgtctagccttcagtgtcaaacaactcaacttgcatgttttcgactattgcacgtctggtgcgtttggataatcattgcaacgctagttttttt

SEQ ID NO: 107092 - DNA, 316 bp, Zea Mays
tgtgatttgacattgttgccacgtataaacacatgaacatcaacagtattgtcagcatcatcttcgatggccaaagacacagcattaatggcatcaaaccgtggatcaggacgcagctctcctctgctttctgttaaaacctgtttacagtgaaagaagcttgatatcaagaagtgcaatctacttttgctgatatcccaagcatttaaaatatttttatttaacagattgtctatctgtcattagcaaatcaaactttcactaatgataagtttgtcatttagtcattagcaagtcaaactttcatgagttataa

SEQ ID NO: 107093 - DNA, 657 bp, Zea Mays
gaattgtttctcaaatttgaagcggtaagcaagtcgaacgagttcatgcttcttccccgcttccttcttcttcggcattccccagccacttgatgtaggatatgttctattagccaaatattcttgcactaagtctctggtactgatctgctcagctaccactctaaattcaacttcggccagctgacagggtgaccctagttgcatgttacataaaggtcgggtcattccgaagctcaagctcagaggactcatgaccatggtcaccagccttcatataaaaccattcattttttcagccggttggccactttgtgcagtagctgaggactggtgccttcgtatccttacgatacgcaaaattgtaacaaccaaaattttcttgaagaccatctgccctagccttcatctaatagtgcaactcatgcacgcgacaaaaagcttcggcatccgtgctcatcccttggcttcgaagggtccagataaagacgttgagcctaacaatagcgttaggagtcagctgatgaagataaatttcgaagtttttaaggacttcccatatcatctcattcaagggaaatcgcagccccgctctgaagaagctcttgaaaaccacaacttcatccttcttcgacactggggtagtctcttctccag

SEQ ID NO: 107094 - DNA, 469 bp, Zea Mays
agatgacctcgttaggcaagaaggacgtcaccaccgtcgttggatgtgatttgagtagtggcacattttccttttgtgatcaggaccacatatagtagcttttggatcaatggataatgtgtcttggagtccgacaagaccgtaccttgagggtgtcgccctcctcctgcctctcagcgacaagagtcgtgctgaccacttgcgaggtggtcacgacaaagagcaggagaggttcgtcgtcggtcggtgggaccaacataggagtgtttgtcaagattgtgttgactttatcgagcgcttcctgggcatctagggtccacacaaactggtcagaattcttcaaaagctggtaaagagggagcccttgtttgttgagatgcgtgatgaagcgacttagcgcgctaggcatctcgtgatccactgcactccctttacattatgaattggccccatttgcgtgatggttgag

SEQ ID NO: 107095 - DNA, 300 bp, Zea Mays
gacatgcagcaaacttcttacagaccaccagcgctgagaggtagaggagggagaagcttcagtggaggaaggtacggtaatcagcccaggaaattgttctgccttttctgtggcgaggacaagggtcacacaatgaggacgtgctaggtcacgatccaaaagcaaaaggatattgttgaagccgaggcacgacagaatgagccaaaacaggtcctccatactgcttcatgctagtttccatatatcctggaatacgtaggcaatcaacatcctacggcttctgctgcttcagcaagtcac

SEQ ID NO: 107096 - DNA, 390 bp, Zea Mays
tcagccaaggcatggaattcatacaagacataatattcaggtttgggataccaaatagcatcataactgacctgggatccaacttcaccagctctgaattcttcgacttctgtgagcaacggagcatccagattaagtatgcatcagtggcgcatccaagagccaatggccaagtagaaagagccaacgggatgatactggaagcactcaggaagaaagtatttgacgagagtgaaaagcttgcaggaaaatggatcagggagctgccatacgtggtttggagcctgagaactcaacccagtcgagccctgcatggaaataccccgttcttcatagtttatggatcagaggtagtgttgcccgctgacctaatattcggggcgccgaggt

SEQ ID NO: 107097 - DNA, 406 bp, Zea Mays
gtgtaataggagacgtacttacattcgggaagtatctgttgtacaatgcatgttaggaatatagttagtagccgaatatttagtttggcatatttcttcattaccattggctgcatgcgacaacacgactactgaagcttatagtgtgatatgtaataataccaaatatgagctcttctggttagatgagggaagccctaacctgccagcatccacggttcgattctgggcgggagatgtacactttaagatcttatatacaaatttgatatcgcgctcgggacgcgtgaaatccactagtattaaatgttctacgccatatgtatctactaaccattgctctacttgacatataaaatggatgaattagcgtcatatatcaatatgtaagaaccgcatcttgtag

SEQ ID NO: 107098 - DNA, 491 bp, Zea Mays
gggtgcactggcttcgtgacaacccaacggagctagcggtaccccaaatttatagtgtccaagagcggtggtggctaatttttgcgatggcgcgctcgcggtcggagaggacaagtcactagcgcgagcgctatcgtggctttcaccgtggcaaggcctccggcgatggacgagcttgctacaagggttcaccgcgacgtgttaaacctcccaggcacgtggcgcacgatcggtaagcggccaacgccggtgaagatcattccggccggccatagaccaagtgggtacggtgaactcaacagtgaccgagttcaagccaatccaggcgctaagatcttttattcccctcagttatccactttgcgcggggcacgaatcacggcgatcggcgcgaatccgggcgtggggttaccagcggcgaggtgcaacacacctaagatcttcttcagttactgtacaatggccatcttcatcagtgtgtttgtcagagc

SEQ ID NO: 107099 - DNA, 498 bp, Zea Mays
cattacaaagaagtatgtaagaaaataagagtatcatatttgggagaacttacatggctttgaagaatatgaggtgtgtcctgttcatgtggcccaatatgtctcatggggatgtgcttctctgcgccgaccacgtctgccgtttttgtgtgctcatcgatatgtccaggtgccctcaatgccgccgggggagtaacggagacaccctctgtgtaaccggcgatcgcagacgctacaggatgcatgtccattgaaatagacgtacctattggcttatgcacagacgatacatgtggcatgtcatcgccagcgctggtgctggacattttctcgccgctaatcgccggccggtcctctcacttccgccgccgctaaccgccgccaatatctcagatacgaacgtggacgagcgactgtaaatttgtatttgtttcctcccgtaactgcgcctttatttacgcgaacgaagaacacgtctttccttatctcaaacctgtg

SEQ ID NO: 107100 - DNA, 434 bp, Zea Mays
gatcatcaaacaccaaaacataactatcaaatgggcatcagtccattttccttacatgtataaatttgagtctttgtgggtgttgctagccaatgttacatgatgtagagtgtgtgtgccagtcatccttgttgcaaaaaaggagtgaagtaccttagagcaaaaggtcaacctacaaatcaatatgagtaggtgaccctaacaaatgagaatcaatcaaaggtcaacctagtaaagttggaaaccctccctatctgacctagcaacacactgttcaccataatgtatgtaatgtcaatctcccatgcacatgaatgtgaaacacctactgtcctttcttctctctaccaaagctttagagccaccacaaatgcacctctagatccacagatctccaagaactcatacatgaaggaggacaagagaactaatgc

SEQ ID NO: 107101 - DNA, 493 bp, Zea Mays
tacgtctggaccacgggtgcggcataccaaaggggcactgagaggtccctatcaacatgatggtacgccaccacgtatgatctgtagcgtatcctgtctgccttgtggggccagtcaacccctatcatgggggacctaagtaccagagtctctacagtaaccagtataccgagaaggacaagagtatacaccataccgggtgtatggctacgcacgatggagggtgacacagggtttatgacgaaagtcgagactacgccgtgcatcataccacgagtctaccccttaggagccacgaagcgccactatgaggacatcaacatcggactcgctatagggacccatataccggacagacaaagcatcgcaccatgccaggagtacggccacgcacgaccctatggacgatgttagagggactacgccaactagaggcaacatatcacacccttaccaagtaggaaacaagtcttctctgtaaggtcctaccctt

SEQ ID NO: 107102 - DNA, 765 bp, Zea Mays
cgaaattacgtctcgttttggtacccgtatccgatacccgtttcgggtacccgtcccgttttcatccctagtttgatgggcatggacagtgcagattaaaaccagcataccgctttgagccaacctgatctgaaccgtggatctattgatgtgtggctcgggttggttcccttcgcgcttacaatctggttcgtaagatcttaatccaacggctgtaagcgtactggttcaagattggatccgggccatcaaatctgaatggggtggatagaaatcaatccgggtctttaaaactggatcgttggttctcgatccgagggcaggcaatgtgtaccgcttcaatttaagcaagatcaaatctcggccagaaaaatcagatctaacgaccagggttcctagataccccttcgacctgttatttattttcggtaaagagaccccgagttttatctatttaaccctcattctggccttagccaaaactaattgcatacaggtcctaaacttttataagaaacacactgagcttttagataatacgacccccagtccgaagaaagccccagatctaattaaataaattagaaaaataatttttagtattggaataaaattctaaaacttagtaaatccatatctcttttattttaactcctttttgatccattccagttgcattgaattcatattaattatgtttagcatctagtaaccttatattactatgaaacttatggttaaattcatgtactcaactggtcttat

SEQ ID NO: 107103 - DNA, 528 bp, Zea Mays
aaaacctcaaggttgacaaattgcatttgaactcatctctcccagtggatagatgagtatgagcaatactcaagaccaatctattccaacataaaagattaccacccaccagcgctctgcggaaagagatgtttagaggaatcctattaaaaacattcgccatcgtatcacttttttacgagctatattatataaggacggaaatttcatcattagaggttgtttacccatccacgtgtcctctcaaaatctaatctgcttcccatctttaagaataaaggaaccaagaccaaagaattggtctttaactttcagtagcccagaccaaaaatgagagtcaccaggttttctacctacctttgacaaggtacaagatttgaggtatttgttcctaagtaaatttttgccatagactgtcctcattaatcaatttaaataaccatttaccaagcaaatacttattttgaacctctatgttctgaatacctagacccccttggtctttaggttgacaaagaatatcccaac

SEQ ID NO: 107104 - DNA, 651 bp, Zea Mays
cgcgatcgctgcggcacctactgtacgtctctcgctcttcagttcagagctcatatatactcgaggttgagggggttgctttgcttgcaagtttccccgccaatttacaggccggacaggacagagtacacgagtccttcgcctagctagtcactgcatgcgtttgggtgtgtgtgctccttgtcaagttccgaatctatctcgtgccctctagtttcagttgcccgagacgacgacgactgtgtgtccaggtgcatccgcggtactgtttcccttttttaattccatgcagaaacatgacgacgacttcgtatgcgtaaaataaacgacctttaatttggcactctccctctggtctggtgtgtgtcccgtacgttgatcgatgagcgtatacgtacacaggtattccgttacgtgaacgcgcacggcacggaagctgtggatcggattatccaccacctgttgcgaggaaatgcacacacatagtgcccgccgccgtacgtagacgtcgattcgtagccggaatggtggtttctagtataccagggcgggcgacacgattttgtttggcttggccccgctcgagatcgttacttctggaaacaaactcgtaacggtgtgttgtttgtgcgtgaacctgcagcatcttcg

SEQ ID NO: 107105 - DNA, 823 bp, Zea Mays
gaaaagagttactactatgcatatgccaatttttttcaaccaagttattttattcattacacaagttcattacagcatacagttgccacaagtcgcactaccccgcgggtgccatctaaggtactcccgaactccttttctaaagtgtccccaaattccttgaggaggtcatcaaggctagttagggacatagcctcggtgtcggacgagttctctatcctggtaggaggtagggctgggaggggcttcctccttctgttcagtctggcatccttggcttctggtcttctttcagattttcttcgcgggggtgagcttctttagcttcttgtcgtaatccatcttcagggttcgataggtttcacgagtgttggtttcctcgccttctgctatttcgagactctcttggagtgacgccttttcccttttaagttccttgacttgttgctctaggctttccacccgggagtttaggtaagtgcagtgggaggaaaggtcatcatattggttatcgagagtgtggaggtatccggccatgtagacgatggtggggtcgtcctcggtaggatctcttcctgatagagcctgaagtcttttcctccaggcaggggtatttttgttgttgggtggaaagtagcgaaggggggtttcaatgacctttctgctgtagttctggcatagctgttggagagcttttcgggcaacattttggcaagtgtctgggaagcagtgtccggtgaaagtgacttggaaaggagggtggtttgggtagcttcgactttctcccaagtagactgccatagagcacttctccattccattc

SEQ ID NO: 107106 - DNA, 346 bp, Zea Mays
gagaagtggagagagcgatagagggatcgacacgaatgcacgctcctgctctgttggatggatggatggatccttcgcgtcgcaggcatgcttgcttgtcgatcgaagttcgtgtcagaaatgaaaaaggacgacgggactagcgaggcctgctctagctgcagcctgcagctaaggtttttgtataacaacgacgtacgaacgtccccagctagcctgacgtgtcgatgacccgttcgcgcaagttaattgcctgctagctgcatgcataaaatctacatccgcgtatccggctcttctcagattgatcggcgctttgccagttgcaattttgtcgatcactcgg

SEQ ID NO: 107107 - DNA, 602 bp, Zea Mays
aaaccgccatcaccagcaggaggatttgacacaaaatggacgaaggccttggaaggaggcaggttccaagccgaatacgcaacaggggcgccaacatttgataccttgcctctgagtatcatctcgagccggcttaccaagtccacagcaggatttcttctgttggtgacccgggttgagtcagccaggcctcggtacagataggccgggtgtgccctgtccttcagtggctgaatgttcttgaagacaaagtcagcaaccacaccctctgcagtcaaacctctctccttcaacaatccaacttcagccaacagagcccttgcctcggccacctcctggtctgtgggggattcggtccagctcggagtacgaacatccggctgtctccctgaccgtggtgggagggaattcccatgattctccacgataaaccactctaagcgccatcctttgatgctgtctttgagcgggatgtcaaggtaatcagtcttcctcccacggcgcatctccaagctcgcgccccctaccagttggtgctgccctccggccatcccaggccgacaatggtacaagaacttccacaggccaaagtgcggcagaac

SEQ ID NO: 107108 - DNA, 662 bp, Zea Mays
tctgctattgaccatgcactgaaggaaatcattccaaagggcctcttattggaactttctgaagctagaggtgttgacatccgtgtagaggtcccggatggtgctccttctgctagtcttctggctgggcaagaaataacccaggcagtttcccatgcatcttcaacctttgagggtggtctgattggtaaggatactctggcccctgaggttacacatgatgggtatctagccttggagggtatgactgaagataacccaacaccctagggtgctactgaaggtggtttagcccccgagggtattgctgaggatgacccagccccccgaggaaaccgctaagggtgatcgagccctcgagggtcctgaacctggctcttcttcggctgcttcgatggatgttcatattgggtcaccactagttcaatctgagaaagctgtggtgacaagtcttgatcttcctactgcacttgctggcctggctagtttagaggtcagtaatgtgggtgctgaggatccgccatatgcgtcgccctgagcatgaattacaatcctcctctggtgctcaaacctgcttttgatattacttctatcagtgtcctgccatctgatagtatctcaatgcctccggccttggagtttcctttgttcctttccaacct

SEQ ID NO: 107109 - DNA, 759 bp, Zea Mays
caatctttcattggtggcgcggcggacttattcagggtctcgcccctttcggatcgggtctttcgtttctcgctttcttgcaagaatgttggtttcacagtttatcggcttcgttcttactcctgctccgtgttcaaagcgtatctgcacctatggaattctggcggtccaaactggatcattgaatggctgtgttattcagaggaagaatccaagtcttggaaattggtttctcatcgccgttcttcaccggtctcgttcgctgatatcgttcgtaagccagctctgtcaggtgcaaacttggttcctttgggtcggccggaaaggcccagacgttcttccttaagaataaagcagcgacattcggtttcgatcggatttccttcccactttgccccgccattgatcaaggatatgctgtgcgttcgcaatttcaaaaatattcaaattacagcatcggccgcgttgctagctccggatttcagccatcattgaggacctctcgcgttctcccttgggccccgcggaagttgatttggcggcccaagaagattttggaacagtgcccggggaattttgggcaggattttatccccagacttaatggctctgcagacccagtgacgacatgccaccgtcatatttgggacctttctctctcaggaaaaaaatcacaaatatttggtctttcggggcagaagtgcaaacgaccttttggctctttccccaataagttcgagaaagcctcatgggtgtagc

SEQ ID NO: 107110 - DNA, 617 bp, Zea Mays
gtgtacagggggctggagctatcatagctgacgagaaggctccaagtagtgagatcctttatggacatgccaaaaatatcaaactcaatagagcaaagttacctatggtaaactgatgaacagataaaagattttgaatgatatgagagatgacaagaacattgcgaagatagaagggcctagcaagaaccgaatcacttacagaggtgaccaggagaatgttcacattgcccacaatgataggtgaaggatgagatgggagagatgggtgggaaaagtataccagggtccatagtggtgtgataggaagtgtcggaataagtgacccagtcagtgacaacatgagccagggtcattgtgctgaacgagctagcaactgactgttgatcccacccaacagaccacgggttccaggacggaactgagtggggtgataggggtagaagcggtggttgaggtgccggtggcacaaagggaagtgggccgagaggataccccgggtcaagcatcgtcaagtgagccgggtagggtggaggcagacatggtgaaggtccaccaggggatggacttgtccacatgaagatacagccagtccacgggttgtagagagaggccaa

SEQ ID NO: 107111 - DNA, 816 bp, Zea Mays
ttttatttgggctataaggagccaaaggctagagccagatgccatgtgcttctgtaatattcatgaattatcttaccagacgaaggcaactgggaaggagcattaccataacaacttcgggtgcttcaactttgtgcctcgctctaacgctaggtatctcgtgccaacatttaggaagaaatggctggtttcttagatgaaacaatggttctatgtgaagcatgatctaagtgtgagggagcatgtgaggggcattattcagcgtcccatatggtcatgcttcggcattagaaggtcgtcaattgcaattggcaacaaagtgcaggcgtgtttaatggctttcaacaccgtgtgcacttacatcggtaccagggatctggaataggaacacattgcttacaatgtatggcctcttgtgaatgactgggagatgccgaaagaaactgctactagtttcagccaaggtgattcgatttatccaagatacaccttccggtataggagccaatttgacgagccgaatgacgattggctagaggctgttgaggcaaccggtgatgagctactggaagcctacacgaaggcagaggacgaagccatgatcattgcctttggtgctcgaggaaaaaagagactaaacaaagtttttgatgtgatcgggtttgtttatccggactgttgttttcttgcttgaaaacaaggagggaagagaaaaattgccacttcgacctcttccggtgcaccgaagctgaagagagctaaggtcctgacccacaggccgaagctacattcattagaaaagactgatgtagtgcc

SEQ ID NO: 107112 - DNA, 419 bp, Zea Mays
catcggtagtggatcaccggaggggtgggtgctccgccgtcagtccatggtggccgccggcgtgccgtcaagtggtgaagacgagtgttggtcattgatcctcgattggatggcggcgattagaaacagaataccggtccggtcagatgtggcgtgggccattcgattccgatcgattggacgtgagtgggattacgttatttaaatctgaaacgtccaagttagatcgaaaggcttagattgcgtaccggttcgctgggtagtggatttaatccaggccgttcacgcttgatcggacgactcaggacttacgataccctttcggccgcccatcttatataaaagcccctggatttattaagtataaacccgcggtcctcgggcgagtgttcactgagtctagtatttcttgcgctgtg

SEQ ID NO: 107113 - DNA, 380 bp, Zea Mays
atttaaaggatattatattggttgtgtttggcctcctcatggcttcaaacgaaattgttgttagctacaaagtctatagtttatattacccttacagtctgtttggtttacaggaattggtccgaattgaatcagtttccatttctcggcccgtttggctgtccatagaattcaattcatcatttcagcctatttcctatccctgaaattttagcctgtgcacgtttcagaccctcatccgtcggaaaggtctagaaagttagctaggtttcactgctcgtgcctcgagcggcggcggcggcagccggactgttctggccgacgacggcatcgacgacgacgaggttcgtctctccctctactgtcgctcgtagctcgtg

SEQ ID NO: 107114 - DNA, 493 bp, Zea Mays
tcttttggacccatttgagacgtgatgttgagcgctttgttgctagatgcacaacgtgtcaaaaggccaagtcgcggttgaacccacatggtttgtatatgcctctccctattccttcgattccatgggcggatatttcgatggactttgttttgggattgcctcgaatgaagagggggagagatagtgtttttgtggtggttgatcatttttctaagatggcacattttataccttgtcataaaatggatgacgtcgttcatattgctaacctctttttcaaagagattgtacgcttgcatggtatgccttctactattgtttcagatcgtgatgcaaagtttttgagtcacttttggcgtacactatggaacaaattggggacaaagttgctgttttctactacttgccacccccaaacggatggacaaacagaggttgtgaatcgcacattgtctacaatgttgcgagcgatattgaagcacaatttgaa

SEQ ID NO: 107115 - DNA, 433 bp, Zea Mays
aagtgcaggacaccactgtattgggatcaaactggagaaagacagttctttggacctgaacttattcaagaggcagaagaacaagttcgaatgataagggaaaattttagaattgcacaatccaggcaaaagagctatgctgataataggagaagactactggagtttaaggagggtgatcacgtgtatctgaaggtgtcaccactccggggtatgaggagatttaaagttaaaggaaagttgtcccctcgcttcattggacccttcttgatcttaaagcgagtgggtgaagttgcatatcagctagaactacccgatcacctgtcagatgtacatgatgtattccatgtatctcagctgaagaaatgtctcagggtacctgaggagcaactaccaatggaggaccttagtgttcaagatgacctgacttatg

SEQ ID NO: 107116 - DNA, 455 bp, Zea Mays
cacaaacagattccacccaagagagaggtgatgtttcattatgagtattgtggtgggatgggcatctggctgtctttttcttaaggaggaagagagatgagaggcagggttttgagtcgaattggaggaacatgaatcgccctctcatggtgttcatgagcttcctgttcagagatgtcctgctaggcctagaggtgctttgcctcaagctactaggcctcgtgcaatgagaccaccggatggtcgtgccctgtggggtactggtcgtgtgccatatgggcaaggaccccatggcaatggctttggttctaacttccccaacggaccacaatttccttctcatggtgaccgctatcccccatggaaccagggatgtttggtgttttccctaacacttttcatgggtaaatgacgtagcactggtatcgttcaaactttactaaccccaatgttgt

SEQ ID NO: 107117 - DNA, 395 bp, Zea Mays
atctttatattggagaaagtgcaggactcctctatattgggatcaagttggagaaaggcagttctttgggcctgaactgattcaagaggtagaagaacaagtctgtataattcgagagaatttgagggtagctcaaaccaggcaaaagagctatgctgataatagaaggagaccactggaatttgaggaaggagattatgtgtacctcaaggtgtcaccacttcatggaatgaggagattcaaagttaagggcaaattgtcccctcgctatattggaccattcgtgatctttaggcgagttggggagatggcataccaactcgagctacctgctaatctatcggatgtgcataatgtgttccacgtgtctcaacttaagaagtgtctccgtgttc

SEQ ID NO: 107118 - DNA, 521 bp, Zea Mays
caagtgtacttaatttttggagttgcatcatgctttaaaatcgtttggaaggggaggttgatacttgataatattgtttgtttgcccagttagaataatcaatttcatataagcttgttatttaagtacttatatgagcttttgtagctgtgtgaatgatgtggtacatgatgacctcgaggtggtacatgatgtggatctagaggtccatggcgttgatctggtgaaatttcttccagaccctcttcaaagatgactttatttctttttgtggttgatgtcttgactactaataattttgtgaggtacacgatggtagatccaatttctatgatttctgtttcgatttgttggataggttcaccttaatctgtttaagaatactcttggtgtgatatagggtacatatgttacatggatgtgtgtagtctttctttctagtccagttatgtaggagaccttctagttctacaggttggtttccatagtatatgaccatgttatgttgcatggcagatatg

SEQ ID NO: 107119 - DNA, 505 bp, Zea Mays
ccctgctccaatcctggaggcggtaggcgtggttttatccgaagccatctgccaggggaaagagttactaccatgcacatgccaaatttttttaacaagttactttattcattacacaagttcattacaacatacaactaccataagttcattacacgcgagtgctatctagggtactcccaaactccttctctaaagtgtccccaaattccttgaggaggtcatcaaggctagctagggacatttcctcggtgtcgaacgagttctctatcctgataggaggtagggctggaggggcttcttccttctgctcagtctggcatccttggcttctggtcttcttgcggattttctttgcaggggcgagcttctttagcttcttgtcgtaatccatcttcagggttcgataggcttcacaggtgttggtttcctcgccttccactatctcgagactctcttggagggacgccttttcccttgtaagttccctgacttgttgctccag

SEQ ID NO: 107120 - DNA, 544 bp, Zea Mays
cagtggaccacagaagcacaggaagctctagaagcactgaaaaagttcctgactacgccaccagtactcaagccaccacgccgagccacgccgaatcagccggcagaagatctgttgttatacatctcctgcacgactcacgtggtgagcaccacgttagtagtcgagcgggtggaggaaggacatacatatccagtacagcatccagtctacttcatcagcgaggttctcggaccctctaaaatgaagtatccccaagttcaaaaactactatacgcggtacttctaaccgctcacaagctccgtcactactttgaagaccacaaagtcatagtagtcaccggatttccaataggggatattcttcacaacaaagaagccatcgaaagaatagccaagtgggcctacgaactgggagctcacgatatagagttccggcctcgtacggcagtaaagactcaagcagtagttgacttcgtatcagaatggactgagcatcaggtcccgaacaacccagaggctactgaagtatggtgaatgtact

SEQ ID NO: 107121 - DNA, 408 bp, Zea Mays
gaatcatctcaagtcggttcaccaagtctacagagggaattcttctgttggtaacccgagtcgagtcagctaggcctcggtacagataagccgggtatgccctgtctttcaacggctgaatattcttgaagacaaaatcatcaaccacagcctcagcagtcagacccctctccttcagcagtccaacttcagctaacaaagcccctgcctcagccacctcctgatcagtgggggattcagtccaactcggagtacgaacatccggctgtcttcccgaccgtgaagggagagaattgccatggttctcaacaataaaccattccaagcgtcatcccttgatactgtctttaagagggatttcaagatactcagtcttcctcccacgacgcatctccaaactagcacccc

SEQ ID NO: 107122 - DNA, 278 bp, Zea Mays
catgcacctctggcacattgctcctatgttctttggaccgaatagcatcgagacataacagaatgtgcagtagtgggtaatgaaagtggtagcgtgttggtcgatttccttcatggcgatttggtgatagcctgagtatgcgtctaggaaggaaaggagctcgcacccggcggtcgagtccatgacctaattgaaacagcctgaatttgggggtataaatttttgtctctaatattcaccaaatttaggcgttactctcttttcacttccaatttcgc

SEQ ID NO: 107123 - DNA, 521 bp, Zea Mays
aggttcgggataccgaatagcatcataactgacctaggatccaacttcaccagttcagagttcttcgatttctgcgagcaaaagagcattcagatcaaatatgcctcggtggcgcacccaagagccaacgggcaagtagaaagagccaacaggatgatattagaagcactcagaaaaaagtctttgacaagaatgagaagttcgcaggaaagtggatcagagagctgtcgtatgttgtttggaccctgagaactcaacctagtcgagctctacatggaaacacacctttcttcatggtctatggttcggaggcagtgctacctgctgatctcaagttcggggcaccgaggttaatctttgaaaacatagcagaagctgaagctactaggctggaggatgttgatgtactcgaagaagagcgactgaatacggtgattcaatcagcacggtatcagcaaactctgaggcgctatcatgataaggccatacgacatcgatccttcgcagtgggagatctcgtc

SEQ ID NO: 107124 - DNA, 542 bp, Zea Mays
ctgactgctgaagctgtggttactgattttgttttcaagaatattcagccattgaaagacagggcctatccagcttatctgtatcgagggctagccgactcaactcgggttactaacagaaaaattccctctgcagacttggtgagccgattagagatgatccttaggggcaaagtgtcaaatgttggtgctccagtggcatactcggcctggaacctacctcctcccaaagccttcaccctttttgtgtcgaatccacctgttgctgatggcagtttgggccttagagtgcgaccctctgctgatgaagttagtgccttggttgcttcgcttggggagattcctgatgatgaacggcaagtccattttgaggtgcccttgaaccctagtgatgcggagataagtgctatgcttgatctgctagctgaggattcttccgacgctgctcctgctggggcgttggtagtggtacccctcccagaggctgatacgactttggatgctcagaagcctgtcagtactcgcccaaggcgcccttgtcg

SEQ ID NO: 107125 - DNA, 437 bp, Zea Mays
ggtgtcttgtttgagatccgtttgttttgttggtctcatatgagtactaggaacattttaaaacattagatcacttgttggttgatgtgttttggtttgagcgattccttcacctccattgatgttaagtgctaaaattctagttttaagaaacagattttgataggctcccattcacgcccctctagttgccttttgattcttcaattcgtatcagagccagataaggatcttttcaccttaatcggttttatatccacaaaggcaacatggaaccgaagtgttggcaaacctccgttcttcgatgggacaaactacacatagaagaaccacatgtcaacatatctccagagtattgggtatcatgtttaggaaatttgcctttatcaaactatcgaggttcaaagtgctcaaatcacgcctctacaaatacggtg

SEQ ID NO: 107126 - DNA, 471 bp, Zea Mays
ctctcagaccaaccagaggtctggtgggagttcacagaactgtcaaggtggcgccagtaacacgcaggccagaagcaacaacacacctgtccaacccaatggttgtttcaagtgcggtgagctaggccactatgccaacaactgcccaacgcgcaaccagcagacacctctgaaaagcaataaccagagaaatgaccagaacacccccgctcgtggatctgctcagaacaagactccacagaaccagagtagaggaagggtcaatcacgtcactgcagaatcagtgcttgaggatgacgacatagtgtatggtatgttcctcgttaactccatacctgcatcagctttatttgactctggagcatcgcattcttttataactgagtcatttgtggaaaaacacaacatacctaagtacccccttaagaagatgttacacattagttcaccgggaggtaacatgaaggccac

SEQ ID NO: 107127 - DNA, 602 bp, Zea Mays
gttttatgtgaagaacgacttggtggctagggaggatgttaaggaggttattatgcgccccatttggtcccgcttcggtctccgaaggccgaaggttgaaatcgatgaagccgctgaagcatgctagaaggcttttggtactgtttgcttttttattagtacaagagatttaatccaggagcatatagctttcagagtgtggccgcttgtagagaactaggaaatgccgaaggagactgtcaccaagtctggcgaaggtgagctggtttgactgaaatacaccttcagatacggagataaatttgatgaaccgaatgatgaatggctaaaatgtattgaagctacaagtgatgaactgcttgggccatattccaaagcggaagataatgccttatccacatccttcgggggccagggaaaaaagagattaaacagagtttttgatgccattggttttgtttaccccgactactgctaccctctgcgaggacggggaaagaagaggaaggctgctgcttcggccaccccgatgagcctgcgccgaagagcaaaaaaactgaaagtccttacccaccggccgtgttatattgagccggtcgtga

SEQ ID NO: 107128 - DNA, 399 bp, Zea Mays
attccagggataacgtaggtaatcaggggcataactatatttgacaaggtgaaaccgctccctggttacctataaatacccccgcgctacacactattgcaagaggttggaaaaacactgttgagctaatacactacgttagcgaagcatcaagtcatttccgctctcccactgtttgaattagcttgaccatgagtcgacgagtttcaacaacgtacacgtcctgacataccttccttcgtgcagtcactcgaaccttatattgtgccagagtctaacttgcatgttcccacgtatgtaaatggccaaagcagtaaacccaggaatttcgtgacatggtgatcgggcgaagtgtccaattcctcagccctagggtttgggcgaggcgaaacctcaagg

SEQ ID NO: 107129 - DNA, 366 bp, Zea Mays
gaaaattttacacttgtttccaatcatgtagtgcctccaaatcttcaaagcgtgcactacgacagctaattcccaatcatgcgtaggataattcttttcatgcttctgtaactgtcttgaggcataggcttacttttccttcttgcattaacacacatcctagtcctagatgtgatgcatcacaatacacgtcaaatcctttatgaatatcaggcataatcaacactagtgcagtggttagcctttcctttaaactcttcaaaacctttctgacacgcttcatcccacttaaactctttacctttctccaacagtgaagtaaggggtttcactattttggagaagccttcaatgaatcttctgtag

SEQ ID NO: 107130 - DNA, 722 bp, Zea Mays
cctcgatttccaccatgccgtcgtcccaggtccctccacctcccccaccgcgtttatctggatcaccccttcctccctctccgcccgctacaatctcttcttcgttcgcaatgcggtcaacttccttctgactgtctatccgagtcgcctccacgttgtgcaagtgcgtcctagagttttcagagtcacggttgcttgccaggtcatagcgaacgcgctcgtcgtcaggggttcgctgcgtctctcctcctccgtgctgcacgttcacctctctctggaagacgcttgcaaagcggccatggcagttcaggaggaagtacactttgatctcaaggttgacgaagcagttattgccccaccagaacagggcgcgactcccgaccccgcgtttacttcggtctgctctgatgttccttcgtgcactgctcaagacaatccagctggaaaggagcagcctctggggctctttttggattcgccagatccagggatgccggacttcgggggagcaagagcaactagtccccctgcctccacctgccgcggcctgctgccaaccgctgccccgcttgctgttaatacgccccaccaaacagcagccaagtcgtacgcagacgccctccgaaccccaacaaaaaccacaccgcgcgcgagaaaacctctaccaccaattactgccaccaacgtctgcttccgctgcctctcgccggagcactgcgtcc

SEQ ID NO: 107131 - DNA, 388 bp, Zea Mays
gatttttcgtttatgtcgctgatttgtctgtctagatttatttcttatccagatttttttgttatttatttgttgttttggggtctctggtctctttccagtgtttctagctagtgcagcggcacgtacggtcagagtagcaggctggacgatgcatggcgctgctgcgtgctcttccttccctcggcccggggtgtctcactgcctggtcatgcttgtgaacccgtgtttcttgtatgtttcaggtgcacgtcgccgcgtcagcttggttggtctttgcctctctagcagacagaaaaaaggcaggacgatccatatacagtagccataggcaccatcatagatttgtgacaagtgtacaaggttataaatccaaaatataaatgcg

SEQ ID NO: 107132 - DNA, 950 bp, Zea Mays
gccatccgcacagcgatggacgtcgacgtcgatgcggcggctgccctggccctgaccttgccctaagacgtgccactaccgacacactccctcgtgctcatcctctgttgcctcatccacacccgtccgctccgttgctaccacacatggcctctttaacaatctctacccctccagcgaggatgatacacgcgccccaacctggcctgcccatctggcctctctttatgtgttgaccatgcggcggctcccatttggttgcctgcttatatgatgccaatgttgcacccacggctgtaggtcaagccaaaaacatctctcctggttgcatgcatagatacgcaaggagcgtcccgtttccagcagaacagggtcgcatgagccatgccatgcttacacaccgaaccaatcagacgaattgtgtcccactccaacaagccgtgcaaagatctccaatgtcctcccggtgctcaagtaccacagcgtctgcgctaacgtgtacctctgcagcaccatctctacaacaccctcacgaagatgaacgtcgcggcgctcgagccatcctcagagtaggggcaaagggccagatatcgctgttggtattgcttgggggtaataccttggtctaacccaaccaagcaccagcggtaaaaacaaattaatccccaaccctaagtgttgtctcctatctgttgtcgcctgttgagcatctgagcggtccacgcctccaggctccagctctgcctcaagcctcaccttcactcgttgaggaaaaaatctcgagacctggtcgcccaattcggtgttctccttccgcccaggcctaggtgcccagcaccgcccatcactagtctatcaacggcgccgaagtgcgccaaggtcgaggtctgccccatcccctcccctaccgagctccgtgcctccatccagggcggactcgagaccaagcc

SEQ ID NO: 107133 - DNA, 541 bp, Zea Mays
gttgtaccatcacccgcatcaagaatttcgtggtacgaactaaagtgtagaaactcgttaccgtgggagttcagatctagatcttcgatccaaatttgggtcacagagttgttcatcgatggcgaccaaatctagggcgatgaggagaagaggtggaactcgtcatccttcgacacatcctagacagagaagttcctcactatcgaggacgagctagcttgggacatgaaatcatggaagttgttgtggccatccatgattcgacatcaaggggtaaggaaaggacaccgtcgtagtgtgtgaagggagctcatgcacagaagaaggtcggcagcgcgggtggaagaacaccggtggtcaaccggcacaggaaaaagagctagtatggggaagatgaatggctcggatgtgggggttgcatgggaaagaggatagacgcgtgacacaatagattaccgaggaaggagatgcggcggcgcgtggaagaataccgagcgtgaggggaagatgaccggtgatgaccgagcttgggcatgcccgg

SEQ ID NO: 107134 - DNA, 870 bp, Zea Mays
atctagcgatccatggtaacatagttcttaacatcttggatagcgatgagggagccagggagacaggtccataggggtacctgacatcgagcaacgagcaacgtgctatgactctagcaattgcatgagagcgagcaccgggcgatgtgttggtgggcaccaggcaatggcgatgagactaacacacgacgcactagtggaccggtggcacattgacgcatgtgtacatgttgggcttgggtagcctgatagggccttgagctggcactacaggcaaggacgagtgactttagatgtgggttgtgctactgtggcatgagtgttggttgtcttagccatcacgtctaggcgtgtggcggtgggccggtgtccagtagatgaatttgtgaactacaatggctttagagcttgactacatgagagatgactgaggactttttatttctgaaattagcatctcccacacgctgattttttgggtagatcgggtacttcagctactagaatgtttgacccaaaattgccttaataattttgggtattgggagttgataccctaattgttgtttgggttcgggttatttgggttcgagttttgggtatcggatcttttgcccagccctaggcacgaggacgtggatgggtggatcgtgtcgccaacgcagtcgagtactagagggacatatgtcttagatgtgggggacgcgcatgcggtgtgctactcgtggaggtttggtggttgagcttccaaaccacccagcgctacggacatcgaatttttgaccaaatttgggcctcaatactcaacagtgcagttctgacgggaatcgggggtggcacatggcatcatcacgaagggtgcgttaaggc

SEQ ID NO: 107135 - DNA, 814 bp, Zea Mays
tagagcttaaagcctttactatttctaacacatctagtacatttgtcatccttcttcttttgggagttgtcgcaagacttatttgttccttcgacactgttacttctgccgaagggcttaaaatttctaacatttttgtcccttcgatttttggctcttcagtcttacctttatcagtcttcgactcagctagctcgactgagggtaccttcggcattatagctggatcttcagacttctgcgtaggagaaatgggctcctttggtttagcagctgaaggagtctctccgcaaaacttaggcaccccgactagttcaatataacgcgaccggtgggtaaggactttcaactttttgctcttcggcgtaggctcatctggagtggctgaagcagaagtcctggccgaagcagcagtcttcctcttctttccccgtccccgcagcgggtagcagtagtcagggtaaacaaaacctatggcatcaaaaactctgttcaatctcttttttccctggccaccaaaggatgtagacaatgcattatcttctgctttggaatacggcccaagcagttcatcacttgtagcctcgatacatattagccagtcatcattcggttcatcaaatttatctccatatctgaagttgtatttcagttgaaccagctcaccttcgccagacttggtgacagtctccttcggcatttcccagttctctacaagtggccatactctgaaggctatatgctcctggattaaatctcttgtaccaataaaaaagcagacagtaccaaaagctttttggcatgcttcggcggc

SEQ ID NO: 107136 - DNA, 513 bp, Zea Mays
ctgggggaaggcaaatatgaggcagacctgttgatggcaggcaattgttaaggtccggtggtgcaccagacctatccaatgaaccaacacaaagcaaatttttggcagttttccttcaatgcctttgttgggtatttggggctatagatacccctcctatcagcctagtcaagcacccaagtcactcaagagcaacacattcattcataagcattagagcaacactctagaaagatccaaacacccagatttgcaagagtagcctagagagagctatgcggcaagttgtgtgcatgtgttcttggttcttggtggtggtggtgtgttcttgtgtgcgttctttctccctcttgttttcattggagttctaactcccattcattatgtacggcaaacaagagtctccaatatttgtggagtaccctatgagaaggaatcgatggctcaagttgttcgtgagagcacctagagggggtgtgaataggtgatcctacaaaacttaactaaaataac

SEQ ID NO: 107137 - DNA, 438 bp, Zea Mays
ctccaacttgtcaccctctcatgatgaacaacacatttgcaatgttgtcatggaaagcgttcatgccttgttcttcatcaccatcttcttcaaacaaattattgctctgaatcgatatatagttctcatcattgtcacacatttcaaaatccgcgtccgccatagcactttctctaatgaaattatgaagggtcatgcacgcaagtataatctttgtttgctttaccattggatacaatggtaagtgtaacaagatcctccatttcatcttcaacacgccaaacgaacgctcgatgacgttgcgaagagatgagtgacaaaaattgaatgactccttcttcccacttggtttagggccttgtcgaaactctagtacatgatacttagttcccttgtaaggagctaggtaaccatcacggttagggtaccccgagtcaa

SEQ ID NO: 107138 - DNA, 526 bp, Zea Mays
catgatatcatcaccgttggagccttgctgtcgggggggcttcaccaggcttcgttgatcatgagcgttgctccgcctagggagattacgctccggccgccgggaattgttcaccggagcaactcccccaccgtgaaaagaccctgccgcaaaccaccttttgtgcgtcgccatatctggtaaggcccttctcatctagttcgtgaagccatccttttcgcgtatcaccaagcagggttcgtagtagggcttcgggtgagtgttgggatttctccggcgaggccccactgtaatggctggcggtgccgctgcctggcagcagcgtggggaggagaaggcgtcggggcattgatgttgtgattgatggctccagatggatgttagtgtggtgtgtgcttgaccatttgatctcgcatgggcggccaatattaggtcaaggataccccttcatgactcgggcgggtggtcgtttgattgggatccgagggttgcgattgaaactcgggtaattaaatctgggccgctg

SEQ ID NO: 107139 - DNA, 391 bp, Zea Mays
aagatcttgaagacgtgaaaaacgaagctacaatcaaagatctagaaaataaagtcgaaagttacgaagctgctttgaagaaaaaggacttcgtcattcaagaccttgaaaataaagttaaagatcacgaagctgccttggagaagaaggacttcatcattcactctatggagggtttgctggctgaagctcaagccgaaattgacaaattaaacagcgaattactcataaaatcagaaaaatctgagcaagaaaagaagaatcttgaaacaagtctcaagaccgaaattgagaagaattcaaatttgcagaaatcattgaaggagcttcaagaaaaatgtttagattttggcaaccgatgtgtgcagcggctgaaggatgtgttttactc

SEQ ID NO: 107140 - DNA, 275 bp, Zea Mays
gaatataagaggtaacaagaaatgattgaatagactaactccccctaaagctatgcataggtaaaagatatattttaacaacatatgcatataaggaaccatggggagcatatgatgtgaaatgacatagtcttattcaaaaatagagaagacatgggaatgataccgatcgtggaatgaaaccactttgaagttttgcattggaagcttattgtcttatctttggggactccattttccttcaatgagattactacacacataatagacttgca

SEQ ID NO: 107141 - DNA, 660 bp, Zea Mays
gcttcggttaagtctatctcaaatcgcccttctagcccatcttggaagaactctccatcatatgtgtccgggtctaagttataatcttcatcgctaggaacaggtaacctcccgtgcggcgatatcttatacacaacatcccaacccttaagatgttctttcgtttggcacacatatgggagataatacacttgtgtggcctgttgggccacgatatagacatcatctcctggtaaggtggaatcttgtcgaatttcgactatcccaagattagaatatgtccgtctcgtcacttgagggtcaaaccaatgacatttgaatatcaccggagtaagaggtttggaaccataaaaattgagctcatatatttcttcgattcgtccaaaataatcgacatcgtcaaggccgggcgtaaagactccagaacacattgttttccgattgggctaacttttgtcgtagtttgttgtgcgaaaatggtatccatttacgtcatacccagaatatttcttgaccctataagcaaagccgttggctacttgtctcaactcggcactcatagacggatctcttttgccctgcaagtattcgcaagttaaaagacgctaaattgagttcatagacggatctctttgacaaactaagcacgtaccttacatt

SEQ ID NO: 107142 - DNA, 543 bp, Zea Mays
gtcgggatgggcgagtggcgtgcatctccgcgtgaagctcttcttgatctgggtaagatcgctgcggtggaatgcaatgatttcggccgccacgcggccactaatcgctccggccatatccggtcatcggcaccgctcccctccgttcatccacgccgcaccgattaggccacgttactatcgcagcagggacgtggcaagctcgtaagaaagggtagcgctcgacgccgccgttggtcgccagctaaggccggcgatggttatcaccatggtcgtggcagtgattcactgcgcctataaattcatcgcgtcctcacccccttcgttcaaatcaaccgagctcagcccttcgtctctaaattgcgaagccgtagcactcgatcccacccttgattagccaccctagccggagaatcaccaatttcccccaaatcggtccgccgcgccaccaagaacagccgcccgtggtcagccacttccaggtttattcatgccctctgctactttgtttcagcattagtgtgctcccctgatgctcctcaa

SEQ ID NO: 107143 - DNA, 804 bp, Zea Mays
aagatcccaggtgcagtgcacccaccatcagtgaacccactccgttatccacatcggcgttgtgattcgtgctctgtggcacgcgtataactgctagaggtaaaagatcttggcgtagggggtgagctcgggtcatgtttagttcaccgtacccacttgcacgccgacgtggtcgggcgatcatcgccgtggtggccaccgtcctttgtggttgcgccatgctgtgaccctttcaccacgtagctataaccatggcaagcctggagttactgcccttgaaccgttgtaccggctagcgccacgacgaactcatccaataaaacatcccatcgccgctgtgatcatcttcgactcaaattggcgaagcacgtagctggttcctttaaattgagcactaccagcgctccgcctctctgttacgcgctcataccaacctcggatagcctctctcgtgcaccgtagcccccagccactggatttcctcaaatcaggtcactcccgcagccgtgaggcaccctaccgtgatcagccgttcccaggtccgttcatccccctctgtgccatgttttagcatccttgaatgttaacgtagctcgtcggctcaaccgattgaacaataccatgatagggcatcgagaacaacacctcgccaccatagaacacaaccgagagcgcactcacgttgacccacttccccagcctcgctccgtccgaattcacgcgtgtatccgacctctgttgaatcagtgaaactcgccctaacttcaatttaaacgctaccgtgttttgtttctcagaacacgc

SEQ ID NO: 107144 - DNA, 1076 bp, Zea Mays
caactctcatagttttatagtgttgctcttcaattaattgcccgacggtaatcgatacaactttaaatatctccctaatttttgtagatcggtactgatatacttctccactcatcaaacatcttgtttgaccaaagaatattgttgaataacttggctatccatactatagctatgtccctgaggctccatgcttctattgagataccattagacccatcgccttacacccctttcatcctcttcaatgcctctctctaatctcagatttttggatcgtgcacgaaacgcctattggtgtcatcatccaattgaaaggttgtgtttccattgaataatttgtcaaaatacccttgccatctctgttgatctcatccccttcatgaagagctgcaccattttatccttaacgcacttcacttgattgaagtttcttgtctttctttcatgaaccctagccatctatatatgtccttctctctttcctttgtactcaaacgttgataaaggatatccttgtatgccctacccttcgtcacatatacaacttgttttacggtcttctttgctaccttgtgcttctttatgtttttcatactcctgtcatggttcatatatctagagcattctttcttttccataacaaccctttatacttcctcgttccagcatcaagtatctttagcttcgtctccacctttggttgctccacacgtctctgaggttacctttcgagtgtaagttgccatcttctcccacatgttattcgtatcatcttctttcatgtgccatctttgatgatcctttctttaacaacccttgtaatctctgcttgtttatccctacaggtacacatctgaaaacgaaattccaccaccataaatttatattgaaagacaacacactctctaggtatcaccttgcaatcaagcatgcttgtttaccctctctttttacgaggagaaattcaatctgactagagttttggctactattataggtcactaaatgagattctcttccttaagagagtgttggatatcaataggtcaaaagctaccacaaactacaagact

SEQ ID NO: 107145 - DNA, 646 bp, Zea Mays
ttcattggtacaagagacctgatccaagagcacatagcctacagggtatggccacttgtggataactgggagatgccgaaggagactgctgtcgggtccagtcaagatggattaattcgtttgaaatatatcttcagatacagagaccggtttgacaaaccaaatgacgactggctgaaatgtattgaggctactagcgacgagttacttggggcatataccagagccgaagatgatgctttgtcctcagccttcgggggtcggggcaagaaaagattgaacacggttttcgatgcaattggttttatatatcctgattattgctacccctcacgaaagcagggaaaaaagaggaaaactgccacttcggccatctctgctgcaccaaagggcaagaaaatcaaggttttaacccaccggccaatatatattgaaacggccatagtgccaaaatttggtgaagagacatcttccgctgccaaagcggaacaagctgctcccgcctctccgagcgctgaggaatcgactatagtgccgaaggtgcctatagttgagctagttgaagccaaagatggggcggccaaaaagccagagtttgaaaaaacaatagtgctgccgaaaattttgagcccatcggtagaagcag

SEQ ID NO: 107146 - DNA, 647 bp, Zea Mays
accttccgtagtttcgccatgttccttgctccacatagcagagttttggccggagttttgctcggtgttggctctcctgggcgtgatcagggacctcgttcatggcgccgccgcctagctcgggtcctgggagaagatgatgagttaaccgttggatctagataaatggtagggatttgatgggttggggaaagccgtgatccgttggatctgtagagaacggacaggatcagatcatgggatgaggcctgtgtgaaccgcacgatcttaatcctacgcgcggtgtttgttttcacaactttaaatccgcgacgtcgatctaggatctgatgggtacggtcgcataccatttcattaaaggcgctatctaatctgggtcgccggatctagatcggacggccatcatcctgcaataccccttcgtgggcgtgttttccttatgagcccccgaagtatttaggtatcaacccgcggtccacgtagataggttctgtgtcttgggaatatttctccgaggcccctgtggtttctgtaaatggtgcgctcagcctagagaacagaaaatcaaaggaattcatttagaaaatacatttttgtatgaaaataattataggaacttaattaattcctagaaaatgcattttaac

SEQ ID NO: 107147 - DNA, 347 bp, Zea Mays
gtttgacaggtttttcgaaatgagtctgggtgaacacttcgatcatcttcatgataaagggtgcatgaagacaccctttgagaggaggccaggaagcacaaatgatctcttcccagatcatgtcaaacacattaatgcgggcgagactgttgggagcaaggaggagaaggaagacccgactctccccaaggatgttcatttgattcccgcccttcgggagaacggtcatcctggacaaagagttaaggtacctgtagtacctatgcatgttggcggtggtccagaactcccgatccatagagacatgaataaatttagtcttttcccgcatgggcagcttaatgtca

SEQ ID NO: 107148 - DNA, 989 bp, Zea Mays
gtttgatgagccaaacgacgactggctgaagtgtatcgaagctacaagtgatgaactgcttggagcatattccaaggaggaagataatgctctgtccgcagccttcggaggtcggggaaagaaaagactgaacagagtttttgacgccatcgccttcgtgtaccccgattaccgctacccgctgcggggacaggggaaaaagagaaaaactgctgcttcggctaccccagttgagcctgtaccgaagggcaaaaaggtgaaggtccttacccactgaccgcgttacattgaaccggtcgtggtgcctgagtttggcgcagggacctcttctgctaccgaaacaaaagaaactttaccgactgcgcagagcactgaagagccggctgtaatgccgaaggtgcttacagtcaagatggttgagacgaaggttgataaggctgaagagccaaaaattgaagaaataacaaagatgccagagattttgagccctccaacagaggcaacagtaccgaaggtacaaatgggttctactgtaactcctaagaggagaaggatggcaaatgtgctggatgttgtgttataaacaacaaaaaccttgagtcctgctcctacaaggaaaattgccgaagcttccaaggcgcaacccgaagctgattctaagcaggcaggaatcgaagctgcaacaattcaggctgaaaccgaagctgggccttcagtgcccaccgagatggagcgtgctgaccctaaggaaaaatcaacagagcagattgcaactgaagaaatcgaagctcctggtcccgaagcgtcgaacaaaagtattgactacattattcgtcatgcttcgggaaaggtactatcccaagaagagatgttagaagcgcaacattatgcccaaaaattgaaatatctgatggggtgttagtgttcaatggcagtggcgaagaagattttttgtactgtctcccggataataaagaaatattcgtttg

SEQ ID NO: 107149 - DNA, 442 bp, Zea Mays
ctacttgtgaacgagaatttaatttccaagcgacacccaaataaaatatctcggttcattttaattcctctcgttcatccgtacgtcagttcgctctgttccctgcgtcggtctcagccaacgagtgagcgctgcgcgaatcggctaacagatgacccctcctctccaaccaataaattgcccgtgtcttaatatacaactcatacgggagctcttgtctcagagaaataaaataaatattacttagctcctaagtaatcagcccctcctcaattacagcctctctctctccattttcccgcacacgccatctctccttcaccctattcctggcatagtctgccactgccagcctctggccagtagatggctgccgcccgtggtggcaaatggattgccagcaacatctcgttaaatcaaccaacatccttatatttaaatt

SEQ ID NO: 107150 - DNA, 279 bp, Zea Mays
gcagcacccgcaggggcgacaggaatggcttgcctcagaagggccaactcctgctgcatggcctgcattgcggctaacattgccgccggactcatcgagtccccactaggagcttgcggactaccccgagccctacgaggcggcatagctgcagccacagggatgagaataataagtaaatgagataggcatagcatcgcttcagataatgtcaaagctagcacagaccataacataatcatatcaatagcaagacagaaatcccatcctacatgtgca

SEQ ID NO: 107151 - DNA, 388 bp, Zea Mays
gaagcccagaaaacagaaattgaagatcttcggaggcaactggtcgaagctaaggaaaaatgcacagtcgctcaaactaatcaagaaatcagcgaatattggaaaaattatctagagaaaaatgttgaagaacttcacacatccaaggaaaggtgctttgagaaatctttggattgtgtgaagaaaataaaagctagcttcgccaaagtgggtgcctattctactgaagaaaacttcgtacgaggcgaccccaaaggcgttgttgaatggataagtggagaagccgaaaccttcaaagaaattttcagtgatcgcggggatgtttgcatgttttccgttgcgcgggaaatttcagctatcttggagaaggttggatgcgaccatatta

SEQ ID NO: 107152 - DNA, 612 bp, Zea Mays
cggtgtttagcattggcaacacactatgggaggccccacgtagtggttttatggttggcaagatcgacggttagcttgatggttcatgcaaagcacgatgggacacaaagatttatacaggttcaggccgtagagatgtgcaataccctatgtcctgtctgttattgtgacggaattgatctttagttcgagattacagagtgcatgtaaactatgatctagctagcctgtcagaggatccaatcgttttgtaggggtccctaacccaccttttatatgcgacgaggttagggttacatgaggtcgaacagattactattgctacacttatatccatggaaccgactccgactaacatgtacgcatgtggtctggttggtttatcttctctgcatgcataggaatctatttcaaaaaacccacacctacgtctttgagctccatgccgttatcctctagcttgggctgactgatcaacccaccaggctatccatccaaactatcaaggacctttggtggcccataggctaaatccggcccatggagacccaggggatatctatcccccacatggccataaggggtatttatagcccctaccaagcaaacaca

SEQ ID NO: 107153 - DNA, 451 bp, Zea Mays
gcaaaaataagggcaaggaagggaaatggcaagggcaaggacgacgaaggcaactcaggctctccttctacactacgcgtaggtggtgcgatcaactcaatctctaggggagggtgcctcttgctagccttccttctacaacacgtgggccaagactatctctatgtggctcggaccactatcgatgcaccattagatacaacctgtgacacaagttttttgggctgtgatgggtccctttggtcctcccaacggtcctccattcctgccagcaccaacacgtcatctcctggcatcgccacagttcccatgacaatgggtggcatcctcctacccctagacgtgggatcaaccgtcactggcttgctccttcggcaccatggctttgacttcactgataatcactaattgggtggtagacttcagtgcctccaatcatactacattgtat

SEQ ID NO: 107154 - DNA, 383 bp, Zea Mays
aaaaactagtgaacaaagagttgtaaaactgggtgcgaaaggagaaaagaagaagactcgaaagtgccaaaaatgtggcattgctgatggacacaacagtcgcaccagcctgtctatagaggaaaatagggttaaattggctagccttgctgatagaaaaagaggacgaccgcctgggtctagaaacaagaattcaacaatggccccgcagtgaaatgagacatccacatcaaaaaaacataaacataccgattctagagaacatggttcggatgacgataatttgacatgattgtaaaacatttatacataaatatttgatgatattgaaatgttatgatcatgatactatttgatgaatatgaatatttacgttaaaagct

SEQ ID NO: 107155 - DNA, 796 bp, Zea Mays
atatgttcaaacatagtagtttttacactttagtccaaaggttcaccacttttgcacataagcccctgggttttagttttagggttttccagggctctatttagggtttctagtatcccaggggtataaatgtgattcaactttattcttagggtcattttatgactctttccataaggtctttaggttttctcatcttaggttaagttttacccttttaaccactatttagggttaagtcctctaaccagggttctatttgcaaaacattaaaacaatacaacttgtttgaaatttttacctagtgaatgcactctaggtgtgtcaaacatatgcaatgctaatgcttatgatgccatgctcaagttttagttatagtaacaccaggggtgttacagaagtccttttaactttagttttataattaacccattctactttaggatcatttttcttatattttgattcgaagggtaggggaggggttgggcatgattacgtactaatttccgtaggtaaataatcgggaaagttggaacgtagaaattcctcagtctcctaagtagcctcttcctttgagtgattactccattggatcttatacatttcgatcgatttatcccgagttgatctttctttgcaatccaaaaccttggaagggcactcttggtatgatagatttggctctatctccaattctagttctgctataatctcagtcggcaatcgaacacacttcttcagttgggatacatggaatacattgtggatggcagacatttttggaggtaacttc

SEQ ID NO: 107156 - DNA, 497 bp, Zea Mays
tgtctcatataaccgctaatgtctttttctagcttcggaaattcgatactctttgatagtgtgcttacaattttcgccctagcacgatcacggatacaacctaaaatctcttcatccacgccatcgaagggaaaaaatacaggctgatagccgccagacatagcaaattccttcaattcagatatatcctcttcggaaagttgttggccacccagatggcgtagattgaagcttttgtctttcgaagaggcttcttcagttctttttcccttcgacgttgaagtctccgcagcaattgtccccttggtatttttctcacgtacaacattagcaataagtcaatcaatttctaataaggttgtctcgaggggaccaccactgttttcagcctgttgaggccctttgttggccacatcggctacaactttctatagaatcgccagaggcggggtatcaagaatagccctcatcacattcaacatccgatgcttcttctg

SEQ ID NO: 107157 - DNA, 591 bp, Zea Mays
gcggtccgccggctggaaggacgagtcgcgcatgaagaagtgtatatatatatataggagcaaggtaatggaagccctgggcttcgattagtaggggaagccccagccaggacgcggtcagcccaccacatacgtgcttgcatcaggatttatggtggtataaccgggttatggaatttgtgtatatcatgcacgcgacaaccacaagccaggatgctatgggtcagtaattatacgaatgcatatacatattgagtaatgtgcatataccatgcaacgaatctgagaacgcagttcacctatgcatgcgtcagcatttataccgggataaacagattgaataatgtgtataaaccatgcaaaaagaatctactgacgcgcaaatcacgtggaacgactttacaagtttgttcagtgtttacgactgcataagaacatgaaaagtaatcgcataaatcatgcaatatcgcaacgccagaccatttatgctattgtatatacgtgaccagtgtgtgcatagatctggtttggtttgagattaggaaagtagtgttgtaaaatctcgataaatgtgggacagataccgcttta

SEQ ID NO: 107158 - DNA, 327 bp, Zea Mays
acgtcggggtcatcatgccaacgagctgtggcagaatttagggtggtggctgaacagatcagcactagagatctagttcaataatacctggccaacagggtatctccaacgctgagtgaatggagtatgccgaagctaaaaggaacaaagaaggaggatgagcttgttcgattaccctatcgtttcaagtttgagaaacagtttaaaaagccttgccaagaatggctggagatgattgagactatatgctatgaaattttgggtaattataccaaaaaagaagatcagctaatgactgcagccttttgcacccgacaaaaacgaagg

SEQ ID NO: 107159 - DNA, 523 bp, Zea Mays
gaggcacgagcacagtcactatccgtcggcaaacgaccagacaactgaaaaataatgggcaacatggacacttcgagcgtggagctttgctcccttctctaatagatagaatgtcaacctcttcctcttcgtccatggggttgatgtctccttctaaaatgaagatctttcagctataatcatagttttttatgttgttgggagtacatggcatggtgattgatatagttaagttagtgactctggcttgatgtggtaattgatccatgaaggagactacatgggaggaagtagacatgttcctaggtagctaaattcctagccaatgtatgattttttccatctgacattgcagtaaggactaggccttgttgtacgcctatcactgggactccttgatcatatccccccttcaacctccgatgcgagagtggatcggataagacttgtgatcgattcttggtagattgaagcggtattcttgagtttgagggtgagtccaactagacttgtaccacatttg

SEQ ID NO: 107160 - DNA, 708 bp, Zea Mays
aacagttttgttgcaccattcaacattgatatgagcttgataagtctttaatagagtgtcattatatggaactacccacctattatccaacttgtgaccccctttaatgacgtagcggtcattgttccgtcgtctgtatgtagcaaatccttgttcgtccaggttagtttcttcatggaactcctttggataattcttcgagcatctgttatttttcatacattgagaatttggatttaatgctccgcatggaccgtggatcatatgttctgccaccaaacagtaccctaaagggtcgatgcttggatctggaatctcagcactgatgaaagaatcaataaagttggatgtaggctccgaagtgccatttgatacccaaaatatgatatgcgagtgaggtaggcctcgtttttggaattcaattgtgtagagcactgcatggaaagggtgttagaattcatggtagattatgtaatacgtggggaataattgtctggttttttatgtacggtcgtatgtgtgttgtgggatgagaacggccatacctgcagtgcatgatccaaaaatagatccatttcttatgtcatgcatcaaatcatttaatttcatatgataaactcgaactataacattagatctatcgggagggttctgtccattttcaaacatgctttccaaaatttcaggccagtttgcattgcatgtaaa

SEQ ID NO: 107161 - DNA, 610 bp, Zea Mays
ggaaagaattgtctgatcacaaaagaaagtaccaagggcagaccagcagaaacacccggcaaaacaactcccaaggttctcagttccgctccggaaaccagagtggaaacaataactaccaagcacagcgctctagacaacaaagttagtggaacaatcaatatcagaacaagcagagaagcaacacccagatcggtcaaaggtctagtgtccaacaacagaatcgttagggaagcgcagtgaacacaccggccaagaataataatacaactaatccagttcaacccaatggctgtttcaagtgtggcgaacttggccactatgccaacaactgcccctggagtaacccacggacaccccagaagaacaacaaccagaggaatgaccagaacacccctgattgtggatctgcatagaacaagactccgcagaaccagagtagaggaagagtcaaccatgtgacatcagaatcagttcctgaggatgccgacatggtgtatggtatgtttcttataaactccatacctgcatcagttttatttgattctaaagcttctcattccttcgtaacaaagtcattcatggaaaaacataatataggaaactatcc

SEQ ID NO: 107162 - DNA, 484 bp, Zea Mays
gtccaaccatgcgtggatcgagtctacgtaaagcaaaggtgaccatgaatactaccaaaaggaaaccatttaacgaactttgagacgaacatctaaccaaaactcaaataactcacatcatagcacgggggctaacgcagggaaaattatagttccaataaacatctacaatgagtaaggttagccctcgtgaaataagtctattttctcgggctttaaagagggagaagggttgttagctaagcttaaagcctaggtaacatgactactggagatgtgagaagaatacaacgtagcaatgctacgaagaacattggtgatgtgaaaccaagggaaatgattgaagaggaaggtcaagtgatccctccatcaaatatggacaccattgattctcgtgatcaaggtcaaatacatcaagtgcaaaatcaatatttgtctagtccaactcaaaataacacaatatcgtaaccaaccaagctcaaat

SEQ ID NO: 107163 - DNA, 822 bp, Zea Mays
cgaaaacaaaccgcgaatcgaaaaccaaaacgagacggacgctcgatcagacataacatcagacaaaagaaatatgcttcggcatgatgcagcacccatgtcaacttagatttttttgtttacacgcgatacggacaccagtctctatactgctttgaaaattggaagaaggagcgaaatgggaagggaaaagagtgtaatgcctgaatttggtgagtatcgtagaaggaaaattatacccctcaaattcagggtgttacacttcatgtatgcttatcttcataccccatgtttgtttaagacatttcagtttacataccccatgagcgatcattatatttcgcacaaccttgctgatctcgttgtttccttgtaacttccctcggtaatgaatttttacttcaacccttctgttgggaccttacctatcgtacccttgattgttttctccgcttcgccacttcacgagtcttctcttaacgctatcctttgttatgcttttcattattatcatctttaccttcaacatcaccatattttacattgatggttatcttatatctgcccttcaaactctcctctcttccatcttgatctaagagttgtaaaattttacttatttttcccttggtcgtatcctcttctttgtcacctgcgagttttcaactctatcctttgttgtgattttgtttgttatttcctttatctctctcatctctctatccaacctgtgattacattatgtctgttatctaaaatctccaatctcccatctcaatttgagagcggtgttgtacttacctcacccttggctatattctc

SEQ ID NO: 107164 - DNA, 431 bp, Zea Mays
cttcttctttgtgcaagagcaatcattctagaatttggcattttttttgcttaagggaagagggggtagaaattcttggactatatggcctttttcatggggtagggggtaatgggtgttatcttatatttttgaatacgttttgtatttttctctggtggtctacttcatcaataattgggtaaaaatttatttgcctactattgcacaattttagactttcttatgatttaattagaacatgggccaaaaccatatttgaattgtttagctcactcattttgaggggttggggtgttcattatttttgtaatggtgttctaccagttaggagtctactgaatttctcttaccatttttgaaatggtccttatatttttaatcatggttttccttggtttcttattgcctaagaaatatttaaccttcga

SEQ ID NO: 107165 - DNA, 601 bp, Zea Mays
tgaggaaagactccatccaagattgtggatcttgactcttctttggtgatctcacttgatccttgaagacttgagttggtgctcatccttccttgatgaagttgatcatcccctttggtcttgtctcattgattaggagttagtgtatattattgggctagagaatgtggttaagataggtatggatgagatagattacatgatataggtcaaaatctggtttgatgtcaggtggtggttgatagattatgcaatcctttaagactctattgattgggtcagatctcatgcatgtgatttagttggtctaatgtactgagttaacacctgactagtagggtctattctcttctaccagtatcactaatctgtttaagtagaccacattagatagaatctagatcaggttggatataactagattagactagtttaggttagatagatcccatagggtagaatatgtattattaagatatgttagaatcttttgagataggatggggtatacggtgtaggtaggtcagaagctctattaggttaacacagagggattatgcaactatcggatgggtaaggtagttgcatgtgtatatgatca

SEQ ID NO: 107166 - DNA, 353 bp, Zea Mays
cgtactaaagcatataattctttgtcatatgtagaataattcagagttggaccattcaatttttcactaaagaaagcaacaggtttacctccttgaatgagcactcctccaatcccaatgccgctcgcatcacactcgagctcgaatgtcttgtcaaaatcaggaagttgcagcagtggtgcttgtgtgagcttcaacttgagggcatcaaaggcttgctgttgtgatggtccccaatgaaacgacactccattctttgtcaactcgtggagaggtgctacaatggtgctgaaatcccgcacaaatcgcctgtagaatcctgcaagaccaagaaaacttcgaacctgcgtgat

SEQ ID NO: 107167 - DNA, 300 bp, Zea Mays
cttatccggactagaataaatgacttgtgtcaccttgcatcatctatctgggtcaagacacggagcatcatttcactagttggtgagaccctcgggtcaagacaccaacaatatgtgatagaaataaccgaacaatgggaatacgataggactacaccaacgaccacctagtcgtccatctagtctcgcgaactgtttgttgccaattgccatgcatgagaaatgtaggtgccccctttggtcagcaaaggttcctcacgtctttctatctttgtttgttgttgcgagaaagttgttgac

SEQ ID NO: 107168 - DNA, 925 bp, Zea Mays
gcataaacactaaagggtccatagtgtgatattttgcaggggtgtggccaatggaatgtttgttgtccagttcattcttatctcaatcctagcacacaagtatttcctttgttcccatactgcagacatcaaacataactaataattactcactgctcactaattcacaacagtccaaactagatatttttagaggagaaaagctcctagcacacgaattatgcacttcctccatatctccatcactctctcaatctctaccaccagatgaaactcagcatggagagaagatattttctgcaccccagtctgttccagattcagttatctgaaccattcacaccactacctctaaatcagtacaaccttgatatttcctgtagggagttgaggtctctaaaacttggttatgtacttcatccatgtcttcatcccaacacacaagcaaagcacagggagagaggtgatcttcttcagtgatcccattaaacactgaaaccaacttcatatgtcctgctgcttcattcctctcctccatattcattccctggcatctcacaattcccctcacaacagacctaccatgcttagtagaaattattctctaaacatagctctaccaacttgggatagcaacccataactgaaaacatatagaacaaaagttatggtactccaagttatagccaaaaccactgaaatgtcgaattccaaatgtcggaaacaacataacaccaacctgatagcctaacttggaatccacttttctccaaattctcagtgacaacaggctgattttggttcacagaattttctcacctaatacagctctacaagtttgttgcagtagcctaaggctagatgcccataattcaagagttatggtgctctaaagttgggcaaacctcactaaaaacagtttcag

SEQ ID NO: 107169 - DNA, 295 bp, Zea Mays
taaaagtgtattatgagtagaaacctgcgtgcgatccgaaacccaacgtgtggatttggaattgcacgtgtgagtggtcatgggtggttttaggactggtttggtgaatggatttgaaggggatccataggcgaaatttcttgcaatttaaaattaaatagcaagagatttatttctcataaattcaccacccttaagtcagacttcatgggtgagaccgtacagggtcctccccggctttttttaatcgagctttttatttctctgcttttaagaaagcaaaataacagttgca

SEQ ID NO: 107170 - DNA, 639 bp, Zea Mays
acggcgcatgcatgacgtagtagtacacgggtgggtttgctgatgtgtattgtatggctgttgcaagctgacgtcatcatgcaggacagttgttgctggtgattgggtgaagtagacgtcgaccgaaccgttgaagcaggcggcgaggtgagaccacacgtacgttgtttaagtagaccacaagtcgaagcaagcagtttaactagagtacagtcttgaattcatgatggcgcgcgggctcgacgacgatcacaagtcgcagcacgacgtacacacgccatctcgcaacgttgctggtttcgaactccatctgatcctgtacgcgtgtgcttgtagcgatgcgtggtggatttacgattttacctaagaatatatacccttctacaagttttcatatacatagttctttcgatctcgatacgagttatatcccaaccatgcgtcgtcaggggctcatgacgtcagccgtcagtgtgccgtgttcgctcggtcgtcgtcgtactcgtcctctaggctccgaacgagattagattaatcggaagtggaaacatcgtgtatgaagttaacggagcacaggtactcaattctaaaacgtttggacttcacttgccgcgttattacgcgggccttccatcgttc

SEQ ID NO: 107171 - DNA, 383 bp, Zea Mays
gcgcacgttagggaggactcggccatcgcctcgggaagacttccgcctcgcccgactcgaatctgaccttgatatcagcaacaaaggacacccaatgtcatccaacacaggagcgctgacgcatcccgtaagcagacttttacccacactgaggctctgttgcaaccactacggtatgggcgatccctcccctgggggctcgggcgtgtgaccaacccctcggcctagacctcggttctcagcgaggaaacaacagattcaagtcaacaacaaagtacaaggtcatgtcacccataggacgccaagacacctcccttagtagcacgacggaccccatctcaatagcgtacaccccctaggtgtataaataaggcaatccatga

SEQ ID NO: 107172 - DNA, 567 bp, Zea Mays
tacgaagaaaaccccagccgcgcagtctttcctttcgtcggaggcgactcgccaggcgatttccgcgcctccaatccagcgcaacgccaatccaccgccgctccaatccagcgccgttccattccagcttacatccttcaatctcccagcattggagcccgattcaagaagttccaggtaatccaacattgaaatacaccgagtttgccgtcgtttttttgaagcatttcggtcgattgaagtggatttgattgtaacccttattctccagctaaatgtgtgatttgtatccgtttatacatctctctaatcgggtcattgcatcgcgcattgcatctcttttttgttcaggagccccgatattagagcatatgtatttattctagatccccactatcgcccgacattcatagatctagacaaaggctgtggattaggtatttactgatgagttagcaaagagtactcttacacaacccaagtaacacatatatgctttttgtatttaatatatatgcatatcttcaacactgtttatgcacattcacttgagtcatttgtttacac

SEQ ID NO: 107173 - DNA, 776 bp, Zea Mays
ggagtttttcaagtcgatgacttatctttgaagcagcttgttggtgtgctatttgactggatgtggggttctcatggccgctttatggtcagggagagggttggacaggccatggagcatgtagcattgtttcctacttgattgggattgtatttcgtgtgtctatactctaatgtgctgaatttttgtgaaaggcacggagggatgaggagatcgaggacttggaaggctcgttcgttactctgcaaattgctggagttggggtgggtgcgaaggaggagtcctcgctggctagggctgatgatgtcgtgtatagtgctgcagagacttcacatcgagcggttgacgatgaacaacgcgatgcacatgtataaaaggggtgataatacttttctgaggggcttgatttgtggtacgcattaacacatggtttggtacctgcacaggttctgttgactgagcctatgcagggggattttgattcctcaggcaatggaagggatattcttgatgttgtcgcatgtgttacgtcactatcttatcagattatgtcgttttccaatgatggtgatgattttttatttttaatcgtcgagtggcgaagggggttcgaagttctttgagggtatggccgatgagtcctctgaggaggacttagaatcttttttgatatgttggatgttgcctccacggttgatgctaagacaggcgaggagccttcgagtggggcttcacctgctaagtccaaaatgagaaggacacgagttggaattccg

SEQ ID NO: 107174 - DNA, 370 bp, Zea Mays
agggtcgtgatttcatgccttcggtattatccacggccttcgccttctgcagcttcgaccatgtgttcttgtggttgagggggtgttctgtcttcgctccaacacgagcccctgaggggttggttcaacttgttgagtcaattctgaagtcatgtgaaggcgattgacgaacggtaccctcgatcacaagttgaaccggttgctttttgtatgtgacccttggttgctgacgtgttcggcgacgtagggtggcacatattttgatgaaattctatatataaggacgaagcagaacaaggtttttcctttttttgcacactgccacactcatcctctttagttttttgctctcgcctcacatttctctttg

SEQ ID NO: 107175 - DNA, 413 bp, Zea Mays
tacatgagggatttgtaggagtaaaaataatgggagcataagagatttcatcaataatattgcaagtgagtacatgggattatgtagtggctttgaatgccacactcttctttttcttgtcatccatcatctagtcctccttatcttccctatcccattccacatggtatgtgtgttgtgggaccacatcacctagtacattagtaggggttatatcttttaatctacctcacataatgatgatgactagagtgtcaaatcttggaggcaaacatccctagaactaatgagagaagtcctcacatccacttataacccaagtcccttagctcatttataatgatattgagcctatgaaacatttccatcgcactctcatcttctagatttgaatcttttaccaccaatgtgca

SEQ ID NO: 107176 - DNA, 496 bp, Zea Mays
atgccctaagctctaattctaccggtgccacgcgacgaggaggacaaggcagactcagatgaggactacttaccgatggttaggctgcaacattcctttcccacagggacatgcgatccatggtggatcccaacttctgatgaggaattgcgacagcgccagaggtcgttccaatcccacgacgcaatgccaagcatccaaacgggccagtgattaaccttatctcccagccaaccagcaactcacaatcgatggcggcacggagcgacttcctctgtgctctcccccatggaggctctcagctctcacgatcgcgcgacgttagcgggacgagatgcagaggagtatggggagctgacttaagtacccgggaggatcatgtagtggctcgggaaaaaggggaagagggttgagggagatgcggaattcacaggcgggagatcggcgaagtctgttgggaagacgctcctcatgactcggccccaccgcatagcga

SEQ ID NO: 107177 - DNA, 986 bp, Zea Mays
agtatcattgtttttttgggtcagggaggtgacattgatgcatctcatgacactccaacttacacgggccccctttttttatcagacacctagtggtcaatgtaagtactccagttatacatttattgcatgcttgcttctcataactcattcataaattactatactctctacctgcattgtgtttcaggttgcatatggtgaggaaacacatagcttgcacactacacacgaccactctctgccacgtttaacagaattggactgtgctcggtcgctacgtgattttttgtgctcctcaaaacccgacccaaacaggtttgtctttaactattaagtaaaaataacatgtaggttgttgcttacatatataatgaataacatatctgtttttacattattatataggaagatcatagaattcggtgaatgtattggaaattgtctggatattcaacaatcatttgcagacgggatgtgtctggataatgtgttcatgcagtgtttcatcctgtgttttcgcgatgaagaaataaataattgctcgtccatcaacaaaaacagacttgtactggatgtcaatgttggtgtatgtacaattcattaatacctacctatttttgcaattgtttacatgcagttttatatgacacagtaattatgattatgcagactctcctcaattttgaggagcatgaacgctacaacaagtctcctcagatttttgatcaaactgtccttgatgcttatctggacaagacactgccccagctggacaactttgttgactacaaaacggtataaatatttatctttgtatcaacgtttttctattatgcaattatattcattgctcacctacacactaatggtatcattttgtatctctaactcctgatatttgacagatcatggtccctatacttcatatgggacattggacattgtatgtcatcaatatccagtttctatgcattcacatttta

SEQ ID NO: 107178 - DNA, 672 bp, Zea Mays
gttgaggagtttgtaaattttgtctgtgtgatactgaaccttgcttgctgcgcaggttctgaggtttgggcctgcgcacacaaccgctacttacaatactattcttgtggcggcttcgactgtggctgccgatgatgattcgtttggctctgtgtctaagtgttttgagtctgatgattctgggagttcgattgcgtggacggaggagtcttcagatgaggacttggattattttgcagcgttagatgtggctggagcggagccttcgccgcgcgtggagggttccgaggggctcccgggtgcgagtactgggtataggcgccgaagggcggtggcgaaacagagagtgagtgaattgttgcgaagtggtaggcgtcattgtagtgaaatggagagtggtcgtcttcgcgtggacgggactggtaagcgagaattgttgtcctcgccgattggggcgagtgtatgtgagggggagctgcgaaatctttttgagggtgagtaattgaggataatgttgttcaactacagggagatgggtatcatcccgaaggttgagccaatataatatatgatgccctcgctatgtgtatgtgactgtaatttgtatgataaggctgcgcaccttcgttgatccggccgcgcccgtaggcgacttttgcacggagtcttttg

SEQ ID NO: 107179 - DNA, 325 bp, Zea Mays
aaggggtcttgatatcctcgagcagaacaactttgcatggggcttgatgcttgatcctggcaagcttggccatctcctggcaaatttcttccgtttcaccaccggacacgtcgatgacaacaaggataccggaaggaatccccccgaggatggctctcctaggactagagttgttcctcaacaggttcaccatctccttggagctgaagcaccggtcggcgctgccgcattccgcggtagcggtggccgtgctattgctctgcaccttctccaaggtggaaccgatgaactcggcttgcggaaccagccagaccttgacctcgat

SEQ ID NO: 107180 - DNA, 879 bp, Zea Mays
ggagacatttttaaggtgctttgtgaatgcttgccctaacaaatgggtggagtggatttatttggccgaattttggtacaattctagttggcattcagcattgggtttttcacccttccaagtattatatggttatgctccacgacactttggtgtggatgcttcctctgtttctccagtgtcttctctgcaagactggattcaggaaaaagggctgatgactgaccttatcaagcaacatttagcccgggctcagcgtcgtatgaaaacacaggctgacaaaaaacgttctgagcgatcctttgaagtgggtgagatggtgtatttgaaactgcaaccgtatgtccaatcttctcttgcaccgcgcgccaatcaaaagttggcgttccgtttctttggccctttccagattctatgcaaagttggcactgtggcttacaagctggctctaccttcctcatcggctattcatcccgtatttcatgtctcacaattaaagcgggccgttccagcatccactcctcttgctcagctaccagtcagattggagggtcttcaagtgccagaaaggattcttcgccgtcgactggattcagctggttctcttcagattttggtcaaatggtctggtatgcctacatccttggcgatatgggaagattatacagctcttcatcaggcatttccaggtgcgcctgcttggggtcaagcaggtttccttccagggggaatgtcagcactaccattactacactgggtgatcaaatgtcaaaggaagcaagctgtcaggctcctgcggacaaggaagatggtggaaagactacagaaccaaagaaacctgggccacgtaaaagtgaacgggcccgacgggctaatgta

SEQ ID NO: 107181 - DNA, 369 bp, Zea Mays
ctcatcaaaacatacttgaaagttgtacgccgaatgttcttatctgtcctgatattgggattttgtaaataattagttatgggcgtcctccaatcacttgcatcggctttattatcagccgaatcaattaggagaactttcctggtaactccggacagtccggagtctctacttggacggtccgcgaccaggggaattggccctgcacttgttatcagattttcagtgttgtgaaatcttcctcgctttatccgataacctgatgcatcttgtgccaaattgttagctctatgattctcaactctagagatatgtcaaatactgaattcatcaaaagaatgaattatgccccaacatttttcaaggtaa

SEQ ID NO: 107182 - DNA, 400 bp, Zea Mays
cgggactgatttgggaaggtctttgaacttgcatggaccgcaggttgaataggtaaaagaatagaggctcatatgcaatagtgttgggctgaagggatattgagtttctaggacaatccgatccgatttaatggtctggattaaatcgtgcgaaggggtatgcacgacctaatccacgtcgtccattactcgatcaacgaatcagattaggtcgaccgcttaccaaagcggtacgcgatacgggccgcacatcatctgagcgacggtgtagattttaaacactcgtggtacaatgtcgaccacccgatttaatttcaacgtcgtggatgctattaagcgaacagacacgcgatcttttaatcctatccgcccaattagatccaacggtcaccgattcatc

SEQ ID NO: 107183 - DNA, 467 bp, Zea Mays
gtcatctactgataaatggtgacagactccttcttttagttcaggtaagtacagcttggttaccattttctttccggatggggacaccaacttaactgttctcttgtcacaactgacagtggcttgatttctgtgtagccaattcatccctaggatgacatctaacccttgagttcccattactactaggctagcggggaagtctacccccttatttcaatccttagattcgaacaaatcctatcggactgaacttttcccccaactgaattaactcttaaaggcgagatcattggttctatggggatgttatgtgattctacccaaggtgtagaaacaaatgaatgtgtggcaccagtatcaaatagtacttttgttgggtaggattcgactggaaacaccttgtcttgctggggcattgactgctggcggctgctgagctgctttcttaggacagttcttcgccc

SEQ ID NO: 107184 - DNA, 307 bp, Zea Mays
tcgcctatcacatcggctccaccttcggaataatacccatctccctgtaattaaacagcattatcctcaattcctcaccctcaaaaagctcccgaagatccccttcgcccatgcccaccccattcggcaaagacaacaattctctcctaccaaccctgtctactcaaagtcggtcacgctccatccctgtgcgacggtgcctgccactccgcgaaaattcacccacacactgttttcccaccacccttcgccgcctacacccagtactcgtaccaggaagaccctcagcaccctccacacgcggcga

SEQ ID NO: 107185 - DNA, 780 bp, Zea Mays
cagatatcgtgagatcaccaaactgcttctcctcgcgaacaacatgtcgctcacatctgctatccctgtctaccctccgtctacccctacctccccttgtgtctacatttgtctatactcgtcaacctccacttttctcaccttgtcgtgcaacgtctcacgcgatgtgcacgcaaccgccttccccctcgctcgttcttctcgtggtcatctgaggcccaagtgtcaactttatcttctctaaaagttatctatttctcgtgcacgcgtctgacttggacaaagcctcaacaatctctcctcatcctgcctcccatcacaagccgtggcgaaatcgtgcaactgactttcgcgccctcttctttatatatatatacacacaccttatcatcgcgaaccacctctcttttcatcctcgcgcgacaactcctcacgcccggttcagctcggtcgtgtgccatgtcgcgcgcacaaaatcacctaaaactgtgcctgacttgagtcccacccgtccgcagcacaagcatacccccttgctcaaccgtttcactgatctatcggccccacacgtcgtaatcatcctttccaaaaccgcctctcctcttgaccccgcacctttgtgtcgtgcgtgcgcataaaatggaactagcatccgtgtgtgcatgcgtagaagtgccggcgccctcctctgtccctccccacgcagcagctagagcccgccgtcgccaggaatccttcgtgtgcaggtgagccctcctcccctcctcacgtcacttcttt

SEQ ID NO: 107186 - DNA, 1017 bp, Zea Mays
gtcaccccgagttaagtaagcgtgagcatgtcgcatcgtcttaagtcatcgccgacttaagccgattgctccgttagtagggtatagtggtcaccccgagttaagtaagcgtgagcatgtcgcaccgtcttaagtcatcgccaacttaagtcgattgctccgttagtagggtatagtggtcaccctgagttgagcaagaatgcaggttgacaatgaacaattcttgaagtctttttattgatgatgcatttcccagtttacagaatacattatcgccccaatagcttttgaaatatagctaaggataaaacttgctgaggtgttctatgttccatgagttcccaatttccgtgccgtccatctgagtgaggcggtatgatcccggtcgagtgacttcagctactacgaatggtccttcccatagaggtgacaatttgtgccgtccctcccccgttagaattcggcggaggacgagatctcccactgcgaaggatcgaggtcgtatggccttatcgtgatagcgcctcagagtttgctgataccgtgctgattgaatcaccgtgttcagtcgttcttctttgagcacatcaacatcctctagcctagtagcctcagcttctgctatgttttcaaagatcaaccttggtgccccaaacttgagatcagaaggtagcactgcctccgaaccatagaccatgaagaaaggagtgtttccatgcagggctcgactaggttgagttctcaggctccaaacgacgtacgacagttctctgatccactttcctgtgaacttttcatttttgtcgaaaactttctttctgagcgcctccaatatcatcctgttggctctttctacctgcccgttggctcttgggtgtgccaccgaggcatatttgatctgaatgctcttttgctcacggaaatccaagaactctgagcttgtgaagttggatcctaggtcggttatgatgttatttggtattccaaacctgaatattatatcttgtatgaattcca

SEQ ID NO: 107187 - DNA, 751 bp, Zea Mays
attacttaacatggaaagggttggcgggttgataagtcaaaagggcgagggttcttttagaaaacgaccacgactgttataatgcgcgggcaaccagagtcatccagatcgaatccaatggtcacaatacaacgcgcgaaggggtacgcttgattaaatcatggcccccatctgtgagtcgacggttctgatctatcagattgaagcggtatccctaggggtaatctgagccgtccatcagtcgaccaacgactcctgttttccccaccaatctacacaaggacgcggcggcgccggtcaccagggcggcggcgccattgccggcatgccaccaccccacaccccagtatcccaaacttcaacccagcgcgtgctacacatagaggaggtcaaggcgaacctagaggagtatttcttactagcaatggtgtagtggagatctcgagccacagtgaggtgcggtttttccaacgtgcgtgacgacggcgaacaatccgccgaccaccagggtctctccaggctagatgccgccatatccgagtcccgaagatcacgacaaagctcccaaggccgagtttgcgcaccgaacagcaacagggacacagtcccatggcggcggcgtctggttctccttctctgctccggaccgtggtggagcccgtgcttgcttctcgtttctctctcggtttccgtttatggcgcctggctcgcgttcttatagccttgcaaagttggtcccatgccgctagca

SEQ ID NO: 107188 - DNA, 523 bp, Zea Mays
gtcgaagtcatactttttagagagggctgcaaaactgtgtgctgcagggacttcaaagacagaagctgccaaaggtgctctcctggcttcggaggtaataccttttcttttcctttgatttgcctcaaaacacttctggtctaatatgacttttggaatttcttgagcagatgatgaaaggaatcgaggcaactacagtgagtgccccagctcccattcatttgacactagcttcagaaaagagccatggccaaaacaactgaaggttcaagaactgtcgaaggcgccatcgctatcacagataacaactgctccaatgggaactcctaggaaggggaagagaatggccaatgttcttgaatctattttgaggccttcgaagatggcgacacctgcactaccgaaggtttctgaggacaaggccgatgaaccgatggtcggtattgcagattcttcttctgacttaggcaaggctggacctttggagcccactcaatcaaaagaaaaatctaagagcctacca

SEQ ID NO: 107189 - DNA, 719 bp, Zea Mays
cacctctgcatatgatcgccatacaaagtttcacatttataggctaccatatcgattaaacatttgcatctatgtaatcaataaaaatgtttgaaatagatggagatgaaatatagaacgaatcggtgcgatcaagaacccttatccagcaaaagcaacaagtgtctcaccgtcagaattatctgcatcagaaacatgaacacaagcattacctttatcattggatttacctttctctctctatatgtgttagctcttttctctttgttctttaatttataacacttatatataaaatgattgtttgtggcaatacttatataatttatctcccttgcttcgagattttgtacgccctttatagccattagaacttttacatctattgttattgtttgatttattttatatccatccatgaagaaacaatgcctctctattagaagtagaatcttcaaaaatatcgtatgtttcatctttttcttagtctacaaagccttagaaaactcatccatcgttagagtatctctaaagtttgcaaaaaaaaactagacaaaggatacaatacaataagaccgaaatcctcaccatcatagtctatcctcatagcctggagatctacaacgactccctcgaagaccaaaagatagttaagcatagaaccaccttcttgtatcgcgcgtgtgtataactttatcttattatatgtatattgcttg

SEQ ID NO: 107190 - DNA, 516 bp, Zea Mays
gttctccagccgtcggactcccccaccggcctgtcctccagcgcgctacgcccccatccgcgcctcccaacgacgttgttgtgccgtgatccagcccctgccaccaataccacctccatgttccctaccgacaccactaggtgagaagcagcgggccccatctttcgttgtgcttatggatttctcaaatactgaaatagtgttggtttcatttattttgaatgttgtaatcttatttggaattaaagatatcatccttagtgtggtaatgtgaccaggaaggtgagcatattcagttcatccttcattcatccctcatcacgaaaccaaacaagagacggtgcagtttcaacccacttcaaccctataatcaaacaagaaattgggttcaacccatcacttcaaccaaacaaggaacgggtccgatccaacccacaaaaatgggtcggtttcaacccaacccacttcgttccgaaaccaaacgcactataagataacctaagcgtggcaggcgcc

SEQ ID NO: 107191 - DNA, 429 bp, Zea Mays
tgagctagcacgggggccgttgtcaaatgttgcattagtgtatgaaaggcatcctcacatttctggctccaatcatacttgactcctttcttcaacaattcagtcattggcttggcaatcctagagaaatccggaataaaccgtcgataataccctgccaatcccagaaaactctgaatctgccgtacagtggtaggaggtttccaatccatcacttcttatactttctcaggatctattgataccccctcctgagaaatggtgtgacccaaaaattttatttccttcggccagaaatcacatttggacaacttagcatataggcgatgatcgcgcagtcgctgaagtacgatgtgtagatgctcagtatgctcatcttcatttttggaataaaccagaatgtcatcaataaagaccaccacaaacttg

SEQ ID NO: 107192 - DNA, 634 bp, Zea Mays
atggtttctgcctgcctgggaataaactagtaatatgctactggctcgacatttatgggatcacatggctctacgcgtgccgtattgatttcctgggtgtcctacgtacatttttgaaaacgattggaattcgaacagggcttcgattaaaaccaatgtctctgtcagagtgtagcgagccatacggcacggcgtctgcgagcgaggacgttcttttttctagtttccaaaggaaaaacaacgattaaaaacgggaaacgggatagtgacattttttggagtgacggattttccgaccgaagaatcgagaaggatgtgcagattcaaccagcgcggtgcaggaggtggaagaaccaaggaacgattcctgtcctgagagccggagagcccgcatggaagttggattcgcccgcagccccaaatttcatcagcgtattctacatctaatctgtagtgtctatctatctaatgcgttactccatggtatgtatcgcagaccacactgcttcagccaagagacggcaggcagaaaaacaagagacgacaactgggagagcgcaggtgtgacccgtacgtaccttcttggaggccctctccacgagcttcttgacgaacatggtggccggttgtcgat

SEQ ID NO: 107193 - DNA, 464 bp, Zea Mays
agagatgacaaagtcgttgttttcaaaagcttctttagagcaggtcttcaattctctctatacgagatgatcggtgaagttttaaagaagttcgagatctaccttcattaacttaccccaaatgctatagttagactcagcgtatacatatgggctctccgaagccaagggaagagtgccaacgctgaaggactttgctgggtgcatgaactccactaccagactaaggctagagctgatgggctgcataagaacttcggatgttacaattttgcataccaaaaggatactaaagcacctgtgatcggttatcgcaccaagtggctgactgggtggaaaatgaatggttttatgtgaaggctaatgagaagaagagagagaagcttatgagtatggtgatgagtccgctgagaatgagcttcagcatgacacgaccattgtgcaacatgcaactcgggtccccg

SEQ ID NO: 107194 - DNA, 1245 bp, Zea Mays
agaggctgcaactgcaatcaaggttcgaacagtagtcatatgcacaacaggtgcaaaagtctcatcataatcaagtccttgagtctgttggaaaccacgagccacaagacgagctttatacctctcaatggaaccatctgattttgtcttaactttgaagacccatttacatgtgatagaaacaacatgcgagggtaaaggaacgatatcccatgtatcagtgcgttcaagagcagccaattcatcaatcatagctagctgtcactcaagaatctcagaagcttcttgataagtagtgggttcaacaattgccacactagctcgtggaaaaccataacgatctgggaggttcaatggtaccacggtcacgaagacgatatccctgattaaaaacatcattagactcattattattagtacaagaatcgggtacaggatcacgatcagggccagccgtagaaatggagcgggaacgacgaatgtagatttggatgacaggtggtctgaaagactaagaagaagatgacgtggaggtggaaggtgtgttataagaatgagaacatcagatgtggatgtagaagatgacggttcagatgcaggaatggaaggaagacacatgaaagaagtagattatgtgaaataatatgaggagtgagtagactgattatgaaagaaggggcgattttcattgaaactcacatctctagaaattcgaatacgacgagtagatggatcataacaacgataacctttgtgttcagaaccgtatccaagaaatacacactctacagaatgagcagtcaatttagtccgctcacgtggtggtaacaagacataacatatacatccaaacacacgaagatgatcataccgtggaggagtcacaaaaagaacttcacccggtgatttgccagaaagtttagatgatggttgtctattaatgagatacacggtagtggaaacagcttcactccaaaagtgtgagggaacaaaagaagatatcaaaagagtacgagcacgctcaataatatgacggtgtttgcgttcagcaacaccattttgggcatgagcaccaggacaagaaagttgagctagagtaccctctatggtcaatatctggcggaaattatcagataaaaattcaccaccataatctgaacgaaaaattgtaatagtaacagaaaactgggtgtgaaccatgcgagtgaaggacttgtaaacagaaggcaattccgagcggcgttt

SEQ ID NO: 107195 - DNA, 776 bp, Zea Mays
tgaatagggtgttcgatgttattgggtttgtttacccagattattgctttcccatccaaaggcaagggagaaaaaggaaagtcgctgcttcaacaccttctggtgcgccgaaggcaaagaaagttaaggtcttgacacgtagatcgaaacccattgggacgaccgatttgccgaagttagtggaaagggtagaaactgccccctagccacagagacggctcctgtgatgtcgattgaagctagtgcagacccagtcaaagagccagaattagagaaggcagcagagcagccaaaggtgatggtgacagcattgccgaagctatcagctactgcaacaggaactccaacgaagaggaggatggctagtgttttggaagctgttctagcacccgtgaaaactcgacctcctgcttctatcaaagcttcgggtgggaaaattgaagatgctagagaagtggtccctgcatgcatttcttctgttcacgttgaagcgagaccttaagaagctgtgctagaaaaactagtgggaaaaatccttccagaaaaaccaaaaacacctgctctcgaagcacctccctagggtgatttgaattatatggttcgacatgcttcaggaaaacagctatcggcagagcaagttgccgaaactccacattatgctaaggagctgaaataccccaagggatccttggtatacggaggagataacaaagatgtcttcctctactgtctaccagacagtaaggatgtcaatgtttgccatgaaatgatggata

SEQ ID NO: 107196 - DNA, 287 bp, Zea Mays
tcttggctcggcaccaccgtcagatgattgcccgagcagaagatgcagagaagcgcaaccgtaagctccatgtggatctcaccacagctcaagcccgtgcaactgccttggaaagtcgtgaagtcattgctgttgaagccctgaagcaagccaaggatgagcatgttcagaagttgatggaggcctacttggtaacccataaccaacgtagagccctacggatccaagagcccgcttcatccaacccagttcaatccatgagagctgaagatccctagattcttgaa

SEQ ID NO: 107197 - DNA, 510 bp, Zea Mays
gagagcggtgcagacattagatagggagagaagctagagcaatggtggatgatggaccaatgggaatcagggagccaactttgggctattcacattgaaggaaaaggataaaagtgagatgtgccccacacgaacaggaagagaaataaccgtaatagggacacataccagtagttaaactgttagattttgcatcatcgaaccataacacatagtttaatgagtgtgcatagagttcctgagaactattgcataccattagactggtctaaaacatattattggatggtacactaccattatgtagaatcgtagtagtgaaacacaataccattgaatagtctaatgccctaagaaaacaagctatcagatgaaatggaagcactattccatacacgtataggacctaggcttcatcgaactggtccaatgcatagtccaatgtttcggtctcatgccgtaaaagatgattcttcagcaacttcttcatagagatttctcccaacaaat

SEQ ID NO: 107198 - DNA, 616 bp, Zea Mays
ggaatactatatgttttgccatctctcggcaaacagatacctccttatcatccggaaggcagtatagaaagtcgtcttcatcagtaccattaaataccaaggatcctgagggatatttcaaatccttggcataatgcatagcttcggcaatatgctcttctaataatttttccctgccgcatgacgcactataaattccaatccctcagtagaggcttcgacagtagggaattcagactcttagctagtttttgtagcatttgaaggtcttgctttgatattcttttcaacaacctctgtaggccctgtttttgcgggatctgagggcccagcttcagttccaacccgagtcaggacgacttcggtagtttccttcgtattcttttcacctatgttaggtacttctacagaaacaggagtcagtacctttgttgattccataatagtgtctaatacgctggccatccttctcctttttggagtcactgcaggattttttgacatcttcgccagctccgcctcttgcgatgggctcagaatcttcggttgctctgtcgaccaccttggttctggtttttcggccgtttttttcgtagtttcggcaggtggcttcggc

SEQ ID NO: 107199 - DNA, 577 bp, Zea Mays
tgaagagggaaattgctaagtatatatcggaatgcgacacttgccaaagagtcaaggccagtcatttgaaggtggcaggcaccttacagccccttcccataccatcttggaaatgggaggatatttgcatggatttcattgtaggattgcccaatacctcccggcaccacgattctatttgggtcattgtggataggttgaccaaaacagcacatttcttgccagtacataccacccaccggacagaaaagtatgtagaaatttttattgaccagatagttcgtttgcatggaatacaaaggactattgtgtctgacagaggaacaccatttgtagcatgtttttgggagcaattgcaagaatcacttgggaccaatgtaataagaagctcggcataccatcctcaaatagatggtcagacagaaagggtgaatcagattttggaagacatgttgagagcatgtgtgctacactatggtaaggattgggacaagtgcctttcgttggcagagttctcctataataacagctaccagtccagcctaaagatggcaccttttgaggccttgtatgggag

SEQ ID NO: 107200 - DNA, 365 bp, Zea Mays
caaaaaatgcagggggtaagacttgcctcgattaaggtcatcgtttcgactcctgtgggagccgcctttttagttgtaattattttcagataaaagaagttactcgaatctagctattttgtcgtttgcggattttgtcgggaaagcttgcggaacacgaatgtttcaatgtgcctaatgtggttccccctgcattattccagagagaagttactggaatctagctattttaccgtttgtggattttgtcgggaaagcttgcggaacacgaatgtttcaatgtgcctaatgtggttctttttacattctaatctaggaagtcagttattcggtttaaacttctttatttgtaggcaaagcaatta

SEQ ID NO: 107201 - DNA, 395 bp, Zea Mays
tgcaactccaaaatgtgacaggagttgtggagaagctccttggccgtggtcagaccccacgagtgcagtgggatcccacggatctcaatatccatcaaatgaggcagtgacgtagccgaagtgtgtgtaaatcttgtccactgcttgaagacgagcgagaacatagggcctctaaatggccttcctttgttaagcactcttgccgccacttcttcatccggcaaaaacggaaggaagtcttccggcatggtttgatgaatagacatgtcatcaatattgaggcaatagcgacgggccacttcctccagcacatccgagccgagaacaacaggtctggttccaataacagtaacaaataaggctcgacggagtgctacttcttctcttgccatgtc

SEQ ID NO: 107202 - DNA, 284 bp, Zea Mays
gcggaagaaaaagtgaaacttattcaacaccgtttaaaggttgcacaacaccgccacaaacgttatgcggaccagcgaagacgacccttatttttccaagtgggcgattttgtgtatctgaaggtttcacctatgaaaggagtaaattgttttggcattaagggaaagttagcaccacgctacgttggtccttttgaaatactagcacggtgtggagctgtggcttataaagtgaaactacctgaacatctttcggccatacataatgtatttcatgtatccca

SEQ ID NO: 107203 - DNA, 407 bp, Zea Mays
tttgctgttagggtatagcagtcaccctgaacaattgtgaaagcaagcgtgccatgctggttttaaggcgttttctgacttaagccgatcgcctggttggtagggcatagtggtcgccctaagataagtagtcgtgagcatatcgcatcgtattaagtcattgccgacttaagccgattgctccattagcagggtatagtggtcaccccaagtcgagtaagcgtgagcatgtcggatcgtcttatgtcatcgctgacttaagccgattgctccgttagcagggtatagtggtcaccccaagtcgagtaagcgtgagcatgtcgcaccatcttaagtcgtcgtcgacttaagccgattgctccgttagtagggtatagtggtcaccctaagtcaagtaagcgtgagca

SEQ ID NO: 107204 - DNA, 366 bp, Zea Mays
ttcttgtgaagaccatatgttctagccttcgtctggtagtgcagctcgtgcacccggcaaaaagcttcggcattagcatccattccttggcttcggagagcccatatgaagacgctaagtctaacaatagcattgggggttagctgatgaagatatatttcaaagctcttaaagacgataacttcgtcctcccttggctaacgagttatctcctccctagcaaatcgaacaagcttgctctcggattccccgaaatagcccagttttttcatcatagtcatgtcatcttctgttacagtggattttccaaattcaagatgactaggctttgctgggttcagaatgatgttatcctcttcgctttca

SEQ ID NO: 107205 - DNA, 288 bp, Zea Mays
tttgcgggggattttcgcgtgtatattacatggctccgcctcattaaaaacctcaccccccgagaggaaaagagtgcgggccggaataaaactgtttggtgaattacaagggcgtgttagccctgaggatttaaacaaaaaatttacggagattgtcaatattctaggaatgttctaggtcttcgccagattgcgttgttagtttgtacgcgctgggagacgacttcgtcttgacgataaatggtccttcccactttgtctccagcttacctcgtgactctgtctggg

SEQ ID NO: 107206 - DNA, 683 bp, Zea Mays
atttgattgacggaaacgatacacgctcctattctaatccgggttgtcaacggtcccgattttattgagtgagatctaattctgtctgtggattctccgatcaatggtcgtggtgttcccaagtcgaaacagtatctctgatatgacctcgattgttgcttactgatcaatggcacccatgcgactctcctctcccccatcaccggagactctttgaccggcaccccaaagtacaaaaccaaaatattctacaagctacccaacgcagtgagcaggcgaactagatgggggagatccttaccagtatccgtgcggtggcgagggctggtcacggtgcagtggcccggcggcgaactcccacactctctcacacaggtaatggcgaggcttaaactcctgggcatggtagggatctagggggtcacggatcccgtgttttaaagggccagggatgcgaggtcagggtggttgcgacagttgagaaaaaaacccgagcgaaggtcggcctcaatggaggattttttttttgttgaggcgagaggataacgaagagcggtttgttgccagctcgttgcatgcgcatggttgaaaggtggaggaaacgtccgtcgaacgagcccgacatacagtgacacgtgcaactattggatgaagtcatcattgacatcatgttgacatcagcg

SEQ ID NO: 107207 - DNA, 1123 bp, Zea Mays
gagctctcaccaccaaagtcatgcgccaaggtttctactgactagatattgtatgcacagcaaaccgtgtagtacactcatgcaaagcatgtcaggaattctcaacccaaaacagggcaccctcatagctcactaaattaattgcccacacctggcctctacaactatggggcctcaatatagtgggaccgctccccaccgcacacggcaacctgagatatgccttcattactatcgaatacttcaccaagtggatcgaggcaagagtagtttccaccataacaacaaaaacgtcacaaagagttttctggcagaacattgtctgtcgttttggggtaccctccgagctaacggtggaaaatataaaaaagttcgacaatcaagacttccgggatttttgtgcctccgtaggaactaaggtagtcttcacatcagtctaccacccacagtccaacagtcatagagcacgcaaacggaaagattttcaccgcaattaagaaaagactcctttaggacaaaaaggtaaatgagcagaccaactaaccgaagtgctctgggggctaaatacaactgaatcccacacaacaggctttacaacattcaaattgatgtatggagccgaagtaatgactctgcaagagctcaagcatggctcaccatgatcagacctagtgcagtcctagatgtcgacgagctagaaacaaaatacctccttgacggagaccgagttcaagccctcgatgcccttaacaaataccaagcagcaacaaaaagctagagagacaaagttgtcgtccccaaatatttccacaatgaagaccacgtccttataaaaacaacacgaattatgtcgaagggtaagctcaaaccgaaatgggaaggcccgatcatagtcaagaagaagacgtcactgatttcatacaagctcgcaagccaaacaggcgtagaccttgaacattaatggaatgttgacaacttatgaaaatattatttgtaagacaagtctagtagggccatcgcgcccttgtaacaaatcatgcgtacatttttccaaaattaggcccgcactcttttcctcacaaggggcgaggttttaaacgaggtggagccatgtaataacaaa

SEQ ID NO: 107208 - DNA, 419 bp, Zea Mays
gtcgaagatcgaccgtggagaccaagtcatgttgtcttcggaaagtcaacgatcaagcaagaacaaattgatgccatgaggggaaggtactttcgtgacatttctattgtgaaggctggagtggagaataatgtctctctgcccgaagctgacaaggtggttgtctataaaagcttcatgaaagcagggcttcggtttcctctggataagatgctggtcgaagtgttgaaaaccttcaaagtttaccttcatcagcttacccccgaagccatcatcaagatgaggatttatatttgggccatgaggagccaagggctagaaccaaatgctaaatgcttctgcaacatgcatgaattgtcttatgagacgaaggccaccgaaaaagcaatatcacaacaactttggttgctacgactttg

SEQ ID NO: 107209 - DNA, 410 bp, Zea Mays
cgcttggaatggttcatcatggagaatcatgggaattctctccccccacggtcagggagacagccagatgttcgcactccgagctggaccgaatcccccacggaccaggaggtggctgaggcaggggctctgcttgctgaggttgggttgctgaaagagaggggtttgactgcagaggctgtggttgccgacttcattttcaagaacattcagccactgaaagacatagcataccccgcatatctgtatcgaggcctggctgattcaacccaggtaaccaacataagaattcctgttgtgcacttggtgagccggctcgagatgatactcagaggcaaggtgtcgaacatcggcgctcttgttgcatactcggcctggaatctgcctccttccaaggcctttaccagttt

SEQ ID NO: 107210 - DNA, 323 bp, Zea Mays
gtttgaaccaggatgctggcccttctgctcctactgctgaagaagtaccagtggaactttttactggagctgaccccaatgggtgtgaccttgatgatgctgaacccaatgggtgtgatccggccagagctaaccccaatgggtgtgttgttcgtattgttgacgaggatgaggaagaagaggaggaaatccccttaattcggaagaacagtcggcgttacctagtcagtggggagagtagtggtattccttctccagctttatctgctctcgttggtctgcaagagttgtccattgcaaattttgatcaggctctcgaggat

SEQ ID NO: 107211 - DNA, 344 bp, Zea Mays
cttttggtcttgtaacatattttaagaaccgttaatcaagtaaaactggaacttatcttgtatgttatttgtccttgctgtctgtagcgtcatcaacttccctctggtacttggcccccctgggaggtaggctcgacgtgtcgaggctggatactagtataccaaagagaaaattggttgcccggtccctaggaggtagtctctacaatttgagactacctacctctggactgggacctgaacatgcacacagctttggttttgaagttttaggagcacacccgtaggacccaccatctggtatctttcatcctttgattcatgcaacaggacctacaggattt

SEQ ID NO: 107212 - DNA, 703 bp, Zea Mays
cagtacgttgaggtacaacctgcagttttatgtaaaatatttttaccactccgtattttaccaaccctgagattttaccatcaccgaaccaacgattttacctcatagtggaacataagattttaccaccatgaacttatgatttacgaggctagattttaccaagagcatagattttaccagtcaggattttaccaaccatggacctatgatttacgaggctacaacctgcaattttaccaagagcacagattttaccaccagattttaacccagtcatgcatgtttacctaaacaaaaggacacaatgagctatcttattttgatcatgcttaccatgtaaaccatttttactcagatgatacccggaggtagtgtatcagctgatgcattcaacttgtggtggagtaagtaccagagaatccctcaccagccaaaacagaccaactttgtgccagccaaaacggaccagcactgctctccaacgccgccatgttgaagtttggtaaaagcctaggttataggtggtaatatcataagttcttgatggtaaactcttatgttccatgtggtaaaactttaagcttctacgaggtaaaatcgtccggtaaaattgtaggttaggatggaaaatcgttggctcgggatggttaaatcgcagtttctagtcaggtaaataataggtctatagttggtaaaatcg

SEQ ID NO: 107213 - DNA, 435 bp, Zea Mays
cggccaccgctcacggactctataaattgagcgcactgcgagctccataggataattacgcatccatagcacccacgcttgcctccaatctttcaccagagaccgtgcattgctcgttgcccccaatctccgtttccgccaccgtagaaacaccctgccgaggccagcttgctccaggtccgttcatgctccctgttctctcgttttagcatgcttgtgtgtccctgttgctcctcgacccctccaattgagctagagtccctaggatcgccgggaacgggcttggttaaccgtggtgtccgctgtcaccgtgggcagggcgtgttattgcgccaatggtgaaattagttggggggaaatgctccttaggactggaattaggtgtagaccaaagaagagcatcggtcattgagtaattcgaccggtgtgcgctcg

SEQ ID NO: 107214 - DNA, 913 bp, Zea Mays
ccggcaacagtcgtcttctggtcttgtgccacgtacctaaacacctctgttgcgtcgccgtgactctctatggcctcttatcgtcgccggtgaagtcgccacgacggtagacacgaatccactgcgccggaattctttttctcctccggtcgccagcgctgctcgaccgaattgatcaccaccactcaagtatcctataaattgaagcctcagcatgttccgctaggtaatcgtgcgtccagtgaaccaactcgtagctccgatcgttccccacagctccccaatttgggatttcccccaaattggttgaagaacgccgcgaaatcaagctcgccgtggccagcgctcctcgggtcagtatctatcaaattactccctgttctagcttgattgtagcctcctattgctctcagtgccaaccaattgaaattcggctgaagcctttcaccggaacacgcgcctgctctgtagaacgccgctatgccaccctcaccgtcgacccgctcttcggttcttattctgcccaaaccaatgtgtgtacataacccctggtgaacccgcgaacccttccccagcctcaatttggtcatccccgccgtcgtttggctggaacgcgttcatccctataaccatccgccctgtcaccgtggactgattgattcaatgcccccttgatgaaattgatggaggggaagtgtgcggtaggagtctaattcggtctctgtcgctcaggagctcctgccatggcggtatccggccggaacaggctcatcggagatcagccgagcactgtttgccgtcggggaccccatcctgcgaagaattagaagtacgaggacttttctacaaaccgttagtgactaaaagaaatagtaatcgaacccgttcccagttagccaaaacaccgagggcc

SEQ ID NO: 107215 - DNA, 326 bp, Zea Mays
gactttcaaataaattccatgtaaaaggttcttttaaccttaataactttgcgcttctgagtacctctagagtgtgagataaattccacttaaaaggtctttttcagatttatgtgtagtctgctaggtcacaatgtgtacatattcatgtttcactatggtttatttttccagtgctattggtacttcattgtttccggtttccatattaaattacatataatagcatcattattagtcaaaactattatgggcgtcttcacctgtttagcaatggcttctatgtattttgtggggtgatgaccatacccaaagaaactttagtc

SEQ ID NO: 107216 - DNA, 1099 bp, Zea Mays
gatcttgatggagtatagtgagcacctgggacaagtgttgaacatggtcctcaaaggattgactgtaaaccaaaatgtcatcaaagaagacaacaacacatttgcgtagtaagggtgctaaggaagtgttcattgccccctgaaaggtacctggtgcccccgacaacccaaaggccataaccttgaattcaaactgtccatggtgcgtttggaacgctgttttgaattcttccccagggtgtagcctcacttggtgataacccgaagcgagatccagagtagtgaaccaacaagctccatgcaattcatccatcagttgctcaaacacaggaatgggaaaatgagctttaactgttaaggcattcaggtagcggtaatcaacacaaaacctgaaagttccatccttcttcttaaccagcaagactggggagctaaaagcagaggagctaggttgaatgatgcccattttaatcatttcagaaacttgtttctcaatctcatctttgagggctggtggataccgataaggtctaatgttgacaggatgtgcaccaggaattaaaggaattcggtgatcacagctacgctctggaggtaatgctgtcggcttggtaaaaactagagcaaactgtttcaagagttgagcaatctcaggctgaacctcatcttgtacagattcaaccaaatgttcttgaacgagagccagttgaatgacaatgtcctcgataggatccacttgatccccatgcaacaacacctgagacccctgatagggaatgagcaaccatctctgcttccagtgaacttccatgggactgaaagtctctaaccaatcaatgcccagaataagatcaaaggattgaagaggcaaaactttcaaatcaaagacaaactccaccccttgcaccgtccagtgggcttgcgacagaatttgagagcactgcataatagaaccattagcaactctgactcgggcagtagcaggaagcagtgtagtacgtttcaggcgggcaactgtactttggctaatgaaggaatgagaacttccagaatcaataaggatgaccacttcaaaattctgcatgacacccagtaagga

SEQ ID NO: 107217 - DNA, 359 bp, Zea Mays
ccaagcaaaatgatctgactatcggtgattattataattcaatgatggataatattgatgaagtgaccgacaagagagtgacaaccttaggagaaatagaaaaggacaagatcatggtcgccaaagcttacaacaagaaggtcaaggctaaatcgttccaagtcggggacctggtatggaagactgtcctacctttaagaagcaaagactagaagtttgggaagtggtcgccaagttgggaaggcccttataaggtcatacaggtgatgtctggtaatgcctacttgttgcaaacattacaaggcaaagacttgcccaaggcgttaaacgggtgtttcctcaagcagtaccatcctagt

SEQ ID NO: 107218 - DNA, 539 bp, Zea Mays
caatgaggaccaagaggccggagtcccgccaagccaagatttagctaggactccaccttgcagcttctaaactccacttccaccccgataagagatctatgagcctctcctccctatctcgactgcttgtaacctctactatgattttgatcattaattgtgcatagcccaagccaccgatgactggaagtagggacattctgcctgaactagtgtaaatcttgcgccatccacacacgccctccagagcccgaaacacacgcaataattacttgttggagcgaggtatggaacaccgacaatatggatgtaaaaatgaaaaatggtgtcccaatgtccttgcataatgttgtagtagtctaaggaaacttaatatggtcatgcatccacaaaaaataattagttttagatttaacttgctctcacatgctttattgcaataacaatttattcattttgtagtaattaatgtgtaaaacctgagcatgtaaaattgttatattagtaattatttgttatcacctatacctcataaaaat

SEQ ID NO: 107219 - DNA, 865 bp, Zea Mays
ctggggaggtgcttcgggagcagatgttgtgggttttctagaaagctctcttccacaagtttttctggcgcaatttctgaaggtcctgcctcagcatgagcagaagtgcttgcagtgaccatctctctggcatcttcaattttaccgctagaggcttcggcagaagtaggaggtggtgttttcacatattctaatacaacatccaaaacactggccatcctcctcttccttggaattcctgttgtagtagctgacaactttggcaatactgtcactagcatctttggctactctgccacctcttctgctaccttttctgagcctggctctctggccaggtctgcaatagcttcaatcggcatagcaggagccgtctctgtggctaggggtgcagtttctaccctttcaattaacttcggcacatcggtcgtctcaatgtgcctcggtttacgtgtcaagaccttgatttttttcgtcttcggtgccccagtagatgtcgaagcaacaactttccattttctcccttgcttttgaatgggaaagcagtaatctgggtaaacaaacccaataacatcaaacactctattcagcctctttttcccgcgagcgccgaaggcagctatcacaacttcgtcttttgccctcgagtacgctccaagcagttcatcacttgttgcctctatagcgtccagccaatcatcatttggctcatcaaattagcttctaaaccgaaaggtatacttaagaaaaaccaagccattctggctggagccagcagcggtttcctttggcatttcccattcgtttgcaagaggtcatactttataagcaatgtgctcttgaactaaatccatcgtgccaatgt

SEQ ID NO: 107220 - DNA, 857 bp, Zea Mays
cataggggcttgctgtacagaagaggcgcaggaggagtcctcatgaagtgcattcacttggctaccgggaggcagctattagatgagattcatgtcggacagtgtggcgtgcatgtagcatcaaggactctgatgggaaggcttttagatccgggttttactgaccgactgcaaagaatgattccgacgagctagttcagaagtgtgaggcgtgccagttcctgtcaaagcaacatcatctaccagcacagctgctgcaaactattcttgtgaccttgatgtttgcatgctgggggttggacatgatcgggcccttcaagaaagctcaaggagtttatactcacatactggttgccatcgacaaatttacgaagcggatagagtacaagcctatcgcttccttgacctcagcaaaggcattggagttcattcagaagataatgttcaggtttggaatacctaacatcatcatcactgacctagggtctaacttttccagctcggagttcttcgatttctgcgagccaaggagcatctagatcaagtacgcatcagtggaacacccaagagataatgggcaggtgaaaagagccaacgggatgatacttgatgcactcagaaagaaggtattcgataaaagcgagaagctcgcagggaagtggatcagggaactaccatatgtggtccggagcctgtgaacccagccaagccaagctctgcatggaaacaccccattcttcatggtgtatgggtcggaggcagtgctacctgccgatctgatctttggggcgcccaggttaacctttgaaagcatagccgaagcagaagcaaccaggctagaggacatcgatgtgctg

SEQ ID NO: 107221 - DNA, 332 bp, Zea Mays
cttcatgtggagaaagacacgcataaaccacacattcatatttgaattcacgcctactaaagagctcaagtaccgagacgtgttcttgatatgcactgcttccatgacaattgttgttggtgcaatgtttgcgcacctggcaataattgttaaaggaaattcatcaggcgttgtccaagcgataccagggtccttacttctggtatgcactattgaacttaactgatgtgttcataattacatctgaaatttatgagcttataaggtgctccctctatccaggtgttcttgttcatattagtctgccctttcaacatcgtctaccaatcaag

SEQ ID NO: 107222 - DNA, 422 bp, Zea Mays
acatgtatagcaggtgctgtatctaatgatagtcagtcgatggcgagttagtggggaacagagttacagatctacgagagcccttgtgccatggaagatgaagaacaatgagcgtgggttaagttctaggattttagctgacgaatgcctatagctactcagatgctatagtgattgcatttcccctttgatagtgtggctatagtgcttgtattgaagcggtgcagaaacagagtcagggtcaggtcattgcacctttatatacctgcttgaattcactgattccactgtaacaagtgtgttgtcaaacagtgttctcttccgtgtttcagtgcggttcacggtatttctgtttatttaggtcggttattccaattcacgtggattggagcttattgaaatagatggagataaattttgac

SEQ ID NO: 107223 - DNA, 306 bp, Zea Mays
agagtggacacagattacgaggaaaaaaagaagcaagcggggtggaggcccgtcaagttatccttccgacaccttcaccctcaaagaaggacggaaagaaatttatcactacatcaactcctttctaccccgacatcctcttcatcagagggagagtggagtcatctcccatctctgacgacgagccaaccatgccaggggaagaacctccccagcgagaagctcagcgacggaggaaccgacgccggaatattcggcgacatcacaaagctggggagcgggacctagcgtagcccgtatcccagg

SEQ ID NO: 107224 - DNA, 357 bp, Zea Mays
ccgggacgcaaatctgaagagaccacggagtaaaaatgcaggagctgacactgtgcttctgtgtttagtaccagtcggggacgtggttcttcggtgcgtaggaacactgtgcaaacagtggctgggagagtggtgtgaggtgtcatgatcctgtcagtcagtcgttgtagagccccgtgtgctacagatcagctgcgcatctagctggcatgcatttttcgttcatcatcaagacgatcgaaacatattggttgctttgagctgcaagcgagctcgtgttctgattcagacagaaacacaggagcggcctatggcctgagtcggaggccctagctagacttggaaatagtttttttt

SEQ ID NO: 107225 - DNA, 519 bp, Zea Mays
ctcgcccgacgcaatcgtttgcgacgaacacttccaggactctgaactccttcatcctcgccagaaccatgtccagctgtagtagtcaccgactcagtacgggtggaatcagacgattcacccgccagcatactgagaacagtgttcacctcagcctcatcagcggttgtcggcatctggaaatgggtctttttctcctcttcagggagatttcggaatggagcaatgaaagcctcaatattctctggggagggtcacactctatggtccggattgccatgttgaacaggagggttggaaacgaactcagaaaaggggctctgcgggggaagattccagacaaaataatataagggagcaccaacattcaaaatcttgcctctcagcaaaaatcaattcggctcaacatgtcttcttcaggaatccgtctgttggtgattcgggtaggatcattgatcctagtatacagataggccgggtaaactctatttttcagaggttgaatattcttcaagacaa

SEQ ID NO: 107226 - DNA, 966 bp, Zea Mays
agttgatccagtttcagaacaagtgcatattagtcgagatgtaatatttgaagaggatggtgtttggaattggagcagtgatgacagcagactacctactgaaacttcgacagaaatgttcagagtcgattttcagaacactgtagaaaatcctgaaatgcaacagccagccatatcaggtgaatgtagtgaaaattcagggggtgtagacctgccaccatcacctccattgccttcagggggtgcagatctaccaccaccatctccactatctcctgcaactcctgctacatcacaaagtcagactcaaaggtctagctcaggtccagcaggtgttggcagctcacagtctcagcacacaggaagtttagggagtgtacctttaagatacagaactctaactgatctgatggagtccacagaagaggtacttgattttgagtacagtggtgtgtgcatgcttgcagcagaagaacctgtgaatgtggagagtgctttatccaatcaagaatggaaagaggctatggattcagaacttcaggctattgagagaaacaatacctgggaatggtctgatctaccaaagggacataaggcaattggtctcaagtgggtgttcaaagtgaagaaagatgcagaggggaatgttgtgaagcacaaagcaaggctagtagcaaaagggtatgctcagagagaaggggtggattttgatgaagtgtttgcaccagtagccagactagaaactgtgagagttctaatagctcttgcaacacatgggaattgggagttacaccatatggatgtgaagtctgattttcttaatgggagtctcaaggaagaggtatatgttacacaaccccctggcttccaaagctctaagatggcatcaaaagttctgaagctaaacaaagccctgtatgggctgaaacaagctcccagagcttggaatgcaaagctggattcaga

SEQ ID NO: 107227 - DNA, 273 bp, Zea Mays
atcaacacctgcctctgagagacactttgaacctagtgacagtattcctgaatacaatgatggaatattgaacaactcaagttcatatcagcctcataattactcttacacagaacaagaaggtaagtgtagaactagtgtgaatctgctagttgttggttaaccgtaggttgacgattcttctataaacatccatttaattttctgtatagtagctatcgaataaccaccatcttaggcagttgctagtcttagtcagaatcaacaataaac

SEQ ID NO: 107228 - DNA, 390 bp, Zea Mays
attaacaagtgattaacagatgccatgctagagcggcagatacagtgacatccctcccaccgagaccaccaaatgcatgcactctgcttactcgcttcgcttgtgttttgtccattgcgacagctgtctcgcgatcctctcgctgcctgccacgtacaacaagcgcatgcatgcgggcgttggttaatcctggggagcaacttctggagttgattaagctcctaaccttcctgcatcatcatcatcacagtaaccaaaatcatttgcttgtcctcttccatgcatgcaccgcaccaactcggcgcttccaccctggcctgcgcctgccgccgcgtcgggcgccgtatacatacatatacacccggcccgtttcgccacctccctctcgct

SEQ ID NO: 107229 - DNA, 569 bp, Zea Mays
gcggaaacgatggagcaagagatgcatggctccctagaagataaacaaaaagccaaagccaagcggcgcctgagcctcgaattgatactagccgacccactaagccgcaacctccatatctaaggcgcgacccaataaggaacaagagtgtaaactaacatgttaccgaccttggtgaataggcccgggtcgaacaggacacctaccctgaggtcaatcgacacccggttcagacccaggcgctaagcgacaaccatgcaacacaggtacgacgccgaggcccgacgccacacaaccacgcctaaataagataactcatcttgccttattgattcacgatattatctccccctacagggaaagaatcggtgggcccacgccaaacccaaactatgaggaagtttgaccgaggccaaaaacttggagtttgatggccatcccgtgaatggtttgcaaccactcccaaaaccctagagccaggggcaattatgaagtgggcaccgattggctagtaccctagcgtacgagcaccaagggcacttctaaatcgtgttcgagtcatagggaat

SEQ ID NO: 107230 - DNA, 645 bp, Zea Mays
agatctgggcgtgggatcagcccgagctcggccgcggctaagcccgtcgtacccccttgctcatcggtggatcgggataagacctcgccgccgttgatcgatcactgccgtgcgccgcgtgtccaggcactttaccacgtcgcagtagctcggcttgcgatagttactcatcgccgatgaagtcgccacgatggaagacacgaatccactgcgccagtaatctcccctctctctggccgccagcacggctcggccaaattgagcaccaccgcttaagccctctataaattgaaggccgggtcagctgtgctatgtcatcacgaaaccaaagcacccgctcccaccctcaatcgttcgccagagctcacgaatttcgagttttccccaaatcggttcatcccaccgcaagaacaccctcgccgtggccagtgcaattgaggtcagttcaaaccttctgctccctcttttgagtgtccttatgtaactgtgatgctcatcgacccgcccaattgaaccgagctgccttagatcatcgggaacacgcttagtggtccattgttgccgctgtcaccgtgggcagagcactgtagggctccaatctagaaattaatttaggggaaatgcttgggaggggttcaatttggt

SEQ ID NO: 107231 - DNA, 662 bp, Zea Mays
aatttataaacctgttaatcaaagactaggtaaactggttagtctgaaaggttatgatggtcattaagcaccaaaatcaatataagaaatggtttaagacctcgggggccacgaatcagtgggagaatgacgctgagtctgcccactcaggtaaacccgcccccgaacgacccctatgcgccgagaagagtggaggtaagtgggaggggacagacggttcgctatgaacccaatcaagtggattctacgcatccatcaaactgctcccactgccctgcacacgtcacatttattacgactgaaagcaagacacgacgcaaataaagccatacttccccgctcaaaacctacgggccctaggcctgagcctcactcatggcctatggacactgggcctgaggcccccgacatcctacgagccctaggactgattattcactcataacctatggattctaggcctgatgcccttgatggtccacgagcccgcataatgacaagaggagaccaacagccaaactacgaaagtagaaggtcaacattggaatataagcaaactagaacgagtaatgacgacgcttatacttccgtcgtcagaacgggttgcacacactcctccgataatctcagaaacgcagcacgagacccacgcaggaaaggat

SEQ ID NO: 107232 - DNA, 856 bp, Zea Mays
tgttgcatcatttgttgggttgaatgtccccaatctgtatgacattagaattgaggttttcatatggtttgaagtttatatatgaggtggatgattattctattttaagaacctgtttgctttgtggaggattggtaattctactggcagtatttgaatggcctttatcaaacttatgatctagttccgttctgatgattgtattgtgcaattatgggcacatttggttcttcacctattcttgctgggcaaggatttgatcttctcctgctgtgtttggatgtttggctaggattgccagcatttccccttgctacctgacacccgcagagagctaaaatagctctcctggctaagcaagcttcccggggcatgtgccgataaggtgaaacaatcttgtctgggaactagctgtatatttatatcgaagggattataagtattattgcttttgcgcaaggccatgcgtgctataatctctgttagcagatcagattctctgccgtcaacttgggctccgaatcagctatatatggctacctagcccctgattgatcctgattgagtctgattgatagctataaggatagctagagatatgaggggatcccgattggctccatcactatagatagggatatgaggagatctgatttgttttgtttctataaaccacacaaatctcctccctacatatatttaacctcagctctctcatctatttatcaaatatacatcagttcatctgctttcatggtatcacgagtctaggtttcaccctgctcacttccgctgtctagcgcgcctcatggtgctgcttcaactccctctcagcgcgcctccagtgctgctcccg

SEQ ID NO: 107233 - DNA, 581 bp, Zea Mays
tagaaggcgagaggcgcaacgaagattccttcccgtgggtaggcagcaacgatcgtgtgccttctttgcgccgggatggatcgtgtgccgcacgcggtgcaggggtggaaggcgagaggcgcggaaggagagaggggcagaggcagaactacagtgcaccggcctatattagagtcttatagaatagtacagactatagttacaacttcatcctaatcctaatctattatagactgagtccaacacaactccaaacctcaccgatttgattcagctcaatccgatccgttctttcaaattccagcgtcctaatccagtccgatcctttttttttagcctgaggaccgatcctacactgcaattcaagggccctaacaattaatgctaccactagtatcccaggtcgttaacagggcattcgaaagcaattatcatgtacaagcagtctaccatcacgggagtagatggtaaatgtttaaataaataaactacaagttacatccaccagttttttcagctgttgcaaaaaaaaatcgcgtgcaaattatgttgacttgaattaagaataatcccatgcatat

SEQ ID NO: 107234 - DNA, 457 bp, Zea Mays
ctgaactgatctcttctttgatcaaaattactgctaatcatacaattggaacatctacaagttcaagtgtttaaaattacagctactcataaaattgtaatgttgtctgtttgaacagcgtgtggtttgatagatttattttagtcctgtttaaaatcattgtcttcttgcaatccatttctgctacctctagctgtccaaacaaaagcagctctgttcttttgtagccagtatagttgctgatgtatttaaagtgaggcttaaattgatgttggtacatacttgattattggtagagaagaaggaaaataaatgtaacatgattgatgctttatttagctttaataacacatctatatactatacaaccattcacaaaacttgatagattgttttgatttcaaaccaatatggtataaaatcttttggttcggttcagtccagccttcctacctcg

SEQ ID NO: 107235 - DNA, 631 bp, Zea Mays
ttcatctttaaagtagcaaccatactgagtggatcgtgtgctgcttctattaaggtttttctatctattaacaaaaggtacttgcttgtttgtctgagatctttttgggggatatagaaagggaactaaacatgcatcttaatactggaatggttagtggggtatctattaatcatcaaagtttcagcatgcatcacatggtacactaactggaacaggattcatcactaaactgaaacaggattcatcacaaaacaatgtattgcctatctatttgttcagaactgaatctaataacttacaaggaagtgaaacatgatgtgattgaaagaacaaactgaaacaggattcatcactgatagcaataactgaaacaggattcatcactaaactgaaacaggattcatgtttcactaaacatagaacaggattcatccccctgagtactaaagcatggcagcagcaccagccaccagaactgaacttgtaatgacaaaaaggaactaacaacacaaacccagcaaaaaacaatgcaaaaggtcgaaagcttctcccatttgccaactattttgatatggcgagttggcgacccactattagttttcccagcatttatacacccacagtttcc

SEQ ID NO: 107236 - DNA, 391 bp, Zea Mays
gtttgggttgagccatcgacgtcttgcccaaactctaatccttgaaatcgaatctggttccgtaaatttcgtttgaaattctttcacgcttgcgttgcacgtgtctctatgtggtctgacgtcgtgacgcgcatggcgagcgcaaccctgtgtgtgacaacgcacagcttctcacttacgtgaaagacacgtatcgtctccacggaggtccccgtgtgcaccttatctccctactgctatcccttttgtttatccgaatcggccaccgattcaactcttcactacgtgtcgcgccttccgtcactccgctaccgcgtgtccgacgtgctagccagtgtaaaatttgggaatcgactgatttcataaatctgtgcatgctattcgaggaaaa

SEQ ID NO: 107237 - DNA, 1008 bp, Zea Mays
ctctgccatccgcagaaggtagcacatatgctccaaaaatacccatagaagaggaagctctcggagtgaagttaacagaagaaccccactgagtcgccggatgaggcagacgcggagctccaaactgagatggtataggagtagccggtgcagtaggcacggacagatactgaggaaaaccctatatagcacgaactgaggagtcccgagcacatagaactgttgcggggggagtggtactgaaaattgctgctcaacgcttgacatcatgttgaaagtgccctgagaagaggaagaagtcactggctcccatctgagcttcccattgggattcctcctacacaccacatccttgtggtcttggttgcagatagcgcacctgccactccactgacactcagcacggcgatgcgcatcaccacaacagaaacacaccagccccagcttgggcttaggaacagcctgatacctctaagtactttctcctgaagtaccctattcagagggtttgccacggtaggggtggtggcgctagtgctgagactttcccctcttgtgggctggacccctagtgttgcccctcctcgcgtcctggccatgaggctgatcaacacccgaagacttctatgactccatggtgtactggtgttgcatctccacgcccaatgtctgctccactgtagtacggaaatccaccaacataaaggcgcccagagcatgcctgattgaaggtttcaggccctgacagaactggctcgccttctccatctcattgtaagccacatgaggaacaaagcggaccatctcgttaaagcccacttcatactcttgcttgaaagataggaaatcaatcttcgttttctccaggaaggtgaccgggtagaacctcctctcaaactgcctgatgaaaacatcccaggacaggactcctggtgaggaggagtgagctgcctgcacgcctctccaccaaatttgagcctctcttttcagcagctgtgtgccaaagcg

SEQ ID NO: 107238 - DNA, 271 bp, Zea Mays
gttgtcttgggatcgacatgccacctaagatgcatgtagacgacgtcaagctaaagatagagatgaatattgaggttaggaaactacaatcaaggctaaactaccgctagaactagtgcaaaaggtaaaagtggtttgatggaccgattattgtgtgtttcatcggttgtacctcttcatatatgtgggggtctggattgttcctaggtaaaacccaatggtttttcatgagttagttaagataattgcgtaaaaggataagaattttagt

SEQ ID NO: 107239 - DNA, 386 bp, Zea Mays
gctaattgtatcatagtcatagaaaaaaggacgacgattacaaggtacaggcgtataaaagtagattgcaggcctttcaaggtatcacacatgcgcacaacacgcaacaaccgatatatgtgttgtaattcatgcatcctctctacgacaattctattcattcgcattgcggcgatcttcaccctcaattcataattctgtcttctttgatctgtttgtggatccgctgccgcataaccgaactctttttattgtacccaactatcaaaaaatataaaacaccaaatgcacccaccgccccaccatcccctatctatgtccattcctgttgtttgcctgcggttgacagaaaatggttggactgtggcgattgaagtagattgcag

SEQ ID NO: 107240 - DNA, 285 bp, Zea Mays
gttttggattgtatctttctcggccacgaccatttgatcaatgcatcaaaatgaatagaatagaggtgccccccagcctggatagacaaagggactatacatgtaccatggattcatcgtcatgtcatttcatatttgagtaggacaatataccgacgatgaataaacgggtggaaagtaccctggtctcataggatgatcaggcgatgcttgtcgcgtcgccttttgggccgttttgttcggccgtttcgttttagcaggtgaccgaggtttctttgttgaccg

SEQ ID NO: 107241 - DNA, 1049 bp, Zea Mays
gcggcgagttgccctcctcttggaaaatctacgaggaacattaggtgagataatactcgtactcgttacctgatgactgatgcctctacttcagcgttacaattgtttgcgttttgttcatggttaattactcctgttatttggtttgtttggaaaccagataataactgcagctaaatttcaaagacacacgttcctaattctctatcgcattgtactgcgttcatgtttgaaagggcataaccacaccgtaactgatatgtacataaccccgcacaatccacattcctaatcacctaagaaaattattaagttgttacctgacaagggggcacgagtgttagaatcagcatccatcactcttgacatggtgccgtgtcctgtatgcacgttgcataataccattgaccgtttattcagcgcaatgctcaattccaagacacttgttggtaacaaagagttgagccaccggttgtcccagacacagtctgaaatctttccgctcttgttggtttcagatgattgaattgccgtagtactcaatatctagaaggcctgttgtaaactgacagagtgatatagaccagaagagtttgtgctgtgaggtctttcacgtttatgacagaataggcatgccatatatcatatagtggtagaagtcacaatcataggatattcagaacctaatatcttgtttctgtgatatctaacagttacggtctgagtgcatctgaataaccgaaccgttaaactcacttgtcttcaggaaaaaggatgctcgacccatctcgtcgtcagctacctgcggtgaagctaaaaaggtaagcatgaccacagatatcattctgattccatctccgcgcaatgaccgtaacaagttctctgctatcaaggcttgttctgttgctctctttaaggggtctgcacaatgagacaaactcatcattcttttcttctccaaacttcatcatgggtttttttttaacgtttccccgccttcgtccttcattccatacatgtgcatatattctgaaacgtttacaccatgt

SEQ ID NO: 107242 - DNA, 457 bp, Zea Mays
caaaattgaagatagaggcaatcgcaaccaagggcaccaacacagttcctagtcaattgggacgcaacaaagctccttcagatcgccaaccctaagaggtagaggaggacgaagcttcggagaaagattcaactcacaaccaagaaggctattttgtttgttctatggagaggataagggacacacaactagaacctgccaagttacaatacagaagcaaaaggagatatctgaggtcgaagcacgacagaatcagctgaagcaagtcctacatactgcttcatgttattccccacacattctggagtatgtgggcaatcaacagccattttcacaacctacagtttcagtggcttcagcaagtcactctccagctgcgcgggccttaccacaaccactggtactggctctgacttcgtccaataaccagcagcctaaagggcagcgccaaattcag

SEQ ID NO: 107243 - DNA, 567 bp, Zea Mays
atgtaatccaccacgacctattggtggacagtggctcaaccacttcgtagctattaagtcaacaaaggacactggataaaccgctgtaggacatgactgagtgtaacgacgggctccaggttggcctaggtgtgcctaaagtaccgtgacggaggaagaaggcgtcatccatggcgtccctcgactgatgggaacccaagaggacaacgaactacacgacaatgcgtgacctttattctcttgaccgttaggctcttgtaacagtgttggtctttgaccttggcctataaaggaagggaaagggacatgattccgaggacaagcaatcacacatacacatcactagcacaagtcaaagcacagagcacttataaccgcacacatattcacacactagagacttgggagctcgatccctcgctcgcccgtttgtaaccactactacaaaccagtgcaaggtaacatgagcaggtcaactggatttatggatgttatgcccaaactagaataaacccttgtgtcctctttgtacaccatccgctcgaagacacacacagcacaataatt

SEQ ID NO: 107244 - DNA, 381 bp, Zea Mays
agaaagtattcgacaagagtgaaaagctcacaggcaaatggatcagggaactaccgtatgtagtgtggagtctgcggacccaacccagccgagcactgcatgggaacactccattcttcatagtgtatggatcagaggcagcagacctaatttttggagcacctaggttgacattcaaaagcatagcggaagcggaagcaactagattggaggaggttgacgtgttagaagagcatttgaatgtcgtcatccaatcagctaggtaccagcagactctgaggtgctaccacgacaaagcagtgtggcaccgatcctttacagtaggagacctggtactctgccgcgtattaataggagaaggacgacacaaactgtcaccgc

SEQ ID NO: 107245 - DNA, 405 bp, Zea Mays
ctatcgtggcgctcctcggggtaatgcctccgtcgacgaactgacctcctatggatatctaatgcgacatggtagatcttctaagcacgtggggtggctacaatcgacggcgaactccgacgaggacaccactgtccactgcgcggcaagtgtcacggtgaacagtccggcgaaaagtctctctccctttcccgagttgagatctttccttgcctgtaacacctcaaaatctcattttgagaatttggtaaaattttccaaagattttgagttagaatatttttttaaataaacttttgaagtcatatcccttaaaataaatatccttcctaataaatagttacttaaaacggacccacatgaaattagtcatcccactataaggttaaaagtactctctaaaag

SEQ ID NO: 107246 - DNA, 521 bp, Zea Mays
tgaagattgatcctacgtcgtgaagatcgggcatcgtgatgcatcaatagtggtcaccctgagttaagtaagcgtgagcatgtcacaccgccttaagtcatcgccgacttaagccgattgctccgttagtagggtatagtggtcaccctgagttaagtaaacgcgtggattgataataaacaactcgagtgcccttgagaatgaagtctttttattgatgatgcactttccattttacagaatacaatgtcgtcccaatagcttttgaaatctagctaagggtagaacttcctgagatgctctatattccatgagttccctatttccgtgccgttcatttgagtgaggcgatatgatccaggccgagtgacttctgctactatgaacggtccttcccatagtggcgacaatttgtgtcgtccttcccccgttagaattcggcggaggacgaggtctcctactgcgaaggatcgatgtcgtataactttgtcatgataacgccttagagtttgttgataccg

SEQ ID NO: 107247 - DNA, 396 bp, Zea Mays
gatggtttcttgccttccaatctaactacaacgtcctactcatgttggctcgtctttgctgttccatacaaccttccaccagctctttgcatgaaatatgaatttattttcttatgtcttgtaatacctggtccagatcatcctggaataaagatcaatgtgatgatgagacccctgattgaagaattgataattttgtgggaatgagtcgaggcgtacgattgttacaagaaacagaagttcaacctgagagtcgcgtttttgtggtctattcacgattgtatggcttatggtatctttgctggatggagttgtcatgggatttttacatgtctgatatgcgttgaagacactttatgctttcgactaaagtttggtggaaagatatgttacttc

SEQ ID NO: 107248 - DNA, 393 bp, Zea Mays
gtcgtctacgacgcagaatgttggtggagaaaaataatcaacctattgggagcacataggtggagccgtgaagttagtaattgtgcggtgtcatgtcccgcaaccgcgctctgccttcttgccttgtcccacaccgtcttgatggatacgtgaaccagtaccatgctgacacgcgcgtgagcagcaatgggagcaccgtgtcacccatctatccggcgggctgtccgtgataatgagcaccagaaagcctaaatactgcttgcgcacatattctttctttccgttttttggggcagtggagccaaagtgaaagtgaagtcagtactccatgtctctattgtctgcatcaccacccagttcatccacacaaggtcgatgctagtgtcggcaatg

SEQ ID NO: 107249 - DNA, 416 bp, Zea Mays
ctttaggtggcttagtgagtgctaaccttcggaagggtttcatgcattgtgctttattttattgattatatgaggtggttagtgtggtatgtcgttgtttcgttgccaaggtaagaaaggtaagtgtaggaccatgcaggccaggtctagtcggctgccctcatgtgtgggttaccatgtgtgttgtataaggactgatagaattacttacattgttgcatcatggggatgggctggaatgaacttttctgcaggtacactaacctcgatatgagtagttcgtgtagttgcgtaccgatgagtgaacgagtatgccaccgcttatgatgttaatataaataggtcgtggggtcgtaagttacgtgcatgcattattgcataaccatcattttggtcatttagtgcatcgtttattt

SEQ ID NO: 107250 - DNA, 1185 bp, Zea Mays
gaagaatcggaaccttagctggcgtttgaagactggatctggtaaatctgaggtcaaagatgatattcccgtctccactcccggtgatgccggtctgccaggtattctcaaaacccccccgccccccattctaaaatctgagaatgatttggtgcgtagggttttttgccagaaatgtggtttagatggtcatcatgctagggagtgctttaagtctttgtggtgcgaaatctgtcgcaaagaaacccacaatactgctcggtgtgttcttcccaaacagaataagccaagtatgccgattgttgggatggcggccgatgggttagggttttattcctctcatttcgccaaacccttatccaacaaacctaaacgcagttttatcggcttggttaaaattgttgagggtttgatcaccgccgatgatctggagaaggatttcggttttcacttcccttggggccgtgcttggaaagctactaagtgccattctggttttctcatgcaattcccctctcaagagagattggatgaaatgattaatttccgtgaattgaaaatgaaattgtctggagccaaaatctctgtctcttcctggagttctcaggctaagcctaaatctaaactgcattcggtgtggattgtggctgagaatgtgccagaagagctacaaaattatcaggccatttgtgaattgggatccactattggagtagtggaagaagtggatattaactctttaaactctaaagagattgtgaggtttaaagttcatgtgaagagtgttgctatgatccctcctatcattgaagttggtgtcaaaccctttttgtatgacatttacttcaaaattgacaacattactgatgaaggttggaatgatgattctgttaatctgggcaagagggcttcggttgatagacaagggtttggtgagatttctcttggcaaatatgctaaaaaggccaagagtggtgatgaggactctggcaaggatatcaagggaaaatctcccttaaagataccatcaagtcaagtcaatgttgctggttccctgtctgaacaatccgaaagcatgaaaatgggaaaaggttctgaagatcctaaaggctaccttgatagtcagggaaatgaggatgaagaattcaatgatagtgaggatgatttgttggattcgcaggagtt

SEQ ID NO: 107251 - DNA, 333 bp, Zea Mays
gatgacaaaaatgcagcagagcgcattgcaaggcagtcagctcattatactctcattggggaaacactatacagaaggggcgcgacaggagtcctcatgaaatgcattctttcggctagtgggaagcaactgctagatgaggtccacgctagacaatgcgggatacacgcagcatccaggactttggttgggaaggtcttcaggtctggtttctactggccaaaggcaaagggtgacgcagccgagttagtccaaagatgtgaagcttgtcaatacttatcaaaatagcaacatttaccagcgcagcaactgcaaaccatacctgtaacatgg

SEQ ID NO: 107252 - DNA, 691 bp, Zea Mays
cacttaccatagggtttggggagtctgccaagtctgaagcttcgacccatgtcagaagttctgacttgcgcgaaactcctaggagaagccacagtcttcttttcactgctaggtcagagcttctaacctcccgtcgtatgttcggacctacactaatcctctccataatagatcttcaggctcacaagtctaaccttgactcaaaggtatcttaggtaagaagtttcaacttttgttgtaatggttagattataagggggtataaatgttgaggacatcacccctttctatgtacccgctgaccgttttacatttatgcatattataatgacacgagctcaaatgcaacaattaaatttagatgtgagctcgttcttagagcaactccaacagaacccgtaaagcaacccgtaaaacatttatttagagaaaatcgcattttgagccctccaacagttccctctttgtgtccccattatatttgcgtcccgcatatacggtcttctctcccgcaaattttcgtgacgctgattcttccccaatcctctcagcgagcaggctagctgctttccacgtacgtgggcgcagagtcccggtggttcatggtacacacaattaaagtattatttggcccatacgtggcttaagttggtgtttcaaaaaatttagggatctattattagcagactga

SEQ ID NO: 107253 - DNA, 687 bp, Zea Mays
acatcatgtctacttcatcagtgaagtcctcgaaccctctaaaataaaataccctcaagtccagaagctactatacgaagtactcctcactgctcgcaaactgcgtcactacttcgaggatcacaaagtcatagcagtcacgggtttcctaataggagatatactctgcaacaaagaagcagtcgggaggacagccaagtgggcatctgagcttggagctcacgacatagagttctgacctcgcactgcaatcaagacccaatccctagtagatttcatatcagaatgaactgagcaccaagttctggagaacttcgagtcaaccgaagtttggaagatgtacttcgatggctcactgaaactgcaggggcaggggcaggaatccttttcattgcccctagatgggacaacctcaagtatgcacttcagctcctattcccagcctccaacaatgcaacagagtatgaggccttaatacatggactcaacatcgctgtgtcactgggcatcaagaaactgatggtatacggtgactctgtagtggtcatcagtcaggtcaacaaagactgggattgctccatagattcaatggacaattattatgacacagtgagaatgcttgaagacaaattcgaaggcttagaattccaccacatatagatggatcgcaatgcagcagcagatacg

SEQ ID NO: 107254 - DNA, 308 bp, Zea Mays
aagtttgagcataaacaagctttagtgaacaaacccttcttaaccttgtatactggggtgtttattaattttaaacagtgtaactactaggttagtgtctccactatttttcttaaccctggtctaacaatatttctatttttccttctaatattaagttttgggcagttttcttatttaattcaaaactctagaaaataatacaggaactatggggtttattatttttgtctgatagtttatatttcacaaagtctagcaaaattggtttaacaaattttggatgattattcttcaagttatgcatt

SEQ ID NO: 107255 - DNA, 558 bp, Zea Mays
tacaaattattttatacctagtagctagccagctaggattcatttacaaaagtctttgtcactttttgatacgtgtgtctatacgacatatgacatgacaagctgctgctgcagtgccgtcatgtggtatagacagaacgccacgactccgctctctgtttggataacatggtaggtaagaccaccggcggccaaccagcacagcggtttaatctgttcgaccgctctacgtcatcttgtttttgtttttccaagccccgaacccttgttttccactgaatggttctatcacgacagagatagtccctgaaccatcacagaaagaaaatgctgttaacccgcccgaccagcttggaaaataacgggaacaggttggttgaagcagccgccagccaatgctttaggtttcctgttgtgcatgtttatccgggcgttgtcaattcgtatatcgccgccgtttgacagacagacagacagaacaatgccatcagcgccaaatccacggcaaagagctctacggaatcgcactctccatgattagcctgaacgttgttcgcg

SEQ ID NO: 107256 - DNA, 767 bp, Zea Mays
ctcgtgcccgacgtggaagcactaccaagtcgggtcgtaaccctcatcgtcggagctatagtcattggagccatcggagaggaagtggttgcatgtagataagaaatgccacatggcctcgggatcatggagcccagagaagtctaggcctagacccaaatcatcttcttcctcagagtctacatactccgaggtttccgggagttccgcgtacatgctggtgtaggtgcttgtcatttaggggtagcctggaggatcgaagctcattcaaaaggggatgggattgaacaccgatggttcccccaagtcaaatgctggagtcggcacctcctgacccgtaggagggggagccagtggagctggcgcctctcgatccatagggggaggagctagtgaggcagacacctcctgatatgcaacgggaggagctagtgtggccagtgtccttcgacccacaggaggggagcccacgtagttggtgtctctcgaaccgtgggagggggagctggtgaaggcggcacccctcgatccacaggaaggggagccgatggagtcggtgctcgggcaatgtacattgacgttgatgctctaggcatgaacctaaggcatgacaagtccctcgcaagggagtctgtgtcattggcctgcttgggagcattggctagggtggagcgctgcccatggtgttgttgcggttgttctgtctctatctccgctggcgaggaggacggcgacggaggtctggatgtccctcctccagccagggg

SEQ ID NO: 107257 - DNA, 291 bp, Zea Mays
gcgatctgaaggtgagagccaagaacaggaagaacgagcgttgagcagcagccgtgaagagtgaagacctgcatgtcgggacaggggagatgagggcgctggagcaacagatgtgccatggctgagcagctttgctagcgcgataggctgagagcgatgacgtgccaaatctcagaacaaagactgagcatgtacgtggagataaggaagagttctagagaacgaacttatgcaaagaagtctctaggcagcaccgaataaggagcattgacgtggattggagatcaggat

SEQ ID NO: 107258 - DNA, 628 bp, Zea Mays
caaattctcatttacagtcgctcgtccatgttcgtatctgtgatattggcggcggttaacgactgcataacgatgcgtaaataaaccgtttacgactgcataacaatgtgtaacatgatagcataaaccatgtattatataaatcttgaccggtttgatataaggaaagacgtgctgcataatcgcgtaaataaagggacagttatggtttgaggagcattagtagaaggaaataaattttaatttatagccgcagttcgcgggttctgctcgggcggattccagcgtaaaacgtgagctaaaacagcgtaaatgagtacgaattttagagtaaatcatacaacatttaaataatgccctcctgatgattacagtagtacagttttaatcatttaccctggtgctatacatgctgactgaatttctgtgttatttccaactgcacatatatatttttattctctattgtttcaacgtgtatttacactgtatatatacgtatgtagcatagtatacaacagtcgtttaactaaattgtgatggcgactgatatgagagatcgattctctagatcgccggactatggatgttgagcaacgaaaccctattccgaacaatgctcctgaac

SEQ ID NO: 107259 - DNA, 494 bp, Zea Mays
tgtagtgcaaaaagaattagagtgctaacatactagtatcgaattttgtccatcagatccatcatctacggttgaacgtaatcctatcggtgtttagtactgacgtcacaatacggaatgtatcacgtagtgcttttgggaggatgacgaggtcgattgtagctcgatggttcatgcggggcatgacggaacacaatgaattatacatgtttgggccactcaagtgcgtaataccctacgtcctatgagttttgtgagagtgtattgctcggtgattaaagattatagagagttctggagatggaagatgactatgctactaaggtatgtcctcgttttcgtaggggatcccctccaccttattgtcgactgagagttacaacgcacgacctgatacacgatctccgtccacccgcctctgctagagtcatgccgagttttctggtggtcaatgagtccttagaagatttacacgtcatctgcatgcagagaac

SEQ ID NO: 107260 - DNA, 448 bp, Zea Mays
cgccagcaaagaccggcaatggttatcaccatggccatggcagtggcttattgcgcctataaattcatcgcctcctcaccctctccgttcaaatcaactgagcacaactcttcgtctctaaattgtgaagccgtagcactcgcctacaccctcgattgcccaccatagccggagaattcccctttcccccaaattggtctccgccaccgtaaagcaccactccaccgtggccagtccgttctggtaaggcaccatccaattcgcgtgttgttctcatgtccttgtatgctggtgatgctctccaaaccgcccaatcaaactagaagcccaccaatcactgggaacacgagctaatgtctatagctttcgctgtcctcgtgggtagagcgaaatagatcaccagatatgaaattgattggggggaaaccattgataggccgtgaatttg

SEQ ID NO: 107261 - DNA, 495 bp, Zea Mays
tgggtttgggctaaagtagtgatgcctgataaggttctctccggcaccatgatccctatggatgacgcgacaagggatcgtcgacggcctacgcttatgacccataccttgcaatgataggtggattagtgtggccagcgttagtgtgtcattattgctgtcgctcgagtcccaatcatgtcggtgtgacacaagaggcatgtttaatggagtatgtgtgattcctaggccatgagtggagcattgtgaggaattgaaaccccctaggtcatatatatagaagaggggatggtggcgtctcagaaaagactatggcttgcgacgaaagcctcttacgccttgtagtagaaggcagtctgaatttggcctgcgacggaagcttccttgcaccttgagtacaagtaagtacaaataagagtgttgcattagtttaaaaactattattagtggtagaattatttcagtaattaaattgatattaacttgtcgtacgaa

SEQ ID NO: 107262 - DNA, 606 bp, Zea Mays
aatggatcacgatcccacagtccctgatccatcccgaggcgggacgccaggccctgatctcagtcgtagcttcacagatccacactccggaactcatcaccgaagtggaacgctcctatctaatcctatgcgtccaccgcggatccaatgacctgccagtgccacccccaatcctcacccgcagcatgaccctgcccggtgacgcaaggacatcatgacggcaccatggccgaaaaaccctcctagaggtttggctacaccatccccatccaatcggtgctagtagaaattcaaagcttgactaaccagctgaacaagccctcaccggcagatgtacaacaaaattccctatccacggcccagcgaggcgcaacggcgtcgatgaagtactggcgacaaatcctcgacccgcaactgggctaatacctaccccaggagactctatgcaacaagggtcggttcatgaaaaaggtgggagagtccttacccgcagcggcgtcgggaggaggtcggtccacggttgggtatggttctacgacggaataggggcaccggtgagcaatttcaacggtcacaaggtccttccccaccgaatgacgccaccac

SEQ ID NO: 107263 - DNA, 492 bp, Zea Mays
tgcatctccgccgccggtgcaaccagaggagaatgccgggtccacgaccaccgcggttgccggcgacggtgaggggaaggagtcgctggacaaccctttggtggccatggagtgcttcatcttcctgtagcactaaccttctcctgacccgttctccgctgtcagcaaattactccacatagttttagcaggagtaaaggtggtggtgttggtagcagcagcaggcagtaggccagtagcagcgtaatttggtgagtaataatctcgtcgtgtaaaacgtttcccccctgggctggctttttaacccccgcgggagaaaaattactggctattcccgtagagccttcagcccgtcagaattcagatcgcagggctgggctctgacgcgctgtgctgatgtattgtctgcactctgtagagtacctctccgattgtgcatgtctacttgtaatcttctgttcctttttgcaatggcgagtcattcagagctgg

SEQ ID NO: 107264 - DNA, 297 bp, Zea Mays
gttttctttacggacctgcagaggagcaacgggaagtggtattcctgaatgggcctaatggcctaggcatagcacgccataaaggcccacgcggccacgtgactttaggaattgcccacgtacagggcctagcccacgatgtctcgaccgcccaaatttgaacgggcttctgtgtgtgacgggctgacgggacggcagctggtacagttatgtatgtgcgtgcgagagagacacactatcaagtaaaaggattaggggctgttttggttggatgactaatttgtgacactttgtcta

SEQ ID NO: 107265 - DNA, 660 bp, Zea Mays
gccttcattaggctttctttcgcaatgacccttgctaccctataagcggggtctagttgtgccatgcccatggcagggttcgatgctaccatgtggttttagggacccgttgggggggggggctcgaaccccatcatagagggctctggacccctagagggcattttctacacctgatggttccattttctcccaaggctccaccgagacctcggatctccctaggatgcctttggacccataaggtggactcctttgtccaatcgcgccaccaaccaccaagtagggcccaagggtcgccacacccaggctccgacatgcattggcctattgggcttctagcacgccatgtgttctaggaccccacgacgaccctgtttaagaggaaggctctgtactcgctatgtggatagccgacaccatcatggtcggtcaagtagttggagtcagaagatgtactatgcctgttcgacatgacatgtgcagctgtgttagcatcatgcccactccctggttgttaggcctatgtaagctagggcgtggctccatcatggtattgtgataacttgtgtgctctaaggcgcgcccaaccgcgaccactgtggcgatatgggtggtgcacaccgtagactgtcatgtctaaggtctcccacttcgtac

SEQ ID NO: 107266 - DNA, 408 bp, Zea Mays
attccatcttatcttacaagattctctctcgtcttaatagattcatcttatcttaaaagattctttcttatcttaataagatccatcttatctcgaaaagattctatcctatcctaatagatctgaccaatctcagaagattctatcttactcttggagactcatcttgtcctaatcagcatacttacccccaccaatttgcttatctcataaaagtgtaacaagcatgatgtattctaaaataaattaagtagatcttatctagtctatgtcacccatatccatcttaaccatactccggtaactttgatgatatacactgacctcgaatcaatgagctcaagaccggagaagaaaggatcaacctcgtcaagaaaggagagaggtcaaacccaaccttcagatgca

SEQ ID NO: 107267 - DNA, 313 bp, Zea Mays
gatggatgttatatttgtggtggatgtattgtaatatttgtggtggatggatcgtgatatttgtggtgtttgtgaggaattgttatatctatgatggatttgtgttgatgtaatatatatgtattgccgttaattgttataatatatatctatgatggatttattgaaattgttgttaattttatctttttcacatttttttctttgaaaatgcttagttttggtgatatagtccttattttcgatggtttctggccgccgaaaattgttctcgttcaggtagagaatcccagagaatcgatctaaactagtg

SEQ ID NO: 107268 - DNA, 762 bp, Zea Mays
atagaatcggcatgataccaaaaagggaaggggttacacaccagggaaaaactcaccaaggtgctcatgacatcttgataaaggggagtgggtgaatcctcatctataaaggacaccgacgatagcatcgtaacaaccctgatcctggcttcaatctcggttagcacaagcggcgcggaagaatggcggttaggatcattgattctagagtataggtacatcggtttctggcgggccatcagaggttcgatccagctatgcatgaaggttcgcaccagccgtgcgctagagagaccatgttgcttcgatgtcttaactaccgtcaatagattctccacttcgattttgaggctcgcctctccaccatgttgccactcatccgtagacaccagatcccgatcggtgaatggttgggcactcgaggccacactcctcacataaaaccactcacctttgtgtcggacgaagggagggagggggatcttgaatgatggcctttcgactgaagtgaagctaagtgatggtcgaaccgacgtacaattgattatcgtgactcggggacatctacgcactgaagaagtactgccacaacctctagtgggggctgatcccaatgaatgattcacattgcatgatgaagcacgctatgtgaaggatgacgttggagtggagactctagatctctagttgataatggtgtaggagtccgcgcatgaaggcatgaaggggtaaactgaacccgcactcatagaatgacgcgag

SEQ ID NO: 107269 - DNA, 690 bp, Zea Mays
atagggacgctggtaacagaagagaatagacttagatagattcaatgacctgtacatggatatctctccagtcggctatataagcctacaaaggtacccctacaaaaactctctcgctcaccattagattgataggtaacttcattttccacctcttgcaaaccacctataacctgcgaacttagagaaatccaatacttagcaccacactggacgtagggtattacacattcacgtggcccaaacctgtataaacttcccgtgttccgacatgcccccactcataccatcacgcagcgatcaacattatcgtcctcccaaaagtactttgggggctaccccatagtgagtagtcgggacaaaacaccgacaacgagcacagaaaggggttgaccacgacactaggtgggtccgcggtggagctatgtcttcgacaagaaatccacatccacccgatgatcaatccacaatgacgcctaatgctatacgaagcgaagaatagtggcaactcggtgcacgactcagagcagattaatggcttcgtgaagctctagtgaagaattgcacaccccctagttggtcttgcgcttggaaagccacacccacacattccttacccttggctgcccttctcgtccacatgcctatggcgaggggtgcgatgtagacatggttcaccggcgatggctc

SEQ ID NO: 107270 - DNA, 545 bp, Zea Mays
gtcggggattggggaatggcccggcagtaaaaggccttctggctcttcagaaggaggaggaccccgacatcttgtttctctcagaaactaagatgtgcagaagaagaattgaaagttttcggtggaaattgggtatggcaaatgtggtggtgaaagattgtgttggtcaaagtggagggatggcgatgttttggaaacaaaacataaacctaaaactcaatatggtttcgcggttgttcattgatgtcgatgtggtggaggaagatggtttcatatggaggcttacaggcatctatggtgaaccaagggcggataagagggaagtcacatggaaggctctacgaatgttgaatactcatacaaggcgaccgtggatgatgtgtggggatttcaatgagattctcatgcaatgtgagaaagaaggtggagaacaaagaagtcggacatccatggaatcgtttagagttgctctggaggactgtggtctgagtgatcttggtttctcaggggatcaattcacctggagaaataatagcaaatgccag

SEQ ID NO: 107271 - DNA, 509 bp, Zea Mays
gtttatgttcacatgattactctagtctggtattgtgtgaataccaaatccatgttgtacctctaatgcaccctcttgagctataaggtgcatgagcaaaaggagccctcaattagtgacaactggtgctctcatggcaattcaggaaaaggcaaaggtatggagaatggaactatgcaatttcattgaatatcttgaagttccatcgattgtgatcacagctatgttcttgcctctgaattggtagtatcttggcttaggtgctccttactttaaaatgttgttccttttggtgtacctaaggaaccttcttaattatggtgtgcttagacattgtgatttatatgcatgatcttgtaattttcaattggcatatgtggtgcgatgattatcatgtatggagcatgcctaggctgcttgtaaaatgttatactccttgaagcatgcattgttgtattaagtcaattattcaattggtatctctttatgatgaaattgatagagtatgc

SEQ ID NO: 107272 - DNA, 706 bp, Zea Mays
gttatttttattgaagcaaaattagtagatgagttactcctctaatctaccacggttctgattagaactactagagccacaccccctgctgttaccatgcccaaaactgcaatgcctgccacatccacctaggtgtccatggatcacctcgtccttgagtagcaccacatcctcagctcatggcgttgactggtctattgttagatacgaggcccatatgggtctcaaaattgaaaagctaatcgaatagctcgttgactatgatcagttcttgctcttgtttttgagccaaaggcgtcttgggtctttatataggcttcgattgtggttttgactgaagaaatttgaattagcatgtcatttgatagcaatgagaagagatatctcacgacatattgatctctggcttcctagtcatcatactctggattgtccacctcaatctcttttttgatgtcacacttctaggggatttttgcaggcgtcgctttggtgtcatcggttaggaagccaaatagctttgcaccatgaatagtatccctaacatgtgcatgtcatagtgcatggttagagtatgttaccttcttggagacaggtagaccaaggagagaattcacggaggtagatgacgatgaacttgtcatggctatgattaccatgtaaaaacacaaaggtgcttgaaagaattgtcgatagcctaaacccg

SEQ ID NO: 107273 - DNA, 1358 bp, Zea Mays
acatccctttgaaccgccactattgattcctcttcagactcattagccaacttctttggagagggcttgcgacagctagctttctgcttctttagcttggacatcatcggggggcaggggcctcttatggctctttgacataggaggcgatggaggagggggagacgaccttgtaggagatggagatggagacagagaagcacccgtgccatggatggcaccatcatcatctggaagaggaggagacgggtaccctagccaccacactgggaggaataatgatgtagcgcttgcgccacaaaattactccatgctctacttcttcatctaggcgggtcttctccccatcacctccagcaatgtctagatctagccactcccctatgggcggcgctgataactctatccacattgactcgataatatccaggtggaattaaactcccatggattcttggtgtcatgttagggtccataggagaaacaaaaccgtacgtgcgccaccaggactgtgctatcccccatgggaatgtgtagctcacatatataccgtaaaaggatcagtgatgtcattatggggaagtgcagcaatgcgtcatcctgtgcaacaacaacaccacagtggaagtgcagctgcttcttcgctaagaggggctgactccctgctgctttgatggtgactgcccttggctaccccactgtagcaccacttgtcgtctgagacctcctcttggatcatcgcgtccctcattcgttctcactcctgtgactcaagcatcgcctcctctagcctgcagatccactctgcctcctcattcttctttcgctggcggcttctataggtctcagcatcctgagggaagccatgccgccacggaatcaagcctttgcctcacgtttgcccagggtgttctggagtctggagggcgcacacgtcagctcatccttctcttggttcggctcaaactcaccactggtggaagcatttagaatctcgataagtctttgtgctggcgttgcgagtgccccaccaaaaaccggacgtccggtctctgggtctagtcagtgatcccccatgtgcgaaaaaccaatgctgggaccgctcgggccaatcgagtgattgtagagcgatccctttgccaagcaggtcttcttccatttttcccactttggaatgccagtcctgtagccacctgatcccgttttatgatggtttttttttgcgcattctgctggttccatttcgatattacctcaccctcttccgaggtcttatacctaacaaatctgggccagtcatccatcaactttttatacaggctgttcgcattgaaatctggagttcactcattcttgac

SEQ ID NO: 107274 - DNA, 444 bp, Zea Mays
ttatttctctttatgaattcccactcgatttattatgcagttaacactaccactttacgattgattcttagcctaatccttaaatatcattctaatcactgcaccttttagatctaggcattatacttgtattgttggatctgttttattgtttcttacgcaaaaaaatgagatgaagatacacacgattctgagtttaccatgtttgagttcgaggaattcgataaggatgcatttttcaaatatatttatgaacgtctgggtttttggtaagccctctactccatggtggtcaaaatggctggccactgaatttacaactatatttatgaacgatctgttttatttacctttatgaattgccactgaatttagataagccctctactccatggtggtcaaaacggctgacctctggtaatggagcttagggtgtttcagttt

SEQ ID NO: 107275 - DNA, 474 bp, Zea Mays
aagcagaaaaatacaaatgcttccgttaggacagcaaaggaatcctatggtttggagaccgattggttgttcccaaaaaccctgagctcaaaaaaaagatattggatgaagctcacctttcaaaattctccatgcaccccggtagtaacaagatgtatcatgatctcagatctttatactggtggaccagaatgaaaagggaaattgctaagtacatatctgaatgtgacacctgccaaagaatcaaggccagtcatttgaaggtagcaggccctttgcaaccccttcccataccatcttggaaatgggaggacatttgcatagattttatcgtaggattgcccaatacctcccggcaccatgactccatttgggtcattgtggacagatagaccaagacagctcatttcttgccgatacacaccacccacaggacagagaagtatgcagaaatctacattgaccaaatagttt

SEQ ID NO: 107276 - DNA, 348 bp, Zea Mays
gagccaccaccatgccgccagagtgtggaggtgaacccacgtgaacgtccatagaactgcaggagagagacctcgctcggacaccctcgggggctgggtcaaggttggcactgcccactcgagccgggtcacccccggcaacaccctcgggggctgggtagtggcctacactcctcacctgagctgagtcctccccggcgacaccctcgggggctgggcacatgtcagcgctattcaaaggatccaagctctctgccgtgaccacctctaaggttgacgggccttcagctacttccataggatcaggacgatccaagtcatcatcccgaccctcgagatcgtgctcta

SEQ ID NO: 107277 - DNA, 893 bp, Zea Mays
aaaaactagagggtcccaggaggtcataaatatttttgttgttcaaaaattcatattttggtgtaaaaattggatgctcactcacatgttagacatgttaacccaaacacattattgaatggatattcactcacccgtctcaccctctctgctcattcactcactttctccactcaacctctcggctcagctcgaagtcaggagcccatgatgcctttctcgctcttgaggccacgggatccgcttggcaaccgcgatttcctgacagaaaaatcccaaaaaccacagatctcgtgcgagcgatgctggtttcacaggagttggttggagctgaggttgtagctttgaaatccagtaacaacccgacgattaccatcgttttaaagtcggaggtgatggtggagatgatgatgatggtagccatggggatggtggaagttatgctggaacatatgatgcttgggatagtcatgcagaatggagtggtatgagggatttgagattcactgaagagagtgagatcacccatgccacataacattcagaccatggagcatctcattcacaacaggagacaagaagcggtcgttgtcgatcagtttccctttccgttgatgatggatgccagaacacattctgctctagttacaactatatagctcgatgagactgaaacctaaacccttatgcatggcaatgatctctaggtaaagtacaaccatcaattatgtatgggtacgaacaatcactccctccaccttatactcatattcgcatctaggagtacccaagccccccatgtgttctatgttttggtgttgcaatgttggatccatatgattctataggcaactaggtgtgttatttttgtttcgtcattaactattttattt

SEQ ID NO: 107278 - DNA, 325 bp, Zea Mays
tgggcgcgtaacaagagggtggaatatggagggcactcaatttatagaggtcggctacaggtgctatgagtttttggacgaagatgggttcacgacagtgaagggtgagtcaccgaagctcgtcaaccgtggcactcaatggggtaagggctcagggcagtaattggtcgtccaccacgacttactgtgatgtggtacgatggcgtatggcatggcacaatcgtggaaaacgacggtaatgaaggcgacggtcgcgcggccacgtcgcgggcaagtggatatgcgagaacggctgaatccactccccctctgatcttttcatcct

SEQ ID NO: 107279 - DNA, 552 bp, Zea Mays
ggtggcgtggagattggatttggggggaaacgaaattgggtcgctacggtggatgatcggaggcgagggctggtgctctgggttcgtaacaagtagacggaactggccgaggcatcaatttgaatggggaagcgctcgcggtgagaagggggaggagtcaccggaggccgctaacatggcgctcacaggctaactatctacggtggtcactatcgagtccttacaacttgcgatgacatggtgaatcgactacgacgtggcacactttcggtgaacggcaatctccatggtgatgatcgtccggccacgtcgcagcacaagtgggtacgacgaccaggcggccacagtgccccgacttcatcccttgcgcgagatcttttaccctgagtcattatccgtgcaccattgggcacgaatcacagcgccggtgaggatcgtggcacgggatcaccgacggcggtgcactgaacctggcgatctgattcagttactgtaccatcgcgctcttcctcagttgttctgacagagcgacttgtgcttagttcttcaatt

SEQ ID NO: 107280 - DNA, 506 bp, Zea Mays
cggtggtagaattcgagccgatagcatttgcttgaatgtaagtgtggaaataagggggatagcgtttcccgctaatctcatagtaatgggtactcagggaatagatgtcatcctagggatgaattggctagacaagtatcaggcagttatcagttgtgataagaggacaatcaagttgatgtctccactaggagaggaagtggtgaccaagttagtcatgcttgagccgaagaagggaagttgttatcagatggctattgatagcggtgaagcagacccactagagatcatcaaggttgtgtctgagtttccagatgtgttcccaaaggacctaccaggtatgcaccagagcggaaagttgagtttgccatagagcttcttcctggaactgcccccatctttaagagagcttacagagtgtctggactggagttggttgagcttaagaagcagatcaatgagctgagaaaggttacatccggccaagcacctcgccttgggccgcc

SEQ ID NO: 107281 - DNA, 550 bp, Zea Mays
agtgatggaatagaagtttgggttaattcgatgcacagagacgcaaaagcccatgttcgccgcacaacaagggcctaccagtaccaggtgggcaaatttctcagcaatctagcctgttggacatcagattacctaggaggagttcaagttggcattccgggagcattatgttccagagggagtacttaagatgaaactataagagtttatccggttaaggcaaggaggagatacgatgatgcaatatctcaacaaattcaaccacctctctcagtatgccattaaccaggtggatacagacttgaagaaaaagaattgttttatgagggggcttaatgacaggcttcagcggaaaaaggcaacatgcttggacctcacctacaataaggctgtcagtacagcactggcagtggaagccaaaaatgtgggacatggaaaatcaaaggggtttggaggtgaaaggtcaaatcaagggcctgaaaagagaaccaggttggtgatccgaccttttaatcaaaatcgttcttcgcctcgcccaccttcatatcca

SEQ ID NO: 107282 - DNA, 554 bp, Zea Mays
aatagattcaatgatgccacccatgagggttaattcggtcggtggtaaagtgcaagcagataaaatatgctcaaatgtaagggtggaaataagggggatagggttccctagtgacctaatagtaatagacaccgctggggtagatgtcatcctagggatgaattggttaatgaagtatgaagcgaatgttagctgtgacaagaggaccgtaacattgaagtccccgcccggagagaaggtagtggctgagctaaggatgcctaaaatagcgaaaggtgattgtcaccagatttcagttgatagcaaggaggccaacccgctcgaggctatcagggttgcatcgaacttcccagatgtgtttcccgaggaactaacgggcatgccacccgagagaaaagtcgaatttgccatagagcttatccctagcaccgcccccatttctaaaagagtctatcgagtgtctgggccagaattggtggaactcaagaaacagatagatgagctgttagagaagggttacatcagaccaagtacctcgccttgggccgctccag

SEQ ID NO: 107283 - DNA, 282 bp, Zea Mays
ctaagcttaacaaaacagttgtgaaaccgtttgaaaatgacaactttatattttgctaaacttggaaacgatatcataatatggaaacgacatggaatggtattgaatttcccaaacctgctttcatccctacataaggaagcaattagcaactgataaccacaggttggcgatattaactctgctactaaaatctatctcatcatctaggccttgcttctagcccataccttctctgctctgcctgctgcccaggtgttgagtgacacattatctgccacc

SEQ ID NO: 107284 - DNA, 428 bp, Zea Mays
tttgattgcacctctcaactgtagaaccacaacgttccaaatttcaatactctgctcaacaaagctatcagccttgagagtaagatgaaggagttgattgaccataagaggaagtcctagtatcaaggccagtctagcaggaatgtttgttacttgtagagcatccggagctctcattctcgcttcgtaggtcagagtgggagctatcaaaaccagattaaacgctcaggccagtagacctagaagtacaaccggcaagggcagaggactggtggaagtcagcagaatcgtcaaggaattgccacgaacaccccaacaaagactagcaacctagtttccctagtgcaccccaatggctgtttcaagtgtagagaggttgggcactatgcctatgcctatgcctatcccaagagaaatttctagacagc

SEQ ID NO: 107285 - DNA, 437 bp, Zea Mays
acgaaattagattatttcagaatgaaacttgatatatacaatgaaggctagaatctcaccaaagaagagttgtatcacatgagaagagaataagatctagaagagagccacaaacaaagcagatatctcaacacaagcacctttgtccaagaggaccagagatatgcaaattttattgttgatagtacatattcactatcaagggatgtagaagcgacccattggcccgctacgtataagccaccgcaactccttaatatgatgggcaatctgacccgaaatagtttatcattagacatgaaaccacccttacttccttcagtactagccaaatcattcatcatggccgcaagatacatagctcaaacctggtatttcttccttctccggggttgatcaacacctcaagagctagctagttgatcactagctttcaa

SEQ ID NO: 107286 - DNA, 349 bp, Zea Mays
caagtgccatggtgtagaggcctccagcggtgttggcaaagaagtagagtccgttcatcttgttgtcaacccgcctctcgagctcctcgtcactcgaggaagaagtggtgtcgtcggcatcatggtcgaggtcgctgagggagtcaagcaaggcgtgctccttgatcttggtcttgtggagatacttctacttgagcacctccttgtcgaaccttcccttggacttgtgcttgtcggaggtgtaatcacgcttgcccttgctccaaccaaagtggtggtcgtgattgctggcctccggcttgaacttcatctcggggcatctggcgatgaagtggtcagcataccgtag

SEQ ID NO: 107287 - DNA, 717 bp, Zea Mays
gttttaaaggctgttttccattcatctccctctttcatacgaatctgatgatagccacttcttaagtcaattttagtgaaaataaaaacaccactaagttcatcaagcatatcatctaatctaggaattggatgtctatacattacagcgatgttattgatagctcgacaatccacacacattctccaagatccatcattcttaggaactagaaggacagggacaacacaaggggaaagactttcttgtacgtaccctttttaatcagttgttccacttgttgctgaatctcctttgtttcttctgggtttgtgcggtaggcagcacgatttgggagggaagcgccaaacacaaggtctatttgatgttcaatccctctcttgggtggtagccctggtggtacttcattaggaaacacatcctcatattcctgtaatgcatcaaagacaatacttggcaaagtagaatgtaagtcgttagtagaaagaaggttgtccttgtacaggagcataaagaacatggcattaggttcactcaattcttttagatccccctttctagtcatcatgactaatccctcttttcccggtgtcttggttattggaggctgtggagttttatttggctttggaaactcttccttactatttttgtggatcactctcaagtgcttctcgctctctcgctgtttcttctttagatcatccttcataattt

SEQ ID NO: 107288 - DNA, 426 bp, Zea Mays
ggcacgtagtgaagagttgaatcggtggccgattcggataaacgaaagggatagcggtagggagataaggtgcacacggggacctccgtagagacgatatgtgtctttcaagtaagtgagaagctgtgcgttgtcacacacagggttgcgcccgccacgcgcgtcacgatgtcaggccacagagagacacgtgcaatgcaagcgtgaaagaatttcaaacgaaatttacggaaccagattcgatttcaaggattagagtttgggcaagacgtcgatggctcaacccaaacgatactggatttgatgttccgaaaattaccaaagtctgaattttgcaaaataaattaggacaatttagacagatggagacagacacgatatcaaaatcgtgataaataaggatgattaaaatttagtgtccatttt

SEQ ID NO: 107289 - DNA, 1010 bp, Zea Mays
atgcaatgcattaaggcatacaatggtgtttaatatgggggttgttgaggtgtattaaggggtataatggtgtttaatattagggctctcgaggtgtattaagaggtatttgaaaaaaaaacaatgtggcgtctcttcgagtggagctatctttagctcgtaaccgttgcctccgcgttccattgtacaaatcaatcgtctcttccatcgatccactactccaggtcgacatcttctcaacccatcccatggatgtaccagggagacagtggtagattccagggaaacccaaagcgtcgtgggtcgttattctcgtagctcccatcaggcttcctcgaccgtccaccgtcggctgtgccccgccacccgaatgacagacctcgcctacctctactgaaatcaacgtcgacaaccgagtgccctttgttgagtggagctcctcacctgctactgatagcctcacaatgacttcatgtcgagaaagatgagatggtgaggtagctagagctagagtcactcattaaatatttgtgtgccgttgcaacacacatgcatcgtactagtaaatgtataatttacgctaaaaagatgttgtagaacgtgggcccatatcaatccttccccaatgtcaattctgcatctcgccaaaacccccaatccaaagcctataaggacatgtctaacatggctccaactccaaacttcatgcggatttgagcggagccagttaaacactcgaactccacattttttggtagcctaactccataaagttggtgcagctctagttcattttgagcatggagtttggagcaccttttttttctagctctacaccacttcaaaaatagacgtagacatgatgttttatgttatttaccacaaatgtcatcgattaaaaaatgatttgtttctatttcacgttcctttcttcggtacccattgccaccatcgtcgatccctcctttgccccgctacgactgctcctcgccggctgccgtacgcctcgc

SEQ ID NO: 107290 - DNA, 516 bp, Zea Mays
aggatacaactatagatgtcatcctacggatgaattggttaaccaagtaccaagccagtcttagttgtgacaagagaacagtgaagttagtgtccctatcaggataagaagtgttagtggaattggacttatctggatcaaggaaagggagttgtcaccaagtcatcacttgtattgaggagattaaaccatcagaggctatcaaggtagtgtcagaattcccagatgtttttcccgaggagttaccaggtatgccacctgaaaagaaggttgaatttgccatagagcttataccaggcaccgccctagtgctggtggaactcaagaagcagattgatgagttgtcagagaagggctacatcagaccgagtacctcaccttgggcagccgcagtgctgtttgtggagaagaaggatggcacaaagaggaagtgcatcgattatcgagccttgaatgaggttactatcaagaacaagtacccctgcctagaattgaagacttattcgaccagttgag

SEQ ID NO: 107291 - DNA, 324 bp, Zea Mays
aaaaagtagtatgcacttgtttatgaaattttctttttacgtgcacagaatccaatacataaaacgaggtacaggtacctttgaatccatgatgtattttcaaacacctagagcagtgtacagaaatataatttagagctgcacccacgctaagacgtagcggaggatgtcagccatttgatccagcagctcatctggggaccggagacgaacttttggtccccgtggatgacatgatccagcagcttgctcatcacagcagcaacgatattatcatcttcagaccaaagtgccgcaagcaagggcccactcatcaaacacgag

SEQ ID NO: 107292 - DNA, 667 bp, Zea Mays
tatgcacatttaacgttgctgtctctagtggactttggctggatcttaccttggatttgtctcccttacccgagcgggctcggccgaggcgaagatcgccgttctgggttaggggacctcggccggtacactagacattggacactagttgtcgttggtcccctggcgcccagaagaaggatcggcgatgtgagtcaatgcatttgaggacgccaacgcgtagcttcatggcacacatagcgtagacaaggtgaccactagttccattctcccagccgggtttagtagaagagcattccaacccgacaggtatttatctattttgctaaggggagagtgggcattcacggggagtcttgtggttgacagggggaggcaaagatatggcagggggaactgacctaggctacactagagagtagaggtgaactggattgcactatcgtggacaacatggatcggcacaagggtgttttttcgtaattgatgcaaaagtcccgtggcttgagcataggcgtctaggatgtttttgagcttggaaacacctgagggagaagcatcagtcacaaattcacaatcagtgtctgactttggttcagagggtgtcgaactgtaccatcttgcttgatcattgcttggagaacgtctgtaaccatgaggaagagat

SEQ ID NO: 107293 - DNA, 312 bp, Zea Mays
tttattcttttttagtacaagaacaggatttgctaaccactcaggatgcggtacttctctaatgaaccctgctgaaactaagcgagctagctcggtgcgaatagcttctctcttgtcaggcgtgaaacgacgcaacttttgtcggatcggccttgcctggggatagaccttcagtttgtgctcgaccagttctctctggactcccagcatatccacaggctgccatgcgaatacgtctcggttatcttgcagaaactagatgagcgtgccttcgtatttgtcatccaggctggagctgatgatggcagcctt

SEQ ID NO: 107294 - DNA, 640 bp, Zea Mays
tagaatttgcttcatgtcgttcagcgacaaagagagcaatgtgtcaacaactggttgagcaatatatgactgaaatttctagcctttattcatttggtaaggtcatattgcttactaatagaatcccaatttgtgatgtcttctatgccgaaaaggctttcatgcattatattatataccttcgggttacttcgagtaaaactttatgcataagaagagagaagagaattaacttatctgtgttttatagatatttcaatttaatttcccagattttcaagcactatatagcttgatatagttgttatggctacttggcgatatataaaaatatgatgccacacaacacaatcaaataaaatatagagccaaacaaaattgtttatgaaggttgcgcataatgtgactttaggaccttgaacaacccaccacaatccacgtgagtacaagctctagcgtctggtgtcaacgcgtgtgcggccatcagggctacgacaacacaacaaggcttcgtaataagcgcaacaagtacaattatggctcggtaatcggggtacacgataagtccacacaacgtgcgcaacaggcgcgattgtggctcgatgatcacgatagacggacagtgcctacagggcatgtg

SEQ ID NO: 107295 - DNA, 467 bp, Zea Mays
gcttctgtaaggagaactcgaacttgataataatcctataatacagaagtcctacgttcctcgcctactattcttattcttccccacgactcccttcttccgcgcgagtgagtgtttgccgatcttaacatttggtatcagattcaacgatcgcagtttggagtcctaccaccagtactacaccccgtcgacagaagagtctaggcgccatggatcccaattttaaagctatcttcgaggacgagatgaagatgatgtgtggcgagatcacgaagggaatttccaagtccttctctgagcatgatattgccctcaaccagcggttcgtcgatctctctgcggctgaagagcaccacaacgcccgcatcgcgtcccctggaggaagcagcatccaagttagatcactccttctccacctggcaaccggagaccgaggcctctgtcaccgacattaggctcgaaatctc

SEQ ID NO: 107296 - DNA, 563 bp, Zea Mays
tccaccgtgaattccactcacccgtgggcaggctcctccgcaatctcttgcaagtgagagacccttccatgttgtctgtcatgtccttccctgcgtatagcttttcggaatcgaggtttgggcgtcgggcgcactggccaccggcgccgccgccgggcggattgtttgacgctgccgcgctcgtgtccctgtccacggctgtcggttggtagtggcggggaaggaagaatggtgtccgaaccgttgatcggttggggaagggctgcgatttgatcttagtacggattcagctagggctcctcacgaccgtagattcaatgatgaacgggtgatcgggtgtgtgggatacttttgatcccgaccctaggattaggatctggcggtcagtaacgcgtactggtttatcatgtgggctgatctaatcatagccatcagatagaaatccaacggctcactatcaccaataccccttcggcactgcagttttacaatcgtgcccctgcgtttattataaatagaactcgccatccacttccactgttctctgtgtctgcggattatta

SEQ ID NO: 107297 - DNA, 280 bp, Zea Mays
ggatattcggtatccacaggttcctcgtagtgatgggtatttgatttgatgggtgctaatacaatattgttgtctgatgagtcggaataatgaaattattgaattatgatacaattgttgtttagtgctaaatgctggaattatagtggactggcggatataagtatgggtagctccaaaaagctcgttccagatatttgagcggcggggtacggtcctcgcgtgaaaatgatgtgctgatttctaacagcgactttacagattgctacctacctacggt

SEQ ID NO: 107298 - DNA, 313 bp, Zea Mays
caaatcctgtgaatcccagtgaatccatgttgtgcaatgtgttcctttgtggccattgagtgtccttgcaggttcctagctccttcgggagggttttcccaccccaaatagtcttttcaccgaaaccctagaacttcgcacgtcacgtgctcggtgaaatgcccaaaccagccaaaaatgctccaattgaacccaaatttttcaggcaccttcacaacacctccagtaacatattcgcaaaatttcacgcccatctgttattctaggctttaatttcaccaaattccccgtttcgagcgatcgtttccgagcc

SEQ ID NO: 107299 - DNA, 444 bp, Zea Mays
tcaacggacgagatgaagagcaaacccgcgcctgctcctattttcatcaatggcccgtcaaagtacatggtccccagctcgccctgtatcggagtcgtcgatagctggatgttggtccattcaacactacaaaacaaacccccctatagcaacgtgtacctagcaacatataattatatgtgttggaagtgattatcccaacacttgttatgcgttggaagacacatccgttgagcaacaatggtactggcaacatttaacatgcgtcgcaaaccgtatccgtagagtaactacgatcatagcaacatttaccatgtgttacaactgtatgcgtaaaataactagaatagtggcaacgtttacatgcgttgcaagccatatatgtggcgtgattttggtacataggcaaattcgtttagtgtttttacttattgaaacatttgg

SEQ ID NO: 107300 - DNA, 344 bp, Zea Mays
aaaagacatgactataaactcgaaatgcccatacctggtgcaaaaagctatcttctcaatatcctcctcacgaatcctcaactgatgataaccagagttcaaatcaattttagagaacacctgggcacccctcaactgttcaaatagaacctagcggatatttattcttgattgtcacttgatttaaagcacgataatccacacatagcctcttgcttttatccttcttctcaacaaacaataccgggaaagcccatggtgacctgctaagcctaatgaaacccttacccagcagatcctccaattggtgtggtagctgattaccgaggccctggtgtcctttc

SEQ ID NO: 107301 - DNA, 303 bp, Zea Mays
ctgagttgagacacgtggaatacatcgtatacatcagacagatgatcggttagctcaagttggtaggccatctccgcaactcgcctaaagattttgacgagtccaataaagcgaggggatagcttgcctttaactttgaatcttctcattccatgaattggtgacaccttgaggtacacgtgatcaccctcttcgaattcttgtggtcttcttctattatcagcatagctcttcttccgagtttgtgctaccctcaagttctcccagatcatacaaacttgttcttttgcctcttgaataatc

SEQ ID NO: 107302 - DNA, 401 bp, Zea Mays
attccgggaaataattagcgttctgataatccgtgtttaatcaaaacgccataaaataaaatggaaataaattatcgcggcccggtttagtgtttgggctagcccaacccagcccatttggcccactaagaaaccctaaccctaggactcttctataaataggatccctctcccttgcacttggctattttccattcccacccctctactttccctagtcgccacattctttttctccctgtcttcttctcccacacggcagcagcccacgccttcttcctcccatggtcagacctctgctccctgtgcttggcgtccctccctacgagctccctcctccatggcttgccttgcgcagtgggagaagcacccatggacgtcaccctccccatgctcctgag

SEQ ID NO: 107303 - DNA, 1257 bp, Zea Mays
gtcgaattagagtaggatctagtgatcggttggggatggttactataatcgaattgtagctggactataggactacaactttgttaaaggtggattagcaagttattacatggaattttgaggtttgggcgctgcaatctgctctgtcaggtgttctgaataacattctgatggtacaataactgacatagatcctaggtgcagctccctcaccgccggtgaaccgtgcgctcagattcgcgccggtcgccgcgatttgtgcctcgggtaagtggattatgctcagccgtgaaaagatctttgtcacagatgagctcgggacactttggccactctatcgtccatccacttgcgccggcgacgtagccaagtgaccgtcgttgaggtatacgtcgcctgccgtgatcgcaacacaccctgaccctttaaccacgtcatagtgagtcgccttagcccacccgttcatcgccggtggtcttgccacggtaaagtccacaaatcgcttgcgccagtagcttcttccctctccgaccgccagtgcaatctcttcaaattaaatgccaccgccctcggatcctaaaattgagcgtgccacatcagccccgctatgtagtcaagcacccaacgcacccactcgtgcctccgattatccaccagagagccccaatttgagacttcccctaaatcgatccagaacaccgtactgagtgagctcgtcgtggccagcgcgttacaggtccgttcacaccctctgttccctcgtttcagtactctgaagtacccatgatgctcctcgacccatccaattgagttagagcccgtaggatcaccgggaacgtctcggttcgtccattgatcgcgctgtcaccgtgggcagtatgattaagagctcaaaccttgcaattgaacgaggtgaaacgattgttaggagttaaattaagtgtcagccaagctagagcactagccgttgcgtatttcggccagtaggagctcgccgaagctcggcctgtcgccgtccacgaccgagggtctcgggttgtaaagaatagaaaggggaggggtcttactggagatgtcggtgagacagagatacagtagggaggagtctttaagagttgttcgaacagccaggggtctctgtgcaaagatgccagcgcgagcgagcgagcgggcgcgttctgccggtattgggctggctcgggctgaattgagcctagtagtgttgaccttttctctttttctttttctaccagactt

SEQ ID NO: 107304 - DNA, 1194 bp, Zea Mays
gccagagtgtggaggtgaacctgcatgaacatccatggaagtgcaggaaggagaccccgctcggacaccctcgggggctgggtcaaagttggcactgcccacttgagccggatcatccccggcaacaccctcgggggctggacagtggcttacactcctcacccgagctgagtcctccccggcgacatcctcgggggctgggcacgtgttagcactattcaaggggttcaagctctctgccgtgaccacttctaaggttgacgggccttcagttacttccatgggatcaggacaatccaagtcagcatcccgaccctcgagatcatgctctaaggtcgacgaggcacgggatgacctcagcccagcatctggcacagctgcacaagtctctgtcgcatcaacatccacaggttccgacaacaagttctccgggaccatatcctctagagcttgatcaaagttggccatggacagttcttgcagaccaataagggcagacaaagcaggagagggaactccactacttccaccgctagcgacgaactgccgactgttttttcgagttaatggagtttcattttcttcctcctcatcttccacagtaacagcgcaagcaacatcctcattggggtaagcagcaggcggagcacacccattgggatcaatatcagcaagaccagttgcagtcatttcttcagcagcaggagctaaggtactggcatcctcatcaaagctggatactcgccggaggtgtcttctcttcttcttctgctcatcagcagaaggctcaggatgactagttcgactagggcgcctcgggcgagtactgacaggtttcgggacctccaaggttgtatcaacctctggaaggggcgccactgccaacgtaccatcaggagcagcatcagatgaatcctcagctagcagatcaagcatgtcatttatgtctgcatcactagggttcaggggcacttcaaaataaatctgccgttcatcaccaggtatctccccgagcgaagcaaccaaagtacggacctcttcagcagaaggtcgcactctaagacccaaattgctatcagtcacgggtggattggacacaaaaagggtgaaagctttgggagaaggaaggttccaagccgagtaagccactggagcaccaacgtttgagactttacccctgaggatcatctcaag

SEQ ID NO: 107305 - DNA, 459 bp, Zea Mays
gtttctagaagtggtagtactcttttgtatgtgaagaaaacacctaggttgtgtgccacaagttcctcctatcgtccatgtggtgttcatgttgatgtggtatctttaatgttaagaactttgcaatatatgtagtattcagtacttttgccattgttttggttgtcctattgactaatcaaccatggttttatttgtttgaaatgtttggctgatagtacaacagttttggattttcatgacttatttgatgtgcataccttcaatgtacaacatgggtaccgactggaaccaagtaatggcacaatatgacagtttcctatccgaggaagatggcactcagtttcagaacattggttttgctcctcctcaacctgatatacccacacaggggtcagcacctgcacctccagtgaagaagggtggtcaacgcacaaagctagcaaacttcacgtctga

SEQ ID NO: 107306 - DNA, 338 bp, Zea Mays
atcaacttacattcatgatcgatgatgcttatctcgtcgtcatgctcgctatcatcctcatattcctaatcatcgtcgctttcgcttccactaccatcattagtgaccaaacatttaagaatagtgtaagatgaatcttttggagaggcagattcattgtttggcctccatcgatcatgctcatcttcttcctttaacaagttagtatcatacaaattcattgaagtagaaataatagagttctcacttctcactgcatttgccacatgtttcatgaattttggtccaaatatagtgagcatcaataatgggatcatcttgaggaatgatagtaaaat

SEQ ID NO: 107307 - DNA, 341 bp, Zea Mays
aaatcttgagcatgactaaaagcctcaaccttctctttcatgaagaacaccaaagaatagcgagaaaatcatcaacgaccataagcacataccacatccccccaaacgagcaaacccgagctagaccaacagtgtctatatgaagcaatttaccgacttgtgaagtcaacaccttagtgatcggggaatgggaagcaacaaccatcttattgtgcaacaagggtgagtgttggtcacttgtcaaacaagatctttctcaaatttcaatttggccaatccttggatgaggccaagtgagctcagtcgacacaaaagatcaaagctcaagtgacctaacctcc

SEQ ID NO: 107308 - DNA, 539 bp, Zea Mays
atgattgtcaagtatgaagcatgtctaggttgcttgtaaaatgttatacttcttgaggcatgcattgttgtattaagtcaaccattcatttggtattcaattgatatctctttgtgatgaaattgagagtatgccttgatcaagagatgttgtgatcccctctagttctgagaaagctagaatgtgcaaagtgcaagttattcaaatacttgatgcacaagctcagggggagcacacataactcgtgtcttttgagactaattgtttcttgagcgatcttgtgtagtctcaaggtggaaaagagaagatgagcaagaaatggagcaatcaggacttgggtacctctgtaagtcaagaaattggtatcttaagtcgtaagtaaatgcatatttttagattgctcatgctctacaatatttggtgatactagatgcttatccttaaatatcatggaactatgataataaatgacctttcaattggtagccgtgataattgacctcttttgataatcactagaataaaagcttcatcttggg

SEQ ID NO: 107309 - DNA, 580 bp, Zea Mays
taaccgtgaggggtaaaaagatcttggggatgaaggtcttagccggagctgagtcaccgccgtacccacttgcccgcgcgatcggtaaaatatcgctaccggtgctcgtcgtgatcgcagcaggggacacgtagtcgcctgattcaccacattgccgtgatcgtggcatctttaagatagttgtggtcgctactagatgaacgcatgcgctccacggtgagcctcggtgattgcctcacccgggagataagctccactctcctcccaaatcggagccgccgcctaaagctcctattaattgatgcctcactctgcttcgccaagttatcacgaacccgagacactaacgctcatctccgattagccaccattgccgtagaatttgagttttcccccaaattggtcatctgcgccgccgtgaatcaccctgtcggggctagccgctctcaggtccgcactcaccctccttattcgtgttttaacactcttacacgcttgtgatgcttgtcggctcaactaaataagctagacgacgcttactcatcgggaacgccttggtttgacctcggtgattgccgtc

SEQ ID NO: 107310 - DNA, 346 bp, Zea Mays
cggcacagggtcctcaggggctggacgataggagccaaagaggaggcgagaggcctcaagagtgccctggaactgtggtggctgaatcagttgagcgaagatgtggcagagatagtgagcatatggcagctatcgacgagcacgtagaccatccagtacggtgtccttgatctcacaaataaggaagtccacaacatcaaactctgagtgagagaccagggtaccaagtagccaaagtttgatatgagtagcagcctccctgtaacccatccgtggcagaagcgtccgtctcatgagctgatataaaaacttggccgctgtagtgaagtctgccggagaacgtcgc

SEQ ID NO: 107311 - DNA, 731 bp, Zea Mays
ccctgaggtactaccgaattctttttctagagtgtccccaaattccttgagaagatcatcaaggctagcgagggacatgtcctcgatatcggacaaattctctatcctggcgggagctggtgctgggggagctttcttcttcctctccgtctggcatccttggcgcgtggttttcttcggattttctttgtgggggcgagcttcttaagcttcttatcatagtccatctttaaggttcgataggcttcacgggtgttggcctcctcgccttctgctatgtcgagacactcttggagagatgccttctccttcttaagctctttgacttgctgctctaggctttccacccgggagtttaggtgggtgcagtgggaggagagatcatcgtagtgggtatcgagggtgtggaggtatctggccatgtagacaatggtggggtcatcctcggtggggtctctccctgacagagcctgaagtcttttcctccaggtgggggtatttttgttgctgggtgggaaataacgaagggggtttcaaagatctctctgctgtagttttggcatagctgtttaagggcctttcgggcaacactttggcaagtgtctgggaagcggtgcccgatgaaggtgacttggaagggggggtttgggtagcttcggctttctcccaggtagactgccatagagcacttctctattccattttcgcggtattccttccagacatattcg

SEQ ID NO: 107312 - DNA, 328 bp, Zea Mays
gtcacggggtaaaatcccaagacacagtgaacagacaagatggacggcgggttgattcaccaaatcacagaggtctcttttgcaaaaacactacggcgaaggggtattgttcaataaggaccgttggatcaaaaccggcggcttagattaaattatcttcaccccgaaccggtacgtgattcaagccgatggatctaggatcaaaggtcaggattttaaacggtcgcgattcgatcagaggcgtccatggtcagatcaacggccatcaccaatcctaccctgaaatggtatatacgtctgatctcgaccgtagattagtatccaacgg

SEQ ID NO: 107313 - DNA, 293 bp, Zea Mays
aacacatctaccacaataatcaaacccagtatatgtgtgtatatcgatgcacacttcacacaataatttgcattttaacttagacaccacatgatcactactacttttcatccgcgaccataaccatgcgcatttagaccaaaacaagcaaatcaccgtgattacgagcttaaccaaagccatctaacaagtcggctaaccaaaggaacgacatagcccgctatacaacatacacgtcggcttgcctattattatcgcaatctgatacacaacatactacaacatttttataa

SEQ ID NO: 107314 - DNA, 448 bp, Zea Mays
gcccatttggagttgtgaccttcacgaagggtcgagagatatgctgcagtaagctcggctctactgcgctccataaaatttcgctgcttcccgttaggatcctgtagtgcctttgcagcatgcatcggtgctactagtctactagtacatgctttgccgctgccaactcgctgccgacggttacgacatgatgctgcgcctgtgggtgtagtctgtagcgtggttcactcttcttctcatgtatctctaatcttcaaaatcagcacgctacccctatacggtgcatggaagaatgtaaaatgggtgcccgtacaggatgtgaagaatgtaaaattagtacccgtacaggatatcatccttgtccttgtcgtctcccggtccaggcgtcacctcgcctttctatgcgttggacagacgagactgctgatctagtcagctctcaaccggg

SEQ ID NO: 107315 - DNA, 578 bp, Zea Mays
aacaagacatgggaacttgttcatcttccagaaggaaagaaggtggtgggatgcaagtgggtcttcacagtaaagcagactccagaaggaaaggttgacaggtaccaagcgagactggtggcgaaaggatatagtcagacatatgggattgactatgatgagaccttcgcaccggtggcaaaaatgggcacggtgaggaccttaatctcatgtgcggctaattttggttggccacttcatcagttggatgtgaagaatgcatttcttcatggtgacctacaggaagaggtctatatggaaattccacctgggtttgcaaatgaacagactgttggaaaagtgtgcagactttaagaaatcactctatggcctgaagcaatcaccacgtgcatggtttgatagattcaggcgagcagtttgtgatatgggctactatcaatgtaatggagatcacacggtcttctacaaatatcaaggctcttgtatcactatcctggctgtctatgttgatgacatagggatcaccagagatgatgtggaggagatcaagaaactgaagaaaaaactaagtggggcct

SEQ ID NO: 107316 - DNA, 480 bp, Zea Mays
tgtcttctccttcctctatcgagacttgtctgttccatgagatgcaacagaacttcaacaagaatttaaaagtggcatacttctccaaattacagaaatacctcaatgagaactgattctgcaagataagtggtaaatagttcatttagctaagctggacatgactgcttaaagataaaaaacctagaaagtcataacagaaatggtttgctataggacagctgcagaagatacataatcctatggtgaaccatagacaataagaataaaaataccaaaatgacacacttgaaaggttattatttgcataggcatagcaatggcatcctttagagttaattgtttatacagtttttagatcagatctcccatttaagtgattaacttcacatggccaaagcaaaaaagaacaataataataaggtaatcaatagatatgtagtttcatacgaatttccttcttagattacaactttgtta

SEQ ID NO: 107317 - DNA, 611 bp, Zea Mays
ggttagggaggtacagtggagggcaaggtcatcatattggttgtcaagggtgtgaaggtatccggccatgtagacaatggtgggatcattctcaataggatctcctcctgatagggcctgaagtcttttcctccaggtgggggtgttcttgttgctgggtggaaagtagcgaaggggggtttcaaagatcactttgttgtagttctgacacagttgtcggagggcttttcgggcaacattttggcaagtatcgtggaaacggtatccggtaacagtgacttggaaggaaggatggtttggatagtttcggctttctcccaggtagactgccatagagcatttctccgttccgccttcgatatgctccgtccagacgtattccggctttttgcggattcccatgcgaagcgcgcagcttcgcaagagatgcgagaacccttccacctctgagcagtaggatgtcctaatggccagagagtcttccatctggaataggaaaagaagggtcttgttaaaatcggggaagagaagagaaagcttttcttggggtaagaggtattttctttttagggcaagtctttaaggtcagggctgcgtcctacggccagtcc

SEQ ID NO: 107318 - DNA, 354 bp, Zea Mays
ctctggctggcctccagttggcttggtgaacggcatcacctatggttgtgatgtgtcgtccgacttagatcaactccaagagaatgcgtaaaacaccccaaaaacatttattggccaataatcttctcgttttcaaccctccaacagtccctccattttctcccccaaatcgagctcaacccgaatacgcgctcctcctccctataattttttgccttggcgattccttccccaattagcatgagcgcgcgaaattggtcactcccacgaaaaatttctcgtgcaaggttttgtttggccttgaagtaggcgcgagaagcataaatggcgtctatcttgagtggtggcggcagt

SEQ ID NO: 107319 - DNA, 727 bp, Zea Mays
cttaaattgaagtttctaggaattatacaagtttctagtattgtttttgtattaaaaatcattttctacaatttattatctaatttctctggtctctggactatgcgcataaaacagataagtatagggtttaatctgtaaatagttctaagactcatcactcttctgcgatgggccgcgggttgtttatagagttatacggggtctcttttgcataatggcatggccgaaggggtaagaagcaaccagagccgttggattaaaaggatacggtccagattagattgttttataaatctaaccgatacgcatcccgagccgtgggattacagatctacgcttaggatttcaatacgtgacacggttcgtttttattcgtcaagattcgatccaacgacgcacatctcatcacgcgagcgggcacgccagattgaatcccaaccacttatcccaggacggacggtgcaggggcttcttcttcatccgcccagacgcaagagatgagagcgcccagggcggcggtgccattgctggtgtaaaccttcccattgatccggtgtgctaaatttcaaggaaaaacgttctaccccacacggataccctagcgagtcacttcgagccgtcgcattggggattgggatgatattccggccagtcgtcgacaagaaggagctccccgctcatatcccgccggccaacagaccacgaccgataccctgcccaaaat

SEQ ID NO: 107320 - DNA, 426 bp, Zea Mays
agagtctaccatatgttgagttctcttataataatagttaccaggccagtctgaagatgtcaccatttgaagctttatatgacaaaaagtgcagaactcctctgtattgggatcagactggtgaaaggcagttctttgggtctgagattattcaagaggcagaagaacaagtctgtatgatctgggagaacttgagggtagcacaaactcggtagaagagctatgctgataatcgaagaagaccactggaatttgaggagggtgatcacgtgtacctcaaggtgtcaccaattcatggaatgagaagattcaaagttaaaggcaagctatcccctcactttattgtacccttcagaatctttaggcgagttggggagatggcctatcagcttgagctacctaaccatctatctgaggtgcatgatg

SEQ ID NO: 107321 - DNA, 481 bp, Zea Mays
gcacgagcgaggcccaagcccacctaggccaggaccacgtgacttcgagcgtgcaatctggagggaacacttcccacaaaggtgcgtgcaccagcaaacatcaccgaatatgacgggacttccaattatggcatctggttggaagactaccgccttgccttctgcatggcgggagtcaaggatgatcacctgatcatccggttccttcctatctatctcacggagggggcgaggccctggttcgagcacttaccgatcgacaccattcatgattgggccgacctcaagaaggactttgtgggtaattccaaggcacctacaaactccatgggagctattgggacctcaaacaatgcgcctaaaaaagtagggatagcctccaggactatatccagaggttattccaaaacagaaacgaactccatgatctcgtggttagtgccttcacctatggcaccatgaacgaagtgacggttcacaa

SEQ ID NO: 107322 - DNA, 295 bp, Zea Mays
tctctagtagtgctagcacctgctttcttgctcgcattctttaattgcccccctgaactttagagggagaaggacgatcgatcggtggtgcaactgcaactgcaaaaagaggggggagagagagtagctgtcaccgtgaacaggagaagcaattcagaaaagacagcgtcgaggtctagattgcgcttgtccgggctccatgcatgctacggagtattctaaacctctggccgcgcctcggttggtttctgacgatcgacacgcgcatctaagaaaacacccagctagattattg

SEQ ID NO: 107323 - DNA, 493 bp, Zea Mays
caacagccaattgaagccaagaaagttgtgcccaaaatggactaagtctggttgctctaagtgcagtggacacgccaaaacatcgtgctcgtggcgtcatcgccattgttagagtttggagcatgttctggccctaccagagcattgtagccctcaccactgagcttaatcctaaaacaattaacacacttctctatgggaactctacctgccttgaacgcctcgtccatggtgacaaacctctcattgtgttgcctcaccattggtaacccgactctggccatgctcagtcgaccaaatcaatactataaggtgtgctagaaggtactaattctatctcaccttttttctttcactctattatgccctaagtcatgcccgattactcacgggagttgatccttaccatgataagcacatgcgtcttcatttgagtacatccagccgctttgtcgttccccttttgtgcctagtgagtctgccttgatctctc

SEQ ID NO: 107324 - DNA, 445 bp, Zea Mays
ggagcatccagatcaagtatgtgttagtggcacacccaagagctaatgggcaggtagaaagagccaacaggatgatacttgatgcactcaggaaaaaggtgttcgacaagagcgaaaagtttgcaggaaaatggatcagataactgtcatatgtagtttggagcctgcgaacccaaccaagtcgggctatacatggaaacactccgttcttcatggtatatagatcagaagcagtgttgccagcggatttgatctttggagcacctaggctaacatttgaaagtatagctgaagcagaagcaaccagactggaggatgttgatatattagaagaacatctgaatgttgtcattcaatcggctaggtaccatcaaactctgaggcgctaccatgacaaggcaatgtggcaccgatccttcgcaatagggtacctagtgctccgccg

SEQ ID NO: 107325 - DNA, 386 bp, Zea Mays
ttgggaggttatgagacaatggggagcttaatggtgctcatgtagtaagttagaagggaagagaacattgtatttaccatttgtaatgtcccaccaaggctcaaaaagtattgtaatgctataaagtcttttctgaattatgcaaatcagaggcatacaatcttgaatctttggatacatggtaccgaggggcaaacctaaataagtgaagggaagggagccgattttgcaattgaaagtcccagctagaatcttcatttttcctcatctacattaatagggatgatactagattcagtataattcacacgcaaacccaaatccatttcgtaagtatggatcaaagatttcaaaacaaagttgtttttgatggcttccataatcag

SEQ ID NO: 107326 - DNA, 1412 bp, Zea Mays
ggcagggctgcgggcaaggtgccgcataagctgcgacgtcagccagccgtcagccgtgcagccagattctgagagctctggggagggattggtggcgcaggacgacgggccgcggcggccgccattcgacatcaacctcgccgtcgtgctcgccgggttcgcgtttgaagcctataccagtcctccggtgagcactttgctcccgtcacaacctactcgtccctatccttgaactggactagtccaagccggtggtggaggcaaccgccatggattagcttacgtggcacgattggtcgtcgtatttcacaggcagatgtgggctggcgcgaaactgatgcggctgactgtcagacagtgttcctgtccgagtaagtcctaggcccacccttctttacagagcttggaccaattgttgtagctatatggtgctaattgctaagccgttactgtaaatgttatgaatgatgtacccatgccacaactattgcagtgtgtttcttcgtgaagtatacgatggacggcttgtcgtcaggctgaagaaaggcataaaccttcctgcaatggatccatgggtatgatgatgcgtagttgtgcatgctgctgaatagtcattatatttatattaagccgcattctctagtggatcactacaacgtttttatgtttggagttattaatcaaagtgctacttttctactctaacaattcccttagccaattcttttgttttcagggtactagtgatccttatgtaattctacaactgaatggccaaactgcaaaaagccaaattaaatgggcgtgagttactcatactttttttttgtgtatgctgggtctgggtgtgctattataaataagaatttcctttacatatgcaaattaaattgacttatgcactatataatgagtgttttatttcattcgggataacatgacacttgtgggtattctgttttgagcaaaatggcctctagctgagttagtttggtggcttgagtagtgttagagtagacgcactaactaaatgaacccaaaagattaagctattaaaaagtggtgagcaatacactttcacacttcaacacaggaggacttaagttgcatttacacaggggcggagctacaactagttaccggtgtcagctgacaccgatagattttagaaaatatagtgtaaagtactgtttaaatattgtttttaatgttgatgacactcatataaaatgatcttgacaccgacaaatctcaaggctggctttgccgctgatttactaggatcgaactcgagaactttgacttagataccatattaagttacataccaataagttcagcctaaaaggttatgctaatgggaaatcttaagtcattggagaaaggtaggtaatccacttatacactttaat

SEQ ID NO: 107327 - DNA, 471 bp, Zea Mays
tctggttccacatgccaaacgtgccggaggatgttggagttgtgtcgtcatcatgcgcggtggtggtgcagtggatgaccaatagcatgcagtatatcacgatggccggaggcggcggcggcggcagcgctaaaactctaatgcattaatggggagagtacaggtctaggcgaacgcatgcagtggtgcttcatgcttgcagagatgattgtggcagagtggatgatgctcgggaatggggctgtggttctccaagttctctagagcagatccatagcggtgggcgcatgcccaagcatgagcatgagcagggaatgacgaaggaagctatgacggggctggatctgcgcttggccatgacgatcgagaggcgtcatgcagcagggggaacacgaccaggaccagcgataatgatgagtgagcgtcggtgacgagaatagagcgcgtgtgagaggtagaagaaaggacgta

SEQ ID NO: 107328 - DNA, 646 bp, Zea Mays
caaaagaccaatgaatattatgtggtgggctttggacaagcataaagtttcaacgaagtacgttgaacatgtacaataatgtcgtgactattgttcgaacaagtgatagagacacctgacttctagattagaataggactacatcaagggtcaactttgagcccttgccttggtttatgttttttgagggcaatgtagtgctagtttattaaagccgagcaagactaactaggaaacaagagttgtggcgggagactcagcagaactaaaaccgaatatatgagatgtgccaaagaaggatacctttcggtatagggtcgatgctaccgagagacgatgatattgatgaaggtgttagccagtagctatagattcaaagtagggtggatgtagggtggatgaagtggtgtcaagcatctaacattctatgtgacaagagggaaccatagaagctaaaagcgacttttataggacgacgattagacctgctacgtttcatggtgcagaacgttggctacaaaaagatgacatgttcaaaatgcgtatgatgcattcgatttgtggccttacaataaggaatcgagtttggaacggcgatattccacattctttcgggctaatgatttgaatattagatagattcgag

SEQ ID NO: 107329 - DNA, 307 bp, Zea Mays
gtgaatccggtttggactgtaggagttggtctcgcgaaaacgaatgcccatgctacatacagactccgtttttgacgttctagataccgttggaaagctaaggatataagctttctaatccgatcagtcccatgtcaatatacggttggagctgatcagaatcgtcatagcaatatgatgttcagaatctgccagaaaccagtggtgcctgtttttgggtctaaaggccttgtacatcttagggttgctcgaccacccccttggccaccacctgagtcgatgatgactccaattcaagtgtaggagg

SEQ ID NO: 107330 - DNA, 601 bp, Zea Mays
gcgataacagacaagggtatgagagaaaagatgaaggcattgaagagccagtggtatgagtacaacaaagaatggagtcacatcaaagcttacacgcggtaaagaagaggatgttgtcaagggtgagataagtaaaacactgctcctgaactaggatggaaaggagaaggctccaaaggctaggttcaaagtaagcgccgtggtaaaaatataggtattacaagggttgaaggcgataacagaaaagggtgtaagagaagaggtaaaggtatagaagaaccaagggtatgagtacaacaaagaatggcgttaaggcaaaatttgcacgtgtcagagatgaggttattaccaagcgtagggtaagtaaaacaccactctcgaattgagaggggagaagggaggttttaagtggcacacatacgacaacatcaaagtaggatcacaagggtaaaggcgatagcaaacaaaacacattaaacgatggggttgaaagttcaagaggcagagaataggatacatccaagggaaaatgggtaaaatacaactttcaatttgagatggaaaagggaagattttatagggcagttatacaataggcaac

SEQ ID NO: 107331 - DNA, 550 bp, Zea Mays
ctcgacttagggtgaccactataccctactaacggagcaatcgacttaagtcggcaatgacttaagacggtgcaacatgctcacgcttactgaacttagggtgaccactataccctactaacgaagcaatcggctcaagtcggcaatgacttaagacggtgcaacatgctcacgcttactcgacttagggtgaccactataccctactaacagagcaatcgacttaagtcggcaatgacttaagacggtgcaacatgctcacgcttactcgacttagggtgaccactataccctactaacaaagcaatcgacttaagccggcaatgacttaagacggtgcaacatgctcacgactactcgtcttagggcgacctctatgccttaccagccgagcaattggcataaatcagaaaaagactccaaaaccagcatgccacacttactttcgcaatcgttcaggatgactgttgaattctaacaacagaaacaaaatgttatagttttcagcaccaaggacacattctagtaccctatccaccgagtatccgaa

SEQ ID NO: 107332 - DNA, 1579 bp, Zea Mays
acgcgttgcaatttactctgagcaaaatacgactatagatataagcaaagctgtcaagtggacaaggtgagctgaggctcacagcagggaatctttgtggaggacaatccaagcccccaaccaatacaccaacacagatatgatatgagtgccacccatgcacacatggatatgatgctgtcaattgcacacagaggcatcgatccaatcaaatgatggttttctttgccccgctgatcatccattccactcaccactcaccttgtgtccgtacgtcccttcttctccctcagtgaaagacagaaagggtgggcatggactgcagtgcatctttggaagaagggtgttttttgcacagatgattattagctacctcttgcccagggaagaagcagctgcagctagcagcatcattctctttccctcaactttcaccagacccctactccatttgcaacaggaattcattattgatgcaatggcagatgcattcaataaatggaatcatgctgattttgtgccgccattgccagccagatgctgcctcagacgcacccccaccacgtacactagcatcaaatggggaggcgaggctagctgatggtgcatgtggttacagcagggagcaggggggcatttaccagctggaattagtcgatgcatgtactaccattgttataggacttagctgtggtttcacatgcaaggcacacccctctcttcatgtgatatccttgctttgtgcatgacccactttattttgctctcacattaatttgttactgtcgtgtgtctggtgtgtgtaagtaagccaattaatcgtgttgttccaataaataacatgttttaatcttaagtctatagcagtgaaattcctactgtccacaccaaaaggccggctatatatatctaatattttgatcagacgatgtgatgggagcttaagaagtcaagatacgtaatgaagaggataaaccagagtgcagccaagacaaggcataaggggataaacctaaaccagaaagccactccaaatatatatgtgcacattccaagatctcaagttgttaaaacgggaccatccagtgtcatgactttgggagaaggattaggacaatcaccgcatcgatcgagagagcggcatttcggtcggtgtgtgctttgataccgatctgacagggaaaaggaagcaaagttaggtttatctccatcggctaaggtccaagtgtttgggcgttaacatcagtccgaaaacctgattaccacgcaccagcagttgctgttgtgtgtgaaacatgagttgaatgattgagtgaataatggtgcgcgattttgaccagtaatcgatcataatgtgaaccaactagttgtcagcagggacaggcaacatgtgtacgtcgtcggcaaaaatatggtactatttaaccagttttttttattcttcttcttggtgtgatggaatggaacattgttgtgaactttcgttacaggagatggtccagtaacttgctatagctctctggaatcctaggactttataggcaataggtaacttgatgtgtcggatagggtacacatg

SEQ ID NO: 107333 - DNA, 627 bp, Zea Mays
cccctatggacctaattgattcatctaaggaggttggatagcctagattcaacaattcactctttaaagccaatttgagctataacaagaatatgagttagagagaattaaagaatcgaattatatgacttagactaattgggaagtcgctagatatatttgtctaagtcatacaaacaccctcaagactagtcaaaatcatttgaacaagatttggacaagaaatatgaatttggtttgctgtctgacacaccggaccggtcccgtggtgcatcagaccacatgcacagggattttgagcctcggcatttccttagctagcgcgctgaaccgattccggaccgtctacgtaaagagggtgtaaactagacctcggaggctggggaactggatcggtccgatggcgcatcgggccgtctgacaatgcccaacggtcggctgacaaacttcaatagacacctgcagatacagtctgacaaggtctagtggtgcaccggatcggcactgtaggtggtctggtgcactcgtagaaagtgtttttttagcccaataactccaattgctatttgggtggttgggggctataaatacctccaaaccagcgcattgaagacataataacaactc

SEQ ID NO: 107334 - DNA, 460 bp, Zea Mays
tatacacgaattatcctaccagacaaaggtggttgggaaggaacaatatcaaagtgtggctaggatcctggatgaggcacgggttctatattaagaaggatttggttgagagggaggatgtgaaggatataattcagcgtcccatacaatcacgcttcggcatcagaaggccttcaatcgtgaatagtgataaggctcaagcatgcctggtggccttcaacaatatgtgcagctatattggtaccagagacttggtccaagagcacatagccttcaaagtgtggcccttgttaatgaatgggagatgccaaaggaaaccgctactagttcaagcgaaggtggcctcggttatctgaaatatacctaccgctatagaagtcagttcggcgagccagatgatgaatggcttgaagccattgaggcgactagtgaggagttgttggggcttatacgatggctg

SEQ ID NO: 107335 - DNA, 602 bp, Zea Mays
cttgacacctttctcactactatgtgtctcatttctccttccatatccatacacccacttcatgaccaatgatgatgtcttatcataggtcattaccattttggggtcaattaactatttttggcattagggtgtcaagattgttgagtgtctttatttttcttgataagggtggattcttcattagcaatgatggtgtttaggttgttgagcgtcttttttcttgattagggagggtagattcttggttagtgatggtggttggttaggtatatgatcctaaggtttcaaggcaccgtgaatctcagttgaggttggtggttcattcgaagttagtggcaatgttggatgtggtagcaacactcccccctcattttttgagatggcatcagtggaatagggccactcaaccagatgtctcatcgatactatacgatgaaattattgatggcttgttcgaatttcctgatacctttggaccaaggatgtctagcaagtcattttcatgttcgactacgactatcgacacttctagcatgttgtgttcatctagaatgtggttattgatggggttggggtttctaatcttttattaggttcat

SEQ ID NO: 107336 - DNA, 273 bp, Zea Mays
tgcgaatgaaaattaccattgtactcatttattgtgactatagggagcactattggatgatcgagcttcatccagacttcctatcacggcgggatttgtcttgccctcgtctacatgcttggtgtttcgccttagagtggatccctctagctatgaatcacgtcatcatcgagccaacggaccaggatgatcatgcttggaaacgttgtatgttgtacccagatgtggtacgtgctaggttggcgctgggtttgggcggcgatggttcgcccc

SEQ ID NO: 107337 - DNA, 814 bp, Zea Mays
atagccgtcgcgtggtagaaaaagccaggaatcaacgcagtcgtcaatacctgtgtacaccattgcccaagctctctctctcgggtctgatggagttcgtgtgcactctcggattgttcgcacggcagtgagtgggcactaggcgcacttgagcatcctgaatcgctcgctagagtcatagcggcgtcgcgcgtcacgtactacgtagattccgcctcggtctccggtaaggcttccactatcgagttgtccattggttctgcactcctttgcactgggttttagggctgagtggtgtaggtcagcgcacttgggtgcatcgccggcgaggtcacgaccgtcgcggtggaagcgtcgccctgttaagcgccaggggtggaagatggcctttagaccgtaggatcaaaatctagcgatcatgagtggaccaagtcgtagtagtacgtgggtcgttgatcactgggtggatggcttagattaggcgtcgtgtaccccttcgctcggatagatccacgccatgaatctccgatctgacggtagtaatcagataaggtctcataaactttgggcctttggatcttgatccagctgttgataaggcgtaccgtttcgcattatggtggatctaatctggcgcgtccatttctgatcaggtggccgatagatcacgataccctttcgctctggcacattagcataagaaaccctagactttcttgaaatagaacccgctgttcgtcctcgtagatgactgagtctaaggagtttttatagattggcccctgtactttatagaaattggcgcgcaatctag

SEQ ID NO: 107338 - DNA, 724 bp, Zea Mays
cgcggaaactactcgcatggtggttcttcgtcgcgtcctacagatccgcctggtgctcgacgtcctgccaccaccaacaacaacagccggcccctttgccagatctgtggcaaaataggccacactgcggtacgctgctggtaccgtcatgatgactcctacaacgaagatccaccgatggccaatgtcgcctctacgttgccttcatacaagcttgacaactggtacggggacacaggcgccacagaccacatcaccaacgaacttgatcgccttgcggtccgagaacgctacaacggcaatgaacaagtccaagtgggcaatggtgcaggtttgaaaatttcacatatcggtcactctactattaatactgctgcacgtcctttatttcttcgtaatattcttcacgttctggggattaccaaaaatctattatccattcatcgtttcactcgtgataatgactgttattttgaatatcacccttggaattttttcataaaggaccggcaaacgaggagatgccttctggaagggcaatgtgaaggtggtctctatcccctgacgatctctagcgcacaagacctgacgcatgcattggctgcccgcaaaataaatcgtgatcaatggcatgctcgcttaggtcatccagcttcgcaaacagtccagtccatcttacgtattaataatattatgtgttctagtgagtctttttcatcagttt

SEQ ID NO: 107339 - DNA, 358 bp, Zea Mays
gccgcctgaaaatgagtgaggcaactggcgctgtttcgcgtaacatggcaccggttggactcaagtcaactgctcaggaaaatgattacacccctccgtcacatcaaattactacttcaggacaacgcgataaacaccttttgcggggcagacaccctttaggcacacccattgggtgtatctcacggaatcttcaagattttctgaaatgaggatacctgcaaaatatacacaatgaatgtaccgcgacaaaaagagaagaccggctgaaacgggaggaagtccaaatgtggttactgaagcgcaagtccaatcaatagaggtattaaagtatagggttgagtggtgtccagccggg

SEQ ID NO: 107340 - DNA, 777 bp, Zea Mays
cattcggacatctgctgctggatagctgcctgtcgagtctactctgctgctagatgagcctgctactgcgtaagtgactaaaggatagcggccagagcagggtcaatagctggtggggcagcaagagcagcactggaactacctgcctcatgatcatgtgagcgaggtggcacaggaggcactggtgggatccctagaccctcatcatcatgggaagaagaatcaacaaggacaccttgggcctcgaactgtctgaaagcctcatccttagccctgatatttgatactggatctggcacgggaactgggtcctcaggggctagacgatagaagtcgaactggaggcaagaggcctcgagggtgccctggaactgaggaggcctgatcagctgcgcaaagatgtggcataggtaatgagcatatggcagctaacggcgagcaagaagaccatctaacactgtgtccttgatctcacaaataagaaaatcaatcacatcgaactctaaatgtgagatcaaagcaccaagtagccatagctgaatgtgagtggtggcctccctatatcccatcctgggtagcaaggtatgtctcatcagctcatagagaaacttcgttgcaggagtgaagtcgacaggagaacgtcgcaccccatctatgaaaggcggtctgaacagggcagtgatgtgagctgtagtgggtgcaactccccgtgagggcgacgaggaggatccgaagtgccgtagcataggctgtggagcctagtcgtcgactctggaa

SEQ ID NO: 107341 - DNA, 521 bp, Zea Mays
cttaggaagacctctgcctcgcccgaactctactcagatctcgatatctgcagccaagggcaccccaacgtcatcagatatagaagcgctgatgcattccataattggcttttctccatatctaagccatgttacaaccactacggtatggcccacccctaccctggagggctcagacgtataaccgaacccttggcctcagcctcggctctcagcggaaaatcagcggattcaagtcaacaatgaagtataaggccataccgttcacatgacacgaaagacaccctccacagcgggcaggcagcaccgtctacaaggatgttctcccctcaagcatataaatagggtagtctacgacctccctgggggacaggcgaagactagtagttttctcctggcatttgatattgatacttgcctcaatcatttccagggacttggggccttcccctctcccgctcagtttgtaacccctactacaggcacctcggtgcgagtaatataagcttcacctctctctg

SEQ ID NO: 107342 - DNA, 330 bp, Zea Mays
tcgggagagatgaacgacgagaacaccgtgggaggtaattaagcagatccacgtcaaggtccagcgggtgcacaagatcaacgcgcaacggcttcgtcgtgagttcaacatcttggtttgaaagaaggcaaaggacacagaatatttcatgaaccacatcactgggcttgttcctgaatcctgatctagtctcctcggtgacaatgtcatcgacaccgaggtaatgcagaagatgttgcaggttgtaccagagcacctgtcttaggtggcaatttccatcgagatcatgcttgacatcaacaacatcactatcgaggaggtgaccagcag

SEQ ID NO: 107343 - DNA, 401 bp, Zea Mays
tgttgacatcaccgttctttggtgacgataagcgaaaacgctgccctcgccccccttcgccaaaggacggctgtggggacatgtatgtgggcaattttcttgtgagcagtgcgcatcttgtaattgaaatatgacgtgtttttcattgtggtgtatgctctaagttgtagatggtagcgtcttcacgcgctttgatgtcgttaatatgtttatattgatccgactgttggtagagtattatcttctgtctaggtgacaacttcgcctttttgtgatacgcctattgtgtgaatccagttgtacccttaggcgacttttgcatggataaaaatatgcgtctcagggacgacttcacactcttgggtgttgttacgcatttgttgtactgatccagatgcacc

SEQ ID NO: 107344 - DNA, 315 bp, Zea Mays
tctgtgtttcattgtatttcaatttaatttcccagattattcaagcactatagagcttgatatagttgttatggccacttggcgatatatttatataatgccacacaacacagtcaaataaaatatagggccaaacaaaattgtttataaaggttgcgcataatgtgatttcaggaccttgaacaacccaccacaatccactcgagtacaagttctagcgtatctagcgtcaacgtgtgtgcggccatcagggccacgacaacacaacaagccttcgtaataagcgcaacaggcacaattatggctcggtaattg

SEQ ID NO: 107345 - DNA, 442 bp, Zea Mays
ttgtgcaccacttgcagcaaccttcacacacaacttatcagagttgatgtcatcagatgccgcctttacatggttgacgctggggccttcagcaaggaccagagatggcatgatgttggtgatgccaggaacatcatttgtggccgacactgttgcattagcaaggttggtgacaggtacgtgcaccttcactatggatgaatatgagctcacatgatcgtagcagctcttatctatattggcattgctgtgatcttgagatgcaccccactgaatgtttagctcacagcaaccatcatagatgtttcgaccatgtaagtctccaaaagttcctgctgcctcatcttttgtttcaaataccacatgagccaacacatggtctgagtccccaaacatgtggacatgctcaacctttccatatggagcaaaaactacacggacc

SEQ ID NO: 107346 - DNA, 294 bp, Zea Mays
agccattgatgaaattaagtggggggaaacgttcattagaccttgaattcggtctcggtcaaagtatggcgccagtcactgcgtgagtcggccggtatatgggctcgtcggagcactgcgcaccgtcgctcgacgtcggggacttcatgttgtgaagggaaggaagtgtaagggttttttggtaaatgtcagcgactgtttcaaatagtgctttggactctttcagattattcaaaaagacaggggcctccgtgcaaagtctgctgtgcaggcgcgtgcgcgggcacgtttcaa

SEQ ID NO: 107347 - DNA, 358 bp, Zea Mays
tggttaatccaaatgacataaccaaaactcatatagtccatatcttgtagtgaaggttgtcttaggtacatccttagttcaaatcttcaacttatgatagcttgatcttagatctattttttagaatactttagctcatctcatctaatcaaacaaatctttaatccgaggtaacgggtatttgttcttaattgttacttcgttcaagcttcaatagtcaacacacattctcctcgaaccatctttcttgttcacaaatagaactagggctccccatggagacaaactggggcgaataaaacctttttctagtaattcttctatttgtttcttcagttcaattaaatctttgacatcc

SEQ ID NO: 107348 - DNA, 613 bp, Zea Mays
cccaagtgcagtagccggccttctgatgccgaagcgagaccagatagggcattggataatcccctttatgtcttccctttcaatcagattattctttacataaaaccattcctccatccaggccctgggccacctttttcgaaatgttggaactggataacttacatcagaacgaagaacgaagccatagcaaccgaaattgttgtgatattgctccttgcccgtggccttcgtctcgtatagtagctcatgcatgttacaaaagcactttgcgcttggttctagtccttggctcctcaccgcccaaacaaaaacccccatcctaataatggcttcaggagtaatctgatgaaggaaaattttgaaggtcttcagcacttcaaccaaaaatttgctcaatggaaaccgaagacctgccttcatgaagctcctgtaaacaacaacttcatcttcctcgggtgcaggggcggcactattccctccagctctcacaatggacatatctcggaaatatctccccttcatggcatcaatctggctctgttcgatggacgactttccaaagatagtatgacttggccgccagggccgatcttcggcatcttcgttccca

SEQ ID NO: 107349 - DNA, 699 bp, Zea Mays
ctttgacctcagccaaagcagtcgagtttatccaggatataatatttaggttcgggataccgaatagcatcatcactgacctgggatccaacttcactgacctagcatcatcactaatttctgcgagcaaaggagcattcagatcaagtatgcatcagtggcgcacccaagagccaatggctaggtagaatgagccaacgaaatgatactggaagctctcagaaaaaaggtattcgataagagcgaaaaacttgcaggaaaatggatcagagaacttccatacatggtctagagcctacaaactcaaaccagtcgagctctgcatggaaataccccgttcttcatgatttatgggtcagaagcagtactgcctgccgatctgatcttcggggcacctaggttgacttttgaaaacatagctgaggcagaagcaaccaggttggaagacattgatgtgctggaggaagaacgattgaacacaataattcagtcggccaggtaccagcagaccttgaggcgctaccacgacaaagttgtgtggcatcgatcctttgcagtgggagacttggtccttcgccgaattctaacgagggagggatgacacaagctgtcaccactatgggaaggaccattcgtcgtatcagaggtcacacggctgggatcatatcgacttactcagatggacgccacagaagtggg

SEQ ID NO: 107350 - DNA, 684 bp, Zea Mays
tggccatctatataaacgattatacatatatgtcagatccagtgtgaatctttgattcaatttttttgaaacggtaaagctgtctcaaacaagctaaaaacccagagacgaaaatgtaattgtccttgtgggtagataatcaccggtaaggcggcatgcgtgagcagatgatgagttgaccatgtcacttcgcttttacagttaatccggtgagtaagccgccactctcagtcagccgtccaaaaccggtttaaacgtggcgtgcacagggaactaacgtacactacagttgcccggaacagtaatctaacgcccatgagattgcatcagatcagactggtagtcggtagttttcccggcaaacagtcgcatccacaggaagcaaccatgatcctctcgccacatgcgtccccagtgcttgcctgacagcgcaatcttgtcctgccccagcccctgcacctgcacctgccgggagacaacaattagttaaatttttgacaatcatcgccttgatcatcgtccaacgcactaccgagctagctaatcaatcacctcttgactgatggagaaggacacaagcatgccggccgcggcgctccaggagtgagctgagccgagagcagttgaggaggtgagtgccagagcagagcacgcaggcaggagcaggattagccaccaaatcca

SEQ ID NO: 107351 - DNA, 509 bp, Zea Mays
tacatacgggatgcaaaactacccctttggcagcccctaacatcgcaaagtaaaaaaattaccaagagggcaagaggtcaagtggctggctttgatcttcgttggtgtggacctgtaggtgatagatgcgaggacctaaaaagaagtaattttgcattccgtatgtagagaatttttttcgtggggaatatagccagtaagcaagcatagcaggcatgatttttaacctgtatatagtgctagtttggtcggtggactgaaaatctacttcgctcaggcatgcactccgggtatgtttggttggagactgttggagcaaaggtgaacacacttccttttgctctacgacttcgtcttctcatcgcgcagacgaaggcgacattcacagaacacgtcagaacaagccgaaggcgccgaccggacggagacctgtgcggtccccttcgccctcgtgttgcaagacgaaggccttgccgaagtctacgggcctcccgcgtcatcaccgccag

SEQ ID NO: 107352 - DNA, 607 bp, Zea Mays
gttgttgggttcaggagctttttcagagcagggctgcggtttcccctttacaatatgataggggaagttttaaaaagatttgaaatatatctccatcagctgacatcgaatgtcattgttaggctcagtgtctacatataggctctccgaagccaaggtaaaagtgtgaatgccgaagggttctgtcgagtacatgagctgcactataagacgaaggcaagagccgatggtctatataaaaacttcgggtgctataattttgcttaccggaaggacaccaaggccccgatgatcggctaccgcactaaatggcagaccgagtggcctagcaaatggttctacgtgaaggctagcgagaagaagagagaaaagctcatgactatggtaatgagtcctctgagattaagcttcaacatgacgaggccattatgcaacatgcaacttggctccccatgccagctggccaaagtagaattcagggtggtagatggtcatattagcactagggacttagtgcaggaatatctggcaaacaaaacttttccaacctctagcggatgggggatgccaaagaagaaggaaggagggaaaaatatgaacttgttcg

SEQ ID NO: 107353 - DNA, 312 bp, Zea Mays
gagatatccgaccatgtagattacggtggggtcatcctcattatgctctcttcctgacaaagcttggagtcttctcctccaagcagggttatttttgttgttgggtgggaagtagcgaaggggtgtctcagcgaattctttgttgtagttttaacataactggcgaagggcttttaggacaacattttggcatgagtctgggaagcagtggccagtagtggtgatgtagaaaggtgggtggtttgtctagcttcgacttccccccaggtagactaccatggatcacttctcaactccattttcacgttattc

SEQ ID NO: 107354 - DNA, 448 bp, Zea Mays
ccctaagtcaccctcttaaactttaggaactaaactttagtacctagaatttctattagtaaggcctcatttagtcatactgtttggtagtactaaaagagtgactaaactttagtcaattaaaatttaggaggtgggaaccaaacaccccttagtttgtccattcattttcattactaagatagtgtttggtttctagagactaattttgagtctccctatttcactccctaaattaccaaacacagtgatgtgcacccgttaggtgaattcccgttcttttgatgaaagtctgtgtaacaactcgattggtggaggagatgacgttcacggcccgactacagccttccaaccagactacaaccttccaaggatgttgtgccttagcaacctatacaccacctcctatggctgtcatgaacttgataagatttccatgtgatacttg

SEQ ID NO: 107355 - DNA, 436 bp, Zea Mays
gttgaagccaagtatgcaagcctagggaagtcaaagggctttggaggtgacaggcccaaccaggggcctaaaaagcgacaaaggttggtgatccgagctttcaatcaaaactgttcttcaccttgtccaccctcatacccctttaaacagcctgtattcatccgccctgccactgcccccacttcaacaactcagacgagtgcccttggtactcgtttccctgcactcccgagttcatctactcgttgcttcaattgtgggaagtctggacatttcatcaaagactgcccatatccgaggcggaacaactccaataatcagcagaactcgggaagttccagccaaggcaagggaaacacaacaaataatgcagcgggcaagaatatgaagaaaactgggcaaatctattatacacaagtggccatgacaccggagg

SEQ ID NO: 107356 - DNA, 769 bp, Zea Mays
attctggccgcctgctctaccacgtgtagcaccttgatttctcctcccatgttcacttgctcttctagaataatttccttcaccttcttccccatcttcatcatggtttcttgcactatcagggactcgacgatgacctctgatttcagccataagtgtctgaagatcttgtgccaaccgatcttgcttgtcttctatgctttgtttgagctcattaaattgtatcatggtgacacattcttcaatctcaacattgggatccatcttcctgcgaaattagtggcgacaaggcaacaaatataggtggaatatgaagctatatagaatctcacaacctcaccactcttaccaaccaaagctcttatgaggtccctgcggattgcaagaaaaatgtgtggtggtaacaataaagtggtggttaagcgaatacaagaccagagtaccgattacaatggcttatatgtggagcttggtggggaatagtaaacaaggaatgcaatctgaatcctagttgttgtaaagttaaataaccatcgaactagaagttcactgcctagtgctgaccacgagatacgagtgatgtaagtagatcaaacacacgcgcaaagaattttcagatttgatgcaaatcaaggagtatggttggaatgcaagtgttgtgatcagacccaaccaaaattttgcaccaaatgacaatagcaaactggttgaacaacttgatgaacttttagcacttgtgcacataaacaaactgatcgttctacttttc

SEQ ID NO: 107357 - DNA, 474 bp, Zea Mays
gaacttttgtttctgtgatactgaacctcggttgctgtgcaggttccgacgtttgggcctgcgcaagcaaccgctgctgacaatactgattttgtggtggcctcaaccgtagtgcctgccgatgataatttgtttggctctgtgtctgagtgttttgagtctgatggtgaatctgggagttcgttttcttggacggtggagtcctcagatgaaggcttggattattttgctgcgttagatgtggctgtagcagagggtggtgccggggatcttcctagtgtgagtactgggtataggcggcgaagggtggtggcgaaacacagtgtgggtgaattttcgcgaagtggtaggcgccgtcgtatggggatggagtgtggccgtcttcgagtggaccagattggtaaacaagaatttttgtcctcgccgattggggcgagcataggtgaaggggatctgcgaaatcttttgagggtg

SEQ ID NO: 107358 - DNA, 1194 bp, Zea Mays
aaaaatttaagcattttccgtacagaaattttcagtcaacattgtcccttcattttcagccaacagttcagattactcaaagttcaaattagtaacggaggattgtgaccttcgttagctcataacctgtatagatattactcaaagttcagattactcaaagcactaacagcaaattcgtgtagacctctgaacgtatagtttttgtttcatgtggccaatcatctagacatctgaacgtgtagacctctgtatgtgatttggtcatactgatccccatgtttgaacgtgtagtttttgcttcatgtgaccatttggtcatactaatccccaaagactaatgttagtgttctctatattgtctcctggaatagtgggtgcaatgcttttatgtacactgggagcacgaataaagggtactatccctggtgccaagttcccttccgtgatcatctttagtttcatccctactggccttatctgcaggaacctcatcattctcattgtggtaaatttgagagagggtaggtttaattaagagtatcattatcaacagacattgcagcacactttgtgtcaggggcagttcctaagtcagttctgatgttagatgattttttgctcacattgtgtgctttcataaactgctctggagtgctcaagttttttccagtagcacccactacattgctagcagagacagtttgtgtcagcggcagttcctaattcagttctgatgttagatgattttttgctcgcattgtgtgctttcataaactgctctggagtgctcaagtgttttccagtagtacccactacattgctagcagagacagtaggacctccactgggtgcatggatagcagagtcaacatgagattttgttctgatctctctaatgtatgtgttgagtagtttgagcatttgcaggaacggattatatatatatataataaatccaggcatcacatactgattgttttgattatgcattcatttttgaaatcctggattcgaaattgaaaagtaagaaaaaaacagaagaaaagggagaagaaaactggaaataggaggaatacaggaacaagccgaacctggactgaaaattcatgcggccacaacaggaatgtgttcacgtgtgcatgccattgatcggtgggccacgtttacctgctcaatctcctttgcggggac

SEQ ID NO: 107359 - DNA, 418 bp, Zea Mays
atgaacaaagtatttactacaacattgataatgtatagatatcaatccatcagtagacccttcacacccaactgattgactgtaggactaaaactcgtcgtagtcctagaactcttgggtctagtacacatgttctcctccatctaaataaaaaagtatacaagataggagtggaaaaggcaagagtgagtacttccgcactcaacaagtatcccacttcgggtacaagtggagtggctatatagttggctagcttgaacggttgcttttagttaaccaagttttatttgcacttgaagagaattataatccccttttgtaaatcattttgttgaataaagagtcattacaatctagtaacttcaatgttcatcgcatcccatgatgaaccatccaccaagtccatggtgaaccatta

SEQ ID NO: 107360 - DNA, 722 bp, Zea Mays
tgaaaaatctatagcagcctggtgatggatcctggttctccatagcggatcctcttgcggggaggggataacgccatggcatggacttgaacttcagggggaatccttccatcaagatgagcttccaaggctgcgatccttgcgtgtgcatcctccagctccaagtgtaccctagagaggtccagggtagcactatccaggtcggtgttaagacctgccaccacaccagctagggtgttgaggcgatcttctccagctccacctagaacaatgctggtctggctttctccacgaatatgcagaggaagatgcatgtacttcatgttgtgcagctgctgccggtaggtgtggctgagggaccacagagtttgcctagtagcattgctgaccgaagaagcataggtggtagcggcgtcagagactcatgagctgatagagtcctgaaccctctatcacctgcatccatcaccctgacatgaatgcgagtgatgtagtagcaagcccgaggaggctcacacactcgcctggtctcatacaggggtcggacataggttcccaacacatacagaacatcaggttagggaagtgccctgtctcgaacattgaggtataatgttcagtgacaggccataaccccaagtagtggtcctgctgttcatcgttggcttcatcgttgatgttttcttcttattcttcttcttcttcttcttcttcttcttcgt

SEQ ID NO: 107361 - DNA, 299 bp, Zea Mays
gcttcttcaaagcagggctgagattttctctgcacaggatgattggagatgtcttggaaaattttgagatttaccttcatcagctgacccctaacgccattgttaggctcagcgtgtatatttgggctctccgaagtcaaggggtggagccactcgccgaagccttctgccgagtacacgaacttcattatcagacgaaggctagggaagacggactgcatgagaacttcggctgctacaattttgcttatcgcaaagacatgaagacaccagtggtcagctatcgctctaaatggccg

SEQ ID NO: 107362 - DNA, 298 bp, Zea Mays
cgagccctgaggttggtcctgcaacactatccccccatttggaggtgggaaagactttgttgatgttgaattccttggaggtgcccccagtatgcttggagaaggtgtggaggaatcggacccctgcttctcatgagtgacagcaggtggcatcgcttccttttcctttggagaagatgaagacaccatcagcactgttgacttggttggtggcgcctttctagcacagatgggccactcccccagtgtgatagggtggaacagcttaggcgtcatcatgaagctggagggcttggcg

SEQ ID NO: 107363 - DNA, 315 bp, Zea Mays
gcgacaattcactcactctctgtttcgccaccgcccttcgccgcctatacctagtattcacacccgggagaccaccagaaccttccacgcgcggcgaaggctctgctacatccacatctaatgctgcaaaataatccaagccttcatccgaagctcctctgtccacgaaatcgaacccccagaatcatcagactcaaaacactcaaacatagagccacacgaatcatcatcagcaggcactacagttgaggccgccacaaaaatagtattgtcagtagcggttgcgtgcgcaggcccaaacgtcggaacctgcgc

SEQ ID NO: 107364 - DNA, 575 bp, Zea Mays
gttggcacatgatgccttgcatcagaccggtatatgaaggtgtaacacccaaagttattatgatactgcttcttttcggtggccttcgtctgataggaaaactcgtgaatattacaaaaacaatcagcatctggttccaatccctagctccttattgcccaaatgaaaattccaaccttgattaatgcatcaggggtgagctgttgaaggaaaatttcatacttcttcaaaactttgactagaaacccgtgtaagggaaaccgtagcccagccttcatgaagcttcgaaaatccactacttcattttttaggaagtggaacactattttcaccgccgattcttactatagacacatcatgaaagtatttgccttttatagcctcaacatgtcctttcttcacggttgatttcctaaataccacatgactcggcctccacgaccgatcttcagcatcatcattatcactttcaatatcaaattcttcactatcactagaatcttcagacagtccagctaaaatctcatcggtaactttttcaacatttgtcctttccatagcttcataaaacctag

SEQ ID NO: 107365 - DNA, 578 bp, Zea Mays
aatcatttgaatgcagattgacgtaacattattctccagagactaactctaatgtacaatgccgcttggccgaaggaggttacgaaaatagctggggatttactgagagatcctgtctaggtcaacattggaagcatcgacgaacttgttgcgaacaaatccatcacttaagtattctagtgaaattatgattgtttttttttcatactttgtgcttcacttttctttaggatgcggagtccttgaagtgccattgctgactcgtgtcagaatttctattgttaaatattttggaaaaagcattctttggcacctaatttctatgtgtcagcctttatctctaatattttatgtggtcatttctaggatgatctatttctatgactcctgtatgtatgcggtatgtagaggtggttctgcctatggacaagcagcggagcctagagcagatttttagagatcaagaaaggggctcaaaaatcatcatattttgctcaactaagaaaatgtgcgaccagcttgctcgtggcattggtcgcaattttaatgctttaagcatccatggtgattaatcacag

SEQ ID NO: 107366 - DNA, 964 bp, Zea Mays
atgaggttattgcttagttctatgcaactctttggataaagaaggtcgatgaggaagcggatgggtacgatcacccagtcatgtacttctacctccacagagtttggcacaaagtaattatcgaagatttgctcatatcctgggtttctctgacgaggacattagagggaggaaccttcgggttcatgatattcgtctatctaggcgtgaagagaaggaagtggtgcacatctcaaatgagagggaatactggattacttctaacatgcataagtactatcggtacatcaacttcttatctaggatgacaatccttcctaagagctgcaatcaaatgaatgtacttggagagagtcgtgtccttctcatgcttatgactcctacctgcactcgcaaaatcaactatttgatatgatttggaaagatattattcgggcatcttggtcacctttgaagggctaccttcatgcacccttcatcatgaagatgatcaaagtagtcacccaggtccgctatgaaaacccagtcaagaattatcgttatgttccttactggttgattccaacaatctagcagcaaggtccaagtgggctccagctggttcaggaggacctgcatcttctgatgagccaccacctcatcctccacttcttgagacctcctctagtgctgctgctggctctcgtccaatggaccatggcggtcgaggaagaggtcagggatgaggtttgtttgtgcatctgtttaagggcatcgtcgaggtttttgccatgtgtagaagctatgttgttgatgaggctgtgcactggcatgagacccaggcacttcatgatgatatgcgaagctttgcagcctccatgggacatcccatgccatagtgacctcctcctattccaattcctgcgtatctagaaaatctcaatgaatggtaccagcaggaatatggcgtgtcgtttattactga

SEQ ID NO: 107367 - DNA, 352 bp, Zea Mays
ggacggcgggttgttttcaggtaaaccgaggggctcctgtgcaaaaaggcctgggcgaaggggtacagggggatatcagccgcaggatccagaatcgagggctaggattagatctggcgcccaacgaaccggtatgcgctattggccgtgggattaaaatccgatggcccagattctatgaaccccgatataaccacaaccgcatgatctgagatctatggctcccgcttgatctattctgtgccgtccgatttccatctaacggccaaccccttttcttctaccacgggcagaccagaccaccgcacaaacaccgccacggcgaggtctcctaccaacggagctaatctcc

SEQ ID NO: 107368 - DNA, 486 bp, Zea Mays
cgagggacgcgaggcgtggcgcagagcgtgcaacagcaagggcccagggccacgccggctctagaggaggaaagccgggaaattagttgctagaagaagaaagagattagtggagatcctaaactataggagattagtttcccttcctgttgcaacgtaggctattaagccttataaccgtcatttgttgaaggaatcaagaaagaacacaattatcttcttcctcatctctactaatctcaagccttcggaagaggggtaaaacctcaccggagaagacggaccgaggttacgatctacgtagctgagggcctcctaccctagatactaaggcccttgacattaggattagggtttcactctcctacatggtatcagagctaggtgtccctctctcctcccctcccattcctagcgccaccgcctcaccttgatggcgtggtcgccgttgccatggccgacgagtaccccttctccctccactcc

SEQ ID NO: 107369 - DNA, 543 bp, Zea Mays
gtcgaatggccttgcatttttagtgggccggctcggaaaattaattctggccctgttgggctcttttgggttttgtgattttttttgttctagcatgtcaaatatgaaaatctagacactttttgggcccattttctattgtatatttttgacattaattctctcggatagattttatgtttttatcatttttatgagctatagatcactagttttcaggtgttttttgaggtatagaattatcaaatcctagacattcttaggccattattaaagactatataatgtacataggatgagacaacatttttgtagctagtttcaatcacaaacaacgggttctttagatttactacatctgtgaagagttcaaatacccgacgacataagttttttcgctaatttaggtttatgattcatgtgatatttgtttgttctagcatgtcaaacatgaaaatctaggcagtcgttcttaggggcactttttattgtagatttttgacatctgatgctctcagataaattttcacgttttcacaattt

SEQ ID NO: 107370 - DNA, 354 bp, Zea Mays
cccagagaaggctaacactgaatttagaagaatgccacagaaatggagcagacttgtctgatctagagcagccctttacagaaaaggaagtctgggatactatagccagtcttccgtctgataaagcacctgggcatgatggctatactgggagattctacaaaacttgttggcttatccttaaggcagatttgatggctgctctcactaccctacatcaaggtaatgcacaaaaattgtggctactgaacacagcttatcttactttgatccccaagaaaacaaatgccatgacagctggtgattacagacccatcagtctcattcacagctttgctaaacttaccacaaatc

SEQ ID NO: 107371 - DNA, 507 bp, Zea Mays
ctcacccagtcgcatttaatgcggtggttgaggcatgcgctgctagcgtagggcgtgggccagcttttgataggccatgtaggctcgaatgaccgcacagtaagtcgcgtgtttccaagacgggcaattgtgtctcagcgccgcacgcgtgggtagcgcccatcgtgaacaatcgctggcctagtcaaagcgccctctgcagcactgatcagaagtgacaacttgggtctatcaccataactcctgcgtacatcagcatgcgcacgtcagcattgctaacacaactccatagataacttatgctgacaggatgagacaaaggcacgcttggtcagaagatccacacgaaggccaacgacggagatctccacctgccacaacatttaatgatgcatatagtacgttatttaatactagatcgctggtgccacctgtcagacccaacacccatgtacatgcccccttggactataaaagggagagcacacatgatataaactcaatgac

SEQ ID NO: 107372 - DNA, 387 bp, Zea Mays
ctagaagtaccaaaaatcctaaatagacccctggaaaaccctggactgaaaccctagggggttatctataaaagtgtgcacattttggacctaagtgcaaaaatcatggagataaggtatcttaagtcatatgattcacatatttggagatttgcaaataacaccataagtcttgggcttatttgcaaaaaggccaccctagtgctcaattagttaagtctaaaaacagtgaaatagagctgactttagggctctgtagatccaaaaatattaagaatttgcctagagtcaacacatcaagtttgtaaagctactaaaggagaacaactttgctatagggattaagccttggtcacatgaaaaatttggagtaaaatgagctcaaag

SEQ ID NO: 107373 - DNA, 572 bp, Zea Mays
gcccctcagaatcatgtccagtcggctcaccagatcctcagtaggaattctcttgttggtgacccgggtagagtcattgataccactgtacaaataagccgggtatgccctgtctttcaaaggttgaatattcttgaagacggagtcagcgaccacaacttcagtagtcaaacctctagctttcaataagcagatctcagcaagcaacactttcacctctgttacctccgaaggggtcagagattctacccagtttggagtacggacatctagctgtctccccgactgaggggggagggacttgcagtgattctccatgatgaaccactcgaggcaccaccccttgatgctatccttcagagagatatcaaggtactctgacttcctcctgcgacgtagttccagactggcgccgccaacaatttggtactgtccccgagccatcccgggccgacaatgatacaaatacttccaaaggccgaaatggggaagaatcccgagataggcctcacacagatgaataaaaatggaaacttgcaagatagaattagggttcaagtgggtcaagttca

SEQ ID NO: 107374 - DNA, 318 bp, Zea Mays
ctagaataacaaccacgagcagaatatataactcaaccaatagagtcatgatgaattgtataacctatctactcccacctaacatccaacaaggttttgatctacaccatgcagtccatctcacccataactaccttaaccatattcccccaacttcgatgatagacactgaccccgactcaataagaccaagactggagaagaaaagatcaacctcgtcaaggaaggagagaagtcaaaatcaaccttcagatgcattaccacccaacacggagttcttcatcaccataaactttcttacctctgcctattcttgtc

SEQ ID NO: 107375 - DNA, 410 bp, Zea Mays
gctgactatgcaagtcagcgagctcccagtcctttatgctggacaaaacttcaaccatatcaggagttaggcaccaccgccggtcttcaagcaccctgccagctaaactaaaagtggactctgatgatacagtggaagcaggcacagttagaacatctttagcaagtatagaaagcacaggatatgtcaacttgtgtcgttgccaccagtttagaagattgaaatcagagtcaaactgggtgacagtatcactatcaagatatgatgacaactcagatatagcagcagcagtagatgatacagatgtaggagtagttatagtagattgggatggcatgaggatatcatccccatatatgtcatcccatgcctctgtagccttacctgccataccaacactcttatgctat

SEQ ID NO: 107376 - DNA, 585 bp, Zea Mays
ggaatgtggacgcctaagagggggatgaattaacacaactattttcccactaatctaggcctcttatttttctcttaaacgaaacctatgtggataaccaagcattgatatgtgcaactaatgtcttgcctaagtgttactatctccaccacaaaatgagttttgtaccctaggttctagacctatccactagcctataactaagctaataagataaaacgtaaaacacgaggaaataatataaatgtggaaccttaagtatggcagagatacaaacttttgatgacatgcctgtgtttttgctaaggtatcaagaagcgtgcaagcttcttagtatttttgttggggcccctacacaaagggtagcccacatgaggaccaagctctctgtcaggtaattccatatatagttatggtccttctccacacataagtgatcttgttctggcctctctcgaatactccacaccatcttcactatcgagcttctgactaaaacgttatgggccttgttccctacgtcacatgatggtggcgccaccataaatatagttggtgtgatctcgcaagacacgatccctcccg

SEQ ID NO: 107377 - DNA, 326 bp, Zea Mays
aaaaaaaaaaaaaatcattcagtttgttaactacctctatgatttggcgatagactgttaccatccggcctgtagcatgtagttcgttatatgagtctcaaccatcaaattgcagtgccaaaaaaaccacagagccaaaggctcccacgtgaggggggtctaagaagggaataaactgatgcaaaccgtccttctacatatgctttccttctacatatgctttgaacccgtgacctggtaacttagtgagatagctcttaccactgcactaggctgcccttcatatgaagttaacacagttgccacaaatcccgtttcatatgaag

SEQ ID NO: 107378 - DNA, 736 bp, Zea Mays
gttttctttggtgaggaagaagagatgctaggagtggacattgcttggtggcacggggaagagtttgtcagccttttatatttggagggctcgacatatttagcctcaaagagattggttgggctcttaggatgagatggctatggttgtcaaaaacggagcctagaaaaccttggtcttgtctccctttacagattcttgagaaggttaaagccttctttcatacggctattgtcaccaagattggtaatggtgcctcaacattgttttgggaggaccgatggttcatggtaaatgcattgaggaacttgtgccacgcctgtttgctgcaatccttagatgtttggccaataacagaaaggtgtaggcggcactcaatggcaggaaatggatagctgacatccatggtgctctaactgtgggggtcattgctgattccctcactctttgggatgccttacaaactgttgtgttgcaccagggtttggaagataaaacatattttcaggttggccactaatggtaaatattcagccaaggcggcatatgagagtttgttcatcgactcaactctttttgatccttgggaaagaatatggcactcttgggctcctccgaagtgtaaattctttttgtgattggctgctctagggaggtgttggacagcggatcagttgcaaaaaagagggttacaacaccctgaaagatgcccactttgtgatcaagaacctgaaat

SEQ ID NO: 107379 - DNA, 680 bp, Zea Mays
acacgagtcaatacaagaggaatgtttggtctcgcgtggatgcgaacgacgagagagccttgagtgagaaaaagaaggtgaccaagaagagtagtgtgaattgttggaccggatcgacggcgaacagcgcaaagaactcagtgtagcgcagtgccgccggagcgcgatcaccacgtctcaacggaagagaggacacagttgtattttctgttgctgcaactgtgcaaccttgcaaatgcattcaactgggaattaaaacacccggatccgtcttccccgctgcactcaactgctgcgagacgtgccgtaatttcagcaacgtccgcgacatgcacggcgagctaagtcgcagcgaaaaaacgccctttgaagcggtcacggcgaggactgagtgcacccatcagtccgcccatgattctacgctgaattacaaaaatgcacgcgcaatctaaaacaaactaatgcacctactaacaatatccctgacaagattacagtgaggctactgcaacatttaccccccataatcttgttaatctgcaattcgaattattccaagctgtctcctcaactctgtgaaccgaattcttcccagaggcttcgtcaagatatctgctagctgatcatctgaacttacatgttcaatatcaagaacaccactgctcacacactccctaatg

SEQ ID NO: 107380 - DNA, 364 bp, Zea Mays
atcaccaagtactcgggggagacccaaccagagctatggcttgctgactaccggctggcctatcagctcgggggaacgagtgatcacaacctcatcattcataacttgcccctctttctatgggactccactcgagcatggctagagcacctgccaccttcctggatccatgactaggaagacctagttagggtcttcaaggggaatttctaggggacatacgtgcgcctcaaaaattcttggaacctttggagctgccgacagaagcaagacaaaactctgtgggagtacattagccagttctccaagcaacgcaccgagatccccaacatcaccgactccgacgtcattggagcattcctcg

SEQ ID NO: 107381 - DNA, 497 bp, Zea Mays
caatcatttcaagccattcagtacatggtttcttgaattgcttctcaaatttgaagcggtaggggagtcgaacaagctcatatttctttccctcttccttcttcttcagcatcccccagccgctagaggttggaaaggttctatttgccaggtattcctgcactaagtctctagtgctaatctcagcagctaccactctaaattggacttcggccacttggcatggggagccgagctgcatattgcataatggccttgtcattccgaagctcaatctcataggaatcataaccatagtcatcagtttttccctcttcttctcgtcagcttttacgtagaaccattcatttgtccacccggttgggccactttgtgcggtagccgattaccgaggccttagtgtcttttcggtacgcaaagtataacatccaaagtttttatgaaggccatctgccctggccttcgtctgatagtgcaactcgtgcactcaacagaaa

SEQ ID NO: 107382 - DNA, 878 bp, Zea Mays
ggtagactacgacgatagatgagaggtcgtagctagctagcgctggcttagcttgactgctcgatcgagtcgcaaagccagcgccggcacccaccgtgtgctgacgcttcacatctcatgtcggaaaagaagatcgatccggccagatggatcgtcgatcggtcacttcaatttctctgccgatgcgggggagctccgtcgtcttttctcttttgactggccggccccagaccccgggccacgtacgcgcgcgcgcgcgtggcgcacatcgcatcagtggcttgtaaagccatctcatatgaacgtccaggtccagccatcaaattaaattaacatcttcgtcagtcaccaagctagacatagatagttctatgtttatagaatcttgagcaaacctatagataaacggatatataccaaggaccaaagctcgatctgcctaacaatacgagtaatatattaagtctaacaaccttgtcaagagaatgttagctttagcaacaacaagctagctagctagggtgtgggggtctccaataacccgccgattcaaattctcaacaacgaataatgaaacatgtccaatgtctaattaaagcgaatggaacaacaccattaacagctaataataaatcatttggatcaacaacctatatatacaaataaatgctagacttagaaatagagagaaaaaactatactctaataattaaagacaattcaaacattaaaatcaacaaacagagtaaagaaaaataaaaagactaaaaaacataacatatgaatgaagtgaagcaaaaacaagataccaaataacaagaaacatacctagcttgatcctaggtgggatctcaaagaactccatgaatgaattcttc

SEQ ID NO: 107383 - DNA, 345 bp, Zea Mays
tgatgcatcatcggtcataactttccaatatatgcgacacggcacatcatatcaccgtaaccatcaagaatgccaacgtacgtcagatgaaacgaagccaagcgctcttgcgaattcatggtcctcactagctagctggccgggtgcggttcacacaacaaaatgcaacaaaatatgatcctctctcgcggccaatcatctatctattggcgagctctctttttaagttttacaattttacgagggtgacgggagaaaccataccgaaacccgtgtttaaaaactatgaattttcaccgttattttgtcgggtcacaatgcaaatctgatactactgattaacca

SEQ ID NO: 107384 - DNA, 736 bp, Zea Mays
gagtagtcgcgagcatgtcatgctgatttaagttactactaacttaaccaactgctccgtcggtagggtctagtggtcaccctgagttaagtaaacgtgggcatgtcacatcgccctaagtcattaccaacttaagtcgattgctccattagtagggcatagtggtcaccctgggttaagtaagcgtgagcatgtcacaccgtcttaagtcattgccgacttaagctgattgctccattcgtagggtatagtggtcaccctgggttaagtaagcgcgggcatgttacaccgtcttaagtcgttgtcgacttaagccgattgctccgtttgcacggtatagtggtcaccctgggttaagtaagcgcgggcatgttacatcgtcttaagtcgttgtcgacttaagccaattgctccgtttgcagggtatagtggtcaccctgagtcaagtaagcatgcaaattggcaataaacaattcgagtgcctttgagaatgaagtcattttattgatggtgtatctcccaattacagaatacaatgccgtcccaatagcttttcaaatctagctaggggtaaaacttcctgagatgctctatattccatgagttccctatttccgtgccatccatttgagtaagacgatatgatccaggccgggtgacttccgctactatgaatggtccttcccatagtgacgacaatttgtgtcgtccctcccccgctagaattcggcggagg

SEQ ID NO: 107385 - DNA, 457 bp, Zea Mays
cgcgctcacaacaacttctttcgcatccttagtttttccgctagaagcttttctgcagaagcgggagctgacatcttcgcggattccaaaacaacatctaatacactagccattctcctttttcttggggttgttgcagaaacacttgatggctttagcagttctgttgtagttgctgggctcagtaccttcaactgttctgctgccttctctgatttcggctcttcggtcggatctgtacgagttttgattggcatgacaagacctgattctgtggcagaaggggcagtttctacaccttcaataagctttggcacatcggccgtctcaatgcgtctcagtctatgtgtcaagaccttcactttcttcgccttcgacgtactagaggatgccgaaatagcaattttccattttctcccttgtttccgaacacgaaaacagtaatcagggtagacaa

SEQ ID NO: 107386 - DNA, 603 bp, Zea Mays
acaccaattgaaccaaatccttgaaattggtccactccacctcgctcggtccgcactcccaatctctcactaccggcccatttccccttcaacaccgcgcgacccatattccttggcgcactcgcactccctggcgagtggacccactggcgtcagctccttctcctcgtaataacagaaccccgcgaacaattgtgtcgtggctgccatggatgttcacccggagatctcgtgggtggttgcttgctcggactctagggtatttaaggctcctattattccccctctcttcctcccctagttaaagctatcaccaaatcgtgcgcctttgcgcactgttggccgaatcaagcggtgaccggagcaccagcactggcgctccgctgtgcaccgtcgcatttgcgtggacaaccttatcgaccccttcatctccggtaaggaaacacaaccgaatcgccctaccctctgctgcgcatagagccatttaggttgtaggataaagccctggtggggaggttgatgttccccggtggtggcgccgccgtaggtagattccggtcgtcgtagggcgcggtcgggcgtgggggtgtccctatccgttga

SEQ ID NO: 107387 - DNA, 525 bp, Zea Mays
gtagcttgtaatattcaacatactgaagtgaatgtgaacaatgatacacctagggtagaaaatgttgatattatagatgcaagtgtagttgaagatctacatagacaaagggaaatggaacagcagcaagattatttcgaagatgaagaagatgaaacaggatggcaatatgctagtgataatgacgagagcaataccccaaatgttgttgatgatgatagcgatgacgactagatgagtgttttcctatcccatataatatccaggtatgaatacatctaattttactatactttggaattttaccttgataaattatggtatgacgccattcaattttagttttgatttaattctctaaatcttcgatttttcaagacaaatgggactcaaggagattgaagttcaaatcaatgagcatgaaaggtggctgatggttgacatgctaaggacatttaagcatttcagataataggatataaattcagagtttcatgtgtagctgttcccttaatacattagtta

SEQ ID NO: 107388 - DNA, 573 bp, Zea Mays
ctgacaccaaatatcatgaccaattcccaaaagagctctgatcaagcgacagctaagcaacacaaccgtttccagtagggtgtgcctgaacagtctaaacagcactctgatcaaagtaaagcgacagctctaatggcgtatcgtcgtgctaaaggcctgtgctacaaatgtggtttacgatggagccaaactcacaagtgtagcaccacggtaccccttcacatggtggaggaattgtggcaattggttagtccttctgattcagtggatgaacaacaacctttgcaagatgagtcgaatcaagaccttatgattctgtcagttaatgcagttcttggcactgaggccctgaaaatagtaaaacttctagccacaattttcgcaaaaaaggtaatcatgttggttgattctggaagttcgtcctcctttatttctgaccgattagcaaaagcacacccagctctaattaccttgcctgctcctgttcaagtgagagttgccaacgaccaagttatttcctgtactcaagaactgcctaaatgcaaaatccaaatccaaggccactgtttccac

SEQ ID NO: 107389 - DNA, 347 bp, Zea Mays
aaagtgttgaacaagattgtgaaagaaaagtagaacgatcagtttgtttatgtgcacaagtgctgaaagttcatcaagttgttcaaccagtttgctattgtcatttggtgcaaaattttggttgggtctcatcgcaacacttgcattccaaccatactccttgatttgcatcaaatctggaaattctttgcgcgtgtgtttgatctacttacatcactcgtatcttgtggtcagcactaggcagtgaacttctagttggatggttatttaactttacaacaactaggattcagattgcattccttgtttactattccccaccaagctccacatataagccatcgtaa

SEQ ID NO: 107390 - DNA, 669 bp, Zea Mays
ctccatcaatatgatggaacaccaccgcatacagtctctggcgtttctcgtctatgccttgtaggaccagacaacactggtcatgggggacctaagcattggagtctccacagtaacccgcataccgagaaagacagagcactacaccatatagactgtacgcttacgcatgttgaagggtgacataagggttcatgacgaaggacagggccacaccacgcacggccctaaaacataccctgactctacatcgtgggacccaccaaacgtagctacagggacctcagcgtcggacttgctacaaggaccggtataccgagcggaaaaggcggtacgccacaccgggtgaacggctacgcatgaccccgaaggcaacgtcagggagactacgtcagaagggctaccgaagacaacagatcacacccttaccaataggaaacaagtccccctataaggtcctacccttgaactataaaaggggcaaggccccctacttcgttccacatgtgcactagttgtaacacaatcctcaaagcaatactataatcaacaccacactaaactagggcaagagcctgaactagtataaactcaccatctgaatccctagattcaccactcagagtgagtccgcgctagcctcccctcctgaacacaaattctattgtc

SEQ ID NO: 107391 - DNA, 453 bp, Zea Mays
cattcgtcgcatggctccctaaactagttattgaacttgtacttatagtttagcctaacgagacctggctcttgcttcatttggctgtcttccttcggctctggcatcacccattcaacccttaacagccaaatattgaaggccaagtgctcctgaactaggtcccttgtatcgatgtaagtacaaacaacgttgaaggcaaccatggtagcttgagcttcaaagttcatataacaaatcaacctcttaatgccgaagctgttcttgatagccctttggattatgcccttgatgttctccctgcctttcaaaccattttcatataaaaccactacttcctctaggagttgggccatttactatggtatgctaggactaggaactaggcttcctttcaataagcaaagttgtagcatacgaagttattatgcagacactctttcccagttactt

SEQ ID NO: 107392 - DNA, 743 bp, Zea Mays
acagattgttacaagtaagctaagcagaatgtgatcatacacacctccttgtagtgggagacagttttattatcgtctctatcgtgcatatagtatggaaaattcaaaaattacagccagttatgaatcaccccatttcattcatgtgcatgtgtacatatattacggaagcatccataaacacttccgtgtgcagtaaagatgatatagcggccagcacaggagaagtgtgatgtagtgctgtaagcatgaaacgtcgccactaactgacatgaagtcatgaacttcatctcagcaacagcaatcactactcagcagctgttccacacttggacctaacctcttgtttttttccctccgtgtacgtagagagtctttccaacacataaagtgcaacagttttcgggaaaaaaacttgtacttttaataagatctagaggaaagcaagaaaatcgtggtcaagcaagatgatgatcggatcgagattgggccagctagctaccatcacctctaatccatggagtcgctggacagccagctagctagctcccaaaaccaggaaagctccaaaccccgaccgaaaatcccccaggagtcaccagcaaaagccctccgatccgtggcaggccgcagagccgatcgtatcccccaggaaagcttttacccggtggccaagggggcactgatatgcctcgcgggcgaagcgaccgggggccttcgatcgattggggtctccgccggcg

SEQ ID NO: 107393 - DNA, 608 bp, Zea Mays
gaaaaatgacctggttgaaagagaagatattaaggggattattcaacgccctatctagtcttgtttcgacattaggaggccatccactatccttgggaacgatatacaagcatgccaggctgcttttaatatagtatgcacttacataggcaccaggcacttagtccaggagcatattgcttatagagtatggccactcgcaagtgggtgggagatgaggaggctgctgctgggtctagcgaaggtggtttggtctatctaaagtacacgttcaagtacatgagccaatttgatgagccaaatgatgactgactagatgccattgaggcaaccagtgatgaattgcttggtgcctattcgagggctaaagatgatgctatgacaacagcctttgggggttgaggtaaaaagagactgaatagagttttttatgtcattgggtttgtatactcggagtactattattctttgcgaaagcaaggaaagaaaagaaaaactgctgcttcggcgatttctaacacgccgaagctgaaaaaagttaaagttttaacacaccgccccaagcgcgttgaaacggccgaagaaccgaggcctattgaggggtcttc

SEQ ID NO: 107394 - DNA, 695 bp, Zea Mays
gcaaggagtgccacacttgggaataaaggccctaagtaagtctaaagttatcaggatagagtcaacctaactaccccatgaaagtagaaaaatggaaaatcggtaaccaagactccaaacatctcaccttgggcgaaggaaaggaattaacctaaacaccagacaaaaaactattttaaaccacactgttattattggaccattgacataaaaggatagcacaccaaattaactacaaaaattattaaacaaataccaccaaaaaggttagttaaaatccccaaacaagctacaaaagaggaagaagtaagtaaaatttcaggctacctctactctaaaaaatcagacctctgatcagacatctccttgttcattaagttttagaccttaaaactaatggccccaattgataaagtcatgcctaattaactaccataacatccccaagaagatggcattgggactctaagtctggacaagacaaaacgaagagtttgtctcggttctaccccctccaatagatcaaacttaagacaaggataactcagtgtctctgacacgaaacccttggggttttgcaccaagtgatagagtgaagagaggagaggagaggagatcatatgagcatattttgtccaaattcgcctagattcacaacctatgggcgtttgaaaatgactaaacaacataaacca

SEQ ID NO: 107395 - DNA, 547 bp, Zea Mays
tggagattgttaccactgcaatgagaagtacttgactgatcataagtgcaccgccagggggtattcttgctggaaatggacaacgacatggaggaagatgcaaaagcagaggacctgggcattgacatcagcagcaccatgaagctccaagtcagggtcaaggatcggacattggtggcgctggtggacacaggctctacccacacattcatccgggaagctgtggccacccagctgggcctccaagtcacaccaagtccgggtctctctgtcaaggtagcaaacggggacaacatcaccggcagcggaatatattccaagctccaaattgctattgccgaggagaccttccacgtcacctgctacggtcttcctctggccggcttcaacattgtcctgggggtccagtggcttcggtcattgggacccatcttgtggaacttcaatgccttatccatggagttctggcgcctaggacgcaaggtgcgttgggtgggactgggtgcgccacatactcagtgcgcagccctgtacaaaccccgcgaac

SEQ ID NO: 107396 - DNA, 335 bp, Zea Mays
ccaccggtcgcgatatattgaaccggtcgtagtgcctgaatttggcgaagggacctcttcagctgccgaagcaaaacaagctgcttcgattgtgtagagcgctaaagagccgattgtagtgccgaaggtgcctacagtcgggccagccgaagctaaggatgatacggccgaagagccaaaggtggaagaaacagtaaaaatgccagaaatcctgagcctatcggcagaggcaaatttgtcgaagatgcaaaaaactcctgctgcaactcccaagaggaggaagatggccagcgtactagacgctgttatggagactacaaaggccttgacccctg

SEQ ID NO: 107397 - DNA, 497 bp, Zea Mays
tagatgtacagggaaactgcagaggtggtaaattctaccatggacagcaaaccagcacagtacaagcaggcgagtcactgctgtcaggctgcaggttggtctaatccaaaaccttccccctttgggctgtaaaaatcgtccatgtgaccccctctttttaccagaacgaaattcttgttgttttgcacttatccaaagtcatctggaaacagctagtggatgcagatctttttcctaagatattttcagactgcctgatctagttcagtcgacagcagcagccaccttgtcccctccgtttctccaatttctttataatgacagagctaactctccacatcaaacttcttccctgaacattggtcttttaatttcttgtagacttccagagtcaatatcttacaggtttcgagttatagagccccaaagtgaggcatatcacacagaaaccataatttcagtttactgaaactgaacccagaattgcagactgtcaa

SEQ ID NO: 107398 - DNA, 674 bp, Zea Mays
tactttaatggttgctggtaaccttgttttcatcacacaacagtacctgctgaaataaaatatcaccaagataaaccttcggtaatttgtataatgcttcagtaacaatgcgtcctgacttgtgatgcaatgcccctatagttggcgttgaatggtttgagctagggctaggccatcccaactgagtctgaaatctatggagtggtcagcaggtcaaggactcacctagaggacaagagcacgctggaaccccagaccggaacagaaagtgtgttgtgctaatgtgctcgcggttcagctgttccgtgcacttggcatccgagattccctctgtctgaatttgatgataatggcaagccatcggaattgggcaaacacaatactactagcaaagacagcagcactggacaacacttgtccattctactttctacctgcagaggccctccattccatcccgccgttgtttgcccatactgtactaccaaccgaccaggaggactgcagtagtagagcatcatgtggttgtgatgcaaaaaaatcgcgagtgagaagtgatgctgatgcaccaggtgaagaacgccggcaaaggacaccgcgagagaatgagatccacctgccaaattattgccgcgggcacggccaatcccaggcgcccaccgaaatgccgaaaa

SEQ ID NO: 107399 - DNA, 354 bp, Zea Mays
aggagaaacactagtgtcaagtcgggtctgtcactctgttcgtgtcgcgacaaaaaccatgacaaggcatgtcaaacggttttggtttagtgtcaaacttcaccagggcgtgtctgaggtaattaggcgccactttgtccatttgatcacttgggtttgagtttaggagctaactgaacgcggtggatttttgaattcgggttggaaaaacagagaaaagctgatttctccctagggtttttctagttgagtgatcgatttggggtcgtttaagattcgttttggggaaacttccttactatctttaatagatattttgatgatcttcgatttgtataattagcctaacttgtg

SEQ ID NO: 107400 - DNA, 645 bp, Zea Mays
agtgaaccaaacaggcctttcgtgtggtagctgaggactggtgcctttgtatcctttcgatacgcaaaattgtaacaaccaaaatttttgtgaaggccatctgccctgcccttcgtctgatagtgcatctcatgcactcggtagaaagcttcggcatccgggctcatcccttggcttcggagggcccatataaagacgttaagcctaacaatagcattgggagtcagctgatgaagacatatttcaaagttatttaaaactacccctatcatctcattaaggggaaatcacagccccactctgaagaagctcttgaaaacgataacttcatctttcttcggctctgggatagtctcttctccagcaaattgaataagcttactctcagcctctccaaaatagcccactttcatcatcataggcatgtcatcttcagtcacagtagattttttcaaaatctagatgactaggcttcgttgggatcagaatgctatagtcttcttcactctcttcaacattttcaccttcaaccacagtctgttcagttttggcattaaaagcaccttcgtcgcccacaaccagacctgatcgtttcattacttctaaaattggtgccgtttcaatagcctcggtttcgtccccctc

SEQ ID NO: 107401 - DNA, 699 bp, Zea Mays
gacagacttcttctcctgcttgtaggactgcaaatcaatcttcattttctccaggaaggtgaccgggtagaatctcctttcaaactgcctgatgaaggcatcctaagacaggactcttggtgaggagtgcgctgcctgcacgcctctccaccaaatttgagcctctccattcagcagctgtgtgccaaagcgaacccgatctccatacacaatctcgaagacattcatcttatcctctgtgtaagttagccaatctgccgcctcgaccgaagtaccactgccatcaaaagaatccaacttcatgcccatccactgcatcagagaaagaccactaactggaagaggcacctcggccccgccacctggagtagcaccctcagggacagcacccccaggcactcctccaccactagcaccctgagcagcatctgcagaggcaacaggaatagcttgcctcagaatggccaactcctgctacatggcctgcatcgcggctaacattgccgccggactcatcgagtccccactaggaacttgcggactaccccgagccctacgaggcggcatagctgcagccacagggttgagaataataagtaaataagatgggcatagcatctcttcagataatgtcaaactagctcagacaataacataacatatcaatagtaaagcagaaaacccatcctacatgtgcag

SEQ ID NO: 107402 - DNA, 477 bp, Zea Mays
accaagtatagagcctatcagaaagatcaagatcaatgagaccatgcatttcaataatcgaattaaagagagcactccatctacaaagaatcccaggtttattcttttcttcattagttctaatgatattgaaatcaccaccaaaaatggtcgggcctttacaatttgagcagacagaagagaactcactgagaaatctacttctattttcagcttgagccgcgccataaatgttgacaaaactaaaagtgacatttttagtcttatgatgaatcaaacaattaatcataaactcactaatgtcctgactaatgatattaaaaatatcggagttaaatccaaccagaagcccaccagatctacctctggggggagaagaaatccagataaattttttttgaggattcagagcctcaaaccacctttgatcaaattcctttcttttggtctcttgaagaccaataaagtctactttat

SEQ ID NO: 107403 - DNA, 476 bp, Zea Mays
gcaatatttggagaggccccatcaaacacacagcgattgtggtgattccacaatatccaagcacccaaaataatcatggaattgagtccttttttctaatgagaacacccactttgctaggagttgtttcccaccaatcttcaaaggatttatcatccgactgaggagtgagagcctgcagcccagcccttcgcaacagattaaaccaaaactctcgagcgaagacacactccaacaataggtggttaatggtttcctccgcttgatcacagtctggacagcttgtaggatgtgggagatttctttttgctaattgatcagctgtccaacacctatcccgaattaccagccacataaagaacctacatttaccatggggccaaagatttccaaatcctttcccatgacctgaagatcacccctccctgaaatagatttcataagccgattttgcggagtactagccatcacaagac

SEQ ID NO: 107404 - DNA, 361 bp, Zea Mays
cggggcgtagatcttagatcctggggttagggttgcataccggttcggtataagttaaaactaatctgagcgctccgtttgagatcggacggtctggggcgcacgataccccttcgcgacacatttttattaaagagcccttatttttccccgaaaacaacccgcagtccacgtagctgtgatctgtgtcttggggaaaactctggtttagcccctgatctttctgaaaatagacgcccagtcctgagatgattaaaaacagagaattaattatagaaattcgtttttaatacaaaaacaaatatagaaacttgtaaaatgcatagaaaatccatttttagtccaaatcactccattccag

SEQ ID NO: 107405 - DNA, 700 bp, Zea Mays
atgaagtgggccaccttggtgagacagtctattattacccagatagagtcattccctttttgcgtccggggcagtccggttacaaaatccatgcctatttcctcccacttccatttaggcactgggaggggttgcagtaggcctgcaggtttctggtgttcggcctttgttcgttggcaggtgtcacactgggccacatactgtgctatctctttcttcatccctctccaccagtatctggctttgaggtctaggtacatcttggtggttcctaggtggatggagtaagctgagttgtgagcttcattgagcaggacttcccgtgcctccccttttggtacacacagacggttcttgaaccaaagaactccttgttcatctgccctaaggtccggaagttgctctttgcgagctttttccataagtcttgttgtctctgtgtccaggcgttgagccttgcatatgaggtcttctagcattggcttgacttctaggctaccgttgtttcccagacatgcatttagctgagctgattccttcctccaatgttctaaaaagttggttccttttaacccgaagggttttcgactgagggcatctgctaccacgatggccttttcggggtggtaatggatctcgaggtcataatctttgatcagttcaagccatcttctttgacggaggttgaggtctagctaag

SEQ ID NO: 107406 - DNA, 309 bp, Zea Mays
atcattgcctttgtgggagacgaggtaccctagaaccttgccctttcggatgccgaaaacacatttttctaggttgagacggagtctaccgtctctcgtgcttgcaaatgttcctatgaggtctactaggtggttctatttgtttttgctagccggacaatgtcaacgacatacatgaagatattgtgaccaacttgttttttctagaatagactttgtcagtctagaaaaggtagagcccacatttttaggccttcgaccatacgtacgaagtttgcttaattagtcaacacattctatgtgtattgg

SEQ ID NO: 107407 - DNA, 295 bp, Zea Mays
gttttttttaactgacatgactacatgagttgatgatttggtatgttgaagattgaatcctgatcattgaggctggcagattagaagagagggaatcaaatgaagttgtcagatagcacagtcatgctatggtccatggtccatgttgtagtgctagtagattcagccatctagtacgatataaatttatagtagtcgttgacactgatttggatcacagactagtaagagttagtacatctctgatcgacacacaccttgaacacgaggaacatagtggatcgttgaaatcgat

SEQ ID NO: 107408 - DNA, 374 bp, Zea Mays
ctagtctgcccctactctctttgctaaagtattcaacagcttcatcctcccttgctgctgacacctgtggaagcgacataactccaaaatcttacgggggaccttctgtccatccgccaaactatgtgcgcatacaagtccaatgcaaggttgtggtcatagcgcctgcgccccaacaaacgtctgcatgaacaatggtgcactgttctcaacaacgattcatgtccccgcatgttcggttcctcagggagaaccctacgagccccgtgtttcctctctcactctctatgcgatgtattgttctataaacccatgttgtactgctagccgctttcgccggccgataatggaaatttcatgtgggcgaccctctc

SEQ ID NO: 107409 - DNA, 384 bp, Zea Mays
atttgagcctttatccttttcttgcttaggcaaatgtttgatagcattttgcattatgtgaaaggtgcataacccatgccatgcctcatgaaacacttgctcaacagcctttcccatagcaaaatcttggtccgtgtagaatgttttaggttgctttccattatgtgcttttagaaaggtctcaaatatccacttgaaagactcaaatgtctcgtcgtacattagagcagcaccgaagattactgtttctctgaactgattgaatccaacaaaaacaccaaaaggtcgactctctctatttgtcccaaatgtggtgtcaaaggaaacaacatcaccaaaatgtgtgtaatcaacaaccattttagcatcagcccaaaatatgtt

SEQ ID NO: 107410 - DNA, 425 bp, Zea Mays
attacgagaacatgaatttggaatcccgacccactcttgtgattgttgtcctaagtaaatattattagaacttgacgacaacaatattgacgcaaaattaaatcggatcgagataactagaaccgaactgagtattcataattaatctgtttcactgtctacaactgtggaaatttgtctggtccgtaaaatacctcccattgtaagcgcagtccataaacatcaaaatttatattattttgattggtctgattgcgtctcgtccagatctaagtattcggatatatataactatacacaaattatcgtactgtgagaatattcaccaaatcgaacgcaatctaaaatagcgttgttgatattaatctgatctcatatgtttgaatcttgcccacatccaaatccctaaacaccaatacgtatgt

SEQ ID NO: 107411 - DNA, 427 bp, Zea Mays
ttgggacaacgtatatggcatagatgaagaatatggacgatgcaatgaccaatagctttgttgagctgaggcaaacctttcacccaaacgtcttgtacttgctttttttcttgtgtttgcctttgctccacttcttccaaaagcatcatccttacctggaccttgagaactctcattagatgcccacatcatgcctcccatctccagctcttgtgcactgagtttttctagcctcttgtgctagattgataatccgagtgggcttctcggttgtttgggcatattgggcttcttaagttcaaatttagtacctgtactatcgttagctgatttctctattgtttgggtactgctagccgaagtatctaatacttcctccggctctgtaatgcatgaatttagatctgaacttttggcttttctatta

SEQ ID NO: 107412 - DNA, 349 bp, Zea Mays
tgtttttgattctgcacatgtgaactaaacaaggtttttttaggttatcacagcatataaaacagttcataaagtcagaccatacacaaagcttaactaacacatgttttgccaggcactctctatctcagtccctctttcaaacttcagtctacataaatgcaaattgtatgaatgtatgattagtattttaggacagggggtaaataagttgttactgatctttactcgatttcacttaaacagaacaaggagctgataagcagcgcaaacagccgtttcaataattgacatgctactgagaacaacgatcattttcttgtttagttcaactgaatatttatgcaaa

SEQ ID NO: 107413 - DNA, 757 bp, Zea Mays
aacatgatgatattctttattaggaatgacaacatatgatggctaaggagattgttgttcttgagcacactgtcacatgagagttggtcccttgtccaccacatgttcgtcctatcactcgtaagtgggtctataaggttaagactcactttgatgggtcccttgagcgctataaggctcgactagtcgctcaacaagagcatggtcgacattacaatgacttttgcacctgttgctcatatgaccattgttcaaattactcttcttattgaggtgtttgttcataagtggtccatctcttagcttgatgtgaagaattcatttcttaatggcgagctgtgtgaggagatgtatttacagccaccacctaggtattctattcctaagggcatggtttgtcatcttcatcgctctcttttatggcctcaagtaggctacacgttcttggtttcagtgttttgcttctgtggtcaccgtcgctgttttttctgctagtactcatgatcctgcgctgtttgtgaatacttcctctcgaggtcggactcttctccttctttatgttgatggtatgctcatcactggatatgatccatagtatgtcacgtttgttaaggcacaccttagtgagcaatttctcatgtctgatcttggtcctctccattactttcgtgagatagaggtttcctctttgtctgagggtctttatctatcttaagagaagtacatttaggatcttcatcgggttgctattactgac

SEQ ID NO: 107414 - DNA, 322 bp, Zea Mays
tatgatgatctaggcatcaatgagttcaatagaatcaagaatctcaaaactactcatgagatttggaccaagctagtggaattttatgaaggaaccacaattttgaagagtgccaaactatatgtgtgcaaagagaaatttaagcaatttatcatgaaggaagatgaaagtgtatccgacatgttcaaccgttaaatgagatagtaaatgagctcaagggacttagtcttgatgtaccggatgtggattttacgcataagttccttagatcccttctaaagaaatatgaaactattgtaaccatgctagtgagaagtgattt

SEQ ID NO: 107415 - DNA, 363 bp, Zea Mays
attctctgggcatccgatggcttctaacttcctttttatcgtgcgcagccagtcatcagcatcgaggggattgttggatccagcgaatgtgggaggcttgagcctcagaaaatctcccatcctgtcctgtggtcttccaccattcgggcgctaattctccagacttctagtgaggacctcaatgagtcgggtttggttggctagaacttgggctaaatctaatggcagttccggaggtgcggggaggtgggtctcactccttctccaccggcttctccttcagctcctaggggaaaccctgctccaatcccggaggcggtaggcgtggttttatccgaagccatctgccagggggagagagtt

SEQ ID NO: 107416 - DNA, 333 bp, Zea Mays
tacatgcagaagaaattcagatcaaagttatgagcacttctaacaattctagctcacagaactttcgtggttccatgaacacatccatgtcttgttaaaccataaaatcataaatgatagcattaaattactaaaattactcacgtgaccaacatggacaagatgaactacttcccagggtataacattgcctgtcatatccaggactaatggattactgttataacgaggaaaaaagttgtacatgatggtactataatttaggccatagcaaacgacattttgtactgaaagtataaccaatggctagagtaattataacattcattttct

SEQ ID NO: 107417 - DNA, 609 bp, Zea Mays
ttgtaagggccttgtggtcatttctgcaggagattcgcaaagacaactctagcgaaatagtggcttgttaaagtgccctcttagtgtgattcttcatgacaccttgtgtaggacttggcttattacgtgaccaaacatgtgaatcatttaagggtagattggccattacgaggacataggttactagcaagtaatcgaaccttagaaaaatattgtgtctaccaattacctcatgtggtttatacttcaaatacccttgctattacatactataaaattttatgttacttattacgctttcgtatataattttttccttaattcttacaataagttttgttggcgaaattcttttaaaaactattcacctcattctagtagcatctagggcaagccatcaaaggacacttggagctcattttcgtgcacgtgctcggtctagctccttgccctcatttgccctctttatcctccctcacctcgcgtcgtcacttttcctctccacgcgaccaccaaccacccacttctcaaatgcgagaggtgagaccaccgaagctccttcctcctgacttagctatacttagcaaatcatgcatatggtaatataaa

SEQ ID NO: 107418 - DNA, 398 bp, Zea Mays
gttgagacgaagcttgccacatccgaacaaggggccgaagaagtacctccaaatactgatatagcttttgagagaaatatgggcaaagaagccgaatcccctgctcccgaagcaccttctgaatatcctgattatatcattcgacatgcttcgggaaaaagattatctaaggaagaaatttttgaagctaaacactatgcccgagaactgaagtacccgaaaggggtcccagtgtttaatggtacggatgaagatgacttcttgtattgcctcccagacaacaaagaattatccgtctgtcgggagatggccagaagtatgggctttccgaagctcgaagttggcctctgcgccatgacgaaggacgatcttgcggatagccttgcatacaacagtat

SEQ ID NO: 107419 - DNA, 340 bp, Zea Mays
ggttagtgagcctctttctttccaaagttaaaccactatcttttatgtaaggacatgacttaatctcatgtcccttctcatgacattgataacactttctagtgcatcttctcttatttggaagagtggcttgtttgttaccttgtgtggagcatgtggaggcatggttgaggcacttgtcatgagctttggctttcttctcttgatgtttgctcatgcctttcttagggaacttagcattattttgaagtgggtttgtgcatgctacggttgtccccttctcaagcttcttcaccatgttatcacggttatcgtgagaaggttgagcatgacactttcc

SEQ ID NO: 107420 - DNA, 344 bp, Zea Mays
attcacaactcagttcagaaactaccacattcccactggattgatgaagatcaagaaggagtttctatcattgaagcaaggcaacatgtctatcagcgagtaccgtgacaaattcatccagatgttaagatatgctcctgatgaggtggtagatgatgaaaggaagcaagagcactttacagaaggactcaacgggctcctacagtatgcactggttgctcacacatttccatcatttcagagcctgctggataaggctcttgctattgaacacaagcgtgttcaattgggagatttgaagaggaaggccattacccaggggcagggtagcagtagtgttcgtc

SEQ ID NO: 107421 - DNA, 1030 bp, Zea Mays
gtttcgaactagcaccgatgagtaaatttgtgtatgcacgttttaggctcggatagtttgctcagtgtgtgcaaaaattatattggttgggcgaaatatccctactcttgtctttaatggttcacactactggtacctgatttcttgtagtagaggttacaagtggacgagagagtgagaaatcccaagtcgctatatgttgtttcactctcttaggttcttctttgttgcctcggggtcatggggttgtggtgcttgttatgtcttcttcttctgttcgggtcccgggcggcgcaatcggttctgtctcgggtctctcatctctctatgaggtcggcctctccttttatagaccaaggagggggcggttatagatagcatcttctagaagttagcataacataagataaaagaaatgattcacactcaataaaatcttgtagtgtgttggtgtctttccccgcatgggccttctatcatatctctgagattgtcgggggtgggcgtgatccgtgccggtgatgaaagtccgagtgtcaccattacttgttttgtccgtgtctccccctacgtcgaccttccgccttttgtggcctcactgctggtttctctttaatctcggttaagggacataggacttgtagggacttaggcctaggatcggtagattatgagtgggggagaccgatactattcacgccgcatcccaccactaggcgtagttaatgaggcgtacctagagttgacggtgtggctaatctgacggacacgcaagatccactcgaatggggtttcgaccgattcgtttgaaccctttcacctgcctctgtctcatctaacctcttggcttgatgcaaggggtattagccctcgagcctttggaggaaagtaggtgttccatcggaggcttttcttagctcatggcctaaaggtggtcagggcgttttggtttcccatgcgcgttggatttaggcaactctcgcctagagtcggattaagtctttgcttaggtggcataagctttcacaac

SEQ ID NO: 107422 - DNA, 362 bp, Zea Mays
tctctatatcttctgctcgggcaatcatctgacggtggtgccgagccaataaatcatactgcgcatctagggtgagcaggtatgcagtgaggtacacgactgaggggtcgtcctcaagcagctgctgcccttccaatgcacgcatcctggccatccacacaggacggtttctctgaaagggtggaaagaatctgagcagcgtgtcggccacttcttcttcataaatctgacacagggccctcaatgccttacgagcgacgacttggctggtgtctttgaatctgtgccccgcagcagtgacactccattccacatggtgcggactggatccaatgtatacagtcacgacacacttctctgtg

SEQ ID NO: 107423 - DNA, 361 bp, Zea Mays
attaaattgtatagtgggtactcggacacgccgattaggttgcgttggtaatcggctgagttatgacattagctgaatattgactgcgccttggcaacacgacgcagtatttgtgccgttcgaacttcgctgtgtcatgtgattgctatgtcgcgctctcgctaaatcggatcgctcccgttgagtcggagcgccatcgccgagtcacacatttttcgtgggccctgaaggcattgcatgtgtgtcgtaactattgagtcacagttgcgcttgttgcgcctgttgtgcctattgcgcgtatttatcgtgtaccccaactaccaagccacaactgcgtctgttgcactggttacaaaggttt

SEQ ID NO: 107424 - DNA, 856 bp, Zea Mays
gtgaaatgtttctgcagcatgcatgaacttgcatatgagacgaaggccatgggcaaggaataatatcacaataactttggctgttatggatttactgcccgccccaacgcaagttatccagtgccaacataccgaaaaaggtggcctagagcctggatggaggaatggttttacgtgaagaaagacttgaaggcaagagaaggtatcaaagaagttattatgcgccccatttggtcccgcttcggccttcgaaggccaaaggttaagattgacgaagctgccgaagcatgtcaaaaagcttttggtactgtctgtttttttattggtacaagagatttaatccaggagcatatagcatttagagtatggccacttgtagagaactgggaaatgctgaaggaaactgtcaccaagtctggcaaaggtgagctggttcgactgaaatacaccttcaggtacagagataaatttgatgaactgaatgatgactggataaaatgtatcgaagctacaagtgatgaactgcttgggctgtattccaaagcagaagataatgcattatccgaatcctttggtggccggggaaaaaagagattgaatagagttttcgatgccattggttttgtttaccccgactactgctacccgctgcggggatggggaaagaaaaggaaaactgctgcttcggccactccagatgagcctgcgccgaagagcaagaagttgaaggtccttacccaccggccatgttatattgagccggccgtggtgcctgagttttgcggggagacatcttcagctattgaaccaaatgagcccattcctcctacgtataaggttgaagattcgactataa

SEQ ID NO: 107425 - DNA, 427 bp, Zea Mays
cacatcaatatcttctagtctggtagcttctgcttcagctatgctttcgaagaccagccttggtgccccaaacctgaggtcggcaggtagcactacctccaaaccatagaccatgaagaagggggtgtttccatgcagagctcgactgggttgagttcttaggctccaaaccacataaggcaactctctgatccactgtcctgcgaacttttcattcttgtcgaagactttcttcctgagtgcttccagtatcatcccattagccctttctacctgaccattagctcttggatgtgctactgatgcatatttgatctggatgctccgttgctcgcagaaatcaaagaattcagagctagtgaagttggatcctaggtcagttatgatgctattcggtatcccaaacctgaatattatgtcttgtatg

SEQ ID NO: 107426 - DNA, 285 bp, Zea Mays
tagcttgtccttctctaacagcagattgattaacaagcttgtttccccttttgcagtgctgcagctcggctacaaccagctcacatggagcattccaacccagctgggccacctaaacaagctcactattctcgcccttcagttcaaccagctcagcgacgcgatcccggcatccctcggggacttgtcggcgctggcacggctagacttgagctccaaccaactcttcggctcaatcccctccaagctcgctgagatccctcgtcttgcaacgctagacctccg

SEQ ID NO: 107427 - DNA, 505 bp, Zea Mays
cttaggagataattaggggggtttaggagttttagggtttctaacctggggatcaaaattgggatgttacaaacctaccccacttaaaagaatctcgccctcaagattcagactgggcttgagaaatggtaagggtattccctcctcaaggagtcctcactttcccaggtagcctcctcttctccttctttgctccactgaactttacagagtttcacttctgagtttcgggtctttcggatggctgaatcaagaatcttcactggcttttcttggtactgcagatccttctgaatctgaattgcctcttcttcgatgtgactttctggcacttgcaggcatttgcggagctgggatacgtgaaacacattgtggatatctgacatggattctggcaattcaaggcggtaggctgcgggtcctattctgccaatgataggataggggccaacaaatcgcggagctagtttccctttcacttggaatcttttgactccacgcatcg

SEQ ID NO: 107428 - DNA, 452 bp, Zea Mays
cgagatttaggaagaacaagggaaaagatggggaaaatctatgcagagcccttcttctctttcccaggtcgcttcatcttctccgtggtgactccattgcactttgcacatctttatcaccttatttcttgtaactcgagtcaatgtgtcaagaatcttgattggatactccatgtaagtcaaatcaccctgaacactgagctcttccatcggtaactgttcctcagggacacggagacacttcttgagttgagatacgtgaaacacattatgcacatctgatagactagcaggtaactcgagttggtatgccatctccccaactcgcctaaagatcaagaatggtccaatatagcgaggggacaatttgcccttgactttgaatctcctcattccacgaagtggtgacactttgagatacacataatctccttcttcaaattccagtggtc

SEQ ID NO: 107429 - DNA, 326 bp, Zea Mays
cttttccaagagaatacattgcagcggggtcgcagtccatcgagtccatcgttttctcaaggcacgcggattctgcccacgtcgccgtcgcaagtcggaacgagccagcacaacaccgcgttgcttgtcgacttcaatcgagcgtggccgtcatcgttgcgtgagcctattatccatgatccatgcgtttgcagcggtagttgaccggttgctgtataggaaacccgattgggctaacaccagacgtctccgcgttctcatatacgtacagagaaatccaggttttttttagctcacaacagcgtgtgacctacgcggatcatatc

SEQ ID NO: 107430 - DNA, 410 bp, Zea Mays
ctatcaagcacagcgctctggacaacaaagtcagaggaacaatcaataccagaaccagcagagaagcaacacccagactggccaaaggtctagtgggcaacagcagaatcgtcagggaagcaccgtgaacacatcggccaagaacaacaatgcaactaccccagttcaacccaatggctgtttcaagtgtggcagacttggccactatgccaacaactgccccaggcataacccatagacaccccagaagaacagcaaccagaggactgaccagaacacacctgctcgtggatctgcacagaacaagactccacagaaccagagtagaggaagagtcaaccatgtggcagcggaatcagttcctgaggatgccgacgtggtgtatggtatgtttcttattaactccatac

SEQ ID NO: 107431 - DNA, 851 bp, Zea Mays
ggttttcagctgaaggtgtaaatttcgaagagctagctccgacagagtgaaacacgtccttcagccgctgcacacatcggatgccgaagcttaagcatttctcctgaagttctgtaaaggatttctgcaaatttgagtatttatccacttcattcttcaggctcgcttcaaaatatttcttttcttgcccgaatttttctgattgacggagcaattcattctttaatttatcattttcagtttggacttcagccaaagagccttccatggtctgaataataaaatccttcttttctagtgcaccttcgtgctctttgaccatgatttcaagattttgaattgcgaagtttttctttttcagattggcttcatgattttcaactttttcagccaaatcttgaatgacggttttgtttttctcttcctccagatcttgttgcatcttcagaaccttgcttaataatatgctctgtcgaaatgatcttcgtcagaactcgacccaaaaagttaataataatagtaataaaaaaataaaaatattcgttaccttgaagttagcataaagcaaacttccggcgatgtgttgtcgttggtaacggcataagtccgcttccagcttcggcaagccaatgtttttggaaagggttctaacaattttggcttcagtgcggttccgaaggcatcttaatttcccttcgttgaccccaccgaaaagcatagcccctgatttgtatccgcaagatatggaacattttttcaactcctctttttcggcgtccgttaattcttgtccgagcaaatcttgaaagttaaaatcttcttcttctgaaatttcatcaatttgctctttc

SEQ ID NO: 107432 - DNA, 353 bp, Zea Mays
attaagtataggcgtcctccaatcacttgcatcggctttattatcagccgattcaattaagagaacatttctagtaaccccggacggtccggcgtctcgacgcggacgatccgcaacctagggaattggccctacgccggttatcagattttcagtgtcgtggaatctccctcgctttatccgataacctgatgcatcttgtgccagattgttagctctatgattctcaactctcgaaatatgatgaatactgaattcttcaaaagaatggattatgctccaacatttttcaaggtaactattcagagtaccatcaaagcattgatattgttctaacacttgttggacgacca

SEQ ID NO: 107433 - DNA, 590 bp, Zea Mays
gccctagacagctcttttttctcagagctgtcctgaactcttttgcaacttcgacggggttgaaggtgaactacaacaaatcaagtatgtaccctatcaatgtcagtcctactaaaatggcgatccttgcaggaactctcaactgtcagataggttcaatgccctttacctatcttggtgttccgcttggtctatcaaagcctaaaatctgtcacttttaccgctcattcataggattcaaaagagattatcatgcacctctgccctcctctcccaggttggcaggcttgagcttgttaactcggtattttcagctctcccgacctttttgatgtgtactctgaaaatcccggttaccacggtaaagaagattgattcttatcggaaacactgtctttggagaggaaacgacgtcaattcaaagaaacctgctctagctgcttggagtatgattacacagactaaaaaaatgggggcctgggagtggtaagattagagactcacaataaagccttgcttctgaagtttttgcacaagtttttcaacaatcatgatattccctgggttaacctggtttggagcaactatta

SEQ ID NO: 107434 - DNA, 965 bp, Zea Mays
cgacgcggcatgcagtggcatcgcaggcgcagccgggtggatcccgatcggcggcagcagcagagtgaaatggggggccagtacagtacacctccgtacagatgcctgcatgggcggtttattaattcagaccatgtaattaatgtccatcactcatgcaagcagagggggtaactagtagtatggcagtgaaagagggatgaaatgcatggactttatctactgtgttggtcaacctgaaggtgtggcaagattacgatggcatctttgcagtaaccaaatgacgatgtgaggaggtcgtgagggtaaatccgatctcgtaatctatcgggtatgcatggtatatggaggaaatgagggatgatctgtgtttgtttttcccttggtgtgtgcgcgcgtgtgtgtgtgtttttcccctctgggagatgagctctgacgaacaccaccgcaccaccgttctctgctgccagtgttactagctgtgatgagaaacctgtcgggatttatttcggctctcgtacgcgtgcaattgattccgcgaccagacagtgtttatatatggtgcacgttgtgcatgtgatccggggattatgaaattatgcggcagccgcacagccccccctcctctgcacttgcaggacggcagggacgagtgtttattgtttttctatgcactctgacccggcctctttttactcgatctgcgagcgataactttgtggttttagcgatcaataaatatatgtgtgtttggagtgagagcattattagtttattactccactcattaatttctgatgagtaaccttgtatatatatgcgccatccgatccattctgtaattgggattgtaattcggttactttagctttgtaccaataagtcaaattcctcaaattggctgggggtacgtatctggcacaactcgtagccaaatctcttggaagagctgctggtaattagta

SEQ ID NO: 107435 - DNA, 456 bp, Zea Mays
agggtccagcaatcccctcgatgcagatgattggcttcgcacgatcaagaggaaactggaagccatcggatgccctgaaaaccagcgtgtccaactggctgctcatcagctttcgggaatggcattagcatggtggaacaccttcagcgaggccgtcagagatgctacctgggcagaatttgaaacagccttccgtgagcaccatgtaccccaggggatagttcagctcaaggaggatgaattccaggagctaactcaaggtgggagaacagtcagtgagtatgtgcacaagttcacagagttggcccgttacgcgcctgacgatgtcagcaccgagtccagaaatatggcccgttttctgaaaggactaagacccaagcttaagaccatccttgccagccaagacttcctcaacttttctcacctctccaacaaagccatccaagtggaaagggc

SEQ ID NO: 107436 - DNA, 394 bp, Zea Mays
gtcatctaaaatgtgaatttaccttacgtgttgtatatttgtggtcaattcatgatttgcctgcatatggtatttggtctggctggtgtgtccacggtcgactgtgttgtcccatatgcatgggggacacacaagcatatcgattggagcatggtaaaaaggtctcattctttgattgtcatcgacggtttcttccatccaatcacccgtttcgaaatgatacgaagtcatttagaagaggcataaaagttaaagatggtccaccaaaacgtttaatgggtgaagatatccttatacaacatcgtgcccttcaaagggctgcagaaggtcatgagtttgaaggctatggtcaagatcacaactggactcatatttcttttctctgggaactttc

SEQ ID NO: 107437 - DNA, 370 bp, Zea Mays
tgtaacatgtttctcatatttttaaattgcatgtaatagattcatgtaacagtgtagaaaagaataggaaaggaaggggtatcactagattggatgaaatatttgcaaagaagcgcaacatgcctaaaatcaaagtagaactcaataaatatggttagcctattggggacaattgtagaaggttttctagtgctcttggctgccatgtgagaaggaaattatcagttggttgttctgactggagacttgtggatcctcaaaagaagtatgaagtgtgggaagatatgaaggtatatcattatccttctttgatgagtagtacattattacccacatatacaaccaattggctacttttgcatgaaaaatt

SEQ ID NO: 107438 - DNA, 375 bp, Zea Mays
agcgacaccgcgatgcattctgttccgtcgatggttcttctggggtcgggaacacgtctcccactccctactgttgagtctccatctctgacacacatcgcgacaactagcacacgcggcggctggtctttgtggggtggtaatggaacagggcaaggcacatcgattatacttaaccccctagctgactgcgagagactcggagattagttgcaaggtggcccccccaagagttagtttgagcggtgcttggatcttgcatgagaattcggggccggttccgcggtccaagctaatcacccgcttgtccacaaattggggctagctagacggtctgactggtcagtgttcgaggcgggagctgcgcgggcgagc

SEQ ID NO: 107439 - DNA, 272 bp, Zea Mays
gtcgttttcgcgtttgttacgcttcgtccggctgtgccctcgggcaactgttgtgctagtccggctgcacccttaggcgacttctgcgcggatagtcttcgcggtagacttcggttttttgcacttgttgtgctagtccggctgcacccttaggcgacttctgcgcgaatttgtcacacgcgagggtagctagcgctgagcctcgcggtgactttgtattggtcgaatgtcgaagaccgtcgtcgcggtcttttttcgacgcatgtttttgc

SEQ ID NO: 107440 - DNA, 459 bp, Zea Mays
tgactagcttattacagtcgagggagaaggaaattggaaaagatgctgaaggtgggagcataagggttccttcggcgaccagggtaagtgttaagaaaaaacggcatatgatggccgtcatgaggactgtacacaagacaaccccaccggtcgcaacagaaaagattgttcctctcgctgctgccgaagctactgaagcagagcctgaagccaaaaacattggagtcccgctcaggaccacgctatcagagatcggcagaattatagctaatgtggttcccgagagggaaatgggtgaatacattgttgtcgaggctgcgacttcgtagatgaagaaaagtgaagaaacttcttcgaagagcaaggcttttaatttacgacacctgggtggccagcaactccctaaagaagacatttctgagttaagagagtttgctattgcaggtagctagcagcccg

SEQ ID NO: 107441 - DNA, 545 bp, Zea Mays
atagtgtgaaccccaaagtgtgtcaccagctctctgaagagtttgatcttgatttaaccctttgtcagtgataagttgtccacttccaatggcctttgttacatcatcacaatgtttctctctgatcatatcttttcttttgcaagaacctccaaccacattgaataaaatagagatcatataaaaaaatctgcaacatctccatgcttctttgctactgccacaataaccaactggagctgatgagcaaaacaatgcacataatatgttgatttatccgcttgcaaaatcttagctttcaagccattaaactcaccacgcatgttgcttgccccatcataacattgacccctgacttgttttatgcttaacccaatatcagtgaataatttttgaagagcttccatgagacatattgctgatgtttctttcacatgtacaactccaactaaactttcaatgataagtccttgcttgttgagatatcctaacacaattgcaatttgctctttatcagacacatctgcagcctcatcaattaataa

SEQ ID NO: 107442 - DNA, 689 bp, Zea Mays
tttacagccgtcaagaaaatgctcctcgacgacaagaaaggcaaatgggccgacctgttacctgaagcggtctgggcgctgaacacgactgagtgcagggcgactgggttcacccctttccaccttctatatggatcggaggccatgaccccgcaagagataaaacatgggtcaccacggacagtcacgccagccgtccccgatgtagacgagcctacttcgaaggacctcatagaatggagaaagtgttttagccatacaggctctaaacatataccaagctcaaacaaaagcatggcgcgaccacacagtcatcctgagggaattcagcgaaggagacctcgtactcgtccggacagctcggacaaagtccctgggcaagctagagccaaagtgggagggccctttcatcgtcaagacgaaggcgtcccccagcgcgtacaggctaacaacacaatctggcgaagacctagaacattcctggaacatagacaaccttcgcaaattttttgtttgactccacaggggcaactcgcccttgtaattccccaaatagttctattccggcccgcactcttttccccccggggggtgaggtttttaatgaggcggagccatgtaatatacacgcaaaaaatcccccgcaaaaaattacaacgtcgaaaaaagaccgcatcgacggtcttcgg

SEQ ID NO: 107443 - DNA, 528 bp, Zea Mays
gacctgtagagagctggccacagcgagctcacacacggcggggttcttgactgatttgggggaaatcccaaattggggagctatgggggacaattggaggtgagggctggttcactgggtgcacgattacttagcggagcaggctggggcaccaatttatagtgtccaagggcggtggctcctaattttggcatggtgtgctagcggctggagagaaagaaggtcactggtggctcagtcgtggcgttcaccggtgcagcggttctgagatggtaagcctaggcttgccacagttactactgcgcagtaaagagccacggcgtggcataattggggtcgccggagttccacgacgacaccgacggtccggccacgtcgcacggctacaggcgcggttgataagcttcaccccgcgaccaaatccgctccccctccgatcttttcaccccccggtactatcctgcccgagtcctacacaaatcaccgcgatcagcgcgaatccttgcgcagaggtcaccggcggcgagg

SEQ ID NO: 107444 - DNA, 353 bp, Zea Mays
caagaatctagccagacacatgtggtggcataaagaaggcatacgtgagaatcccgatgtcatggcgcacccagctgatacaaatgcatggaaggcactagattcctttgattctagctttgctgacgaagtgcaaaatgttcgctttggtttggcaacatatggtttctcgcctttcaatctaactacaccgtcctactcatgctggctcgtctttgctgttccatacaacctaccgtaacctctttgcatgaaatatgaatttattttcttgtgtcttgtaatacctggtccagatcatcttggaacaaagatcgatgtgatgatgagaaattaacatattaataatccac

SEQ ID NO: 107445 - DNA, 494 bp, Zea Mays
gtttttgtgagatgggacacaaatggactgttatgaacttgcaaatgaattgttacctgcaaggaaaaatcaacttcgttactactgtaacttgccatgaagcttaagctgaggactgtaatctatcagttgagcacctctacacagtcatgttgacttgcgccagagcaaaaatttatgcacagtgtctctgctttcaagcgatattgttttcagttaacacctatacgtactatcaactcatagaaaagttaggcctcagctgtggttactagtcaatacatcaacggttgtaacatgtagtacatgtctggtaaatatggcgacatagtaagtataaacagaagttgttcttataaacctgagatctttttgttcatcttgaacgcatcgcctattcttgacttcttgtaaaccaacagaaatctgttgccttttggcgcctcttattattatataaacagaagctgaaacccgggggtcgcgctggtgat

SEQ ID NO: 107446 - DNA, 526 bp, Zea Mays
aaccgaagaggaaaagtccaaagaaaatgggaaaaacatccaaaatcactagatagtatttatgaccagatagatcgagtacatgggaggtccagagacacaatgaaccaggtcaaaagcctgctcatcccgagaagtaaatgggagacgagtatgttggcctaactgacaagcattacagagaccctcaaaatgttccctactacatgaagaatctaaactactggtaatcttggtcatgacgtcggatcctggatggccgagacgacaatgccaagtggtagaggaggtggtggaggccaggacgggaggcggagacgcgccggtggtcgaaggccggagcgtgtagagaggtctcgagctgtcacaacgaacgagggggtcctggtggctaaatccttcatagaaaaaccagaaatttcaaactcaatggaacaagagttgtctgtggtgaaccgacgaacagaaacaagattatgagtgatatgtggggctacgagaacgtcgttgagatagaacgacccag

SEQ ID NO: 107447 - DNA, 596 bp, Zea Mays
cagggggaatgtccaacaaaaatgagtaaaatcatcaagtatgacaaggtaatatttatagcccgaaatactcaaaactggagaggtccagatatcacaatgaacgagttcaaaaggtgtagatgtattagaaatagaactagtaaaaggtagcctagcatgttttcctagctggcaggcatggcaaatgcggcgagctgctttattacactgtatagctgaaagcttatttagggtttaacggcggctggtgctggatgaccgaggcgagcatgccacaactctggagcaacgacagcaacatggcagcgaggcggcagacgatgtggaatggtgtagagatccccgttgctattgcatcgaaggaggaccgttttggtttggagatccttaacagaaaaaccagaggcgtcaaactcaatggaacagttattgtcgcgagtaagctgtcgaacagataacaaattacgagcaagcttaggagcgacaagaacattattaagatgaaaataacgatcagctataggtaagagagatgtgccacgaccagatgaagggatggactgcccgttaccgaccgtaattgagcacggtgg

SEQ ID NO: 107448 - DNA, 983 bp, Zea Mays
cgagcttcactttggcttgcatacgcagtggatgttctacccacgtacacggcggaacccacgacgtcgaggccacgttcccaatcaatcaggcccgtaatggtcaaacggctgccacgatgagctcaacgggaatacagggctgctaaaacaatgattcataggcgcagaaccataccaggttcgcctggccacggaagggctatccacggcggcgcggagattcaatttgggggaaaccccgaattgcagcgctatggcggatgattggagatgagagtgggtgctttggcttggggataacctaatggagctcacagaggcatctatttatagagatcgaccgtgagcacgacaaatttgagcggcggatggctatcagtaagaaacaagatgagtcaccggcatggtgattcgttgccttcactgtagcggcctccccggcgatcatcggacatgcataatactggtgattgcgacatggtaattgctgaggcacgtggcattcggtcgacggcagccaactctggtgatgataatcttggccgaccgcgcggtaagtgggcatgacggccggaccagctagcgatcgaaacttatcccaccactgatcttttcatcgcgcccagtgttatccactcctcatcgagcacgaatctcccaggcgaaacccgattcccggcgcgagctcaccggcgatgggtgcactgcacctacaatcttcttcagaccactgttcattctgaatctcccttcgaagttgcctgacaacccatgtttgagccacaattactccctgctctaggcagtaacacacctaccttcctttgacaaagttgtactccaatatatggtctccaaccttgtcacagtgacccaagtcttaactccactggattagtcacaacttgactccaatgttgatccaatgtcactgatcatccaatttttagactgttttagtctgacagcccatctttggg

SEQ ID NO: 107449 - DNA, 515 bp, Zea Mays
agacatctcgccgtggccagtcatctacgggttagttcatgcccttttgtgtgatgttctagcctccctcaggtctcctgttgctcgtagacccgtttgattgaactagaccgcattaaatcgcctagaacaccatgatttgtctttggtattcatcgctaccgtggacggacgaactccgggccgtactagtgcaattagttgagggattagtgtcgctaagggtggaattaggtgtcggccaagttagggcgctggtcattgagtgtctcggccggtataggtttgccggaaggcgtgctcaccggcgatcaccatcggggacctgacgttgcgaagaaatagtactctgagggcctaactatgaatgtcagagacacaagtaaatagtgaaaatggttcttaactagttatccaaacagctagggtcctctgtgcaaagacgacatcgcgggcgcatttccctgttagtgggccgacccgggctggtttaagcccgttactattcattcctt

SEQ ID NO: 107450 - DNA, 387 bp, Zea Mays
cacgtagcgagttctggtgacatgtgagaccattggaccaagacatgtgcacatgcttgtagccctttcatcattgtgcggtgttgcagaatcttgatcggcacactaaaatgaaattggtcagtcgccaaagtcacagatgcagtgaaaccagtgcccaacgcacgcttaagctacgacacatgaaaaactgggtgaatgcgtgaagatgggggtaactacagcttatacgccactgtgcccacgcgctgcaacacttggaacggtccgaaaaacttgaacgccagcttctgatgtgctcgaacagccacgaacgactgaacatacggttaaagcttgagaaatacccaatcacccactgcgaactcacgctctgaacgacctttg

SEQ ID NO: 107451 - DNA, 481 bp, Zea Mays
ttgaggttcatattttgaaatatgatgtaggcataagctggttcattcgtggttaatcgtctttgatgagaattatatcatattagtatgattcattttgtattgatatatctcttttgcttctgcgatgcttataattttgtattgcttagtgtttggctgttggtagtgaagtcttgttgcctcttggggtgtttgtggatcccgggatgttacaatcaggttctggacggtccgagagacataacagactgtctgtggtttccaagacacggaccgtccggcgcccccctgcggatcatccgcgagtggagcatatctcgaccagaggcagaccgcaaccgtcacaattgcacttgaccacgaaccgtttctctctctccacacatttgagaacaccttgttgtttgcgcagttggagatttagtttcgagcgcggactgtccgggagaatccttgaagctcatcaacaatgtctttc

SEQ ID NO: 107452 - DNA, 485 bp, Zea Mays
ctccctacttatgttggtatttatttttatgcctaaaaatgatctccagggcttaactgtcaattcccaaggacttgtttgtaatttaaatattaaacagtggggccctattagagccgataggatggcgcgtcaatttgtaaataccccaaggtctctttaataaaagtggtcggctgacacaccgcaagcaccctagagccacatatctaatgatcgacgacccgaaatactccatgattcggtacgcattcttgaccactagatctgggatcgatgctcaaaattctaaagtcccaagatccaatatcacacatccgtgattcgatcgatggtccagatcgtccacgtgtaacgttgtaccttgatataatctcggtcgaacaaaacacgatcaacggcccctacattctctccctcccgtcgccgtcctgaggcggcggcgctagtgccaacgacggacaacatcgccggagagggccatc

SEQ ID NO: 107453 - DNA, 431 bp, Zea Mays
gcgagcatacattcaatacatttggaaacatataaatgaacagcacatcaaacatttacaatcattgacacataactcaaaaaggtatagtattaagtgtaggggaacgatatcaagttacaaagaaaatggagtaatcctaattggggaattgattactctctaaatgtttgggacatagctcaaaaaggttaagtagtgattaaaacaaaggaaagctagaattataatataaactactctcatttaggaatttgagtacattttaggtattatccataattacattcctaattctgtttatgttattaaggcctaaaggttaagtccaaaaataaatccaagtgatgcataacactaatctcacaagattgaatgtactttattcctagggttcttcttttatttatttcattaaataaataaatata

SEQ ID NO: 107454 - DNA, 1226 bp, Zea Mays
tgagctaccctggacccctgagacttgactaggactattagtctaaaactgagtaggtataggtgttgctgagaactgtggtgttgcactaggttgtggtgttaatgcagctggcgaggatggtgctgaaatggcattagtccctccgtttccaccctgttcctcataatttgagtcttcagtgtgtgtcagattcgttatatgattctgaaaatcaactttaaacatctcagttacatcacctgctagctgatcatcatatactttgttccaatcccattgttcagcttcctcaaacactagatctcgactgatacgcagctgtttagactgaggatacaccaacctatatcctttcgttccagcatcatatcccagaaacaccatcttgcaaggtctgtctgacaactttccttgccctggtcatactttcttcacatgagcaatacacccaaatgtcctcaggtgatcaactctgggtcttttcccatgccatgcttcatatggagttttcccatccaaacttttagttggtgacctatttagtaagtaaactgctgtattgattgcttctccccaatattttgaaggcacacctttgctcttgagcatgcacctgaccatctctaccacagactggtttcgacgctctaccactccattttgttgaggagaatagggagtagtagtgtagtgcttaatcccttgctcattgcagtatacagtgaaggcatttgagttgaactcaccacctccatctgttctcaaggccttaagtcttccactataatcaacttctgctcttagcttgatcttctgaaacgaagccaaagcctcatctttagtctttaataattccacccacatgtacctgctgtggtcatccaccactagtaggaaatataattttcccccaacagttggtggtctcacttgcccacacaaatcagcatgaaacaactcgaggcccttttgagctctaaatgttgatttccttgggaaaggtgttctatgttgtttcccaagagtacaaccatcacatacttgctctactcgatccacaattggcatcccttctaccatcttccttctaccaagatctcgcaaagctctgaagtttaaatgtccaaatctggcatgccacgtccaggctaaattattcatcttggacacaagacagactggagcaaccacacctagctttacagtgtatagtctgttgccag

SEQ ID NO: 107455 - DNA, 610 bp, Zea Mays
tttgaaagatttataatcaaattttagttttatactcataggactacatgtttttgtatactcgtaggtccatttggattaacacaagacccaggattatatatctattatctagctactcagtgatctaaaccctgaggtaaattcaaattagtttgaactctggtttgtggattgcaattgatgcgacatagctaaagtctatttgaatgtaattgaatgttgtaaatgtagacaacttcgagatgagcagcatagaagactcaggccacaacgacacgataattgatgatagctccatcatattccagcaagcgggtgtagcaacagttctagctacttttgcttctcgttcgtgtattgttgatcctatgattaatcctcctcctccggtgccgcacgtgacaggatgacaatgggtggaacacaatttcagggactttaggaagttttaagaaaatttttgtatgactccggatggttttatagaattgcatgatactttagtgaggtatcacaggttaaggtcaacacaagaggtggagtcatgtgaggcattagggatgttcttatgggcttgtgggacataacaggcgacacactaaattag

SEQ ID NO: 107456 - DNA, 396 bp, Zea Mays
ctcgagctactctgggtgtatgctcggaggggtcgttttcttggaactcatcctttgccgtggccatgggcaatcaaatcgaaaggtgtggatttgtgttctccgtcgcgctagccgctaggtccgactgatcccgttcatccagatgtggcttggcttggtccttcagcgcgcgagatggctctctgtgcccccacccaaaacaatatcagttcataacaactcccatggcccacgctaagttcatctgaccatctctgaacctgcccaagtcatgcttttcttcttttatttttgcgcacaagaatagtcaaacgctgttcactgggtacattggcgccttggatttgttcaaaatgtgtgattttgataaagaaaagaaatattggcctccaa

SEQ ID NO: 107457 - DNA, 838 bp, Zea Mays
ctaacgcagcagactgtgccgtcaatttatagcggcgctaagcggtggccagtgaatttggtttggcgtggtggcggtcggagaagaaaggagtcactggcgcacgagattagtggctgcaaccgtggcaacctcaccggcgatctctgtataggtcagtacgagtctcggcagcgtggataaagtgttaaggcacgtggcacaagaccgtgaggtgtctaactccggcgagggtcgattcaaggcgatcagggtagagcggacacggcggccggacaaacagtgccttaagctcatccgggggggggagaagatcttttcaccgtggaatgttatccgagcgccgatgagcacgaatcacctcaccggcgtgaatccacgcgcggggtcgctgacggccggttcactgaaccaatagattcttctggtcactgtatcatcagattcttcttcagtctgtctgacagaccatgtttggggcgaatttcctcctgactttatatggcaactagaccaatgcacgacagcaaagttgtagcctaatagaccaactctaactttgctatattgtgcacccacaaaaagtcacaaaatcttacttaaaattgagccctaagttcatccaatcttactgtcactctgaattcagacttagggcagtctgacagcccaactttgagctcattttactccaaatttttcatgtgaccaaggcttaatccctatagaaaagttgttctcctttagtagctttacaaacttgatgtgttgaccctaggcaaattctcaatatttttggatctacagagccctcaagtcagctctattccactgtttt

SEQ ID NO: 107458 - DNA, 543 bp, Zea Mays
tttttggttttggtctgactgaggaggaagaaacactctatctctctctatttagatgccaaaaaggcgactttcctttcagatacttggggatcccaatgcattatagaaagttaagtaatagtgattggaaaaccacagagataaagtttgaaaagaaattgagcagctggaagggaaaacttatatcggtaggtggtcggttagtcttgattaattctgttctcacaagcttagttatgtttatgttgtcttttttgaagtgcctaagggtgtattggaaaaaatagactactatcactctaggttcttctggcaaggagatcatcataaaaaaagtatagacttgcacgatgggatattctttgtcaacctaaagaccaagggggtctaggtattcagaacattgaggttcaaaataagtttttgattggtaaatggttatttaaattgattaatgaggacggtctatggcagaatttacttaggaacaaatacctcaaatcttgtaccttgtcaaaggtaggtagaaaacctggtgac

SEQ ID NO: 107459 - DNA, 477 bp, Zea Mays
cgcaattatgcccccatcatctccccccgtgtcataatttaattccgtggattccgctctaatgacggccattatagctctgttttcaccgcgaaccagcatgggtcgtcaaattgcaacctggatgacggaatggcgtgactagtttccccctcaatcccctccaattttctcgagatcccggatcaccaaatcagctctaacggtgtaagctgggacgaatcagctgctgctaatcactggtggagagaaccgtagcatcacaattatgcccccatcatctccccctgtgtcatagtttaattccgtggattccgctctaatgacgaccattatatctctgttttcaccgcggaccagcatgggtcgtcaaattgcaacctggatgacggaatggcgtggccagtttcccctcatgcccctccaattctccggggatcccggatcaccaaatcagctctaacggtgtaagctggg

SEQ ID NO: 107460 - DNA, 441 bp, Zea Mays
caatgccttactcaagtatgcaatggggtgtccagcctgcataaggacaaccccgactcccagtccacttgcatcagtctccaaacaaaatggcagcgaaaaattcggtaaggccaggacaggtgctgttaccagagcttgcttgagagtctggaaagaaacctcatgatcttgagtccaaatgaaaagtgcccctttcttgagtaaggatgtaagtggtttcgctataataccaaaatgtcgaacaaacgcctgtagtacccagccaaccccaaaaaactacacaactccttcacattgctaggtgtggaccactcgaccactgcttgaattttgccagggtccgtcgccacacccgcagccgagatgacatgacccaaatatgccagttgaggtttagcgaacgtgcacttggaccacttgatgcaccactgatccttg

SEQ ID NO: 107461 - DNA, 337 bp, Zea Mays
gatgagtaagctgttggagacagctaaccttccacgtgcctacctgcatgcatctagccacccaagtggtggtggcggtgtgtgtccatcctcttcccagcctacccccaccccgctaacaactccacccaccctacatgtaggaggccatggcgatgatccactcgcagacgcaattaagccacaacgacttgaagggcaatgatgacgatgcatcctcctccagtagcggggagctactacgtggcggtggttctgctagtttaggcaaacggttgtcttcgttgtgtcgacgctcctatggggatgtccttcctcctgatgatgccctgttcca

SEQ ID NO: 107462 - DNA, 911 bp, Zea Mays
tttttctgagtgcttctagtatcattctgttggctctttccacctgaccattggctcatgggtgtgccactgatgcgtacttgatctggatactcctttgctcacagaaatcaaagaattcagagctggtgaaattggatcccaggtcagtgatgatgctattcggtatcccaaacctgaatattatgtcctagataaactccattgctttagctgaagtcaaagaggcaattggcttgtactctatctattttgtgaatttgtcaatgacaaccagtatatgagtatagcctccctgagctttcttgaaaggtccaatcatgtccagcccccatcatgcaaatgaccatgtcacaagaatggtctgcagctgctacgcgggcaagtgttgttgcttcgacaggaattgacatgcctcacacttctggactaactcggcagcatcgctctttgcagttggacaatagaaaccagatctgaaagccttcctgaccagagtccttgatgcagcatgtacccacactgcccggcatggatttcatccaacaattgtttcccagtagccgagtgaatgcatttcaagaggactcctcctgcacgtcttctgtacagtaaaccccctataatggtgtagtgggccgactgtctcgcgatgtgttttgctgcagccttgtcatccagctcttcttcattttttatgtacctgatgataggctctctccagtcgttggtatctgcctctggctgactcaaggtgttgcactcctccgcctgatccgtgaggatgctcggctgtgaaatttcttggatgaaaatcccaggtggagcatgggcccgactggatccatctttgacaacgcatccgttgctgcgttgcggtctctttccacgtgatggaactccaatccctc

SEQ ID NO: 107463 - DNA, 331 bp, Zea Mays
gaaatttcattatgactattgtgagagggagggtcatttagttgccttttgttttaggaggaagagagatgagcggcgggtttctgagtcaagcagaaggaacatgaacgacccttctcatggtgttcatgattttcttgctcagaagcgtccaacgaggcctagaggtgctttgcctcttgttgttaggccttaggcagagagaccatagggtggtcgtgcctgacgaggtgctagttgtgtgtcatatggccaaggacatcgtgctagtggctttggttcctacttccctagcggaccatggtttccttctcatggtgattgcttcccc

SEQ ID NO: 107464 - DNA, 752 bp, Zea Mays
aaggtgagacgaggtttcgaataagaaagatattataaagccaaggagtcaggtaagaaatagcaaggagttagacaagacatatttgttggtggccaagagtgaaatgagataaccatgaactattaaagtgaggatgaatgatacaaccaagtatataaagtgagttagggagaaagcattatcaaggagaaaagtagagaggcaaaggtttaatatatcaaggtagatattgcacaaggatggcaatacaatggcaaggaaacaaaagtataagaagtcaagggttatatagcaatattagggattagaaaaccactataatataatttcgccattaccgatctagtcgaaaatcttaatactaaagaacaatcctatcaacctaaccaagaagtctagtaatagatccaaagaatccatagcaaaacttcttgcggagtggggataagacagagaatagggcatcgtcgatagcttcgaaaaggtttcttctggcaatcttcgcttcaagttccgcaatcctagcttgatcatcttgcaatgcttctcattagaaccttctgatagacaaagaatcagacaagaagggttgaagataaaagagacgagttttgatataaagtaagtttttatggagacaactaagtcaagttttgaacgactaactgggctttccatttctaactaatctagcgacctacggtcacatttcttttataccacttctgtcacacccgtttctggggggc

SEQ ID NO: 107465 - DNA, 424 bp, Zea Mays
ctcagttttggtttaactcctccccacattcagctactggtctttcaccttacgaagctctgtatgggtgccggccacatcagtttggcatctcagagaaggacaatattcagtccactgatttggcgtcgtggttgcatgagaggcaattgatgtccgaactgatccgacaacatttggaacgggctaaactcagaatgaagaagcaggccgacaaaggtcgttctgaacgggagtttgcagttggcgactgggtgttcctcaagctccagccatatgtgcagtcgtccctggcagttcgtgctcatcagaagctggcattcaaattcttcgggccttttcaagtactacaacgtattggttccgtggcatataagttgcagctgcctgattcctctcgcattcacccagtctttcatgtttc

SEQ ID NO: 107466 - DNA, 386 bp, Zea Mays
cggagatggagttccccgcccgggcttgacgatttaccactgctgcgccattctgtactggacctggacgtgatgcattgctttgcttgttcgttcatgggtagtcgctctttttgtttgattagttcatgaatcgtctcgtctcgtcaccatgtatgtgttatcggcgaaactaaactgtcagcatatggttggtgtcaaaacattccccttttggtaattttatgtattattatatatttgatgacataatggagtactattggactcttctccctgtgtttgattttgatatgatattcgacgcaagtgtgacagactgacagcatgtttggttggctatattattttggtacagctgagtttaaaaacaaattattcaccag

SEQ ID NO: 107467 - DNA, 432 bp, Zea Mays
atggcttctgattcatgtacaaaggtattacaaatagtatccacaaactattcgatttcagttaacaaacagaacatgaagtcaacgatgttgacaatctaccaaccatggcagaaaatccaccagcaaggcagcaatgagccttagaaggtgtcaccgtgtcagcgtgtcagccggccgcaactctttttttattgattagacttcgacgaggataattaaaccaccatgaacactcaagaacatgataaacattttatacttttggatatcatgcaaccgtgatttctctctgtatatatctctaccactcttaaaaacatagtgtagccatccacacaccggtcggtctggtgcacggttctgcctcccactcccacccacgccgccatccacaccgcgatctcctaccaacaatggccgccatcaacg

SEQ ID NO: 107468 - DNA, 529 bp, Zea Mays
caacgcaaacacgacatcacacgtacaaacatttatcacattcactttaatcatttattagttactctattgttaaactacttaggcacacatacattcactgtgacttctaaacatcatacagacaaatttagtttaacagggaataatcacttaatcgggttctaccaacattctcaatattctaatgcaagcacacacagaaagtgatagcctaatcacactgcttcttatacttgtctaatggggttggttatttagcaatactcggattagcagcacaattattagaaatggtaacgtatcattaattgtgtttctcatccatataacgacacttgctaaatgtgtttaagctaagttactccttaggatttaaccaatttagttcactatcattattaatcatgtttagtcaaaattcaaaacaacaagaagtcggctcaagacaagcacactggagtggaacaatcaatcacaattaacatatttaggacaacatcacagtagttgtttcagtcataactca

SEQ ID NO: 107469 - DNA, 702 bp, Zea Mays
ataatttcaatcctcgttggcccaccttgtttaatgctattattgagcgcctagaattgaaagagatataaatgatgggtcgacagtatacttgggcaaatattttagacccaccaacatttgagaagttagataaagtgctgatgagcctagaatgggaattaaaattccctaaagtcacagtagaggcctttgacatatctcgttcaaaccatacacctctgttacttaatgggagggtggcttctcgtatcagtaatcacgcactatttaagtttgaactaggatggatcattagagccagatttcatgatatgggctctacaatttggcaaaaataaatgagggtgcctctagcctagaaaaatggcagaataaaattagatcccttcaccaacacctgcaaggtgggctaagagcactgccagaataattaaaaaggagaaatctcaacttactctgaggcttgatgagttggataaaaagacgaaaactactcctttattgcctaatgaggtagctttgaaagtttaccttaatgaaagacttgctactattttgagagaagaggaaaatcggttgttccagcgagcgaaagtgaaacatctgcttgaaggagatgataacacaaatacttcctatttagtggcaaatggtaaacaccgaaaacagagaatatatagtcttgaagatgataatggg

SEQ ID NO: 107470 - DNA, 364 bp, Zea Mays
ggggttaggagattagggttctaaaccttggttgaaaatttgggatgttacaacacgtgcttcataactcttgtgaggcatggctaccccaacaccatatgctctagcaccatatgtttcactttcagcaccatatgttttagcaccatatgttccagcatcacctcccctatcatactatgcaccaactcttcttttcctttgtcttgtctagttcaccagcaaataatttctttacttcaggagaaatggatggacaattcttgacatccttccctgaatgtggtaaatgcttattgaaacgagtagcaccgccaccaatcttttcttcatgacaatacttacacctgaaaccagaatcaat

SEQ ID NO: 107471 - DNA, 568 bp, Zea Mays
aatgcgtagggtgaatgatgaggtgctaaagaagtatgagatttacatgcatcaactaacatcaaatgccattgttaggcttgttgtttatatatgggttgtgcgaagccaaggagcatgcactgatactgaagcattctatatgatacattagctgcactactagatgaaggctaggccttcagatgggctgcacaataattttggttgttacaattttgcttatcgcaaagattcaagatttcctgtactagcttataggataaaatggccaagtgactgggtgaaagaatggttctatgttaaggtggatatggagaaaaaggaggaatttaaatatatagtgatgagaccactaaagataagcttcggcctaaagaggacggtgtgcaacatggaaggagccaccaaaacgaccatgatcacattcaattctatggtcgatagaatcaacacctaggatcttgtagaaggatttcttgcaaatagagtatttcccactatggctagctggggaatgcctaagccaaagaaaggtgacaaagaagtgaaactcgatgtcctaaaa

SEQ ID NO: 107472 - DNA, 872 bp, Zea Mays
cttttgcatcatcataaatttttttaagtttcataccggccttgcattgtgtccgcttcgagctggtattacgtacctttgggtttgatgttctccttactgcactctttccttccatcgagcaattcaaccacttacaattttccgttccctatactttttcaatgggaagccaacttcatatgcatacctactataaaatttatatgcttcatccacaccactgaatgtcataccaactttaggtaccaacctcggatcaattgtaacttcctgtgcaaaaaattaaaatatatatgtatgtacatatatccataacatgtatgttgtatggtgtcctacataattttacatcgtatgcacaatataacatttcataccatctagctgcattccatcgtatacaatttaatctacaatactgaaaatccaaatcagttatatagtacttacatgtctctgcagaatcactggtgtgtcccgttcatgctcaccaatagtacgcatagtagtaagttgttgtcctccttgatttatggtcatcctcgatgcctctaatgtgttctgatcatcaaccctcggcgccctcaaagctgctggtggagtaattgcccctacaacagtagctgtttgcatatgtgcacttgcatccgaggcaaactggttccctccttgttgttcttcctgcgccattgttacgatatacaagtatggatttgatcgatgaactgatgtcggcgtcgtatactcactgattgactctttaccccatggcgccgccatcttccagatcagattacgcccttcagccaggcatgccctaacaaatgattcttactgtctaccttttttggaagcttatgaatatttcc

SEQ ID NO: 107473 - DNA, 738 bp, Zea Mays
tgcgaggtcgccttgggccaagttcaggtgttccacgtgttgtcctctcaccagttcgctgacatcatgaccaaggagttgcttgtttagttacttactaatttcgatctagtctctactctctacgttcgtgattctcccgctgcgactgtatgcgggtgggttgtataggactatatctaggcacatcttttagatttgcattagccttgtaggcttgtactccaagccatattgccttgacttgtattccaagccatattggccctatatatatggtcaaccccccctcacacacacacacacacctaagggtgtgtgcgtttcccatctatctttctatagccccccttaatactacttccattttttaactacacatcgggaatatatagagatgacacattctgcttaccgttcgaaagcttatgctgacattgtgaaagaagttttttgacactcaatattaataagaagaattaagtagcaatctaattttctgcacgtaaataggattgcataagtttgttaataaaatactcccaacttacatagcttcacagtgtatgactcaaaagttctttttccatttatagaacaataaatacttcctggttttgattgattattcacagttaaccaaatatttcccatcatggtcaaaaaaatgtaatctgtgcaaaagactcatcatttccaggaatagtgcatttcatatttctgaaccccagtactaac

SEQ ID NO: 107474 - DNA, 868 bp, Zea Mays
tgtaggtcttcggctaaatgccgtggaggccgtgagccactccatcgcccccaggcctgcagcctgttcgacgaaattcctgttagggacgtggtcacctgctcagctgcaatttaccgacatgcgaggagcgggctgttccatgagtcagctgagctgtttgttggcatgatgagggcaggtgtgtgcccaaactcgttcaccttggtcggtgtgttgcttgcggctgctggtctgggtgacgttgtgcttgcccagtgcattcatgggtgggctgcgaagagtcggttggaatccaatcattttgtttcaagcgcactagtggatgcatatgcgaaatgtgggcgccccatgaatgcattggcattttttaatgatttgagggatcctaatgtagtttcctggaatgcgatgatctccggattagtgcacaatgttttgtttgttgaagcagtattcgtgttcaagaggttgtgttgttgctttgggtcagttcctaataatgctgtgaccatgattaatgtcgctcaagcgtatgctggttgtggtgaccttggaatgtgcaagagtgtacatgcttatgcagttaaggccggttttgatttggatgtcttggtgacaaactcaatacttggcatgtacttgagttttggagatattgagattggaagagagattttcaggaaaaatattgttcggaatgtggttacttggacaatgatgatgggtttccttcttaagcaggtgcatgctggtgaagttataatgctctttgttcagatgaggtcaaatggcatagttcctgacagggtagcaatggtcagtttggtgcaagcttgtgcacttctgggtgatgcaaggagaggaa

SEQ ID NO: 107475 - DNA, 433 bp, Zea Mays
tttttggcggcattcctggcaaatcttctaggaatacatccatgaattcttctaccatagatatgctttctgctgctatgctaaacaccattggatcttgggcaggtggctgagccttacacgaaactgactttccatagtggttagtgagaagaatggtcttatctgtgcaacttatgacgccattatgcttggttaaccaatccattcctaagatcagatcaattccgtgggatggcagtacggctaagtctgccaagaatactaccccacttaaaataatcctgacttgggagcatttgaggcggcatagaaggtctaaccctggggttcgggtgaccaaaggaatttctagagatgcagtgggaatgccatgattttccacaaaactagtggctatgaatgaatgggatgctcctgaatcaaaaagtac

SEQ ID NO: 107476 - DNA, 422 bp, Zea Mays
agtgctatttgatactggtgcaactcattcatttgtcactgcaacctgggtagaaatgcataacatctcagtagaggcaatgatgccgcccatgaggattaattcggttggtggcaaagtgcaagcagataaaatatgctcaaatataagggtggaaataagggggatagggttccccagtgacctaatagtaatagacacccctgggatagatgtcatcctagggatgaattggttaatgaaatatgaagcgaatattagctgtgataagaggaccgtaacattgaagtccccatccggagaggaggtagtggctgagctaaggatgcctaaatcagcggagggagtttgtcaccagatttcagttgatagtaaggagaccaacccgctcgaggctatcaaggttgtgtcgaattttccgg

SEQ ID NO: 107477 - DNA, 467 bp, Zea Mays
ggataggcgaggtaaagagggagctagaaaattgtaggaggagaagaagcatatgtcaggaacaggtgaacccggagaacatgtcaggaataggtgagttcgtacctcatggctgaccaaaagaggaccggaacacgttcttccatgcatatgcttaagacaggaaaaggaaggaatcatgtgaggaaattgattgatgataacagatggtgaatctcttgaagttggggacagggaactttgcgccgggttttcaggtgctccgcaagctggaaaccttggctgtccaaatgagtctggaatgggtggcacaacttggcatgccaagaacaagtttggagacagatgcaatgcaacaaccttgggactggctgctcgatggagatgtggaccaaagcccaaatggtagctcgtttatgttacaatctaattctgtgcattgttcagtctatctgctctagattgtg

SEQ ID NO: 107478 - DNA, 691 bp, Zea Mays
ttgatgacaatcattacaaagatccaacttcattacatgttcatcatgacaagcatcccaacatatgatagcaaactaactctaactaagactgactaagactaagatactgaattaatcattattacagactccgactccgtcgatctatggatccaaatctatctgggtcctgcagtctagggtaccatactcgaagcgaccatggtgcggtgaacggtaagggtgctgaatctcgacaggggcgggagaaccaccatccagatagtggtgtgctacgcactcagcatgcaattctgcaacctccacccgaaccttgcccaactcatcaagggcgtggtccagcttggtgttgagcacaacggacaggttgaccatgctgtttagcctgggattgccttcaccaacaggcgagaaaatcacacctctagcactgccggtcgaacggcgagggtagtacttcatgttaaggacatcagctaccccgctgaacaacgagcaatactgagaaagtgcatgtcatgctgcatcatgcatggctgccttggcagtatccctctcagtgatagaataatgctctaagaaggcatctgcaccccggagatcattgtccggatgacgcaccaagcaagtagcctcccactggtccgggtataactcgcgatgatgttggtacaatacacaacggtac

SEQ ID NO: 107479 - DNA, 290 bp, Zea Mays
ccgataagcatccatagcacacaagtgtgttgaaacgagagcgaggagggcgtgaacgtacctatagagagatggccacggtgcgacgttcacggtggcgcggaaatccgatttgggggaagtgagaaattaggaggctatggtggctaatcggaggcaaggtcgggtgctctggcttcgtgatgaccttgcggagctagcgacaccatcaagttatagtgcccgagggcggtggctcggaattttgaaagagaaggtttgcggccggagagagaggtgagtcactggtg

SEQ ID NO: 107480 - DNA, 638 bp, Zea Mays
aggatggtatgctgagctccttattacatgagtcccaagtgattcttgcaattgctcccagaaacgtgccacgaacggtgctcctctgtcagatacgatagtccttggtattccatgcaaacgaactatctggtcaatgtagatttctgcatatttctctgccctgtgggtggtatgtaccggcaataagtgagctgtcttggtcaacctatttacaatgacccaaatagaatcgtggtgttgggaggtattgggcaatcccacaatgaaatccatgcaaatgtcctcccatttccaagatgggatgggaaggggttgcaagttgcctgctaccttcaaatgactggctttgactctctggcaagtgtcacattcaaatatatacttagcaatctccctcttcattctggtccaccagtataaagatctgaggtcatgatacatcttgttactgcctgggtgcatggaaaattttgaaaggtgagcttcatccaatattttctttctaagctcaggattcttgggaaccaccaatcggtctccaaaccataggatccctttgctgtcctgacggaagcatttgtatttttccgccttctgtccgatcatttccttaataacttgaacacccttgtcac

SEQ ID NO: 107481 - DNA, 758 bp, Zea Mays
cgctttcgaagcctcggcaattttccttgaacgagtagagttcaaagtctttactgtttctaacacatctagcgcatttgccatccttctcctcttgggagttgcagcagaacttttttgtgccttcggtgctgttacttctgatgaagggcttaaaatttctaacacttttgtttctccaatatttgactcttcagccttatccttatcagtcttcgacccagttagctcagctgagggtagcttcagcatgtagttggctcttcagtccttagcacaggaggagcaggttctcttggttcagcagctgaagaagcctccccgccaaactcaggcaccacgaccggttcaatatagcacggccggtgggtaagaacctttaactttttgcctttaggcacaggctcgtctggagtggccgaagtagcagttttcctcttctttccctaacctcgcagtggatagcggtagtcgggataaacaaaaccaatggcatcaaaaactctgttcaatctcttttttccccggcctccgaaggctgtggataatgcattgtcttccaccttggaatatgatccaagcagttcatcacttgtaacttcgatgcattttagccagtcatcatttggttcatcgaatttatccccatatctgaatgtgtactttagccggaccagttcaccttcactagattcggtgatggtctccttcggcatttcccagctctctacaagcggccatactctgaatgctatgtg

SEQ ID NO: 107482 - DNA, 499 bp, Zea Mays
ggcgcggtggcggccggagagaagggggtgcactggcgcaagcaatttgtggctttcaccgtggtgagctcaccggcgatcaccggacgtgtgtaatacaagctactgtgacgtggtaagacaccaaggcacgtggcgcacgatcgttgagtggctaacgccggcgatgatgattccgacgagtcgcggtccacgtgggtacggcagcacaacagtgagcaagcccgagctaatccgagcaccaagatttttatccttcttcgttatccatctgcgctgggcatgaatcaccgcggctggtgcgaatccgggcacacggctcgtcggaggcgaggtttagtggattggggatatttttagtgcaatgtaccattagattctcattcagtcagcctaacagagcaacttgcagggagatttgctcccaatttcatgtagtgactcgacctgctctatgtgtcaaagttgtagccctatgatccagctataaccttgctat

SEQ ID NO: 107483 - DNA, 607 bp, Zea Mays
cgaacgagttcattcttcttcttctttccttcaagcttcggcatactccattccctcaacgttggaaatactcggtggccaagtaaacttgaactaagtccctagttccaatgtgttcagatacaactctaaactcataaacagcatctggggcatggtgcccccggcatcatgttgcactgaggcctagttagcctgatggttaactccaacgggctctgcactagcttctccttttttctcatcaatcttaacataaaaccattcagatttccaaccggccggccatttagtgcgatagctgaccaccggtgtcttcatgtctttgcgataagcaaagttgtagcagcgaagttctcatgcagtcctcttcccgagccttcgtttgatagtgaagttcatgtactcgacagaaggcttcggtgagtggctccaccccttgactttggagggcccagatgtaaacgctgagcctaacaatggcattaggtgtcagctgatgaaggtaaatctcaaaattttccaagacatctgcaatcatcccgtgcagaggaaatctcaaccctgctttgaagaagctcttaaaaatcaccacttcatcattttc

SEQ ID NO: 107484 - DNA, 360 bp, Zea Mays
tgcatggttgaggcttttggcagaggtattgactttcttcttttgtttcttcctattgacaatcctcaaatccttgacattttcttcaagggattttgtgcatgccacggttgttcccgtctcaagcttcttcaccatgtgatcacggttatcttaagaaggttgagcaatgcacttcccttttagttgtgtcaagctcattcttagcctctcattttcttccttgagctcttgacatgaatcatcttttattcctgcaaattctagctcaacagaggatttgcttgctgacgagcaacaagcattagcacatgataatacagtttcaatttgaatacatgtgcatgagtgaggttgttg

SEQ ID NO: 107485 - DNA, 582 bp, Zea Mays
gtttgtagtcttatgcgatcacatcaactatgtttgtggtgtggctaccatcgtgtactagaggggatgaggcccacgatgtttcgatcaaaaactcgatagtgaagaccacggcgagtgctccaagcgatgctattctagagacccacttatgtgtggggaaggtatggagttatccatggagttacccaaccaagagtttggtcctaatgtgggcatcattgcaaggggttctaacgaggattagggagatgctttcatgcttctcgataccctagtaaatatatgagagtcatcgatgggagtttgtatctctattgcctttcaacttctacatttatattatgtatcttggttgtgtgccttaccttcctaacttagttgatcgactagttgatgggtctagatcctaggttccataactctttgtcatagagatagaacaagcttatccaaaatcatatttgcacataaataatttattagtttcataggttttgactaggcaaaatttagagtccttagtttatgaaatatattgttaactagaaacaatccatagaagtttatgaaatagattgc

SEQ ID NO: 107486 - DNA, 567 bp, Zea Mays
agtggatcatggaactaccttatgtggtctggagtctgcaaacccagcctagtcgatccctacatggaaatactccatttttcatggtatacagatccaaggcagtgttacctacagatctggccttcggagcacccaggctaacatttgaaaacatagcagaggcagaagaaacatagctcaaggaagtcgatgtgctagaggaggaacacctgaatgttgtcatttagtcggtcaggtagcagcaaaccctgagacgctaccacgataaagcagtacgacaccagacattcgcagtaggagacctagtgctttgccgcatacagtcaggggaaagacgacacaaattgtcgccaccatgggaggacccgttcatgattgcagaagtaacctgatcaaggtcttatcggctaactcagatggatggaacttgtagaccccacaaatatatctataaatatatgtatggtgttattgtattcataaattcgttgggaaatataatgagagtttaagatgattaatgttgtaatggtgaggcatgttctctactaaatacatgttaaa

SEQ ID NO: 107487 - DNA, 335 bp, Zea Mays
cacccggatcgtctacggattaggtataatcttgaggaagtcgttcgtctttcccgcgcctgacgccctcaaacgccggagatagatcggaacgaagccaccggattttccttaagataagcaaagtctgttcgttattagctaggagataagctgaaagagtgtgatcagcgtgtgcgtagggaatgccccacggtcgtgtatattaggcctagggggaaccccatcattttcatctcaattagcacctctccattcgggaaacaccacttgtaaacacaccacacatacaaagccaccccaggaagtagagtgatacgcctctcaaagcggtc

SEQ ID NO: 107488 - DNA, 485 bp, Zea Mays
gtcaggccaggactccgtcgtgcctagcgttaggtagaagaagggcgctcagccgtcgatcggatacttaacgaccaagattctgagaaacgtaccgctttgatggggtgggatccagaccgtagatctcgcggttggcggttgtgattataaacgttatacccttcgtgtgcggaccgtcgatcctggatcgttcggtcgtgcggctggcagcgttgtttaaaatctccaccatcgatcgcccatctcacgatcaccagtgagtaccggttcgcaagggtactcgatctaatctgggtcgtgcgagtttgatcggacggttcaggatgcttagtaccccttcgccgtgcacttctttcaaaagagtccctgcacttttgttaaaccaacccgccatcctcccaagtcaaaaccaatttacagccgagccctggatctttataaactagccactgcgctctgtagaatttgtaccagctgtcctt

SEQ ID NO: 107489 - DNA, 430 bp, Zea Mays
gaattcttaccgtggatttatggcgattagggcatggtccctgataatggcgatacgatggtggaggcggaacaccgacgaggtgttctcttgctagtcggttgccacgacaatcgatgccatgcacaggagctacgagtctttacaatcttcttgggctacttgctgacggttgcggcggcggcgcactctcagttcggcaacggcagcggattcctccttgctctcggtagtgatggttggtggtggcgatggcaaccctgattcgatggaacgagaggggcgacgacttataagcgcaggggcaagctagctcggatctaaccgaacaccccagattcccgacgaggtggttacgtcggcgctcaacccagatggatacaacattcgcacgaggaggaaggtctctagaagacggggcccaccggcg

SEQ ID NO: 107490 - DNA, 575 bp, Zea Mays
aagagattaaacagagtttttgatgccattggcttcgtctaccccgactaccgctacctgctgcgggaacaagggaaaaagaagaaagctgctacttcggccaccccagacgaacctgtgccgaagggaaaaaagttgaaggtcctaactcaccggccgcatttcatcgaaccggccgcgatacctgaatttggcgaagggacctcttcggctgccaaaacaaaaggaactcttccttccgagcagaggactgaagaaccgactataatgccgaaggtgcctacagtgaaggtagttgaaatgaaggttggtaaggctgaaaagccaaaaactgaagaaataacaaagatgccagaggttttgagccctccagtaaaggcaacagtaccgaaagtacaaacgggttctattgtgactcctaaaaggagaaggatggtaaatgtattagatgtgttggaaacaaccgactccataagtcccgctcccacagggaaggttgccgaagctgccaaaacgcaacccaaagttgatactaagcaaatagaagctgaagctacaataacccaggctgaaac

SEQ ID NO: 107491 - DNA, 460 bp, Zea Mays
agaccttgaggtgttatcatgataaagccatgtggcaccggtcctttgcagtggcggacttggtccttcgccgaattctaatgggggaaggacgacacaagttgtcaccactatgggaagggccattcattgtatcagaggttactcggccaggatcataccggcttactcaaatggatggcacggaagtggggaactcatggaacatagagcactttagaaagttttatccttagcgaagcctcaaaagttctcgaagcaacattgtactatgtaatcgggggacttcatcatcaataaagttttcgttttcaaaggcattcatactcttgactaacagctgacttcgatttgattagacttgaaatcagcatgcttacttggcttagggtgaccactataccctactaacggagcaatcagcttaagtcggcgacgacttaagacggtgcgacatgct

SEQ ID NO: 107492 - DNA, 667 bp, Zea Mays
ccgaaaaagatggtatagaaaatttaatcttagcataagggtcgttaggagcacgattgttattaccttggtggcggtgtggcataccttctgtgctttgatgaagacgacgatgtaggcgcaaatctctggtggccgcttcatcatgattaccttcttcaccaaacaccgcatcatcgagaagacgtggacgaggaggtggtggtggcggtgcttgttgttgcgtctccaacacagcaagtctgtcgacgatctcggacaatcgtcgatccagcctctcgtaagtcttgccaaggttcatgtcaatgaaggcatcatgcactaacttgtggaccgtctcctccatttgctccttcaggagcttgttgtttgcctcaagatcttggtggctaacacattcatcgaagtctgtagggatccttgcttcttcttcgtcgcctgccatcgaaacacaaaaataggaaacaaacggtgaaggttatcctaataatttcactacactatcctctcaggtggaacacaggaacacactctatcgtatcttaccaagctcttacaagtgtctaacgaaatacaaagcaaaggatggtacaatcggaggctggttcatgatacttaccaagaggtagtgaaaccacgattgcaaggtcaaatatgtattgatcag

SEQ ID NO: 107493 - DNA, 462 bp, Zea Mays
agagaggtcttcgtggtagatttgtccttgagttggtggagaaggatctccaaattgagcaaatgggcaaacgtacccgagagttagagcagcaagtggaaatctgggacaacaccattgaagtcctagaaagttagttccacgacatgcaagaagagcaggatgaggccaacgctcattgggatatgcaccatgaggacatgaactaagcaatggagaaagatgggaacatcgaggaggaggaggatccctaggagattgagccagcttccagtctggacacggcttactctggagtacccccttcacctgcggcctgtactgcctctgctactcagggttagatgggccaggaagaagcatattaggaagatgggaaactacataagcttagcttttggcacaaactgatgtactaggctatagcattggatctcctgatatgttgtaacccagaaaacc

SEQ ID NO: 107494 - DNA, 519 bp, Zea Mays
ctctactgccttcttgttctatgattgtagccgtgagggaccgatttggtgctccggctttggtaagttcttaatccggtgcttgctcttgtgatctgtgcttgtgatctatgttcgaaccctaatctactctactgccttcttgttctgtgattgtagccgtgagggatcgatccggtgctccggctttggtaagttcttaatccaatgcttgttcttgtgatccgtgcttgtgatctgtgttccaaccctaatctactctactaccttcttgttctgtgattgtagccgtgagggaccgatctggtgctccggctttggtaagttcttaactcggtgcttgttcttgtgatttgtgcttgtgatctatgtttgaacccaattatactctactcccttcttgttctgtgattgtagccgtgaggggccaatttggtgctccggctatggtaagttcttaattcggtgcttgttcttgtgatctgtgcttgtgatccgcgttccaaccctaatctactc

SEQ ID NO: 107495 - DNA, 465 bp, Zea Mays
aaatgttggtatcgattaacacgtggtcaagcgggccaaaacactaggaaaatgggggattcatgtgctcaacaaaacagtaggcatggaactgtagcgtcatgttaagtgtgtcccatcaatgtacaatttgggggtatttataggtaaccagatgggtgagtgtgcccttctaagtacaattatgctcctggttacctgctacagccccaaaatatccccccctacgaggtcattatagcgatgttaagtacagcctgatcaaatacacagtaaaccctacaccagagagggcttacaaataggcccaaatgacagcaggacgcagcatgggccccgccattggacgacgcagtcctcgcccgtgcgtggcactcttcgctctaaggcaacgagtattcgatcctcgccaaggctgcaacttggaaccgtccgagctggcggggtcgccttcgcgaagtcatg

SEQ ID NO: 107496 - DNA, 309 bp, Zea Mays
gtcatcttattgtttaggataaaagataggttagggcaagaaaagcctaggataagcaagtttatgatgggaaataattccatgttgagtggtaatgcatctgaagattgtgtttgactcctctctttccttgacgaggttgatattttcttctccggtcttgagctcattgattcgcggtgactgcatatcatcgggggtgggggaatgtggttaagatagatttggatgagataggctacatgatgtaggtctaaagttcatttgatgttaggtgggaatagacagatttatgcaatccatcatgac

SEQ ID NO: 107497 - DNA, 528 bp, Zea Mays
atcgcccataagcctacttgggtcaactagacaatttaaaaacattgaaccataccacttttttcctgcataaggtaatattctccagatgaatctgtttcactgcagtatgtacaccaacctaaatcagagtgaaaccaaagaatcagcaacagctacatccaaattaccatttgaatcatgaacccataaaccagagacgaaatactctagcaaagataaaagaacacaggctcagttcgttattacagagtaggtatttcagcaagaattaacatgaactaaactgagttctaaaacctcattggtagaatcaaccaactcaagaactgcagtttaatatacaccacctagacaagaccggctgacaaaactgagctggtatttgacttcccttcccaagtaattaattaatatattccttctatacaataataatgcaaagtatgaagagcataactacagtttagacaggtttactgagtcattttctcctgacgccctgaaacaatagtagtgaacggcgta

SEQ ID NO: 107498 - DNA, 387 bp, Zea Mays
tcttcggctgcaagtgttatcccaacatctccgccactgccgcccataaacttgctccccgctccaccacttgtgtcttcctcggctactcatccgaacacaaaggctatcgttgccttgacctctccaccaatcatatcatcatctctcgtcacgtcgtgttcgatgaatcctcctttcccttcgccgagaatccttccatctcgactcttcccactaatctagattttttggatgatttttctaaacaggtacatgctccaccgcttagcgcctccaactggcccctccagcaggttgctcactcatctgctgggacgtctgtcccactcggaggccgatcgccgtctccatcaggagcccctgcgcttgggccgtcctccttcc

SEQ ID NO: 107499 - DNA, 856 bp, Zea Mays
gtttggttgtcagtcgagtcagaagactgaaatgtggctgatagtgaactctgacgaactttagagccggtttgagcttgatcgagtgagcggttgaccaaggtacctatggtcgcattggagcttgtatataagttaataactttgttgtaatctggtcggtaacttatcacgtagaaatcgaagaaaaacacatctgaagatgctatgtcagaacaactgaagaagatcctgatggtacaatagcgaaaagatcttcaggttcagtgtatctcgccgccggtgaccttacgccgcgattgacaccggtcgtcgcgattcgtgcgccctggtatgcggataacggctggcggtgaaagatcacaatgcagagaagggttggagccttatcaccggcctgttcaccgtgccatttgccacgcgactgaccgaggtgtcctcgccggagtacgcagcccttcgtagtcgtgccacatacttagaagagttaccacgtcgcagtagatagtcgtaggtagtctgtccatcgcctgagacattgcctcggtgaacgccacagtagttcacgccggtgactcaccccctctcctcggccgccagtcttccccttccaaattcggagccaccgctcttggacactataaattgagtgcgcgactagctccgctaggttgttacgaagccagagcacccaccctttccctcgattggccaccatagccaaagaatttcattcttcccccaaatctgttgtctgcgccaccgtgagatgtcgctccctggccagccatctctaggtccaccctcgctctccttgtccgtgtttcagcacccacacatgcttgtgatactcatc

SEQ ID NO: 107500 - DNA, 1739 bp, Zea Mays
caggatcggcacccgttctatcactgccagatattcatcaagattttgtcgtcttctgtgatgcctcgaggcaaggcttagggtgtgtgctaatgcaaaacgagaaagtcaatgcttacgcatcacgcctactcaagccgcacgagcagaattaccccacccatgatttggaattggcagccatagtgcatgccttaaagatatggaggcattacctaatcggaaacaaatgccacattttcaccgatcacaagagtctgaggtacatattcactcaacctgatctcaacctccgtcagcgaagatggttagaactgatcaaggattacgacctagaaattcactatcaccctgggaaggccaacgtggtagccgacaccctcagtcgaaagccattcagaataaaagggaccaactttctagaagactggaagaaagaatcagcacaactaaatgcatgtctgggaaacaatgacagtctcgaagtcaaaccaatgctagaagacctcatctgcaaagctcaacatctagacccagagacgacaaggcttgtggagaaagcccacaaggaacaactcccggacctccggacagatgaccaaggagtcctttggttcaaacaccgtctatgtgtaccaaaaggggaaacccgagaagtcctactcaaggaagctcacgactcggcctactccatccaccccggaactaccaagatgtacctggacctcaagaccagatactggtggaaggggatgaagaaagaaatagctcagtatgtggcccgatgtgacatctgccaacggacgaaggccgaacaccaaaaacctgctggcctattacaacccctcccgatacctgaatggaagtgggaagaaataggcatggacttcgtaaccggactgccccggacgcagaaagggaatgactccatctgggtaataatagatcgcctcaccaaggtagcccatttcattctagtgaaaactacctttggaggaaccacccttgcccggatttacctcaaggaaatagtcagactccacggcatcccaaggaagatagtgtcagacagaggaacccagttcacatccaaattctggacaagccttcagaaagctatgggcaccaagctagatttcagtaccgcttatcaccctcagacagatgggcagacagaaagggtcaacaaagtccttcaagatctgttaagagcatgtgtgttagcttttgatagaagttgggagtctagtctaccctacgcagagttctcatacaacaatagctatcataccagcatcaagatgtcgccattcgaagcactgtatggacgaaaatgccagacccctctcatgtggtccaacgtgggggaaaaagcgctagaaggatctgcctttgtcaaagaggcggaagagaaagttgcactgatccgcagaaggttgcttgaagctcaaagtcggcagaagagttacgcagacaacaggcggagggaactccgatttgaggaaggagacttcgtctacctcaaggtttctccaatgcgtggtgtcaggaggttccaagtcaaagggaagctagccccacgttttgtaggtccatatcccatcattggcaaggtaggacctgccgcataccgcctagaactaccagaatccatgtccgacatccacaatgtgttccacgtatcccagctccgcaaatgcctgcaagcaccagaaagtcacctcgaagaagagacattg

SEQ ID NO: 107501 - DNA, 528 bp, Zea Mays
tgactcgagattgcagatcaaccaacctttccgtaaggagggagcctcaaagcagagcgcaagatgaaagtaagaatagtatcctttgtatgcggatcaaatctgatgatagaaacaagagagtgttacaccccaattaataataagtacacaagagaaatgtatctgtagaagaatgaaaccaggacaacctttcatggagattctcgggaaccagaatatctttacatgggctcagcatagatgaaatatatgcaggaagaaattttgcgtccgagcagatcatggtcttttggttaaccaacaattcaaggaaactaccaaaagttggagatgacaaacattgaggtaatttggtgttgtttcctgtatatgttagatcagataataaatatcaacaccgaactggtccagttggaaaaaaaatgaaaataaggctaacagaccatttcttggtacagaagtgctcaagcgctgccacaccaaagataacccctcaatacacttaattgcagatgcccttatatc

SEQ ID NO: 107502 - DNA, 465 bp, Zea Mays
cctcgttgcaccatccaatgagcacgatcttgaagggaaccagatgcctcaatcatggtcgtcgtgcgtagtcagtcacatagacagtcgtatgccgccagatccggcagcgagaccttatcgtcatcttcatggagagtcgcgcgagcctcccggtacctcagtgaggtggggaggaggggaagaagggtggcggcagttagggtttggagagccgcccaggtcacatgcgcgagagacaaccatacaccggtagtgttagaggtttttggggttagtcccttgtaattacagttataccctgtgtaatgggccaagcccaacaacctgagactattaatacaactcccaaccttgagttagggtgattgcctccctagcgattgacaccttgttgtctccctcccctactagtgactttgttagagcacctcccatggctctttcacgcaccctatggcttca

SEQ ID NO: 107503 - DNA, 539 bp, Zea Mays
aaggttgttgtggagtgtgaggcatggttctatgcaaaatagtgagtaaaatgttcttaaactagctctgtcaggctgtagtgagtggtgtcagtttcaactaactgaatttgggttcaatgggatgtgctccacttttgggcaccataactttgaatatatgcatttttggcctgggaattctatagcaacgtgaaagagctatgcttggtgaaccactttgatgtagtgaggtaggtctgtccttatgtagaaatgagagaaaatgggaggtgaatttggtgctgtagtcgaactgaagaagttcagagcagtccaaaacatctgaaaatatctcagtccactaaataatacattatgggtgacttttcagtaagaaacaattaaaacaatctatcctaggtgatatacattatcatgggtgatatacgtggctttctctgatagagagtctaaatactaaaaataacctgcaaaaagaccaaactaaataatacattatgggttattgctataggtaagactgaacgagaagtgac

SEQ ID NO: 107504 - DNA, 849 bp, Zea Mays
cttttcgtgaggcaatatgggagtagtcttcatcgcataaacgatgtgagccaaatgttgggcactgacacgcgctggcgcactatcaggtggacccaaacacttagagacagtgggagagagctcaggtgcacgataaggcaaacaacatacaacagtaacttctcgttatgcgtgcccatctcgctacatgatgggggtatttatagggccgtacagggtaggtggtccaaagtacgccactgcccctagttaacggtcgttttttacaacacggactatacaacggggtaattacagtcccgcagccccctctggttatgtgcacttgcaaatgtacccgctaattacattgacaaatgggccccacccgttgtcactacgggcccgcgacttggacaagcaagtctaccacgctcgtagccttcacccggaggagccttcacgtctttcgccagtttttgttacgactgcgccttggcgaaggcttcttgtttccaaacgtctcgttcctcaagatgggtcgaggactcccacgcccgctagccgatgaccgatgtcgttgaagtctctaatcacctgcagcgttacagttagtcaacggttagtgttgacttcgctttggtgaccgagggccaggtcagcctttatcccaacacatccctagacacaaaacaacttatataggtcgacatattaaatggacttttcttttattgggtcgtgcctttaatgagacgtgtcacctggtgtgctttaacagatttagttacaggggctatgtcttagactagctccaacaaggagctaaagggtcctgtaccctaaatttagaggatgaggacgtcc

SEQ ID NO: 107505 - DNA, 272 bp, Zea Mays
ctaaacataacatcgggcctagatgcagtaatataaaataagctaccaattattgagcgataaagtaagctaccaattatgaattgggaaggttgacactaccctattcactaaaataattggcaaagacttatttgtttgtcaaatttatgttgataatattatttttggatatactaatgaattgttttgtgagaaatttggaaaaataatgtcaaaagaatttgaaatgtctatgataggagaattgaacttctttcttggtcttcaaa

SEQ ID NO: 107506 - DNA, 938 bp, Zea Mays
ggatgaaagaaggttgttgcactgtgtgatgtttgccagacggtgaaagttgaacacaaaaggtctgacagtttgctgcacccgcttaagatacctgagtggaagtgggaagagattggcttggacttcattgtaggtctaccccacacatctactaggtatgactctatatgggtgattgtggataggctgactaaagtagcccactttatcctagtgaagaccacatactgaggagccaggctagcagagttatacatggcacggatagtaggtctacatggtgtgcccaataagatcgtgtcggaccggggatcacagtttacttctcggttttggcagatgttgcacgagtgcttggatacaagattgaatttcagttcggccgaccattctcaaattgatgggcagaccaagagaaccaaccaagtactagaagatatgttaagagcttgtgctcttaaacatggtggtagttgggataagagtttgccctatgcggagttatcttacaataatagctaccagaccagtttgatgatgtccccgtttgaggctctatatggcagaaagtgcaggactccactgtattgggatcaaactggtgaaaggcagttctttgggccaaaaattatacaagaggcagaagaacaagtacggttgataggggagaatttgagaactgcacagtcaaggcagaaaagttatgcggatactcggagaagactgctagagtttaaggagggtgatcacgtgtatctgaaggtgtcactgatccaggggatgaggacatttaaagtcaaagggaagttgtcccctcgctttattggacccttcttgatcgtgaagcgagtgggagaagttgcctatcaactggaattacccgaccatcttgcagatgtacatgatgtcttccatgtgtcccaactgaagaagtg

SEQ ID NO: 107507 - DNA, 481 bp, Zea Mays
acctccatacgacacagcggacgagtcagcccgaagtttaagcttagagggctcagtactagtgccttgagcttctccctcttcttctcagccttcacgtaaaaccactcattcttccaaccagtcgaccacttgatgcgatagctaaccaccggagactttgtatctttacagtaggcgaaattgtaacaaccaaaattttcatgaagactgtcttccctggcttttgtctgataatgaagctcgtgcactcggcagaaggcttcaacattcgggtctgctccctggcttcgttgagccccagatgaagacactgagcctaacaatagcattaggagttagctgatgaagatagatctcatagtttttcaaaacatcccctatcatctcatttagaggaagtcgtagtcctgctctgaaaaaactcttgaaaactactacttcatcatccttcggcactgaggtggtttcttctccggca

SEQ ID NO: 107508 - DNA, 892 bp, Zea Mays
cgcgactcgaaggaacttgggccccatcagcaggtggcaggctcctagcgtgtggttcactagcctctaaagaggccagaccagcgagagacgtagaaagatgtgtcaccacagcctcctcagaccggactggtggcgatccaacgtggacgtccatagaagcagcagagggggagcctgctccaacacccttgggggctgggccctccacagcagccacctctagggctaaagattcctcagccacgtccataggagccgggtgactcggatcagtgttctcgcgaggaagaccgccctctaaggtcgacgaggcacggtaaactacccgggttatctcttgcccgacaaaatcatgcgacagaagaccatcatctaggacctctgaatagatagtgggattgtcagcttcaggaggctctgatagaatgtcttcagggatgacctcttccatcacttggtcaaaatcagatattgacaacccttgaaggctgacaagagctgacaaggcttgcgcgggaatatcgctgcccttgtggtgacaactattcttgcggatcagcggaatttcttcttcttcctcctcttcttcctcatcaagcacaccgccagcagcctgagcatcatcacaacctccagaattgtcctcggggaaggcgctcgccgggccatcgccaaggaataatgtggaagggctagcgtcttgttccaggcatgacaaccaacggattcgcattttcttctttgtctcctcgacaggtgcagatgggtggttcactcggcgtgaatgtttccgacgggcaccctcgggtttctggatttcctcgtcttcgctaaactcttgcccagtcgcaactgccatcggctcagtgcgggcagagtcagatgattc

SEQ ID NO: 107509 - DNA, 460 bp, Zea Mays
taaacactgactgactgttatttcaagaccaagagaactgcaatttatgaaatcatggactcataactcatgtatttcaaagcaaaattaaaagtattgaattctatcatctctacattaacattagattaacaaaacgttcatggttgtggactcatgtctgcagtgtttatttagtccgatgaatcacaaaacagaaagattaaaatgaccttacatagaagacaaacaagtcaattccagagtgaagaaaaactatgctataaacagattgctttttattaaaacatgaggcgaaattcatataatcttgtagctattattgcaaagatacaaaaaaatcatgctgtcagactgaccagtactcctcttataccagtgatggggacatagcgatgtgtcaacaacattttaagaaaacacgaattcaacaaactgtgaaggaaggtcagactggtat

SEQ ID NO: 107510 - DNA, 529 bp, Zea Mays
gcagcagccaagggcgaggccctgccctctgacgtattctaccacgtcatcggcacaccagccgtccgcaaccccgaaggcttgcaaataactcaagacgccgaaggccaccgaatcgtcaacctcatcatggccgaagactagcgggccccaataacactatacctgcagggccactaccatccaaccgaccgcaatgaggccaaacgactgaaacacaggagcagggacttcgcaatagtcgagggtcagctgtacaaaaagggcatcagccaacctatgctgaaatgcataaccgaaaccgaaggcctagaaatcctccacgaagtccacggtggaacctacggctcacactcaggacacagggccctcgtagccaaggtgattcgtcagggattttactggcccatgataatttgcactgccagccgagtcaccaggtcatgcgtggcatgccaaaagttctctcctcgctcaggcaacccttcgcaattcaccaagctcatcgcccacacatggccacttcaac

SEQ ID NO: 107511 - DNA, 439 bp, Zea Mays
gcagtactgcacggacgtcgggcagcccaaggtaagaagacaaccccctagaatttgccttggtattttctctgtgtagcatctacggaatcgaattatcctgttatcaaccgggaacgtggtgaaggggagttggatggccatggtgccactgtggggccgcgtcgcgtctgggttgggcacttcgtggtgctcacggacggcgtaggcatggttaaggtgttcgggaaggtttggtctccgtcttgaactaattaggttagggtttggggactgtgggctctagttcggaatcctccggtggagctctgccgcattcgttggcggcgccgctgtctgctcggtcgggaggtaaggggatatgcttgggccgttggatgagcagtggacgttcgagattagaactgggtggcgttttgcttagggaaaaatcatgtcc

SEQ ID NO: 107512 - DNA, 924 bp, Zea Mays
gatctacaaaacgagtaatgaaagctttaaaagtagttggagaattggaggatattagccagcaagctatggaggattatgctaagcttttcgtgcatcctctctcccaaactcacgtggaagctttggcggccctgtttggatggtctactccagtcgatttttgtgcagattagtagagtgaggacatgttgttcttcctgtattaatggatccagaaaaatcttgatttggaatgtaaggggtttaaactcctctgttcgccagaattcggttagggagttggtgtcctcttcacgagcggacattgtgggtgttcaagaaacaaaataaactgaagtcccgcgacgaaccatgttgtccatgcttggatcagatttttcaaattttctggttctaccttctcttggagctagtggtgggattttagttgcctggaaacatcatctgggagcacaggccttaacagaattgatgatcacagtatctcagtctagttctgcacacaagaggggcaagcctggtggctaacttatgtatatggaccgcagagtagtgaagaaaaagttcagtttctgcaggaactaagaaatgtcagagcagcttgtcttggtccatggataattgcaggggacttcactctcatctacaaagctgaagactaaaacaattctaatcttaatcgcgcaatgatgggtcgctttagaaggaccattgatgatttatctcttaaggagatcccccttcatggacgcaaataaacatggtccaaccagcaaaacataccaaccttggtgaagctagatagagtcatgtgttctactgattgggaggacttgttccctaatgttttgctgcagagttcagcttctgaagtgtctgaccactgccctttactgcttggtcttcgggataacaggtcag

SEQ ID NO: 107513 - DNA, 435 bp, Zea Mays
ttcccaagaagtagttaagttttcctaagtctttgagtgcaaattcttggccaagttgatgtaacaaggcttgtgtagcatcagctgtcgaacttgcaacaattatatcatctacatatattagcacaaaaatgactactcctcccttgttaaagaagaacaaggatgtgtctgcttttgatgcactaaacccaagactctgaagctttgcactcaaccgagaataccatgcacggggagcttgtttcaagccatacaaggccttgtctagtttgcatacatagttatattttgctttatcctcatacccgggtggttgtctcatatagacttcttcttctagaaaaccatgcaaaaaggcattttgaacatctagttgacgaagactccatccccttgacacagctatagacaagattatcctgattgttgcag

SEQ ID NO: 107514 - DNA, 332 bp, Zea Mays
gttatcgtagtgagatggagagtggtcgtcttcgcgtggacgggactggtaagcgagaattgttgtcctcgccgattggggtgagtgtaggtgagggggagctgcgaaatctttttgagggtgaggaattgaggataatgttgttcaactacagggagatgggtatcatcccgaaggttgatccaatgtaatatatgatgccctcgctgtgtgtatgtaaccgctatttgtatgataaggctgcgcgccttcgttgattcggccgcgcccgtgggcaacttctgtacgaagtcttttggaaaagacttcgattttgcgcgcctattattccg

SEQ ID NO: 107515 - DNA, 388 bp, Zea Mays
ctcgcacttgcactgctgtgctgcactgcatccacatccgtgcttgtcacgccgcagccggacgtctctctccttccctccattaattctggcgtttcacttctctattgcactgtaattgatggcgagccgccgacattaatggatttcaagagacaaccgtttgtgcaacatcaatatcgttaatttgctcgtaaatcttctccctgctcggcctataaagccactcctcgttgtgtagttctcattgccccgctcactctctcatgctgctcatctgcttgcctctctccgagcgtcacctccactgtccgcgcgtgcagttcgccgcggttgtcggaagcaaccaggcatcaccgcctcctcgccaagcttctctacgctaaag

SEQ ID NO: 107516 - DNA, 734 bp, Zea Mays
gacaattacttatctcacctttctagagaacatagacttgactttattgctctcatggagacagaccgtagttctttcttggattctactttgagacatttttatagtggcgccgattttctctggcacctcatgccacctagaggaagatcaggagggatgatattaggggtgaatccgggggtttatgacattggagctattgatgaaggtaatttctattgtaagttctgacttcgaaacaaagaggatggattcattttggccctttttgctatttatggcccagctcaagatgatttaaagaatgatttttagctgaagttgtaggtgcgtgtagttctgaaacacatccatttatgatagggggactttaatatcatgcgaagagcggaagacaaaagtaatgataacttcagctttcgatggcctaatttgtttaatattatcatagcgaatttagaattgcgcgaaattgaaatggtgggacgtcaatttacttggtcaaatgatttggatccacccatgttttaaaagcttgatagggttttaatgagcccggagtgggaacttaaattccctaacgtctcagtgcaagcggttgacagatctcggtctaatcatacgcctcttctactgaatggtaaagccctcatgaacctaggaaatttctattgagtttaaatttgagttaggatggttaattagagagggattctttgataggatttctt

SEQ ID NO: 107517 - DNA, 565 bp, Zea Mays
ccacctgataaatcatattaaaatctccagcaagcaaccaaggtcctgtacagagtgccctgatgtctttaagctcatgcagaaactggattttcagatcatcctcctgggggccatacacccctgtgaaccataccatccagcccagcaaactgaactgagaccgagtaatcatcaacacgggaagaaatggcttgacaaacagcgcctttccaagcaataagaataccaccatgggtgccatccgcaggaagggtcaagaacttatcgaattcagatccacaaactgagagcagtagatgcggggaaagatctgacaccttgatttcttggaggcaaatgatatctgctttacaggataaaatagtttcccttacacaatctcacctggccttattattcaggccccgggtattccaaaccagaatggatgtagtattcatttgggacaataaaaaacgaccaagtgacatagaattacgaacccaccagaagccctggtcctctgaaatcagcaccaaagtctacctgccagccaaagatggctgcaagcactgttcttaag

SEQ ID NO: 107518 - DNA, 387 bp, Zea Mays
acaccaaaagttcttttgcaaagtgtttaggctagttagaccataaaattggtgctttgctataggctaagtcttagtgtttaatgagtttggtatagctctatccactcattgtctgtgagcactatcattgtaaactagggagctcacattcttacaagatcacaccaaccatgtttctagtttgggcttctagcttgtactgaagggaatgaggcccgtgatgcttgagccagaagctcggtagtgaagatatatggtagggatctatctataagtaggcccttccttttttggagaagttttatagccaatgacaccaagattactagaagaggcgggtggtggtggtgagcatttgtgtcttcacttcttttgcatgggaag

SEQ ID NO: 107519 - DNA, 453 bp, Zea Mays
tccgccgcggtcagctcttgcgccgcgccgcggacagctcttgcgtctcctctgcgtgtagagagccgtcgtcttctactgtcctcctcttgcggcgaggtgagttctcgtcttcttccattcgaaaccgctcctctcaactcccttttagctgagttctcctcgattccttttgcttagggtttgtgtgagttcggaaccatggagttcgaccccttcggcatttcgccagacagcaactccccggatctacgccctgtgcaatcaactgcgccattgttgccattggcggcaccgagttcaactgctggaccgagatctcctgctggaccagtgacaggggggggaaataggtgccagtgaggtgagataaatttacagaactgtgtcattaattgtgaaaatattgtcgttgattattggatgcttctccattgtctgtaatataggaag

SEQ ID NO: 107520 - DNA, 415 bp, Zea Mays
gctagagttactaggtgaaaaatacaatgtcgattgttggatcaagtccaggatatgtaataagcatcattgtttttacaactggttccatgccaagagccagtggtacatgggtccttgggtataagtccattaatcccatagacaatacccccctcgatagttgctcaggcccagtgatccattggttgtcagtttgttgcgttggtcaggagatcaaaataggcaccatgcaacaatgactcctccatccggaatgccaccaccaaccatggtaataacaccagcagtagaataaatgtatatacacataagtaactttttatggtgatatctaatccttttctgatgtattgcacaattaatggtgtttgaatactgaagaaacaaaaactgcaggaccgaaggatctttg

SEQ ID NO: 107521 - DNA, 798 bp, Zea Mays
ttcaaagggatggttcatatgagctggagtataggattagagcacccaaattaggatgactttaactcattttctgttaacttgggcctctgctaacacacttttgtagggataggccaagaatctatttttagcaatgttatcaagtcgtatgactaatcacgatttgcaggttgatcactgccatggcaatcaactatgcactatgattagtcaggctggtcggtctcatggtcactagaatcgatttagatgatttgataacattggtttttactcacgattagctgggctgatcgctatcatggcgatcagctataaactatgattagtcatgattaattgtgattagtcatgattagtcttggactgactgatgtcatcagtgactaggaatgattagatgattcgataacattggtttttagtatggccaaagttcattcttagtttaaccttcccctcactttatgtgaatttgacgtgcgcttttgtcactgaattgagcttctgtttttttgcatgacactctatgggcgcatgtggcatgctggtctttcttgttcattgttgagccggcagcttgctggcatgctgtagtgttacgaaacatgtgaactttagcactgtggatatactatatataattctaacacatattgtgatactgatctcaggctttccctggtaatgatacttctgaagattgtggttgttgttatggacggtggaaatggttggttctgatggttttggtcttttgcggattgttattgtttttttacgaggggcggcgcg

SEQ ID NO: 107522 - DNA, 363 bp, Zea Mays
acaaacgataacagagggcatgttctgaagaacattgttgctaggagagtaaggcattggcaaagcgatccttgaaataaaattataaaatagataactactgcgtccgagtatgttattggtgctgttacaaacgaacaacgttttttctggtttattgttctgaataaaaaatagtagaacaacctgagaatcactgaaagttattatgactgaacaactgaaaccaaaccgactaactgagaagaccagttaattattactgaagaactaaaaccaaactgactaactgacaagagcagctaatgcttactgaagaactaaaactaaactgactaactgacaagagcagctaattcttac

SEQ ID NO: 107523 - DNA, 659 bp, Zea Mays
gcagaagggatagaagtggacccatccaaggtggaagccgtttcaaaatggaaacagccatccaacgtcagtgaagtacgaagctttctgggaatggcggggtattaccgccgcttcatcaaaggattctccagcatagcaaaacctatgaccaaactcctcaaaaaggacaataagtttgtgtggactccgaagtgtgaggaaagtttctagatcatcaaggaaaagcttacaaccgtgcccgttttgacactaccggatatacaccaggacttcgtcatcttctgtgatgcttcaaggcaaggcttagggtgtgtcttgatgcaaaatgagaaagttattgcctatgcatctcgcttactcaagccacacgagcagaactaccccacccacgacttggagttggcagccatagtacacgccctgaaaatatggaggcactatctgattgggaacaaatgtcacatcttcaccgatcacaagagtctgaagtacatcttcactcagccggacctcaacctccgtcaaagaagatggcttgaattgatcaaggattatgacctcgagatccactaccaccccgggaaggccaacgtggtagcagatgccctcagccgaaaacctttcgggattgaagggaccaactttttagaagattg

SEQ ID NO: 107524 - DNA, 424 bp, Zea Mays
gttttccgagttctccgttttgattaccacatcatctacgtaggcttccacatgcttgccccagtgatcggctaagcatgtttgaatggctctctgataagtcgctcgagcgtttttgaggccaaacggcatggaggtatagcagaaagcaccgaagggagtgatgaacgctgtcttttcctcgtcttcctttgccaaactaatctgatggtacctggaatagtagtccaggaaagacagcacagaacatccagcactggagtctaccacctgatctatcctagggagcccgaagggatcctttggacaatgtttgttgagatccgtatagtcgacgcacatgcgccaatccaccttattctttttgagtacaagaacagggttggctaaccactcgggaggtaacacctctctaataaaccca

SEQ ID NO: 107525 - DNA, 393 bp, Zea Mays
gccatatctaagtgggtcatcatccaaaactaacataagttgcagtgcatcatatggttttagcggtctgaagtatggttgaagggttatgtacatgcaatagaattgtatttagttgtaaaatggcaggaccaataagaaaaaatctaacactgcattcaagggccaaatctctattggtttcatgtttttgcatatatcatttatggtcatctttttggcgtgtggaatatttgatgtgcactggttcttgtttaagcctgtgaaatgaaaggtaaaatttcaataatattaccaatcattagacaatgaagtacaaatatgcggtctatgtaagtagtctcttttgtaaggttggccagctatgtactatataaacaaaaaaggaaatag

SEQ ID NO: 107526 - DNA, 836 bp, Zea Mays
ctgccctctctgtctcaggcggcgggcgtgctccctctgccttctcctgcactccatccctctatagattacaacctctgctcctggactcctggtatagcctctgtccccttcctccactgctacccttgagcatataagtcatgtacctcatcacctatagatactgtcatctccagcacatcatctccctgtcgttctttgtagttgcccattggtgctatgcaagctagagctgtgtgctaataactcttccaacacttaactttctgaccatcttaccttgatgtgtcgccatcaaccacttggtttgagttagacttcgggttccatgggtagtgataagtcaaaaaaaaagggcaatcaagttgtcagcaatcaacatggaagccgactttgtcttatgatcatacaagtactcatcttcccccaagcctagctgttgcaacaaggcatcatgcacggtcatgtcagacggcatctctttgtcccacacaacctcactaggcatttcatcaaacgcctcttgtgactctccgatacagcagaggccctgaaactatctgcttagtctgtgctattgtgccatccttaagagacatttcatcaaacatatcagctagaggatccacgccaaactcccaagaaagggagcgctggtgagctgaatgagagtgaacatattgtcattagctggctgaggaagtagcttgctcccctcaccaccactacttaccaaactctgctaattgctgaaacagactggcctgaaggtcaaggtcataccacatccttgcaaagaatgtcatcagacacatctcgtgcagcaactctcg

SEQ ID NO: 107527 - DNA, 529 bp, Zea Mays
gatgaagctaggttacttcggagaagccgagaagaagctgatttgttttgttggggaggaaaccattccgacaccgaaagatgacgaagttgtaattttcaaaagttttttcagagcaggattacggtttctgctgaacgagataattggagaaattttggataattatgaaatatttcttcattagctgacccctaacgccatcgttaggatcagtattttcatctgggcccttcgaagccaggggatggacccaaatgtcgaagctttttgccaagtgcatgagctacattaccagacgaaggccagagaggacgggctccacgaaaattttggctgttataacttcgcgtatcgtaaggatacgaaggccccggtcctaagctatcggaccaaatggccaactggctggaaaagtgagtggttttatatcaaggctgacgagaagaagagcgagaagctaaagacgctggtcatgagcccactgagcctaagctttgggatgactagacccctgtgtaacatgaaa

SEQ ID NO: 107528 - DNA, 361 bp, Zea Mays
aactactggagagctagaatttgtcattcgacacgcttcgggtaaaaaattgtcagaagaggaaactgccgaagccagacattatgcccgggaactgaaatacccgaaaggatccttggtgtataatggcaccgatgaagatgacttcctgtactgtctcccggacaataaggaaatatctgttttccaggagatggcaagaaacatagaatttccgaagctcgaagttggcctctctgctatgtcgaaggatgacctcgcagatagcctcacttacaatagtctgaaggtacagaagttgttgaattatgagtagattatttttgtatcttttactcttgtgctgatcctttgcctcccc

SEQ ID NO: 107529 - DNA, 631 bp, Zea Mays
atgaccttggccttcgaaggacgaggcaagaagaggttgaatagggtctttgacgttattggtttcgtatatccagattatagctatccttcacaaaagcagggaaaaaagagaaaaactgctactttggccatttctattgcgccgaagggcaaaaagataaaggttttaacgcaccggcctagatatattgaaacggccacggtgccgaagcttggtgaagggacaacttccaccgctgagccagggcgacttgctcctgtcggctccaagaaagaattggctggagtaccgaaggttcctgcaattgagtcagccgaagcgccgaaacctgctaccgaaagcaaaggaaaggcaggcgaagagccagagcgagaggaaacgacagggctaccaaaaaccttgagtccaccaccggagccagaattaccgaaggtatcgaaagctcctgcaataactcccaagaggaggaggatggcaagcgtgctggacgctgtcatggagtccacaaggggaactcctgctcctgcaaaggataccgcggaagctaccacatctcgtgctaaactcgaagcagggccctcagtgcccactgaagcagagcctgctgggactgagcagagaactgaat

SEQ ID NO: 107530 - DNA, 669 bp, Zea Mays
ggaagattgatgccttcacccctatccttcggcttaaaaatgatgccgaattcacctgggggtagaacaacaggaagcgtttaatctcatcataaaatatttgtcttcgactcccgtgttgaaagcaccacaagtaggagtaccgttcagattatacattgcagctgaagataaggttattagggctgttctgacgcaagagaccggaggaaaggagcatgtagtgacctatctaagttggaggctagtagatgctgaaatgatgtacactttcattgagaagttatgcttatgcttgttttatgcatgcaccaagtgtagatgttatttactgtctagtcgttgcttcgttttcggtcaaaccgatgtgatcaaatacatgttgcaaaaccggattatgaatggtaggattggtaaatgggcttatgcactcatagagtaagacttggcctatgaaccattgaaatctatgaaaggacatgtcgtagcagattttattgtagaacatcggattgatgatacttataagctagacatatcatacctcactgttactcccctagactttatattttgatggatcagtttgcaatggaggacaaggaattggcattgttcttgtttcaccaagtaatgtctccttcgatttctctagccgattgaaagctt

SEQ ID NO: 107531 - DNA, 564 bp, Zea Mays
cttgcatactcttatttttatatatgcttacctttatatcccaatatctgtttgagacatttcagttaacatgcccttgaccacccttgtttcttaatgatccatgagcggtcattctactttgcatatccttggtgatctcgttgtctccttgtaactccactcggtaatgaatctttacttcaacccttctgttggaaccttacctatcttacccttgattgttttctccactttgtcgtttcgcgagtctcgccttaactatatcctttgttatgcttttaattattatcatatgcacccttgacacctctatatcctacatcgatgtttgtctcatacctgtcctttaaaatcgcccctcttccgtctcataccttctttctcttgatcatatcctcttctttggctcgcgagtttgtaacctcatcctttgttgtgcttttgtctcttattgcatttacccttctcatctctcaatcttaccttggtaattatgctatgttcgttatctaaaacctccaatctcccaccttagttcaagtgtggtctcttacttatctc

SEQ ID NO: 107532 - DNA, 310 bp, Zea Mays
gcgatgtcggtgatgtaatttgcattcttaaccattatttgatggataacgaacttgctcagcacctccttgggactcatcttcttttatctggggttctcagtaactagggagacaaggttggcataaaaaatagtaaatgaccttagcacgagtcgcacaacttcatggtctgtcatcttgtgctcccatagttgcgaacttagttcaccagggatttgagtctgttgtacatttcttgtggcccttcgtgcctcttcatggcaaatctccctagctcgccctcgatgacctccatcttggtgacttt

SEQ ID NO: 107533 - DNA, 730 bp, Zea Mays
tccaaatatttttatgtatttgatatgggattgattaagagatcaattttattattattttcatgtaaaaacagaggcaataggtgataaacaacattgttacaaaattatagagactgaaatgggtcaatttggaccaagtatgcattttatataaattaaacaagttctagcatttatttttacactaaaaagtattttcctaatgaatttatctgattttctaattatctggactgagcgcaccattaccagaaagtccaggggccttggtgcaataaatcctcagactcagtaaacaccccgaggggatggcgggttgattcctaggtttgccagggttccaaatgcaaaactgtgcccgcaaggggggtatggcgaactctaggccgccagatccaaatcctacggacgagattagatcactcataatatgaagcggtacgcgaccggcaccgtccgatcctcacccgacgctccagatttaattatcccaggatcgcccacacccgatcgatcccaatcggacggtatccgcgacttagaccgaaacagcacccgacttcaaatctggaccggacattgccagatcaacggcgcattcaactaaacaaaggggtatcaccatgatttaatctcaaccgttcattgcaggacctacggttcccaggttatcttccacccctcgccggctcgccccatatcttctctctgctcgtcagcatcaggg

SEQ ID NO: 107534 - DNA, 293 bp, Zea Mays
ctaagatcaagttagcaagtagccacactagcctaaaaaagtgaggcgcaaagcattgcacccatggaaatattacattgataagttgggttgttacccaacagtcaatcaaactcaacaacaccataaaactacattatatagtgttttcacactacaccaagtcggattagacctaatatacacaagctcaataaacaatcggtcctataagtacaagaacccaagaatccttttgggaaaaaacatccacagtcaagcatatagaaatatatgatggtaatagctcagag

SEQ ID NO: 107535 - DNA, 329 bp, Zea Mays
ccgtgattcgcgccaccgccgttgtgattcacgtcgccgatgacccgataaggccgccaagtaaaagccatgcacctggggataactccggtgactcaccgccgtacccctcgtgctctgcggctgtggcagataagttcatcgacgagagccgccttctggccttgtgccacgtgcctgagtatctccaccgcatcgccgtaagccttagtgactctccgttgatcgccggaatgaccgccacggtagaagccacgaatccattgcgctagtactcttcttcctcctccggccgccagcactgctcggccgaattcgtcaccgccgct

SEQ ID NO: 107536 - DNA, 317 bp, Zea Mays
aaaaaagcctaagtcctcctcagaggactcctgtccatcgtcgcaaagaagtccaaaccctcttctctatccgacgaccccaaataaaatagagagcatccatcgtgacaagaggacgggctctgacaggacagcgacgtaacataatcagcagcctcaacgatatccttccacttgtccaagaagccaaaattaccctgcacaggcccaatcatcagaacatgcgtaggcaacaagtcagtgtcagtgcacccctttgtcacacccgattttaggggcaaaacctagtgcatagcatatatgtgccaggatccatt

SEQ ID NO: 107537 - DNA, 1861 bp, Zea Mays
ccatatttgaacttttggtttgtaatctctttcaacacaatttgatgtcatcactgttaaacttaaaaaatatagcgagttttcaactgaccgggaatcattttccatatagaaatattgttatctaccagtttcatccctatatgattctttctagttgagggacaaccatggatgagggtgttcattaaagaactttagatttcagtgtacctagtgcatcctagaagcacgaaataatgtgtggtgggttgtgcaaatagtattgacatctctttaaaaccctgaaacaagagtagccatggactgattaatcaaggtttagtacgaagtcccaaagaaagcaaccatgaagtatgaacatatgaagtggtagtgctaattaaaattggaatgtagcagattagaataccttggttgcttcacggttgaaggatagcccgaacgaaggcccccatcttgagaccaccgatagaagtcctcaatcatcatcgtttcagagatgtcggggatgcgatttctcatggattgaaattgcttgaggaacgagcggagggactcgtcgttgttgcacctaatagacttgaggtaccagggctacgcggacttgttggatagtgattgatagttggtgacgaagtgatcatagaagtcaacacagtggtcgatgcactggtgagggagataatggagccactggagcgcatcctgcccgtgcacgattgggaggtacgccaccatgatgtcctccgacaccctagtgcctcgagctaccattgagtagacgatcaaccagcctctggggtccagtttggcctcatacttgtcgatgttggagacattgaagttacgtggccactggaccacgtgcagccgagaggtgaaggttgaggcactaaacactctcgggcttctgaatggtcgtcgagggcgtggtcgtggcattggtcctataacggtgacgggtgatgtggatcttccagctggtcacgagctgactggcacggtgtcgggctattcatcgagatggcgatagagtctgttcaacccacgactcctcatagaagggggtcatggtcccgatcgtacccctctcggtgcctcaattcttcttcgtgacatcgagcgcatgatgcctcgatgctggttcacgcatcatgttggctattgatgcgatggtaaacgtcgtcatctagatgagccagttaaaagaggtggtttgtcgcccgagtgaggatctgtcgatagctctcattatcgggcttgcggggtagatcgttcgccatctgagctagcacaccgccaacctgacttggagtttgcacgaccttgggaaactcgggttgtaggtcgcggggaattggtagatgttcatgtgggggtctagcattacgccagaccacctcatgttcacgctcctgggcggtgcgatgactcctatggcggacattcctttgcagaaaaagataccagttgtcggtagtttccccaacatcggatgcctcgttctaggagacaggttgagtcgggtcctgttccttagtggcgtggtgacatcggaagttgcagggttgtttcgccgacgacgtgcctaacgttgcgggggctcttccccctgcatggttggctcgtcgtcagagacagggttgtcttccaccaccgcgctgatgcaaaggacgtcgaggtagtagagcggaaattttggcatcgtgggtgcggctgttgctccctagggccgagtgatcatggcatcagttagccacaccttgccggccttgggagcggccgggaccttggtaccatccttctttcgagtgatctaggtctaggcccgggtcgacgaggtgaataacggggtcca

SEQ ID NO: 107538 - DNA, 569 bp, Zea Mays
tgacggcgtcggcatcaccacctgtgataaatgaggtcatcgacatacacgcctgcaatcaggtgctcagctccacttccccgggtgtacatcccgtgctcatccacgcagcgcgtgaacccgaggcccaacagctcggcgtcgagcttatggttccacgcccttggcgcttggcggagttcgtagagtgccttatggaggcgcagcaccctgttcttgtgcttgtcgtcgatgaagccggggggttgatggacgtagacttcttcctggagctcgacgttcaagaacgccgacttgacgtccatgtgatgtacgccccagccgaaatgagcagctatggcgagcactagtctcacagactctagttgggcaaccagggtgaacacttcctcaaaatcaacaccgggtcgctacacataccctttggcaacgaggcgtgccttgtacttggcgatgtcacccttctcatcacgcttgaccttgtacacccatttcaagccgatggcacagtgcccttatagagttcaaccagcgaccaggtcttattgtcacggatcgacttcatttcc

SEQ ID NO: 107539 - DNA, 1009 bp, Zea Mays
gggagagggactcccttttatacttcaagggatgatccttacatatgagagagagagagttttgcagctaacgtctcgcgcggtagtgcgcggcgggccccttggggttcagtcttggggtgtgcttgcacacgacatggctccttcttacgggttgtgcgctactgtactcttggtatggcattccatctcgtccgtccgatgtatgagtcactgtagcttctcaatgtcaacgtagtcgtacctgatgggtcctgcagagcatgctcacagtgaggttgagggtcgtgttcagtacggcttcatcttcaagtcgtgacccttgtgtcaccttccagcatgcgtgggtatgctcggggtatagcatgttgtcctgtcctttttcttgtacatgggtcgttatgtggagactctgatgtcgagatcccccttggtgttgcatacatggaccggacatggtttggtgatgttgcgtctttgtcatggtcgttgtgggtcggtaatgtcagcctgggttccctccttgcgggtctgctcggcggggacttgatcgtttgctctgcctcgcaggcttgctcggcgaggacttagtcgttcgtcccgcctcacaggttttctcggccgagatttggtcatccgcccgcctcgcaggtttgctcgttaaatgggtcggagagaggttatgggccttactatgggtaccccattcccaggtacccgacagtagctcccgagttttcgtgcgactccatggagtcgggtggaggctttcttgctggggatcaaagccctaagtgcgcgcaagcgcatcaatatgatgtagcccccgagcccccgagtaagccttgaggattgcttgggggtttactttgttcatggcgaagccttgtaccttcgttttgttgacctcttatgaccttctggtcgtatcagatacatgcctattttttgtcgtggcttctaattgggaccttcgggttggtcaccggagcgaagcgttgcctcagac

SEQ ID NO: 107540 - DNA, 600 bp, Zea Mays
ggctgatggtgactcccatggtacagtgcctgaacaagatcagaacaccaacgcatctcaccgccgacgatcccccgccgcgattcgtgccctcgccggtgtgattcgcgattggatcaactggataacacttgaagtcgtgtaaagatcatcaccgtggataagttccggccagtaaagtattccggccaccatacagagctcgccgcggtggaaccggataagcacaccggtgaccgccgcattccggccttgtgccgcgtgtctaggcatttccaccgcatcgtcgtgacctgctctcgctctccgttgatcaccagagtgactgccacggtaataggacactaatccagtgcgccagtaagctccccctcctctaaccgccgcgcgtcttcgctaaattcatcggccaccgctcttctctcttataaattgagtgtgtcgttggctccgcaaggtagtcaagcaacccacacaccaactcgtgccttgaattgtctcccagagaacttcaatttgggatcacccccatatcggtcaaaaacaccgtagaaccaagctcgtcgtggtcagtgcgatacaggtcctctcatcttctcg

SEQ ID NO: 107541 - DNA, 470 bp, Zea Mays
atcgactacatctttttatacactcttcttatgtgcctaagagaacaatgctaacccctctactgcctcatttaactgttctgtagaaagttgagttgttggtaatagttaccattcttaagattgatcaactatggtggtacgagtcctgtagaaagtgcctcaagaaaacaaagcctcatggtgatgcctataaatgctcggcccgctggttgtggccatgttggtccgcctaatccaaggtatgtgatgtttcttggtctggtacatctatgcctgctgactccttaatcatgcatatgtgactgctactttatgcgcaggtacaaattgctcatcacagcaggagataagacgggtgagactgatttcatactatttggacgtatggcacaacgcattgttaagaaaccacttgacatcttgatcgcggataatccagccagatttattcccgatgaaataactag

SEQ ID NO: 107542 - DNA, 355 bp, Zea Mays
aactttagggtaaaagtcatcaaatgaccctaagaataaagttgaatcacacttatacccctgggataccagaaaccctaattggaaccctggaaaaccctgaaaccaaaccctaggggattatatgcaaaattggtccacttttggactaaagtgcaaaaaccaagccaaataagtgttttaagacaattggttcaccaatatgtggacttgaaagcaaaaccctgagatttggacttaagtgcaaaagggccacacttgactcatgtgatgaagtctgaaaatcagagaattggctccactttggggctttgtaactttcaaagcatagggtttttgccctaggtcaccacat

SEQ ID NO: 107543 - DNA, 980 bp, Zea Mays
catataagcattttgataacgccccagctgattgcatcgttggcctgctcggcgctttcagctgaagcaaccagctagccttcaccagtcaggaaaaagaatcaactaacaatggcatccccagcagccttgttgtaggagtagtgactgtaggagactgcgtgcatgaaccgattgttgtaggagtagcaactgtaggagaccgtgtgcaacaaccgaatgagatgccaaaaaaggttgtcgccaggcagaaatagacaaccagtacgcctaccaagccatcacaagaagatttggatcacgatggagaaaatagaaatgcaagaggcaagaagaagcaaggagcctcccaagctctcacctatcacatttcacatatgggcttgttgttatctagagctgagttccactggaactgagttccttttcccctctggccttgttcatgtttccttctctttgttaaacagaacacaaggctaactggtatgtgagaggattagtgcgaaacaagggccatatatagacaaagtgggagcgcctgatgagggtcactggtagtgtggactttctaacagtcgggacaggtgcgcgcgagaacgagaagccaacccaacaaaaaacaaacgattggctttctaccctgaacaaaacaataaaataccaaggtaggatagaccacggtggcggtggcgatggcgagcgaatactggtctgccacaacaacctacataaacacagatcaatcagaaacacacacaaaatgaaagcagagaactctagatatacaactgaggaagtataccaatctggtaattaaatccaaaagtgcaaccctcgtgtcattgtgcaagtaccagacacacatggtaaatatctaaaaaagaatatgtgtcactgtgcaaacatacatataggacattaatcaacatgtccaactacacataacacttggattaggttaactatctaatggtagc

SEQ ID NO: 107544 - DNA, 428 bp, Zea Mays
gtgccacaggcaggagtgccattcaggttatacattgcagccgaagaaaaagtcattagagctgttctaacacaagagaccgaaggaaaggatcatgtggtaacctacctaagtcggaggctggtggacgctgacacaaggtacacttttcattgagaagttatgtctatgcttgttttatgcatgcaccaagtgtaggtgttgtttataatctagtcattgcactgtttctggtcaaaccgatgtgatcaaatacatattgcaaaacttgatcatgagtggtaggattggcaaatgggcttatgcacttatagagtatgacttggcctatgaaccattaaaagctatgaaaggccaggtcgtatcagattttattttagaacattggattgatgatgcctatacactagatatatcgtacctcactg

SEQ ID NO: 107545 - DNA, 747 bp, Zea Mays
gtggcatcgaaggctctagaaacgctcttggtagtcgtcgaccgtggtgcggaattgtaggcgggtgagctcgcccaacgggttatggcggaggggcgggccgaagcgttgctgacacaacatcttgaagcgttcccatgacaggatgtcgtcgtcacacgccaacaacacgttccactgttgtgccaatccggtgaggcggtaggaggtgagccacaccttgtcaacctccaaggcgcgctgaccatagaagaagtgctgacatcgtgtgcgccagacgagaggatcgtccttgccattcgggaactcaagcctgtggaagcgggaccggattgttatggttgttatgatggtggctagtgttgagggagcgtaaggaggccggccaggtatcttgcccacggcggagcaagaggaaagggtttttcttcttaattctttcttgctcaattggattgataatctcttctccttatatagagaggtttacttgacccctaagcaaccgatccttatcctaaccaaatcaatctaatttatatcttttctaataaaccaaactaatctaatatgtctgacactctactcgccataacctggagccaacaatgtggatttttcatgtggtggcagcaagttaggagtactcacaggttagcaaccagaggagcctagatgcttggtgagggcttaatagttaatactctggttgttttgggtgcctggacactatggaagacaagaaat

SEQ ID NO: 107546 - DNA, 1192 bp, Zea Mays
agtaactcttttccccatggcagatggcttcggataaaaccacgcctaccgcctccgggattggagcaggtttccccctaagagctgaaggagaggctggcggagaagggagtgagacccacctccccgcacctccggaactaccactagacctagtccaagttctagccaatcaaacccgactcattgaagtcctcactagaagtctggaaaaccagcgcccaggtggtggaaggccataggacaggatgggggaatttttgagactcaagcctcccacgttcgcggggtccagcaatcccctcgatgcagatgactggcttcgcacgatcaagaggaaactggaagccatcggatgccccgaaaatcagcgtgtccaactggctgctcatcagctttcgggaatggccttagcatggtgggacaccttcagcgaggccgtcagagatgctacctgggcagaattcgaaacaaccttccgtgagcaccatgtaccccaggggatagttcaactcaaggaatatgagttctgggagctaactcaaggtgggagaacagtcagtgagtatgtgcacaagttcacagagttggcccgttacgcgcctgacgatgtcagcaccgagtccaggaagatggcccgttttctgaaaggactaagacccgagcttaagaccatcctcgccagccaagacttcctcaacttttctcacctctccaacaaagccatccaagtggagagggcaaaagaggaagaaaaagggcacctcaagaagaaattccaagttctccgagctcagcagcaagaacgtcaccagagagctcgaccctttgggcttccacccaggggaccaagcttcaataaaccatctggacccactccgtcccgctacagtcagcagagtcagagctcccttcaggccccctctgttgcaagcaaccaatcgccagcaaatgcctgttggcactgcggagaccccagtcacttcaagaataactgcccccagttgaaggcacccggacctacctactccaactcggtgaatggccccaagattccctcggcacctccttccaacagtcagcagagcaggactcagtaccagggcagagcacgagtcaaccacgtcgacgctcaggaagcccagcaagctccgggagtagtgctcggtgagttccttgttgaatttagtcc

SEQ ID NO: 107547 - DNA, 340 bp, Zea Mays
gcgaggagaaggtcgagcccttcagcaaggagagtggctctggtgacaagtcaccgaggaggtggtcgttcccaagtcgatctccactccgacgaacacgtgacacccgtcgctcgctctcttgcagtccacgccatcagaggaaggtgattgtagagcacgtgatcacagagaccggtggcttcgagaactgtccgcaactaatgaagaccaagtatgacacatggtcgctgttgatgaaattgaagctccaagcttgccatctatgggacatcatcgagttcgatgacgacaacgatttccacgacgaccgcacctcattggaggcaatatgctcggg

SEQ ID NO: 107548 - DNA, 522 bp, Zea Mays
gcaactttcaaggcaagggacaaaagaactagatcaagggtagagtcaatcacgtgactgcaaaatcagttctggaaagcgcgaacgtggtccttggtatgcttcttatcagctccatacctgcaacagtcttatttgatactgtaacatctcattctttcataacggagaaattccttaaaaagtatagtatatcgagttatcccttaatgaggaagttgttaattagttcactgggaggtgaaatgagagctacacactcattccctcaagttaaccttaagattatggggatagatttgttggttaacctagttgtcctaagacctagtggagttgatgtgattcttggattcaactggttgaagagttgtgacagagtaatatcatgcgccaagagagcagttaccttgacaagcccgcatggagagagaattgaggtcagtgtcatcatgccgacagaagcagatgttatgataaatcaagtggaagagaagtctctagaggacatcagagtggtta

SEQ ID NO: 107549 - DNA, 460 bp, Zea Mays
cacaagtgtgctaaagcgacttttttcacttcaacggccaactactcggcatctgtcgggagcaagacatttgctctcgagagccagatcacctttagcttcctcaacttcctcacccaggagaccagtgaagtccgcctcattagccatgacaaggccaacaccacaggcctagggcccagaccttccactcaaactaagctggagaaatagcggctcaaaagacatgtcatagccctcaagcggcgcctcaatgcatccgttgttaatgctaaacggcaagcggaggtagccccacaatcaaccatggtgcccgtagtcaggcgccagccaacatccatccttaaccttcttgaggatgacacgagccgtgcctcgatggagctcagcctggactccgacgaggtgcaagaaagagcatgcttcgtggccacgccgctacaaggcgacaacaaagggg

SEQ ID NO: 107550 - DNA, 1309 bp, Zea Mays
catcattgcattcacgagaggatggctcctggcccttgtcatgctttcaagcgtccctccgattgccattgccggtgcaattgtttcaaagttgatgacagggctctccacccgaatgcaagcaaactacagtgatgctggaaacgtggtggagcaaactcttggtgccattaggacggtttgtgctattagctagcaaacacttcttccttttttgttttgtctattcatttactatcatcaccagtaacttcctgatatatatcctgcttacctggtttatctgtccatgcttatctgaaggttgtttcattcaatggcgagaatcaggctataacaaaatataacatgttcataagaaaggcgtaccggtcttctctgcaagaaggtgctgtaaatgcccttggattcggttctgtgatagcaatcttattttcaagttatggcttggctgtttggtatggatctaagctgatagtcgagcgaggttacaatggtggcatggtcatttctgttatcatgtctgtcatgatcggagcaatgtaagatttctgttatcatttaaaattttcttaaacgaacaatgacaatgacaataagcgagctatatatgtttctgtgtggacgagccttgactccgtcacagtgacagtgactgtatctatcttctgcctattaaaatgtaaagtgtaccatttgtgcttccaaggaaaacatctgcttaacttctaatactaaatacccaataaggattaaatcatgcatctttcagacaaaacattttgtatctattctttcagaccatcggttatatctactgatttcggttataaatacttcttttctgcaggtccttaggccaggcaacacgatcagtgacagcttttgcagaaggccaaggagcagcacatagaatgttcaagataattgaacgcaagccagatattgacatagatgataacacaggtatcatattggaggatgtcaagggtgatgttcaactgaaggacgtgtacttcagctatcccaccaggcctgaacatttgattttcgatggattctcgttgcaagtacaaagtggaacaacaatggccctggttggtgacagcggcagtgggaaatcgaccgtgatcagtttggtagaaaggttctatgacccacaggctggagaagtcttgattgacggggtcgacattagaggaatgaagcttggatggatgagaggaaaaattggtcttgtcaaccaagagccggtgctattctcaactacaatcagggaaaacattgcctatggaacagaaaagccaac

SEQ ID NO: 107551 - DNA, 434 bp, Zea Mays
gaagcaacccacatatacaaccatcaaataaatgaggatcaatgctttagtggtaatgccattctcaaacagtatcattttagttgtttttgagttttgacgatgtacacgtgtgctttgacatgcttgatccaccgctgcaagcttactttgatttttgtgacctatggaaacatttagaattttggtagcttgttgttttctcttttctggagtgtgatcttttaaaaacatgatatgaactcatacttttttatcatgataaaaagtctgttaggattgatggttacattatgctactccatgcttccatgtctcactttgtgattctgttccacttgattctgatataactaaagtttctaatgtcgcatattcccaaacacttacccggttcattcttctttgttgtggtttgagaattcaggaagagt

SEQ ID NO: 107552 - DNA, 317 bp, Zea Mays
tggcagaagcgtccgtatcatgagctgatatagaaacctggccgctgtggtgaagtctgccggagaacgtcgcgacccatctgagaagggcggtcggaacaaagccacgacgtgagctgtaccaggagcaactccgccgtgagggcgacaaggagggtcagaggtgccatagtacatgttgtgaagacgagtcgatgactcgtttaatccaaacacctgacaaatctgactggcatgaatggtaacatcctctcgctcaaatcggaatctcatccagtggtgatcagggtcgatccatatagtagcatagaaaactc

SEQ ID NO: 107553 - DNA, 379 bp, Zea Mays
atatggtgaaagaaacggaagagaaggttcaacgaattatgcataatttgaaagaaccccaagctcgccaaaagagttatgcagacaaacgacgccaacccttgtactttcaagttgaagattatgtctacgtgaaagtctccccaatgaagggtgtatctcgttttggggtaaaagggaagcttgcaccccggtacattggtccttttcctatccttgaaagatgtggaccagtggcataccgactccaactacccgaaacattatctgcagtgcataatgtgttccacgtatcccaattgaagaagtgtcttcaggttccagatcgaaccgttgaagtgacgaatgttgccttagaactagacttgacatattcaga

SEQ ID NO: 107554 - DNA, 382 bp, Zea Mays
gcagcataagcgagcgggagcggcaccgggcggccctacctcacgtcgacgggtatcagcacacaggtcttgtagtgattgaagatagaagatgatgaccgttcgagtgtggcaagggtctctttgcaagaaaatagagagatactagatagagatggtggggggactgcattggatgaaaaatgaagccaccagataatgctctatttgatgagatggatgggattcagggcgccaaaatttgcattcaatgctcagggaccaggggccgtttggttgcagtttgggtgcatgcatcatcaattataagattcaaaagccattaagatggtttgcaacggttttctctaaatttcaccatatattctacccctatttttat

SEQ ID NO: 107555 - DNA, 310 bp, Zea Mays
gggcaccaagctagattttagcaccgcctatcaccctcagacagacgggcagacagaaagagtcaacaaggtcctcgaagatctattaagagcctgtgtgctagcattcgatagaagttgggaatccagtttgccctatgcgaagttctcgtataataacagctatcaggccagcatcaagatgtcaccgttcgaagcattgtatggacgaaaatgccagacccctctcatgtggtccaacgtaggggaaaaggcactggaagggcatgcctttgtcaaagaggctgaggagaaagttgtcctgatccgc

SEQ ID NO: 107556 - DNA, 498 bp, Zea Mays
gaaatgtaggtagtcatacctttagggttgaggtggaccatggtagtaggagtcagcgtaggatctagaagttgagcgcccatgttctgtttcgattctcctcctcccccttacatagtgggtacttggggcgtagtatcagtagcgtcataggaacgttggtttctaagggtgtcatatcttagggtttggtaattctgttcactaggcgctagaaagagattagatctcttgtgaattgtggcaactagggtttaagaaagcacatgaattggcttccgtctcagtctctgcctcacctttttatagtgcctatgagtcaagggtcacaaccataggataggatcgtacccccgattttggtgcaataagttgtagattgccccatactgagtttattggcaaagttcaaagacatatcatgtattctcgtgtttgttcttggcttttctcgttctttgacgatgtggagcttgttcttcgtttgatagattcttg

SEQ ID NO: 107557 - DNA, 344 bp, Zea Mays
agagtccgcctagcagcatcgctgaccgaagcagcataggtggatagcggtgttagggactcatgagctgatagagtcctgaatcctttatcccctgcatccatcaccctgacatgaatgcgagtgatgtagcaagcccgaggaggctcgcacactcgccttgtctcctacaagggtcggacgtaggttcccaacgcatgcagaacgtcttgtagcaggttagggaagtgccctgtctagaacattgatgtataatgttaggtgatcggcccaaaccccataaagtaatcctgctgaacaccattggcttcttcgttgacgttctcctcatcatcttcgtcgtc

SEQ ID NO: 107558 - DNA, 566 bp, Zea Mays
gagctcgtggcttgattccctaacccaatccaaatctctagggacactaaaacactccacaaaagaacaactcaaccacatatcgattggctgctatactaagtcctgagaagaataagagctcaaagggacaaaagaacttgatatggaacccaaacatttagaggaaactccaaggaagaccttcaaggacgagcgtcagtgttgggccaaagtctagcagtaccgaggaggagcagtgccacgcgcacaagcggtagtgtcgctcgacaacatattgtcagaatgtccttaaattttgtaggaagcaagagttgaggaaggacaagatatttgtgaagtttgagctgcaaaagatcaaaactcctcaaaaagattcaaaatctcagttgtgattggtgttttattgggttttttgttattttgaatcaaactgctagaacaaagcacatatccactatatgctccaaccaaacactcaaaatgatctaaggatagtgtcccaactgcatgtgtccccaaaataatccccaaactcaataaatcaaagattctcacaaaatcca

SEQ ID NO: 107559 - DNA, 653 bp, Zea Mays
cattcacagcagtagcttcatgacggtctgcatgattaagcttggtttccacgtcttgcaagaagcgactgcaaaatgtcatgcacttctctaatatatatccctcagctatcgagccttcagggtgcgctttgttccatacataggctttaagagtacgtagatatctctcaattggatacatccatctatagcacacgggtccaccaagtttagcctcttcagctagatgaatcgacaaatgaatcattatatcaaaaaaggctggtgggaaaatcatttcaagccgacaaagggtttcaggaatcgaggtgctcaactgctctaaatctttagcactcaactcctttgaacatattgcattaaagtacctactaagctgaatcaatggaagagcaacattttctagcaaaacattgcgaactgcactgggtaatagcttctgaaaaataacatgacagtcatgagtttttagaccagacaccttacacttgttcacatccacactcctcttaatgttagaggcataaccatcaggcatcttcacgccttctagaaatttgcataaccatatcatctcatccttacccaaagtgtaaagtgctgatggcaaggtgtattttccattcccgagcacaacatattgatccttc

SEQ ID NO: 107560 - DNA, 1659 bp, Zea Mays
atcatcagggtttgcttgtgcaggcccggacgccggaacctgcgcaacaaccgatcttcagtatcatacaaaacgaacatcgtcagtctattccctattacaccctttcaatctgcgccgatgcgtcggccgtcgcaggaccctcagtgatacctccttggagcatggtttgctcttcggctcccgcctccgccgaagcatccctctgggtctccgagctatccaggccggcgagatcctccacatcttctttgttcatcgcctacgaagacagcacaacaacatttcaaaacagtgaacacacacaacaccacccgccaaacccataacatacctgcgccagcgctcggtctgccctctcccagacgatgccgcggccgtgagggccccacatcctatcataaagcgcccaacagagcgcttcaggacgtcatcctcaatctggaacacgccacgatcgaagtcctcgttcactcgatcgaagacctcaaaatccctgcacccctctctagacaaaccattcgcggccccttcgcaagtgacgagagacgcatatgacatgagacccgtcacgatagacgggagcgacccccagtaaccttcagcatgcgcgaagaagtttcccggaggtcaggcggagacatcacttcctcgggaaccgcgcacgtctgcattaactcatcaacaaaaatcccgaagggcctcggcccagtcgcgtcgtccccccatacctaatttcctcttctaggtggccacgaccggagccttcccctttgaggtgccttcgtcaacccgaggcttcacttgcttgcctcgatcgtcaccgacgtctgcggagtccccctccaggtaaggaccatacggcaaactattcaattcaaaaacacggttaaacctcacgcggatatcccagcttctcaacatttcagccttcggtgcataatttccgacaattttaatagcctccgactcaacttctcgcacgaaagcggcagcatcccggccacgcaagtatacagcgaaggctgggcttcgcaccagtttattccctagggatggcatccggcgaggtacaatttcgcccaaagcccacccgtgcgccaaaggccacactccgcaagcaacgaattcttccaccagatcacgaccactgctaatacaggccgcgtagcgaaaggcctgctcgtcctgatcccatttcgccaccttgaactgtggaaacacgtcataacaatgggagcacaaaatagcagggggcaaactaggtaacccttcgacgtcgccaggcgccacataaaaccagagataccaccagttaccccacttattcttcgcacatggtacaatctcaaccacttcagccgaagtcttcccggtcctcggcgtgaaggtgcaagaacccaactgagcaatcaagccacctatcttactcttctgccagtgcagacaatatttttttgtgaagacctcaacaggcggctctccaccgtatgagaacacagcccacacatacttcgccagtgcagccattgcgttcggtatcagttgatggatttgcaccccaaacctccgcaaaacctcgactacaaaccaatgtgccggcaaacgaagtctagcggcaaaaaagcctcaaaaacaaccaactccccttctggctca

SEQ ID NO: 107561 - DNA, 398 bp, Zea Mays
ggcactcattttccaggtttgcctagccagtctaatacatgtttcaactgtggaaagtctggccatttcatcaaggattgctcctatcctaagaaaaacaagcagaaccttcaaaggaattttggaaatgcttctcagggctagcttaaatgcaatgtgacaagaaactaggcaggcaaaggtgagaagaggactggacatgtttattatacccaggttgccactacacaagaaggagaacctgtattgatgtgtacgttttttgttgccaaccattccacaattattctttttgattctggtgcatcgcacaccttcataagtaagacttttgttgagaaggattgcattcctattgaagcattgcattccaatagtgatagaaatggttggacata

SEQ ID NO: 107562 - DNA, 346 bp, Zea Mays
cgccctagataggaaggtgctggggaagagggagcttgatggtagagtggctagggagagaaaaccaggcatcgatgctgctcggagcgcctgctccaggggagctcgacaatggagggagttggagatggagctaccgtggggaacaagagaggaggatggcgtgggggagaagtggaggtggctgggagaaaaagaaagagtggcggctaggggtagatagataaaagccaagtgcaagtgaagggggtccatatttatagagaagccctagggttagggtttttattgggctgggttgggctggcccaaaatatttaatcgggttgcgctaattatttcccgg

SEQ ID NO: 107563 - DNA, 370 bp, Zea Mays
caggcacccagtttgaggaaatacatgaaaagcaacaacaaatgcgccgtgcatttgagggctgccctgacgatttggatgttactgcgcccatggagacgaacacaaactcaaacgcggaaaagcaggtattatatacactctcatcatggttacattatatgttaatttccaatttgcatccaaaatattagacaaaaccataataatgtatacaggattaccattttaatgttggcaataatttgccgagggacataaacatgtctcatcaacatataccagattgcaaccctatgagctcatatccgtcttcccacttgccgatgtttgacgccacaccgcaaaaacatgtatatgtttcatcttt

SEQ ID NO: 107564 - DNA, 594 bp, Zea Mays
ctcttactatggtttgttagttatttgatgaactaaaactttgtaatttgatcatatctgaaattttgcatttttccccatgacttctcccaattaccctttatgcttaacttggcttacttagggtttttgttagggttgccacattacttccttttttttgaaagacccatttgttttgatcatgatacttttaagtatatgcttggggaattcttcattcttaagttaatttgatgctcatgcttactttggttcacatagaatgatggttcttggtttggcattttaagagaagccctaggtgacactggggtgtcacatgcctagccatccatcatggtgtttgctgtgttgttgtcagaactctcggcttcgtgtagtttcgattgggctttgagcttggtatcggtgaccagtcggaggacaagactgttggagccctagaaattttttagcatgacttcaacctggccatcgagacgggtcgacatcctctcactggaggatgtaatcaatggatttcctcagctaggttgcggccgtaggctgctctactcacgagatcatccaggcgagtttgtccctaaagtt

SEQ ID NO: 107565 - DNA, 558 bp, Zea Mays
tggtactgggagcagctaaaaaggaaagacccttagctcctgcaaccatccatttctccctttcctcagcagtggcctctaagattgtagtgatattggggggggatccgttaaacaccactctgtttctgaacttccagatcatccaggctcccagaatcaaaagtgaatttacccccttcttggtcatgcctgacacaatatcagcaatacgtttccaccactgcaggaagtttgtgtcatcttggataggggcaagaatgtggagcctgaatttccgaagagtgatgtaccaatataatctggaaaagctacaagaaaccaaaatatggttgatggtttcaggctcttggtcacaaagagggcatctaggaggatgatttagtcctcttttttccagtctgtttgcagtccagcacctattatgagccaccagccaaaggaagaaccgacacttaggaggtgcccaagatttccagaccattttgtaatgctcaaaaccaacagagccagtggagaaacccttataagccgagcttgcagaatactgcccattag

SEQ ID NO: 107566 - DNA, 353 bp, Zea Mays
tccgcgcaaaagtagcctaagggtgcagccggattagcacaagtacgcgaaaacggccaaaagtccacaatacaatacaagttgcagttacatacactcagcgagggcaccacatactacatcggctcaaccttcgggatgatgcccgcctccctataattgaacaacattattttcaattcctcaccctcaaaaagatttcgcagatccccctcatcaatgctcgtcccaatcggcaaagataatagctctcgtttaccaaaccggtctactcaaagatgttctcgctccatccccatccaacggtgcctaccactccgcgaaacctcgcccacgccatgcttcgacaccac

SEQ ID NO: 107567 - DNA, 758 bp, Zea Mays
actaaaacctccctcgcacggctctggatattttcgcttggcctcatccactcaccgctctatctctccaatgtctcttcacgtcaacaaatatcacattctactcattcccttagcccatccagccggtgtactcatccccatttcctccgtcatctccatctccgagctgcttagctgccttcgccaaaatgtcgagtagcctacaccagcccgtagtccttgtgcctcctccagcacgttccctagccatccgtctagccgatggccatggctgatgttagcagtaggaggagaaggtagatggggttttgggaagaatagagaagggagacgaaggacggaaggatgttatttcttagagtttccgttcatccataaaactcctagccagtagccagaccagattaagtacatccacacgtcagccgctacatacacagcaggtctacacctactcaggttcatatacgcgcctgttgggtcaacgcacacgacgagttgccgcctccagcttgcttggaccattcggtattgcgccctcttactgttgtagcggctgggacacctcctccattggtgagttgataacattcggtattgcaccctttgaagcctgctagtccccaagccctcttgcttggaccattcggtattgcgcccttcgaagcatgctagtccccaagcaggggccaaaggaaagctttgacgaagagcttattgatcttcccatgtagcgagatcaggcgggaggccag

SEQ ID NO: 107568 - DNA, 301 bp, Zea Mays
cgattccatgtggtttgcacgttacgcaaggacgaaagcagcggtaggaaagtgggcgctctgtatgtactacagtggtacaacggaaacaaatcctctccagtactcttgcgtacggccccaatgtgcatcgaatacatagcgaatgggccgcgggcctctgcaatggagttcggcctgttttaaactccagttgggcgctgatccacagtagttcctctctgcaatggaacacagtcaaggcccacttccttcccacacaactacacaagtaccacagtcctcaagcaatactactgtt

SEQ ID NO: 107569 - DNA, 591 bp, Zea Mays
tttttggtgatttatgccaacacatttaaaagcaacccaaagtgcaatatcattctttaaagagtgcaaattggagaccaatttttctcacatagaatttcgcatatttggattacttttgccaccacttggtttattttcacaaaacaaattcttttgcctatctctaagtcaaacacatttgattgggcaaatagagagatatttcaagagtaaatttgatcaaatgccacaaactctccctttttctcatagtgaaacttctcacccataagagaacaattttgcagtaaaagggttttggttaaatacaaagcttcaaactctacatttttgaaatttcacaagtggttggctgatccatttgctttggccttaattttccccctttgacattaagcaccaaaacgggatatctttttggcccattaacctcattgccttaccaaaatgtcaaataagagtgaaatggcaataagagcacaacaaagaacttgggacaagatacatttataccggaatgcagtggaagctctttctttgtccaagttcacttttccctttcaatatccctttgagactatttcaaga

SEQ ID NO: 107570 - DNA, 410 bp, Zea Mays
cgtggcctgtggagtgggctatgtgcaggatagcaggaagtatgctggaggattgtggtacaaaaatctgattgccatgcattatgagtccctctctgatctgccatggtgcaccttgctgccctatactgatctgattgtgcagcagctgaaactcttggttgcttgcacagtcttgttggaggtctttgtagagttgaaaggttagtgttgagatcgtatacaccgatccactggtggtttccctgcgcgaaagagcgtctgctactatatttagccgaccagccctatattccaccttgaagttgaaaccaaatagcttactaatccactgatgctgaggtacaattgagagccattgatcgagcatatacttgaggctaaaatggtctgtacgtaccacaaacttc

SEQ ID NO: 107571 - DNA, 305 bp, Zea Mays
ggtgttgaaaaatgagattatgttacttcattgtgataatgtagcagcgatcaatatagcaaataatgcagtccagtttgaccgcatgaaacatgtggagattgataggttcttcatcaaggagaagattgatgctaggactttgaagttaaagtatgttaagtctcgtaatcagttagcagatagtctcacaaaaggtctaggtcctaaagataatgagttggcatgtagcaagatgggaatgttgaatatatttagcccatcttgagggggagtgttggtgtaaatagttcaatgtaaaagga

SEQ ID NO: 107572 - DNA, 336 bp, Zea Mays
tggaaatggcttatttacccatttccctttcaccttctccctacgttagtcggggttagtccagataaaagaatcctatcacatcaaaaacattattaatctccacattttctggcccctgaatgcactcgtcagggccttgtcctcctttttaacaaagtttccaagaacttcgttacatttcccctcaatggcacacaagcattcatcacatagctctccaaactcactctcaaacttgtacgtgtattttaatctcacgagacttccactccccacctcttgcttcgtcgagctatcttcctttggctccagcattatccatttggcttggag

SEQ ID NO: 107573 - DNA, 493 bp, Zea Mays
tggagttacacacctgagcagggtattgggtactgacacgtggtcaggtaggcccaaacacttagagacagaaacagggaacactgaagcacgacaagacattaggtaaaaactatagcgtctcgttatgtgtgtctcatctagctataagacgtgggtatttatctctccgttcggtcgaaggtggtctaaagtacggtcctgcctccatccaccaactatatccgaagaatattccgtgtaattgggtaattacaacatcgtgctctcaacaggcggcacacaccaaataatacacccatgtgttacactgacatgtgggcctctagaaacgtctcttggtggaccaacgatgtgatgatcactgtgtagccttcgccgccacctccagcgtctcgatgcccttcactctcctttaacagatgtatggcgcgggtgactctaggacgatgtcgtggcgaaggccttggtcggtgtcgatagctcagaggcc

SEQ ID NO: 107574 - DNA, 399 bp, Zea Mays
tctcagataaagagagaagtggaaataaagggattacccaactaaacaactgactttattaataactacaccaagtggtaggggatacccacaccttggtgacaatcattacaaagatccaacttcattacaagttcatcacgacaagcatccaaacagatgataagcaatctaactctaactaagactgactaagactaagatactaaattaagcattattatagactctgactccgttgatctatggatccaaatctatctgggtcctgcagtcaggggtaccatagtcgaagcgaccacgaggcggcgaacagtaagggtgctgaatcccgacaggggtgggagaaccaccatccagatagtggcgcgctgcacactcagcatgcaattccgcaac

SEQ ID NO: 107575 - DNA, 439 bp, Zea Mays
atgatgatcgaacttgttgtatgtactttgagttccttgcgtgtaaaaaaatgctccttattaattgagatctctgctgtatacacgtgtatgattgtatacacttgtgtttagttgcgtgtaaacaacctcatcatttcagctacttgagctttcttgtggtgtaccccttccatcacaaaaaaacaaagaatatttataaatttgtatcactgaatttagtattatatatgagacatatcgatctttgaacacttgatttaatcaagaatatttataaattaaaatcgtatttttttcctcctacactgatgtagtagtattacaatcgttgactttgatgtgacagcctacagcagctaacctaaccgtatcttcagaactgagattttgtaatggacatctatcacaatcaaacaacaagcccatgcgagcaaat

SEQ ID NO: 107576 - DNA, 293 bp, Zea Mays
ttcgaatctagtttggttgcgcggaggcatgttatgtggcgacctccggatctgtgttgccgatgtggtgctccatctcgacaataggaaagtatctttcccctattttttccttgtctttgtggtgctaatcttgtatgtcatgtgattggtaaatgaaggtgtcaaaagaaattaaattgtctaggatatacgcatagagtaatttaggtggctttccatttatgtgacgtaagaattagagtaaaatgcaaggatgctaggtgtttgtgttctagctggtagaatagatg

SEQ ID NO: 107577 - DNA, 571 bp, Zea Mays
tgaggagtcagggactggagccggatgccatatgcttctgcaacattcatgagctatcttactagacgaaggcgaccgaaaaagaacaatatcataacaacttcgtctactatggcttcgtgcctcgctctgaggcaaattaccctgtgcctacatttcggaagaagtggccgggttcttggatgaaggaatggttttacatgaagaatgacctgggtcagagggaggatgtgataggtgttattcaacatcctatatggtcatgcttcagcattagaaggccatcaatagcacttgggaatgaagtgcaggcgtgccaaattgctttcaacaccatatgcacctacattggcacgagagatttagttcaagagaacattgcttacaaagtatggcctcttgcaaacgaatgggaaatgtcgaaggaagctgccgctagctccagtcaaagtggcttagtttatctcaagtttaccttccggtacacaagccaatttgatgagccaaatgatgattggctagacgctatacaggcaacgagtgatgaactacttggagtgtactcgagggc

SEQ ID NO: 107578 - DNA, 436 bp, Zea Mays
gtctttttgcgcggctgcttgggtgattttggcaggtgtgtacggcctgcctgtgggggcccacatgtaggaggcgtgtagaccggtggggcaggtagatgacaaaataggtccacggttcagaggcagaacggccgttggcaaaacatgtcagaggcagaacggcagactattattgcttacttaataagtagtggagatatgagcatatcacacgatgtaccacgaaacataggatggacgtgttgctgctagtgataatgtcaactatttttttgctatattgccatgattttcttttgctgcgatgcgtatatagtggtattgatccataattctttactcacatggtatattgatttaacatgataaatatgttacaagtgtgtagtgtactcatttatttctctttagactgtgcggaggtgctctggag

SEQ ID NO: 107579 - DNA, 289 bp, Zea Mays
accgtttcaaaaagcgcccagtcagcacccggcagttacctccaaaacaccagcgtgccacgttgtcactcggcagttacttccaaaacaccagcgtgccaaattgtcacccgacggtcactcccacatcatcactcggctattaccctcaacatggccggcgcagcccgttctaattcggccgttacctctaaaacgccgatgttaccttcagtcgctcggcggttacctctaacacgccgacgtcgtcttcagtcgctcggcagttatctctaaaactccgacgccg

SEQ ID NO: 107580 - DNA, 558 bp, Zea Mays
aatttattgaaccagatgatgactggctgaagtgtatcgaagctacaagtgatgaactgcttgggccgtactccaaagcgaaagataatgcgttatctgcggccttcggaagccggaaaaagaaaagactaaatagggtttttgatgctatcggatttttgtatcctgaataccgctacacgccaagggggcagaagagaaagagtgcgacttctgggaaggaagttacttcagctgctccgagtgagtccgcgccgaagaggagaaaggtgaaggtccttactcaccgaccgtgctatattgaaccggccatagtgctcgaatttggcggtgagacctcttcggctactgaagccaaagaacctgcgcttacgcagaagattgaagagccggctgcaatgccgaaggcatcctcagccaaattagctgagtcgaaggccgataatattgaagagataggggtcgaaggaacaaagatattagaagttacaagcccttcgacggaagtgacagtgccgaaggcacaaaaaggtcttacagcgacccccaagaggaaaa

SEQ ID NO: 107581 - DNA, 619 bp, Zea Mays
tgctctaccacaaaaaaccctattcttattagttggcgattatgtgttttctttcttcaaggtcgttgcatacaatgctcatcaggaaagaacaaattgagtaggtagtgggctttgaacaagaaatgcattaagtggatggagtttaccatggtgctttgaactccgactggtcatggggacagaatcatagccgatttgggaatggatgcggcctatgtagagtcgacgttatctagtatttgccataagaattattcgttgaagaccttgtccggatgaaagaacgggggcagcaagcggctgctgccccgccatgaatgacaacacgagcccttggaagatgtgtagggaacaatttgaggttaggttaagacatagatctaggttttggagaggtcaacacggggcctagaaattgaagaggtagatgtagagagcttacatggagtctgaatccacattgacttgcccgctcgccgctggcgatgatgcggaggatgggcgacgaagaggaaggtgagcccgggggcgctaggcggcgagcggaaaggcacaaagcaaggctgagcagtgtagtggagtcgtggtcgggttcggagcaagcgttggtttctag

SEQ ID NO: 107582 - DNA, 404 bp, Zea Mays
aaattgttgcagtcctcgctaaaagcataaaaaaggattccgattcgctattccgtaccgtgtagtagcattcagcaccgattctagcgtagtctacgagccaggccggcgtcccccaaaatcaccggcaggttttcctcggttcccgttacgtatgtggacacctgaactcaacgcaaagaccacgaactgccgtcagagaagacgctagtaaaccgcccgccgccccaactcacgaatcggcaccgccacccaacggggctggtagagtactactagtagtatccattcatacgcgcgtggccggtaggcgctgtaaccactttcttcttctcttccagaaggcccagccctccaccctccgggcaccagtgcgtgcgccgtcgacttcctctcaccttctc

SEQ ID NO: 107583 - DNA, 298 bp, Zea Mays
atatgattgtgctaacgccatggcaatgtcttccaataagtatatgatttggttttctcccatttgttatatgatttttttactgagattctgggaatgtatgctctagaacggctggtcaggttaagtgcctcctatccgattggccttgctcagggttaaggccaagactcttaagttttatgactatactggtgcattattatacttcgattgagtgtcattacattacatctcagaaaagtttcatcctcagttttattcagtgagctatagacaaagttgacaatggtaccca

SEQ ID NO: 107584 - DNA, 348 bp, Zea Mays
cggtaatgatgatgctgaagatcggccgtgcaggccaagtcacgtggtcttcgggaaatctaccttgaagaaagggcatgttgaggccattaagggtaggtattttcatgatgtatctatagtgagagtaggaggtgaaaacaatgttcctcttcctgagagagatgaggtggtggtttttagaagctttatgaaagatgggttgcactttcctttgcataagatgctagttgaggtcttaaaaaagtttgaaatcttaatcagcttactcctaaagccttgattaaagttgaaatcttcatcttggcaataaggagccatggactggaaccagatgttgattgcttc

SEQ ID NO: 107585 - DNA, 347 bp, Zea Mays
atcttgttcatttgagatcaaggcatgattatctcttgtctttattggggcttcttcggactcatgttgttgaatcttagcaaatagttggtgaggtgtcatttcctcatagtcatcacggtcccttatcattcttgctaaacttttatctttttctttgtatgctcacataaatagtctagtaaccttggagtcacttcaatcttcacttccaagcactcttattttgttgaccaacaccattagttggtcaaagagtgattgaagtgactcacccttagtccaatcatatcaggcaagctcactctacaaagcttcaattctatgtctcttagctttggggtctc

SEQ ID NO: 107586 - DNA, 363 bp, Zea Mays
aaagggctgtggcgaaatggagagtgagtggattgtcgcgaatcggtaggtgtcattgtagtgagatggagagtggtcgtcttcgcgtggacgggacaagtaagcgagaattgttgtcctcgccgattgggggtgagtgtaggtgagagggagctgcgaaatctttttgagggtgaggaattgaggataatgttgttcaactacagggagatcggtatcatcccgaaggttgagccaatgtaatatatgatgccctcgctgtgtgtatctaaccgtaatttgtatgataaggctgtgcggcttcgttaatctggccgcgcccgtaggcgacatctgcacaaagtcttttgggaacgacttcta

SEQ ID NO: 107587 - DNA, 609 bp, Zea Mays
gccgccgccaacaatttctttatgtttttctgttttcttgttcagagaacacgcatgttccatccatgcccacttgcgcgttttttttgttgttgcagttcttcctcgtttgcagttcttcctcgggatttgatttgattgattggattgggttggtgcgggggcatgctgggggcagatgacgacatgcttacgaagcagaagctgctgcctccgtgacgaggcacgccgtgttgctcgtcttccatgactctgatgcctgcctgcttcgctcccaccaccccacaccttaatcgatggattaggaattaacctgcagcgcccgtccaggtctcgtgagagatttatatgtttggatcagattttagtttcttgaggcagatgacgacatgtgcatcctgcttgagatgcagaagctgcctcccagaggcttagccatgttgctcctcttccatgactctgatgcctcctcgtcctctcccatcatttgtgttttgttttgtattggtttttttttgctgtcttgctgtcagtgatggcccatcccctagcggttaaagctaacaaaacaaaacaggcgatgtttccttttcttgtcgtcactcaggc

SEQ ID NO: 107588 - DNA, 798 bp, Zea Mays
gataagacaaggcattgggtatcaataaagggcaatggatattcccctagacatctcggcttgctgtttattttttcatcacaagtatttttgtagtccagaatgcaatgtccaaactaaattgagtaaaacataacacaaaacaagtaaatagattttaatgctgattatagatcaaaactatgcatccactttgctacattatgttttctgtgatttttttgtctttgtacgtcatctattatgcctagttgtagcctgagtgactacaaaggtatgatgtatgggaaatactgaaattcgaaatgtaaatttgaatgtattgtgttccttgaaaacatgtgtgcctcaaatagctactttcttaacaatgaatatttacatgtgtaccttgcagcctgtgatggagatggatagattttcctaggaccattcacctgactttggttcacataatctgtaatctatgcttaatgtgacagaatcagtttggagaacataggaccattcacctgactttgacgaaaccaaggaaccccatctcactacatagatgtagggaacactcagggcacgaccatggcaatctaaacatggttgttgtcgtcatccttgatctgctgcaacttcttccgtgttcaaaaaattcatttgtttagccaagtgtatttttatttattcaatcaagaactaaccagctcgcccgacacccacataccccattcacttctagcattcttataaattgaactatcctcaagtgctgatttttattcttcaagctgatatagttcagac

SEQ ID NO: 107589 - DNA, 288 bp, Zea Mays
  misc_feature (60)..(60): n is a, c, g, or t
gtctgaccccaaccaaacctctctactaggatcgccatgacctcgactgtctttccaaantgaatcttgtacgccctactcctaagagctgagaaatcatgctctccggtgatccccaatcgcctctgctaaccataattgttgttccctctttttctctaatgctcaagcccactgtgatgagtttaccatgacacgagatccctctagacctcgttagagttagtcaaacctcaccagactcgaccctcgatttgcttgacccctctctttcggacccaacccttt

SEQ ID NO: 107590 - DNA, 500 bp, Zea Mays
gcgagctcactcactgtggagttctaactgatttgggggaacttcaaaattagagcgctctggtggacaatctgaggcacgggcgggtgcgttggatgcatatatacctagagctcactagggggtaatttatatgttccatcagcggtggcggctaattttgagaagacgcgcggtggccgggaaagagagtgagtcatcgtagcggtctgtcgtggcggtcactgggcaatgagctattgcagttactgggcagtcactatgagtcgcgacgacatggtaaatggcctaaggcgtggcgcaaccacggtgaatggtgtatattccggtgatggccgctcggccacgtcgctggcgcaagtggatgagcgacagagcgcaatagtgcctccaagttcgtccacggcaagatctttttaccccgcgaagttatccgtgtgttaccaggcatgaatcagaatgtcggcgcgaatccgagcgcgaggttgcctgtggcgagg

SEQ ID NO: 107591 - DNA, 350 bp, Zea Mays
gttctcctctccctctcttcctgtgagcagaagtccctctcttctcccttttgtgcatctcttcaaatttcttgaaatcaggtgaattcctgtgaatgcaattggtggtttgagttctaatatctctattgtgtatccctgcaagtttttagctccttcgggagggcattcccacctcaaatggccgtttcaccaaaaccctagctccccgcacgccacatgctcgatgaaatgcccaaaccagccaaacttgctccaattgaacccagatttttcaggcaccttcacaacacttccagtaacctacttgccaaatttcacgccaatccgagatcccaggcttaaatttc

SEQ ID NO: 107592 - DNA, 299 bp, Zea Mays
tggagcatttttcataactattctgtaattccttttttggtaactgggtgcatttgaaaagaaagggtaatagtactggatgagctaaaatctaacatacttattaatacttgtatacagacattctaactttggtatgttaagttaataattgtagaatgttaaaatttagtatccctcgtttttatttgcacacgatttcatagtcttaacaattgtggtttatctaaggcaaaatattgcttttctattttgtgggtttttatcttattggcagccattgttgttctgtgcctcct

SEQ ID NO: 107593 - DNA, 619 bp, Zea Mays
aaaattgtcgcgttctagagactcgaaccattctaacactttaccctttgttagcgttaaattaatcaaatgaggactaataagtagacttactaatacttatccgtgttattttgaacactagaagtaccatactcaattaacaacgcattctctatgataatcaatatcgaagcgcttttcacccaataatttgcattttaacttagacttcacatgagcactactactttttacccgcgatcataaccatacacatttaggccataaacaagcaagtcatcgtgattacgagcttaaccaacctgtgtaacacttcggcgaactagagcaacgacatagcccgctaaataacatacacgccggcttgcctattattatcactatctaaggcacaacatacaccacaacatttttatagacatgtatattcacatatatattcacacatcgaccaaatcatacgaaccgtaaaccactaatctctaactcgaaaccattatgtgcttacttcccaattcatgaacacataacgtgtattgacccgactcaagatatagaggaagcgatgactactttggcatgtcaccacctctctatataagccaaaacaatttct

SEQ ID NO: 107594 - DNA, 802 bp, Zea Mays
gcattacagagccggaggaagtgttagatactttggctagcagtatccaaacaatagagaaattagctaccgatagtccagatactaaatttgaacataagaagcgtaatgtgcccaaacaaccgagaagcctactcgaattatcaatctggcacaagaggctagaaaaactcagtgcacaagagctgaagaggcatgacatgggcccctaatgggagttctcaagatctaggtaaggatgatgcttttggaagaagtagagtaaaggcaaacaaaaggaagaaagcaagtacaagacgtttgggtgaaaggtttggcccagctcaacaaagctattggtcattgcatcatccatatttttcagttgtgccatatacgtcgtcccaaggtatttttggttatcctttatggtatcatttttcttcatatgcatcttcatattatggaggagtgcaaccggattattatgcatatggatagttccgatatgttgctacttacatgaagccgaagtattccagttcttagtagtaatgattcttgctacaatttgcttcggtcaagtttattcaagggatgaacatgcttataatatttgcttatcactatttggttattgtttaattgcaaactacataatcagtattgtcgaatagtttcaagtaaataattcatttattagtacaaccaatactcaaacttatgcatcattgagttggctattattgtgttcttccatgggagcaagctctatagttaaatagacatctttactctcagtgtttggtatgaccgatgaatc

SEQ ID NO: 107595 - DNA, 322 bp, Zea Mays
tctcgagaaagataaaatcctgctctccttggtagagagattgaaatctaacaaagctaggctatctagcctttccgagacagagcagaagatgaatgagtttgaagaaaagtaatagaaagatgcaaagcgtattgctaacttagagtatgcgctatatgttcaagtgggattacatagatccgaagtgtagggattggagaagaaactcgatgaattgacttaaaattttaatgtcgaggaaacaaaacgcaaaatatctgatactaaacggctacgggttcagaaaaatgttgatgagcttcgtcgagcaaaagaggaa

SEQ ID NO: 107596 - DNA, 450 bp, Zea Mays
cgagatttatttgcatcaacttactccgaatgctatagtcaggctcagtgtatacatttgggccttgcaaagtcagggaatgagtgccaacgctgaagggttttgtagagtgcacgaactccattactagaccaaagcaagagcggacggtctccacaagaacttcggatgctacaacttcgcctatcgaaaggacacaaaggctccagtgattggatatcgcactaaatggcccactggctggacctacgagtggttctatgtgaaggctgatgagaagaagaggaaaacacttatgagtatggtgatgagtccgttaaagctgagcttcggcatgacaagatcactgtgcaatatgcaactcggctccccaagccagttagctgaggttcaattcagagttgtggccgagcatattagtactcggaatttagttcaagaatatctggc

SEQ ID NO: 107597 - DNA, 377 bp, Zea Mays
attgaaccgaccacagtgcctgaatttggtgaagggacttcttcaactgccgaaacaacacaagttgttccgattgtgtagagcgctaaaaagtcgattgtattgccgaaggtgcctacagtcgggccagccgaaactaaggatgatacggccgaagagccaaaagtggagaaaacagtgaaaatgccagaaattcagagcccaccagcagaggcaaaattgccgaaggtgcaaaatcctcctgccacaactcccaagaggaggaggatggccagcgtgttggatgttgttttggagaccacaaaggccttgacccctgctcctattaagaaagttgtcgaagtcgccaaagtccaggcggatgccaaaggttaacc

SEQ ID NO: 107598 - DNA, 573 bp, Zea Mays
gggcaaccgcattcaagcattggagtagcatgtggaaatctgggacaacaccatcgagatcttggagaaccagctccatgatgtgcaagaggaacttgcggaggccaacgttcacctagaaatgcatcaccaagacatgaacgctaatgaggcaggtagtgaggaagaggatgatcccgaggaaatagagccagcttccggtccgaacacggcccattccggagtgccccctacacctgcggccagtgttgcctctaccaattagggttagattggttagagttaaacatgttaggagaacgggaaaaccacgtatgcttagcttttggtaccaactttggaactaggctttagggtggatctcctaatatgatgtaacccagagaaacatgtatgaacaatgcaatgaatgaatggttatcctcgtttggttcgatataattttatgtcatttttcttcccatgatataaagttactatttggaaccctgaatcaaggtaacatcgacaaaatttctgttttcagatggcagctagacctcgtcgtgaataaaacgagcaggttcccccacc

SEQ ID NO: 107599 - DNA, 768 bp, Zea Mays
gataatggtggtaaccttgagtaccatgttagagctaggcccttgagggatatgatgaatacttggatatggtggcgtcgtcccccctgatgatgtgattttgacctggtagctcatgatgtagtaggttggattctgtgttaccgttgtactttggataagtgtctgttatgtaactttgtggctaggggaggcttggagctgcggagcgagaggacttcacttgtcaaggtagttgagcccttggatggtagctggtgcgaaatggtgtaagttttggttggccacgccggccgactagtggtggcggggggtcttcgtggtgcatgtcaacagtttcttgctccatatccctagccttttgttcctcatctagtatcatttgtctgactctagccttaatattggttcactacctcttggatgcgagtatctccctttgtttttataggtgattgttttttatgcgaagtactcatagtttgagttggtctttgactgagacgcttatgcgaagtactcatagtttgagttggtctttgactgagatgcccatgactttgtcgtcttctatgatgtcttcggcttccagagggtaaagcttggtgaggggtctcgagggaggtctttagaattgtacgtgcaaacggtgcctttatgggtgagagtgggttttctgttcggggatgtttgttgtttattgctctgtcgttcttgggtgtggcctcaggggcatcattagtgagggttcctttgcatttcttctcg

SEQ ID NO: 107600 - DNA, 647 bp, Zea Mays
cccgatcactataaaaaaactctaggaaatttcatctgcctaggacttcgactagagtggttcaatactttaatgtcaccattgtcgacctctcatcctctgcttcggtgttcgtgggccaagaggacgaaggtaaactgacaaggatgcatcaatggcctatgaacatgaatccaaattcttatgcaccaaaaatgggttaactagtagttggccctatgtggctcatatcaaatagaggctcgtaacgactacttgtatcactagaaggggagagagaacctaaacttggattccttcctcaactatgtctaccagacgacgatagagagaactcgacgagtcaccagagtgaaaccttgttctattatatatagaggtatcagaaagtatgatatcattggacatcagagccatgattttagtgcctcatcaccatcttaggcaccaaagttcgatgatgactcaagaggaccaatttggacaaattctcgctctactaggcaagaacccaaagggaactcccttagaattgaaggtaacaatgttggagatgaaggcaggtctcaatgcctcgaagtcggtcaataacaattgggtagccaacctagaacacactatcaataacattgaaaaacatgttgagc

SEQ ID NO: 107601 - DNA, 505 bp, Zea Mays
ggggtatcgacacacgctggtcgctggatcgacaatcagcggtgcatattagattgagtcttcattaaaggggtatgtactggtagccatcggatcaagatcaacggtcgatacaaaacaggtgcgcggatcaaatctcgaccgcacgtgattcgatcgacgacccagacccattcaccctcctctgggccagccagtgacgctggtcacccactcaccctgcggcggcgcattgccgtgacccacgaaatcccacatccaaacaacaaaacaccaaaccgacagctgccacgcaaagggaatggcagggaatacctcgtcgagggtttctcaccgcgagtcgtgcaccccgaagctccgtccatgaggtagtgcggcattgcagcggggacgaattccggcgagtaattcacaccaacaccgctacagtctgagcctgccatcgcgatgaatatgttcggtttgatctcgtgacggtcctaggccctacgccctcgcaggagtg

SEQ ID NO: 107602 - DNA, 739 bp, Zea Mays
tagaaatcgaagaactccgagctggtgaagttggatcctaggtcagtgatgatgctatttggtattccgaacctgaacattatttcctagataaattccacttcctttgctgaggtcaaggaagtaatgggcttgtattctatccccttcgtaattttttcaattgcaaccagtatgtgagtataacccccttgagcctttttgaaaggtccgattatgtccagcccccagcatgcaaacggccaggttacaggaatggtctgcagctgctgttttgacaagaattggcacgcctcgcacttctggactaactcgacaacatcactcttggtgattggccagtaaaacccggatctgaaagcttttcccactagagtccttgatgcagcatgcacaccacactgccctgcatcaatctcatctaacagttgtcttcccatagctgagtggatgcacttcatgaggacccctcctgcgcctcttctgtacagtaggcccctatgatggtatagtggactgactgtcttgcaatgtgttctgctgcagccttatcatccggctcttcttcattctttatgtctctaagattggctccctccagtcattgggatctgcctctggctgactcatggcattgcattcttccatctggtcgtgatgatgcttggttgttgtatttcctggatgaaaatcccaggtggagcttgggtctgactggatcccagttttgacaatgcat

SEQ ID NO: 107603 - DNA, 507 bp, Zea Mays
cacaggtcttacgtgcacacgtgagcactttaattgtgaagccttcatctctaatccaacgttcagtgcctcttttacatctaacccctcccacctcggccacttagcccataatcactttactaatcaccccctgacgtggtacagagaccaggatcgtgacggaacgaccaggtgcgcctgtacagcatctgtacaccatttcagccgccctctgtacaacattgtacctcataatcccacacacacaaggtgctgtccagaattaacacaaatattgaatttggaatttcaactaaaagcttataattgttatgaagatgctccatacatgtactaacaagaaaagttacgaaataaccatgttcatgcatctgaacagaaattacataaatcatgcatctacagaacatgtggttcttgactgtcattctttcgttttcttgccttaggtagttctttgaattttttattcttttactccttcctttggatcgaacattggtt

SEQ ID NO: 107604 - DNA, 396 bp, Zea Mays
gagcactcgtgtggtgtggccgtgtgggtggggctcatcgtggagatggagtgaaactgcagggaagtttctcgtaagattaggacgtaatttactagagcgccgtgcacgggatgatgcactttaggtttaggaccacacatggcctttttttccctaccccccacaagttcatcacgaacggcgcctttctgtcaggcgtaggcacacgcaaacgtatgtatggcgtcaaaacttgacacgcatagtaatatgttagatgcatgtgtggtcaccacgcaacgcaattctggtatttttcatcactttggcagtcacaagaaccttttttttccctagctagtggacgggtatgcaccgatacacgtatattcaacatgaatttggcggacggag

SEQ ID NO: 107605 - DNA, 335 bp, Zea Mays
gaagtagaacttcttcatggcttcagtaccgacataggctgcaacatactgagataactgattaaacatctccaaatactccataacactctccccttcaccttgctttaggttaaagaactcatcaacttttatactcatgatacccttcagaatataatgtgcctgaaatgcctcacagaactcaacccaaggaacttgatatccctctggctgggtcacacaatattttgcccaccaggctccagcttgaccctgggtcacacaatattatgcctcacagaaggtgagtatgatcaatgcctacactaatgagttgtgcaactgcattctca

SEQ ID NO: 107606 - DNA, 516 bp, Zea Mays
caattttcctcttttttccttgccttcgcgaggggtagcagtagtcagggtatatgaaaccaattgcatcgaaaaccctgttcaatcttttcttgccccgactcacgaaggctgaggataaagcgtcatcttcggctctggtatatgccccaagtaactcgtcgctagtagcctcaatacattttagccagtcgtcatttggttcatcaaaccggtctctgtatctgaaggtatatttcaaacgaattaatccaccttcactggacccggcagcggtctccttcggcatctcccagttatccgcaagtggccataccctgtaggctatgtgctcttggatcaggtttcttgtgccaatgtaagcacagacattgctgaaagccttttggcatgcttcggcatcatttttgatcaccacggtcggccttcgaaggcagaagcgagaccagatggggcgttggagaatcccctttatgtcttcccttttaaccagataacttttgacataaaaccatt

SEQ ID NO: 107607 - DNA, 578 bp, Zea Mays
gagagtgatacagattgctttaaatgacctcaacataccaaacaattctagtgagacgtggctagataactttaaaagatgacataaaccggctcattgttggttgcggtgttgtcttgtgaactctatggaggatcagaaatgatagatgctttaatggaaatgatcttaccaattctactaatatttttcttctatgttgtttttggttggatctctgggccatcatctagagaaagacagcaagaaggacgttggaggaaaaaagcaagctaatcagaaaaattgtcgaagaaatctccaaacgtgaatttggctgggcgccggtagatcgtcatattacgtaaataaagacgtctacataaagatcatctccaggcaaaaaaatcgtgttttcacctttaatgtcttcgcttttgctagtataggaaggtatcaccctggcagatgtgtggtatgggctgcttgatctcaattctatgtcttagtgatgtttcccctgggctgtatgaacctgtaaacgttgttcagatcgtgctctctgaataagttcagtcgtcgtaggcctaagtcgtgga

SEQ ID NO: 107608 - DNA, 650 bp, Zea Mays
ctcgaatgttctgttagaaaatgttcttggtactgaacgctatttttatttttttgttgtttgaattcaacagtcgttatgattgcagaagtaagtgcagtgtgatggttttgaaacttcttcctatttcgtggggcttagagatcgccctaagacgagcaatcgaaaacgtgcttatgctgaatcgagtagtcgcgagcgtgccgtgccgatttaagtcactaccgacttaaaccgactgctccgttggtagggtctagtggtcaccctgagttaagtaaacgtgagcatgtcacaccgctttaagcctttgttgacttaagtcgattgctccgttagtagggtatagtggtcaccctgtgttaagtaagcgtgagcatgttgcaccgccttaagtcattgccgacttaagccgattgctctattaatagggcatagtggtcaccccgggttaagtaagcatgagcatgtcacaccgtcttaagtcattgccgacttaagccgattgctccgttcgtagggtatagtggtcaccctgagttaagtaagcgtgagcatgtcacaccgccttaagtcattgctgacttaagccggttgctccgttcgtagggtatagtggtcaccctgagttaagtaaacgtgcagaaaac

SEQ ID NO: 107609 - DNA, 524 bp, Zea Mays
ggtgcaccgcaagatgtaacagacagtcatggtcagacatacaaccgtgggaaggtaaatcacttggagaccgaagcaatccaggatgcagcagacatggcagtaagtatgttctgagtcaaatctcacccaacaaaagtgctattaatactagtgctatacattcatttgttactgcaacatgggtagaaacacataatattccctagaactaatgctaccaccactaaggattagttcagttgggggaaggttcaagcagataaaatgtgtctaaatgtaaggttattaccaattgaaagaatgctaattgaaagggaccgctattgattagataccaaatgaaaataatagtccacatacctttgtgttttgccttatgtgaggtatttcatataattagtagaggcacttcctaatcttgctttaggcgaagagaaacctttaagcttgtgatttaaccaatttagtgaccacaataactccttatggattttcatgaaatagcttaatcaagagattgc

SEQ ID NO: 107610 - DNA, 474 bp, Zea Mays
gaaaataatggttttaacccacctgcctcaatatattgaaacggtcgtagtgcctgaatttggtgaagggacttattccactgccaaagcaaaacaagttgctcccgccgttcggagcgctgaaggatcgattgtagtgccgaaggtgcctacagtcaggccagccgaagctaaagataatatggctagagagccagaattgaaaaaaacagtgatgatgccaaaaattttgagccccccggcagaggcagaattgccgaagatgacaaaggctcctgccacaactcccaagaggaggaggatggccagcgtgctagacgctgtcatggagaccacaaaagccttgacccctgttcctacgaagaatgttgccaaagctgtcaaagccgaggccgaagccgaagccaaagctaggccttcagtgcctattgagacaaagcctgtcgcgcctgaggataaggctgagcaacaaac

SEQ ID NO: 107611 - DNA, 415 bp, Zea Mays
cgagcaggcagaaccgtgcaccaatactgaatgtggacgcctacaatagaggcttaaggagtagtagagattacctcgtaagccaaacaacacctaccaatctatgtggattggagaggattggatgtgtttcaatccataggaagtcaacatctctactaggtttttctaattccatctgatataggaataaccgaacaaggcctaaaagggactaaaaattagtacatagaaactaagcacccctaattgtgtagaaattggactacatgccactcttgtttgttagagaagagttggcaagagcagtaaatgccttacttgcacaaattggactacatcatgccactcgtctcaccaaaaaatcaagtagagcagattggcagttgttgattgataaggtggctaatatcta

SEQ ID NO: 107612 - DNA, 442 bp, Zea Mays
cgcccgacggctaccaggtgaggggagaagccaccgtgtgttacgttgcagagtagtgttgtgttgcgcttgcttgcattgcaccttgtttgtgctgctctcaaactcacgatgatgtgacgtgatgtgcgcgcgattcgtgcttaggtgcccatcaggtggccgaggagcagggacgaggtctggaaggccaacataccccacccataccttgctgctgagaagtcagaccagcggtggatggtcgtcaatggcgataagatcaacttccctggcggtggcacccacttccccactggcgctggcaagtatattgtgcaccttgcgcaggtttgagatacccccgaggctaatctcctgcacatggttcatggttgctatcgtaggctgacgtgaccaacgtttttcacctgtcgtggtagatgctgaattttccaaatgg

SEQ ID NO: 107613 - DNA, 699 bp, Zea Mays
gggcgtaatattatcgagaagttcagggactaaaacagaaacattcctaagactcagtattcccacagtgtggactgcgggttagtttctaggtttcctagggtttcttatgcaaaaaggaaccagcgaaggggtaaggagcaaccagaaccgttggaccagacacgcgcggctctgattagaatcgaaccggtacggctcgggatcccttggattataaatgaacggcctagattttatgaggattgatttgctctgaaccgcacgatcaagatctaaaggcactgatccattcacgtgaacgggtatgcgggacaatatctctaccgtccaactcaaatcctacggccagggccctaaattcctcttcccctccaacaccgcgacgaccaccgcgttggccacggcggcgacctcgtcgcaggaatcacaatccagcgctccacacccccaaactcaaattaaacggcgcaacacgaaattggggacatagtttagcagtgtagaaggttctcgtaggcaatctcggagtggttcccctcggccacgacaccaggcggacggcggtgcagcacggcgatgttcggtcaacaacaaatggtcttcgggttcacgagcccccaattccacaatggtagcccacggagattctctccacccagctgaaaccacctagctgagccacgaagacgaccggcg

SEQ ID NO: 107614 - DNA, 452 bp, Zea Mays
ggccgctcccactccactgccagcttcgagagaacgttcatttgcgaggttcatggaaggaggggctccaaaaagatccaactccccatcaggtcctccactcactgctccagatgttccggctcccattactgcaacttttggtggtacattcggatgcagctggtcatataacacgtgcacttcctcatgcagagtgttacagtatgcttgcagattctccagggatgcgcttaattctgctacccgggcaagagcatttgcctcacaatcccaggcaaaagagcgtgaatttatggcccagtctatagccgtgtctcattccaggatctcccgctgcaagcgattaacctccgcggacaactcaacaatgcgacagctatctcgcgcatgctccctatttccatggcgtagttctgacatgagtcgttccaccctggcctctatatccc

SEQ ID NO: 107615 - DNA, 440 bp, Zea Mays
cgaccattgtgtccgtttaaggaagaggttggatttggtgagctgatgaagctgagcttttcccaccagaggcagggtcctaacccaaaatatggaatatggattgccctgctgcttaccattattccgcttgcttctggccctgcgaggcagatcaatcaatttggcattgcaacctttgcctgcagtgcttctcttcatccgattgaggtccagaggatgattctggctcaaatgacgtccacagagtgacagttctgttgcaattccagaaggctgtgtgttcatcatcattatacaaaaccaaatggtgactggtgtcagatatcaaagagctagaagcatctcaagaaaagaatctcacaaaagaaaggtaccatcccttggctaggtcgtttgttcatcttctctgttctactaaattgggcgttcttttctgt

SEQ ID NO: 107616 - DNA, 501 bp, Zea Mays
cagttgccccaaaaagggcaagcagaaggctgacctgcgcgaccaccactctggttgacgcaagggcaagcgggagtacacctctggcaagcacaagtccaagggaggattcgataaggaggcgctctagaagaagtaccaccagaaggcaaagatcaaggagcgtgctttccttgcctccctcagcgatctcaaccatgactcccacgacacaacgtctttctcgagcgacgaggagatcgataggcgagtcgaggacaagctaaacagactctactttctcaccgacaccacagccggtctttgcaccatggcgcttggtgatgatgtgatgggcggcaacagccaagacataggcgatgtctatgcttctgaggtatctcgttctgccgatgatctcgatgctgaggtagaagaggtgacgtctactttggctagtcaagataaactacataggcttgctgctcgtgagaagaaagattttaaattcaagtacgagag

SEQ ID NO: 107617 - DNA, 489 bp, Zea Mays
gctaacctagccatattgagtttgaaaaatccacagttaaactggaggatttggctttaatgaaaaagatgggatattttggaaaaaaatgatgatgaattgattcggtttgctagggacgaagcagttccagaaccaagagacgatgaagccattgtgtttaagagcttcttcagcgcaggacttcggttccctctatatgagatgatcggtgaaattttaaagaagtttgaaatctaccttcatcagctaaccccgaatgctatagtctaactcagcgtgtatatatgggctttacgaagtcaaggataaaatactaatggcgaaggattttgcagagtacatgaactccattaccagacgaaggctagtgctgatggactgcataagaactttgggtgttacaattttgcataccgaaaatataccaaggctcctgtgattggttaccacaccaagtgaccgactggctggacaagtgaatggttt

SEQ ID NO: 107618 - DNA, 274 bp, Zea Mays
caaacaaacaaacccatcctgattatagctttaggggtaagttgatgaagaaagatttgaaacgtcttcagcacttcaaccaagaacctgctcaatgggaaccgaagccctgctttcaaaaagcttcggtagataaccacctcatttacttcaggagcaggagcagagctgtctcctccaaccctcacaatagtcatgtcgcgaaagtatcttcctctcatagcatcaacgtgactttgtttgatagttgattttccgaagatggtatggcttg

SEQ ID NO: 107619 - DNA, 942 bp, Zea Mays
agtggtaaccaacccgggggacactcaccagtctgctgcctgtctgattcggccaagagactactgtttgtggccctagctcagtcagacgggagtaggaggctgcagttggactaaacaagcaattttgccccgtatcatcaggtgcacaaggtcattatcttagaagactgcaatgagagggccaggcataattgagatgagatgagatgtgtgtgacatgccaccaccagtaccgacgtctcctccacagaacagaaacaggcatccggcggccggtagcgagcatatctctgtcgtcgtggactcatcctggacctgggactccggctagctactcgcagttgttttatgctgctctaacctcctagtgtttggtgccggggcattttcctaagctactcgcggatcacgcagctaccggactggctactcttcttggcattgggcgtagactatgggagagggggaggggggtatatgtgagtgctgacagctcagctgcatgattcgtcaggtttcggggcttggaagtcatgacttgctgctgccacatgactgaccggaggtctgcaggccacaaagaaatggaggaatcttgcgtagaaaggtcgattgagatcggagctgacgagctctagacttgtagcgcatgcacgcagcattggcccttgtgatttccagccttccaggctcctatcaacgtcctacattggcacctcatggacatcaccagccacgcatttaaaagtgcccgttaactaaaagattggttctgattaggtgactagtagcaatttctggcaggtgacaggtggcttatttttgtagtttctttactgtaggagattaagtttctgtggatcaaagaatatctttccaactacaccaagctacgttgtttggcatggctgcaaagatagctccttgctatactccatg

SEQ ID NO: 107620 - DNA, 474 bp, Zea Mays
acattggtctgatggttccaaattgttgagacaccaagaaccactcaaatttccttatgcatggccgttgcaatatgtttcttcccatcatgctgatcaattctagaatgatgagggagttgtatcccttgtgcatgtctatacctaatatcaaagtatagaacatttccatgctccttcactccctcgtgtcatagacacagtgaagagtttaatctaaagacaaattggaagatgttacatttgcatggcgtgccacccctgtggttgctacgagtaagagtagcgtgtgtagacatggtgttgagtttgatcccaagacgaattagcgcgcatgatacaatcgataatctccatgcctcccgtgcttatacgagttaaagcattgtgcatctaagcatgattagagtctgattctttgaagaattggagcacatgtcataatcgtcgaataaatctctgagtcaccagtca

SEQ ID NO: 107621 - DNA, 346 bp, Zea Mays
ttgctgtgtagataggtttcgtgaacctaatgtagaacctgtaaacgaaagactagagtcccggaaccgctgccattcaaaaagctatcaatcttattcgaaataccaaggttcacagacctctagctttgattgtgtgccctttcttgttcctaaggatttctaaccagaccttaccttaggcggacgtatactcaattatcaataagactaaatcgtgatcgacccaccatcatctcttgcctgaactgacttactagtcacagggccgagaacacatgatcgagggaaatttctttcatcactacgaaaactggttttgctgattgacaaaacggatctcttc

SEQ ID NO: 107622 - DNA, 565 bp, Zea Mays
cctcaggactctccgggagtgatgggaggttctctagcaggttggccacaaggcactcctagtctagaccgtggctagccctgcttgatggggagctaagtctgccttttgatcccgacaggaagaagtcatggaatgtgtctcggatggggtctagcattcccatgatctcagtgaaggtgggtcgcagtgagcgtcgctgcccgccaccacctccaggagaacccattccaaacgctaccaaggtttccgacaatgttgagcaagttgctcgtggggtaactggcgcttccagggccctgatcattgtccctccatcatcgatgatgaaatcaagacacccaaaatgaatggtcatttcaggggtccaaactatgtcaatgtctttgttggccattcgaagcctagagagttcatcgagaacgtgcaaggcccctacctagtgcaccacttgtcggtgtttcgaacatcccctccaacaaataaatttctatgtgcacattatgggttccatacggtgtgctcggtggccgcaaggtttatactggtttgggcagaacgtccc

SEQ ID NO: 107623 - DNA, 554 bp, Zea Mays
ccgactaccatgaacagtctcacctcatgttttcgcctcgaccaaccctcgaccccgagggaccaagggcaggacgagctgaccctaggtcttcgtctcacccgacctctaaccgcccgaagggtcgagataaaaagcctcacccgacctagggggctacaaccgacccttggaagccaggactcacgagatcaaaacgatgaccactccgggaaagggtggaaaagagtcaggctctaacataggtgtgtggtttgaatgacatgatgagagatggtatgttagcatacgggctctgacattagggacaatttgaatgaccatttcaggaaaggcatgaataaacatgcatcacctgtacgaaagttgaccatggctcaaccactccatggcccggaggacaaccaaagacacaatgcaagttaagacaaggcacatcagcatgacatgtgtggctacagtaacatgacgaaaggggacgacgtcgactaatgaggtcctttggccaatgagtatcctggacaacaatgaacaacctagcaaggttgggccct

SEQ ID NO: 107624 - DNA, 322 bp, Zea Mays
ctgctgcgttgttgaacgctgggaatagcaattgaagagcatatttgagttgttcgcctccgggtgtaatgaagaggatccctgcacctgccccctgcagctttaacaagccatcgaaatacattcgccatacttctatagtttctgggttatctggcacttgttgttcggtccactctgatacgaagtcaaccagtgcttgagtcttgattgcggtgcgaggttgaaactcaatgtcatgagatcctagttcacaggcccacttggctattcttccgatggcttctttattgtggagaatatcccctatcggaaatccagt

SEQ ID NO: 107625 - DNA, 357 bp, Zea Mays
tgtgtatatggagtttgcgagaaatcgttgaggagtaaccatattggtgaatgcgtctacctgatgtagatgtggatatacccgggattaatatcatatccacatttgacttattggcatttgatctattctcggggacgcctgcgaatatgatccatcagccttagtcaaagcatatgttctgattggagatgcacatggtctgtgataactctcctccgattaattcaccctgatggtgatttgcctcacgaagaggttcatcttgatgatgaaattcctagcaatgcgcgcaatatcattgtgctgggaatacggaacaatgaatctttcgttttgggaaatgacggagatcat

SEQ ID NO: 107626 - DNA, 457 bp, Zea Mays
gtgatagcggtgaatgtaaaggacactaaattttaataatcttcgtctatcacgattttgatatcgtgtctgtctccatctgtctaaattgtcctaatttattttgcaaaattcagactttagtaatttcggaacatcgactctagtatcgtttgggttaagccatcgacgtcttgcccaaactttaattctggaaatcagatctggtttcttaaatttcgtttgaaattctttcccgtttgcgttgcacatgtctctcggtggcctgacattgtgtcgtgtgtggcgggcgcaaccctgtgtgtgacaatgcacaacctcttgcctacgtgaacgatgcttgacgtcgcttccgaaaggatcacaatttcgatgccgcatcgacctcgcgtatttatttcgcgaaatgtcgagtctacgtcgttcggatagcgggcaaaattcgtctaaatttaac

SEQ ID NO: 107627 - DNA, 1035 bp, Zea Mays
gccgtactgccgttacatgtttgtttgtcagtggctttgtcttgcgccagaatttttttcccaagatttttcacttttggaattcattgcctgcctggttaacttggatgtgatgtgtttgcttccgtggaatttctcttggtcaagcactcaaggttcgtttgtcgccttttcttttcttttcctttctcctttattatcttatttgaaaaccgcgaaatagaaaatatctcctgtaaagaatcttgcgtgcaagaaaagatggggaagaaacgcccccaatctgcgcgagtttctttccctcgtggtccgatttttcgttgcgcatttatgctgtgctttttgaaaatattggactgttctgagttactcgcataacttgctgaaaatctttttggtccagttttgaagcaagtccatatagttgcttcaactgggactataccttaatacgtagtagtaatagtaaatcctaagtacttctatgctgcaacatgtttccttgctagcttggaggttacatgagtactttgcctagtttgagtctttgagaacaaactaccgagtacgtgaatgcgcgttgtcttagttttttttttttttgtggaattcttgttatacaattctaccaacagttcaacgagcttcaattattttctagtactactttgctgacatctgtattgtcgaaattgatcgtatgcagttagcttttgagctcaccatccatgtatagtattgcgtttccttcaataatttcgtgattttggtgcatcatgggagtgggactactttagcatactgcatacctattaaatttgactcattttgattgtttaagaagactgtgcgcgtgcgtgtaagcaatcctactttcggtttttccctcccagaaaccagactccaatactccactttgattaatttaggttcccgaaattgtaaagttaagtggtcgttggatttgaaccagatacctaactgataagatgctacccacctttagctgctctaagtattctacattctagaatc

SEQ ID NO: 107628 - DNA, 379 bp, Zea Mays
ctaagaatcatttcccagggcatttaacaaccaagaatacaaagattttagtcctccttgaggactttatcggcagctttgttcagaagcctatcgacaacattgtcaatagcgtcatttgcaattttgataatgtccagcgcctcttcgacggacgggttggcttctggatcgtatggctccggagggggagatagttcagctgcaccgtagtatgtgtttgttagttccaaagctaaaacagattacgaagctagaccagaatagatgtacctataagcctcgcgcgctcagtagcttcttcatctcttttagcttcttcttgagcgtcgtgagattctttctcatttttcttaatagcttcattactatctcacag

SEQ ID NO: 107629 - DNA, 548 bp, Zea Mays
actctgatgaccccaatgatatttttggctatattcgccactcagaaggatgtagggggaagaatgaaggctaaaacaaaaacatcaaaggaacgctcgcaagctaacagaccaaggtaggaaaggattgcaaatatgaagtatgttcggcccacgtaggcccatgtaataacccgagaaacgatttatatataatatagaaagaatactgaataaatatacaaggaatgaattgttggtcatcttcttcgttggaccattatttccactatgcttcttccccaatcctatgcaaggttcaccgaaccatttccctgccaaaaaccgctcctcgctggtaatggcaaaccggcagtttaccggtaaaaactagtaaaaccgactagttcacgagttcaaacaaattttttacgtttaccgatgaaaaaccgctggttaaccagtcaaaaccgatggtttttcccaaagcaactgatttttgatgtttactacagaaaaaatgaaacaaaaatcacagggttcatttgtattttgcttaatgcacattg

SEQ ID NO: 107630 - DNA, 657 bp, Zea Mays
tatgtttagtgcagttcgtaataatcaacctgactggtgaactgatcggcctttatgagcctctaaatacaacattacattttcaaaaagaatatctgtacattttcctgaataagttatattgttttgtatggtcccaataatcacctgctccagagttttgttaaaaacatcgttaccagatcgaggagagtttcagatagtcggagctgagattgcgaaaaagctcaagcgatcacctctagctgctagaacagtgggaagacagttatgtataagaccaaacatcgagttttggaggaatactcaggatcgggaccttctggacgaggcaatgggagctctgtggtggagctaccagcatctagataagcaggtcaggcgatgcttttcttattgcagtatttttcctaggaggcattggctggaccctgagtatttagtcaggttgtgggtggcagaaggatttgtcaccagccacaatacaggggaggaactggaggctgttggtcgaggctactttgatgagttagtgtcagcctcatttctgcaaccagtagatggtgacaaggaacgctatacgatccatgatctgttgcatgacttagtaagtaaagtagctagaagtgagtgcttcagagctgacaatggctggga

SEQ ID NO: 107631 - DNA, 335 bp, Zea Mays
ctccgatccatggcagcaggcggcagcgcatcgaaatgcccctcgatcttttcacacgcgctccctatacagaccaataccaatagccactactagccggccagcagtgaaccgtgtggcaggcagtgcgaggtagctatatagtatgactttagttttagcctcgtggctatatatgcgagcgagctagctacgtgtactgccacaggccatgcgtgcaccagctactagccttgctttgcttagcagagagagatcgggtgtctaggtcgatcgggacgatcgatggtcattcaagagcaagacgtatgtacgtctgcgcgtcgcggctgtat

SEQ ID NO: 107632 - DNA, 737 bp, Zea Mays
gaaaaaacctcatcagcaagaatgacggaacaccccttacaaactgaacagctactaatggatccattagcagatctaaccaaaattgggtgacccaacctctgcaccgaaagaccagcccgtgacacaaaatcctccgaaacaaacaaatagctagcgccagagtaaaaaagagcatgggctgcaaacgaatcaactgaaatcgtacctgtcaccacgtctccttgctccctgccatccgtagcgggtagcacataagctccagaaatacccgcagaagaggaagcccccggagtgaaattaacagaagaaccccactgagccactggatgaggcaggcgcggagctccaaactgagacgacataggagtagacggtgcaggagtaggcgcgacctgatactgaggaaaaccctgcatcggcacgaactgagaagtcccaggcacataaagctgctgtggaggaagaggaactgaaaactgctgctcagcacttgacatcatgttgatagtgccctgagaagaggaggaagtcaccggctcccatctgagcttcccattgggattcctcctacacaccacatccttgtggtcctgactgcagatagaacacctgccactccactggcactctgcacagcgatgcgcatctccacagcggaaacacaccagccccagcccgggcttaggaacgacccgaaacctctgagtacttcctctcgaagtacccgagtcaga

SEQ ID NO: 107633 - DNA, 412 bp, Zea Mays
agatgtccttcaagagaacattaaggtggtgtacacgcaattttgcaatgtgtattgagccttaggggaggttgaacctttcaatgaggacaagaaggatttggggaattgttttgtaagctggttgtaggacgaatttatcaaccatcctagcgtcatcgagggtttgatggcatactctgcccttgtcacaaatgagggtagtggaaatgcccttgcatgtaaaggctaccaccactttgcggcactccgatgaaatttataggtttttattcagaaaagtgaattgtctaactaactttgcggcactagccgaaaggtcctcaacccctctagttgtgtatgaggggcacaatcttcgtgtgtaaagaaggggcactattggacaagggggtgattacctaagggtgtt

SEQ ID NO: 107634 - DNA, 675 bp, Zea Mays
tagctttgactgccagtgctgtactgacagccctgctgtaggtgaggtccaaacatgttgccatcttccactgaagtctgtcatttagtccccgcataaaacaattcttctttttcagatctatatccacgtgttcaatggtgtactgggagaggtgattgaatttattgagatactgcatcacagtatctcccccttgcttcagtcggaggaactcttatagtttcatttggagcactccctctggaacataatgttcccggaatgccagcttgaattcttcctaggtaacctgatgtccaacaggttgaatcgcttaaaaatttgcccactaggtactggcaggccctcttagctgctgagcggcaaacatgggcttttgcatctccatgcatcggattagtccaaacttctgctccattactcgcacccattcatcggcttctaagggttcctccgccttgacgaagagcggtggtcgagtttcggagaactccagataggtagtatctcgttgtccttgcggggaaactcttcctctgtgctgttgaaatttgttgcccgccatttcgcgcaaaaagcgcgtattgtcagcggtggcgttgaccaaggcagcgatagcctcggccaaggtaggtggtacgggtggcgagttgagagtgtcctccccaccgc

SEQ ID NO: 107635 - DNA, 482 bp, Zea Mays
cccccccccctctaggtgctctcagaatctcagtcatacattactcaaccagatgttggcacattgctatttgttgctgaacggcatgaagcgaactttgagataaatgactagtaccttagcaacacgaagttgcgagtacatcgaaaggtaattctgagatttttttcacaatgtttgtgtgaaaaaccattgtgtgttcccgtcgaaccactttactcgtcctatctaggacctctatgcttgtgttgcatacatctctcagaattgtaaatacttatagtcattgaattgacttgggatagtcctttgactggtatggtatacattataagctaaatggtaaaggtcggtcctgaatggacacatacctggggtttatgtagccgaactacactgaattccacccttttggtatgcttaccattatctacctccgatctaccagaagtgagaagagtagacaaataactatgaaatcc

SEQ ID NO: 107636 - DNA, 523 bp, Zea Mays
ctataatataagatttaggtaccggtttgggttcgcaccctactctagtgtagtgctgatcgtcctcttgttcctgtccctccggcgggttcatggctgacgtactcatggtgatgcgtggccggccccatggtgtaagcctaggactcgactaatacggcatggtcccccttcaccattgtgggctcgatgtcctttcgcgcgtgtggattggtttattcgatatggcatcctgtcttgttgtttcttccatacctgccactgtagaggccagttccgatgctgaggttgtccctgacaggagagttgtgttcgtgtctcatcacctgccggggtcgaggtacacttgcggctctggctcaacgcttagacttgctcggtgggacacttggtcgcccgcttcgcctcgcagacttgctcgacggggagacttggtcgtatgctccgcctcgcagacttgcttggtggagtacttggttgtctgcttcgcctcgcttatttgctcgacggaggacttggtcgg

SEQ ID NO: 107637 - DNA, 1184 bp, Zea Mays
tatttacatgagtggtcccactgttagccacgtaggaaacttcatttagtatcgtcgaaccctgagcattggcccgacaaggaccgtcggaccagtctgatgctgatggatactctttggtcatttacagcagggcgtcagacccaggccaacgatgatctaactatcgttggactatgggtgtcgaaccatacaactccatagtggttggcacggcaacaataacattgaaatggctagtacatgtggcaagctctaagagcatcggaccggtgcgacatggtccgacggtgggtgttgaatggcccgacgaccctaatttctacatagtgaaggtaccaacggccagttgccttttgggaccttataaatagagcttggttaggcttggggttaacatcttggctttccaacttgaggtacacctagtaatcctaaaaaacatctcactctcatctctagtgatattgattcgttcaaagtgagattgagagtgatctctagtgatttgcattaaattgttgtatctattggcattagtgatcatattgagctacaagtttcttgttattttttgtggttgtcggcttgccgccacctggatgacttggacataacggaggattattgaacaacttttggagaatgccattggctccaatcatcattatgagggattatgaggggattttgtgctcattccccatgtgaagttcacgaagaacaaatataatgcaaccatggcttgttggagtgcctctctagtgtggtttttatggcgccctaattatgtccttgacgtgtgatgccaatcggtacatggaccacctagtttgggttgccacaataagaacgtaggttgtcggcaagcaaattaacctccgggacatttcttgtgcatgggccacgaagtgcgcgagcttcacgattgctgaggaattgctcctcgatgaccagtcaggcgcggcgcgcagtgccgccagtgccacccgaggtgcgggcagactccatcaactctagggagagtgtgcctagaacccaggacaacacgacgacattcatgcgtcgccaggatggcatggcggggtaggtgtcggagaggacatggttggtgagggcgttccgctcgagggcgagtagaacgagatcgcgccatcaattgtagtggggagaaaggggatcca

SEQ ID NO: 107638 - DNA, 574 bp, Zea Mays
caaaattacaagaacaactcagaacaatgctcgaaactcactaaaaccactagaatgcgttgtggcggagtgtaggagtgatcaagtgctcttggtatgcttgcggtactgaaggaggttgccaaggggtccttttatagcccaaagaggcctcctagtaattgctccttccttccaaagcttgctaaaaaatctgctatgctcggcggcaccagaccgggaacataagttccttctccgtgacctaactaggccctttccttaactgactgacaccggaccaatctggtgcacctctggatcgtctgccacgtcagctagtcgttggctagcgcgcggctccgaaaagtagccattaccagcggtccggtgcacaatgaaacttagtgttgttcaacgtccggtgatttttataaataaaaacccaagatttgcgagttcgtacggaggcggtccagtgcaccatcggacctactcggtgactcgcagattagcacattgaagtcctttttcggcaaaacttggttctttcgacttcgactttcttgtgagctttgcttccacttagacaaac

SEQ ID NO: 107639 - DNA, 667 bp, Zea Mays
cgagctgtcagactatcttatgtctgaattcagactaacagtaagattaggcaatctttgagcttagatttgatcatgattcaatcattatttggccatgattactatagcaagattatagctggagtatcgagtaaaaactttgttataggtggattagtgggttgccacataaaaattggtgatctaggctctgcatatagctctgtcaggcacctgatcagaaccccgatagtacagtggactgcacaagatcactgatgcagtgtatcttgccaccggcgaacccgcacgtagattcacgccggtgaggtgattcgtgctcaccggcgctcagataacgctccaaggtgaaaagatcttctcccccccgaatgagcttaaggcactgttgtccgcccatcgtgtccgctcaatcccgatcaccttgaatcaaccctcgctggagttagacatctcacggtctgatgccatgtgcctcagcactttaaccacgccgctgtgactcgtgctgacctatccagcgatcgccggtgaggttgccacggttacatccactaatcccgtgcgccagtgacctcctttttctctgaccgccgcgcgtctcaatccaaattcaccggccaccgctcttgcctactataaattgagctcgccgtgagctccg

SEQ ID NO: 107640 - DNA, 499 bp, Zea Mays
gcccagtaggggtttcatgaaatcctttgtgctactcgatctcctcccgatatagtaaacaacaaccttcgttatttccttctccctcgtacaacacccactatacgcagaaaaacctcgattcgatcttgcctccccccatgtcaggccgaccgacggcggtcgcaccctctctctccttcccaatcctcctgcctgcctctacctgcacctttctcttacaggagggggtggagcccttacatgaggaatttattgataaagaaggcgttacagggagttctcgtctgtttgtgggtgatgtttgtgctaatgtagctgattctggttttgttttctatgcagtctctatggttttcagggagagatttgtgttccttggtattacggtttgatggcagacaatagtactatttctccgaggaaacattggggggcaatatgtagttgaactgaataggtaaagaagtctctagccataaatcacactttgctattc

SEQ ID NO: 107641 - DNA, 454 bp, Zea Mays
ggaatatgctgtaaaaaattgagctcaaacggagcaccgagcgaaaacctatgctcgttttatggaaggtacctcaagttatggttttcaaaggcacaaatcgacaggaaccgaagtggcggctatggagcacaggttcgattttagagataggatttgttttgtggatatggttggtttagatacaggatctgttttgtggatatggtcggttttagagataggatctattttgtggatagggtcggttgtagagataggatctgttttgtggatagggtcggttttagagatacgatctgttttgtggatagggtcggttttagagataggatctgttttgtagataggatcagttttgtaggatggaagcagatggacagaatcaaactgaaccaaaacaaatctaatccagcaaccaaactcaactagaacaagaactcagaactgcgga

SEQ ID NO: 107642 - DNA, 423 bp, Zea Mays
gagagatcataagcgctagcctagctatctagctagctgataaattatcacggcctgctgctgataataactgataataaacaatacccaaccaggaacggtctcgcgtagtcgcatggaaaaggaaaccacttgtcgtccactcatgcatgctggatgctgaaccaggaggaaacctgcgcctgcagccagattcgtgcgtgcgccgcgcgcgagcatttctccgcataagctgtccaggtacagtatcccacatccgtcgtctctgccggtcctcttttcgttcgcagacgcggggctgaactccgatcctttacacgtcgaatccactctcacgtgacacttgcagcaactcgcaacagtgcttttattacgttggcagcctaaccaccgggcccctctccgcaccagatcaacagcaac

SEQ ID NO: 107643 - DNA, 508 bp, Zea Mays
tgctttagcaattaaactttgatggtgaatgatccacttaaatcagagagagtttaatcttgctactaaagatttttggtggtatacttagtaatttagatcacactcagtgaaactaagtggtaagtccattttggtgttccactgaattctttttaaagccttagtgagaattgtcaagatttcaagttgaacttattggggcgaggtttatctttcatttctttccctctatttcttttatgtttttagagtgggtttgaactacaagttgtcttaataaatttccaaaaattctgtaaaaattacagtggcttattactggtgtataattctctgtcctaaaatttggggcttaaagggtgaatagttctctctggataaaattatcaaatattaggacagaaggggtgttttgaaccacaactaccatttaacagtagtttatcctctaaaacttatttttgctggcatttagatgttataacatgactttgtacaaactttt

SEQ ID NO: 107644 - DNA, 350 bp, Zea Mays
tcgacatcggggactgctgatgtgcttgttcggggcgacccatgctttatctcttgcggcgtcatggcctcggatccatacaatagatgaaaaggggtgaatccggttgcccgacattctgtcgtgtttaggccccagaccacttcgggtagttggtcgaccatttgccctttttgtcatcgagaagtcttttcttgatggcagtgaaaatcttgccgttagcgcgcttgacgacgccattggattgcgagtggtataccaaggtgaagacagtcttggtgccgatggagaaacagaaatccctgaagtattggctgtcaaattgtttgccgttgtcgactgtgagttcg

SEQ ID NO: 107645 - DNA, 582 bp, Zea Mays
cacatagcaatgcttgaatagaaaagcacatctgacctagttagtgttccaggccaatgaactccatacagattagatcagtcttattccttgccaatggttcaactcattccattaatgtcattctgttcttgttagcaacaaacatatgtaaacttttcgatttatctttttcctagaccctactcatgtgggagcctctagcactgtctgccctggattatatgtgataatatttcatttggcattttctcatgcactagcaagtgtatcatcatatctgcacatttcatgcaaaacgtcttgtaatagtacatgctctatcttttacccacttctctttacactgaattatcaggcacatacagtaatgttttgccaaagatcaattcctttctctatgatatacacatgtttgctgggttgcatcgcctcgaacaagttccgttttgggagttgttattaacagtttggaatatgggaagcagattcaaggtttatctgtcaagtattggttggcccgcaattcatacataggttctcgctcgatgacatttatgtgcagggtattggtgggcggtg

SEQ ID NO: 107646 - DNA, 838 bp, Zea Mays
caggcccaggtataacaagacataggaacataaactcatatttcatgcaaagagcaggtggaaggttgtatggtatggcaatgacaagccaacatgaatatgacgcagcggtcatattgaaaggcatgaaaccatcagtttccaagccgatacgaacgtttcttgcattgctgacaaaatctggatcaaagttgtcaagagccttccatgcatcaccatctgacgggtgcaccattaacccatcttgtctgtccgtacaatctttatagcacctcatgtgcataccggtcttactcgagagaaacaaatgtttcactctaggagtgagaggcatgtaccaaagctatttatgtgcaacctttgtcaccaccttctccccatcttcatttacaagctccatgtacctcgacttcccacattttaagcatttctgctctctgccatgttccttccaaaaaagcatacagttgtcctggcaaacatcaatcttctcatactccataccaagaccttcaagcaatttcttggactggtacatgtctttgggcatcttgtgacccgtaggaagaacctcgctaatcaaatccacaagctccttgtaacaattaattgagaatgcaaacttggacttaattgacatcagccgggtcacgaattcgaggacggtcacgtcagtgtgcccgtgaagaggctcttttgacgctttgaggaggtcgaaaaacttctgaacctctggtgtaggtgaatcatgatgatctggggccagttcaggctgcagatcctcaagcatctggtccatcctatcaacatcttcaccgtcatcaacttctacttctgt

SEQ ID NO: 107647 - DNA, 625 bp, Zea Mays
acatcggtttgaccagaaacaatacaatgactagttagcaaataacatctacatttggtgcaagcataaaacaggcatagacatagcttctcaatgaaagtgtaccttgcttcagcgtccaccagcctccgactttggtaggttaccacatgctcctttcctttggtttcttgtgtcagaacagctctaataactttatcttcggctgcaatgtataatctgaatggtactcctgcctgtggtgcttttaatacaggagttgaagacaaatatcttctaattatgtcaaatgcttcttgctgttctacccctaggtgaattcagcatcattttaagccgaaggataggagtgaaggcattgatcttcctagctagattagaaataaacttttgtaaataatttaccttgccgaggaacttctgcatttcaagcttacatgttggaggtcccacattccgaatgaatttaattcggtcagtgttcatgaatggtgaatcctaagaacttaccagccggcactccaaaatcacatttacgtgggttcttttttagaccatacctacacattttatcaaaggctttgcgcaaatcagctatttgagaactaaactcagccgatttgac

SEQ ID NO: 107648 - DNA, 755 bp, Zea Mays
attccaagtatgtagtttcacgcggtccttgaggaggagctctgcctccgtgctgttggaactgattgcccgccatttcgcgcaagaagcgcgtattatctgcagtggcattgaccagggcagcgatagcctcggccaaagttggtggtactggtggcgggtagggagtatcctcccgaccgcgggaagtccccgcaccatcatgtgcgcgagtctgtgatggcatctgaggcaaagaaacatttggaaaaaatataacatgccagcacacaccatcatattacattaccaaaatgtaataattatatagactccagcgtacaacttgacttcattacttattttacataagtataatatctaaactatactattctagtcttcgtcatcctttgttgcttcatttcctgctttaggagaccgtttatcagcaaggttcatggaaggagggggcctaaaaaggtccaactccccattagatccttcatttgctgttcccgatggtccggctcctattgcagcaacgtcagaaggcacgtccgggtgcagtcgagcatacagtacatgcacttcttcatgtaaagtattacagtacacttgcaggctgtcgagggccacactaagctctgccacatgagctcgagcttttgcttcacgatcacaagtgatcgaacgcgagttgacagcccaatcaatggccgaatcccattctgaaatctcatattgcaagcggctgacgtcagctgataattcag

SEQ ID NO: 107649 - DNA, 310 bp, Zea Mays
atttcatttatacccctgagataccagaaatcctaattaaaaccctggaaaaccctaaatccaaaccctaggggcctatgtgcaaaaataatgtacttgtggactaaaatgcaaaaaccatgttaaataagtatcctaagtcatatggttcccaatcatgagggtttgcaatccaaaacttgagatttggacttaagtgcaaaagagccacacttgactcatttgatgaagtctgaatttcagtgtgattgcttcaactttgagcccttgtatctttcaaattaatgagaatttgccctaggtcaccaca

SEQ ID NO: 107650 - DNA, 886 bp, Zea Mays
cgatgacttaagacagtgcgacatgctcacgcttacttaactcggggtgaccactataccctactaacggagcaatcggcttaagtcggcaatgacttaagacggtgcgacatgctcgcgcttacttaattcggggtgaccactataccctactaacagagcaatcaacttaagtcggcgatgacttaagacggtgcgacatgctcacgcttacttaactcggggtgaccactataccctactaacggagcaatcagcttaagtcggcgatgacttaagacagtgcgacatgctcacgcttacttaactcggggtgaccactataccctactaacggagcaatcggcttaagtcggcgatgacttaagacggtgcgacatgctcacgcttacttaactcggggtgaccactataccctactaatggagcaatcggcttaagtcggtgatgacttaagacggtgcgacatgctcgcgcttacttaactaagggtgaccactataccctgctaacggagcaatcggtttaggtcggcgatcactatacccctgacagcggaacgattgatttaagttggcaacgacttaaattggcgcggcacattcggcacgttcgcaactattcatcccagggcgatctctatgccccacgaaaaaattcaaaaccatcataatgcacttacttttacgactgtagataccgttgaactctaacaacgggaaaacaataacagtattaggtaccgaaaagtgttttccaacaaaacatccaagcacactaaccatatactcaaggcattcagtgttttctatctggaaatgtttttctcgggagcaaccgacgaggaaggacgactcgaagaatcgggagcggcattcacatccgc

SEQ ID NO: 107651 - DNA, 324 bp, Zea Mays
tccattattaaattgctaccatttgaccatctctatttcattttgttattgacatgctcatatccttgcatttttaatactcgtaccccttaatctaaagtacttacccttgtacctctattgcctatttaaacagtttagtttatgtgtccatgaccttcttgtcttctgagatcatttcttattctgttgttaagtcgctatctttcggcaatttatatgcccttggtcttagtatgctcatatccttggaatcttgcatactcttatattcttatgtacgcttattttcataccccaatgactgttcaaaacatttcagct

SEQ ID NO: 107652 - DNA, 382 bp, Zea Mays
acctacttgacttagggtgaccactataccctgctaacagagcatccgacttaagtcggcgacgacttaagtcgatgcgacatgctcatgcctacttgacttagggtgaccactataccctgctaatggagcaatcggcttaagtcggcgacgacttaagtcggtgcgacatgctcacgcttacttgacttagggtgaccactataccctgctaatggagcaatcggcttaagtcggcgacgacttaagtcggtgcgacatgctcacgcttacttgacttagggtgaccactataccctgctaatggagcaatcgacttaagtcggcgacgacttaagtcggtgtgacatgctcacgcttacttgacttagggtgaccacta

SEQ ID NO: 107653 - DNA, 432 bp, Zea Mays
gcactacatgccaggaacattttcagcgacgacgatgtcattgacttgggcaccgcacccagatgatattatcatattggtatttccacgcacatttataatcatccattgcaacgaaggtattaaaaaacaaatcaaccgtgggtagtgctggttaagaaatacgaagtttttctcatcaagacatgtaaaactttaggatgacatgagaaaagatacaaatcaaccggtcaaatcaaaggttagcaggcaattaagaaactacagaaaaagggcttggtaaagtacagaactgctaaaagaagattcatggtgcaaagcctactcagtgcagtctagacatcatggcagccaccagcggcagtaccaggcaaggtcctgacagtcacaagcgatgttctgggtgaacgaaaaaagaagagggtattgctg

SEQ ID NO: 107654 - DNA, 661 bp, Zea Mays
ctcgaatgtggacaccaattttggtagagggaatttagatttctttgattgtcgtgaatcccttgatggctgtggagaaggtggtggtgtcctaaatgttgatgcttgtggcggagacggtggattagaaagaggatgaggagcatcatgggaagattgtggaggtgatgatggatgtaaaggtactaaagtttgaggaggcagagatggttggggatgagacgacgacggcattggtggatcaaccaattcgacttcccttcgaggccaaaggatgaaatttttgatggcttgtccaagtgtctcgattccttcgggcccagggatgtctagcatgtcgtcctcagatccttggacgaccgtcatcacttctaccctgcaataatcatctggtatgtcgcttctatgaaacttgcgtcctaggatcgcaatgcttgttcctactttcttcgtgcgattattgttaataccatatcttataactagtgtgcacgtcactggccttgttatgtcatcaacaggataacagaccttatttcccgttgacgcgacagagcttgggatggttgtacaatcggtggaagccggcggttgagctactggaattttttgcagctgtggagtggtcatctgttgaacagacatcgcacttgccaactgc

SEQ ID NO: 107655 - DNA, 467 bp, Zea Mays
ggggtatcagtcacctgagggggtcctcaaggacgttttcactggagactctgactccggtgacgacaacaaccgccgcaagaagttgtacgtaatgtacggtgggagctgggagctcacctcccgtaggaatgtgaagtccctgcgccgagaggtcctttcgatggtcctaggggtcccaaaggctgctccacatcagcggtggaggagcaccactatctccttcggggcatccgactgccacgaaaacatggcaggggccggtatactaccgctcatcaccgcccctgttatcaccaacatgcggctttatcatgtcttcattgacggtggggctgggctcaacgtcatcagccacgctgcattcaagcagctgcagatcccagggtctcgactgggaccctctcatccattctccggagtgggcccacaatcggtgtatccccttgggagcatcgcactcccgg

SEQ ID NO: 107656 - DNA, 385 bp, Zea Mays
gatagagctacaatgtctcaaggcctcaagcacagatgcagtcgtccagtcgagcagaggcagagctgatgcacacacacatgttgtatattcgtgcacttgaaactccttatgggaaactagagtggccaatgagctaagaatttatgggctttgatacatgcacatgatccgcaaaatgtaaaacgggataaaacaggaaattcccgatacaatacgggatatcgtaaatacggacgggaaacacctccaaccgttttcggtcccgttctcggatatacctatcccgatttccgtaccgttttcacatttttaagataaaatgaaaatggacggttctaaacgggaatacgggacgggacgatataattcctgttcgttttct

SEQ ID NO: 107657 - DNA, 385 bp, Zea Mays
ctccaacaatgcagcgtcttcctcgagcgacgaggagactgaaaggcgggtcgaggacaagctaaatgggttgtgcttcatgccgacaccacaagcggcctttgcaccatgacctttggtgatgatgaggtgggcagctgtgaatcatctaggccccttagtgatgttttggtaattaattataactgtttatggactaacggttcttggagaaataagaatgcagggttggaccacatagaacagaaaatcttggagatttataagcattggttgtgtatcaagtgaaggcaaaggtataacataggttttgtttttgccggtctccaggagtttagagaagtcatttgaccggattagtaggctagatggccatactattaag

SEQ ID NO: 107658 - DNA, 516 bp, Zea Mays
caatccatggtccacgacgccgcacgacggagaaccaagctccgacaagctcataccggccagatcactcgatgaccggtgctctacatcggctgagacttaattcaagccttaacaagagtttcccctcaattaatttcactaatggagctctaacgcgctctgtccacggtgaccgtgtgatcgatggacaatccaacgcgttcccggcgatctaagggttcctggcttaattggcggggtcggcaagcatcaggagcatatcagagcactgaaacaagtgaacagaaggcatgaacggacctgagacgagctagccacggcgaggcctctttcacggtggcggaaaacagatttaggggaaatgagaaattggagagttgtggcggctaattggaggcaggagcaggtgcttgggcttggtgataacttaacacagtcgaccatgccgtcaatttataggggcgctaagcggtggccagtgaatttggtttggcgtggtggcggtcggagaag

SEQ ID NO: 107659 - DNA, 369 bp, Zea Mays
caaatattcagaaaaatacttttgcaatggtgtcagtgcgggtgatgtttttaagggttgtaaacctctttgttctaatataataatacacagttcccctgcttgttaaaagaatggtacccttgttgcccatccctgttatgatattatccctggatacttcctttcccgctttgtttcaggatgctatgcctatgtatgagtatctttcttttgttgggatagtcttgggaagcggcgccgggctttctcgtgagtagtggggctatggaattgggtgccgcaaaatgcagctttgattctagctgattaaacagtagtctaaccgctggagttgggtggttttgttccaagaaattaactgcttca

SEQ ID NO: 107660 - DNA, 777 bp, Zea Mays
aaaaaatgtatgcttttatttcagattttttttgaaaaatttgttaattcatatacaccatatatatatatatatatatgcatatgttcccttaattttctaccaccctccgtccctgttcatatcccttcaccacccggaccgacatttcattttccattctatttccatgaggccaggcgatgcaggccctcacaggcacacagcacaggcgtgcaatgcgctctcagcggcccgttggcgtgaacaagatgcaaccgttagataaggccaggatttgcgtgaaaacgacgaatcgcagacgatgacacgacagggcactacagccggccggcccggtcgtttccgttccgttatgttcctcgatctctccgtgccatgcgagtgtaaacacttgtactaactggtagtggtagtgagaggctttgcccccatgcagctccaagaagcatggtcacatgcatgctactctctctcaggcctacctgcaatatacagctgctctctcggctttgggagaacgaggcaactcacaacagcagcagcagtagtgactagtgagtgatatatgcaaggagagctggagcggcacaaagacgacgatggaaagaaagaagggggagagagagaggagatggacacccaggcagctagaaatgcctgcctggctgccactcgccctctcatccatcatctaccacctcaaaccattgctgctgcaataatatactaattacctgtattatatcatagagcatgagatgaagccccccgccg

SEQ ID NO: 107661 - DNA, 338 bp, Zea Mays
ctcaaagagaatcaaaataaatttaatatttctaaccgcttttaaactatcttgaatcataaacacaatatcataagcatattggagacatgcataaccttcatcaatgatatggggtgctaaaccaaccaacaaaccagccccttgtgcattcttaatcaaacagactagaccatctgtagctatgttaaacagaaggggagagaaaggatcttcttgtctaacccctatatgcgtggagaaatatggaccaatcatatcattggttctaatggcaacctttctccctctaacagttctcatgacccaatcaccccattttgctccaaaacctttca

SEQ ID NO: 107662 - DNA, 518 bp, Zea Mays
ctcactgttaccccctggactttatattttgatggatcggtttgcaatgaaggacaagaaattggcatcgtgcttgtttcaccaagtaacgcatcattcgacttctctagccgactaaaaacttattgcactagcaatcaagtcgaatatgaggccctcttatttggcttggagcttctaaattgtatgggagtaaaacatgtgaacgcatttggtgattctcagctggttgtccagtagatattataagagtatcaatgcttagatggtactctaaatagctatcttgaaaatgttgggacataattcattattttgatgaattcaacattcagcatataaccagggttgagaattgcagagctaacaatttggtgcaggatgcatcaggatatcggatgaagcgagggaaatttcacaacaccgaaaatctgataacatgtgccagaaaagttctcctgactgattcagctgataacgaagtcgatgcaattgattggaggacactcataattaat

SEQ ID NO: 107663 - DNA, 701 bp, Zea Mays
gtactcggcagagaatgtcctcgacgatggatggacaactttaggggctgtttggaactggttttaagtctaaaaccaccgtaaattacggatctgtaaaattttacaatcctagatccaagttgtctgctttgatggacggtaacatgtgtggtttgacaacagtattatgtcttccgaaccggaaaataaaaattttgcccgtcggccactcaatcagtgtgtactgcaggtagggacagatggaccacaggcatccaaatctaatagggagaagacgagagatgggatgtaagctatagccatcggatggtgtatacggtcagatttatagagtagaacttaagaatttgaaatacaagaaactgctagagatagccagatcgtgtatatggtcagatttatagtcagatttatatagtagaacttaagaaattgaaatagaagataggatagaagcttatgttatatgcagtacaactaaattgtatatatacacactgattcaaagtatttgtggccggtctaagttaatcggtccaagatataattgaaccgaaggtttaaccggtccagtgaataaaaaaatatcatttccatgtccggttggattctaataactacgcatgaccctcgtgccgtggtgttcagcaagagagatatgcatgcatgcaatgcactggggctttggcccttttcac

SEQ ID NO: 107664 - DNA, 352 bp, Zea Mays
ggcaccctttgaagctttgtatggccgacggtgtcgtactccgttaaactggtctgaacgaggtgaaagatgtttcttcaggcctaatatggtaaaggagacagaagaaaaggtgcggcgaataattcataatttgaaagcagcccaatcttgacagaagagttatgcagacaagcgacgtcaacccttgcactttcaagttgaagattatgtctacctgaaagtttcaccaatgaagggtgtatctcgtttcgggataaaagggaagcttgcaccttgatacattggtccttttcctatccttgaaagatatggaccagtggcataccgactctagttacccgaaaccttg

SEQ ID NO: 107665 - DNA, 1005 bp, Zea Mays
gtcctgatggcttcagctggggacagctgttcttgaagtgattgggatctccgcagtgccaacacgcattcgctggtggttggttgcttgcaactgagggggcttgaaaggagctctgactctgctgactgaaccgtgacggagtgggtccagctggtctaatgaagcttggtcccttgggtggaaatccaaatgatcgagttttctggtgccggtcttgctgctgtgctcggaggacatggaatttcctcttgagatggcctttttcttcttcctttgccctttccacttgcatggctttgttcgagaggtgcgagaaactgaggaagtcttggctggctaggatggtcttgagttctggtctaagccccttcaggaagcgggccatcttcttgacttcggtgctgacgtcatccggcgcgtagcgggccaactctgtgaatttgtgcacgtactcactgacagatcttctgtcttgagtcagttcccggaattcatcttccttgagctgaacgatcccttggggcacatggtgctcccgaaaagccgtttcaaactctgcccaggtagcatctctgatggtaacattgaaggtatcccaccaggctaaagccattccggaaagttgatgagcagccagttgaacacgctaattttccgggcatccgatggcttccagcttcctcttaatcgtgcgcagccaatcgtcagcatcgaggggattgctagatccggcaaacgtgggaggcttgagcctcaggaaatctcccatcctgtcttgtggtcttccaccattcgggcgttgattttctagacttcgagtgaggacctcgatgagtcgggtttggttggctagaacttgggctaaatctaggggtagttctggaggtgcagggaggtgagtctcacttccttccctaccggcttctctttcagctcttaggggaaaccctgctccaatcccggaggcggtaggcgtggttttatccaaatccatctgcgagg

SEQ ID NO: 107666 - DNA, 627 bp, Zea Mays
ttggaaactggggtcctaaccgactagtagatttgtgatgtgtgtccctgtccggatgggtaaatggtgatgcaagaagacacaagagatttattcaggttcgggcaagagaagaccctacttccagcgatggagggaggtttgtattatcttgcacctaagtgttcatagtaggggttacaagcagtcgagagagggagtctgtcccaagtctcttgagtatgattgaggcagagtgccaatatcggaggtgaggagagttgtgtgttgtgaagtgtgtcgcccccacccccccgttgaaggccctgagttcctctttttatagtcgcaaggaggaggcccaagggtacaagggttgatgcgcggttgttgtggtcagaggagacgcgtccgagccctgtagcgacatgactggcgggatggcccttgtcctcgtgtccgagccctgtagcctgttcttttgacggggtagagagccgaggctgagctcgggagcatggtcatgtgcccgagcccagcctatacatgggcacggatgtcgagttggagtagttgtcacagtgcttggtatggtcctccacaagattcgcggaagaataggtggcatttaatgcacgtctgctgggg

SEQ ID NO: 107667 - DNA, 274 bp, Zea Mays
accgtaatgccgaagacgcatacagtcaaggcagtcgaagataaggttgataaggctgaagggtcaaaggctgaaaaaataatgcaagtgccaaaaattatgagccctccgacagaggcaacactgccgaaggtgcaaaaggcttctgctacaactcccaagaggaggagaatggccaacatgctagatgttgtgctggaaactacgaaggttttaagccctgctgctacaaagaaagttgctgaaactacaaaaacgcaggccgaaaccaaaa

SEQ ID NO: 107668 - DNA, 329 bp, Zea Mays
tttggtttcaatagccgaagaggtctcaccgccaaattcaggcactatggccggttcaatgtagcgcggtcggtgggtaagggctttcagatttttcctcttcggcgtaggctcgcttggagcagccgaagcagcaacgtttccagaagttgtactctttctcttctgcccccgtggcgggtagcggtagtcagggtacataaatccaatagcatcaaaaactctatttagcctcttctttttccggctcccgaaggccgcaaatagtgcgttatcttcagacttggagtatgctccaagtagttcatcactagtgttttcaacacact

SEQ ID NO: 107669 - DNA, 639 bp, Zea Mays
gtacaacgaccacagatcatcaaagaataaatgctgcacaggatctatattatctttgctccaaaatgcatcttctggcacaacaaatgtgaagtccttgagtttgtatttgttgctagccaccatgtaccactcatgcattctaatctccggagtcgacaacttagaaagttgcaccgtcgtaaagaacagcctcccattcacaaatttaagaggaacatccttcttcttgtatatcgggatattgattttaagacgtaatgattctcgagtatgaatcattccatcttcttcccatacttcgaaattgtctatttgggaccgtgtgcgtactccacgagatgctgattccgcttttgattgatttttgcaggtagcgtgtcactgcttctgacggtttcttaacattgtcagtggcgattcactaatgaattttctttgaagtagttggcccttcaacattggtgtcaacctttgcttccttttttatgtttgtgtcgacattctgaggaacaattttgtctacgtccccctcgtcgagttccttcgcaagaggtgatatgattgtttcaacagtttttgtggaggtcggtgctatattttcctgcaccatggggtatggaatgatcgaactatctt

SEQ ID NO: 107670 - DNA, 316 bp, Zea Mays
cgccagaatctcctcagagctgtcctccaagatcacaccattcctcacagaaaggtggtgcaactccacagggatttattccgccacaactgggtaggaaggagcctgttgtggtggagggatattgttggtgttcacacgggtagtttggagagtatgcaccatctataagaagaaagtgtcaccttaattgaattttaaagaggaaagattaataaataaatttgtaggaataaaataagcatattttgaacagactgggctttccatttctaactagtctaatgacctagagtcagtatagctttgataccac

SEQ ID NO: 107671 - DNA, 520 bp, Zea Mays
gttagtggggcttatcggtgccatggggattagttatgcactacaattgattgcaattagttcgtctggttggtgccatggtgactatgtcgattagttgatttgaaaaccatttgatcgatgtctgaaattttgcatctctcctttgccactcttttgttagagtagtgtgtccatgtccatctggctaatgcttgttgaccataaagtcggctctaaacctaacacactaatggggttacaagtatactcacaagttagtatgtgttttcacaacatcggtgtgagtacctttgctataagataaatatacatttgcagcaagtggtgaaatggtttttgttttccttattaattttctaagaacgtttcaagagcgtagtatctcacatttgtgttgtgttaaactcctgtgaaattgtgaactatggagagattcgccatcctaccgtgatgcatgtgttctgtcacatgctggtttttaaccttaagctctgtcacatgcgtgatctgaagtccc

SEQ ID NO: 107672 - DNA, 597 bp, Zea Mays
ctctgacacccgtcatgcctattgtgcagccaagatcaaacctcaattctcaaccaacagtggaaaccgaaaccagtaacaatcaagcctaagaaattgcaactgaggaggctactgttgaggcagtagtaaatccaacttcacatgaacaagagcaagaaattccaccttctgagcaggtattcgatatagttgttgatcatgggcttagaaaaccatttttttatatgctactattagagtttatggtcgcttcggcccggaccttggctaatttctaggtccgccactgttcaccataagcccccactctttatatagccgagggaatgtgtgttcattgttacataaatattttgatggggtatgtcatatcctccattggacgtaatcttctagtactccttgtagttccaagaacatgctcgtccatcatttatgatcttgaccggattgtggaggagagttgcatcctgcaggtgtttgaagcctcactgtaatgtacatccccgaggatcgtatgagtagttccatagagtcctctcatttgtccttgtcttatattgttcgttatggcctgtaggtcctcgtttgtag

SEQ ID NO: 107673 - DNA, 724 bp, Zea Mays
ctgagaagttttgtttttatgcctctctgcaactacttcttctggagtcttgcagagcatggcactcactgatttgcttgccttttgggtacttggttttcgaggagcagatacaagaaatggggacatggcagcttgggcaattttcttttttgcttgcttgttttttgtcccagaacttggtttaggaccttcatcattccgctcttctccctcttcaccttcttcagtattagcagtaatcacaagtctcatgctccttttcagatacgtgtgcatttcctttgaaaccaattctggtactctagcacacttcatggtgtcaccaaacccaccggcaagatgctgcttgaaccttttgattccggaaggaacaatcttcgaacataaaatacactcaacaaaatccttctttgttgtgtctggccaccacccaaacttccatcctgggtcctgtgaccttgcctttctttttgggtcagttgcttgtgcactaagctcaggagggagtgctgcaatagccttttcagcaagactttttgagtctgcagcagctgataatgccgaagcagggcctgtgctatcaacatttgaggtcacgggaggaacagaatcacttgcatgccactgccagccacattggacccagggaataagacctcaacatcagcacctcttcgtccaccggcagcatgaaactctgaacatgtcaacagatagaggt

SEQ ID NO: 107674 - DNA, 650 bp, Zea Mays
taactgggggaattctgctctgagtttatattctctttcctaagtggcctcatcttccgaatgatgactccactaaactttgcacatgttaatgactttactccgtgtaattctgcgagatgtttctagaattctgaccgggtactccgaataagtcaaatcttcattgacattcagttcttccatgggtagctgttcctttggtactcttaagcacttcttgagttgtgatacgtgaaatacgtcatgcacatccgataaactatcgggtagctctaactggtaggctacttcacctttactttccaaaaccttgaatgggccaatatagcgaggtgataattttcccttaaccttaaaccttttcattcctctcatcggtgaaactttaaggtatacgaagtctcctacttcaaacataaactctcttcttctattatcagcatagcttttctgtcttgactgtgctgtcttcaaattttctctgataatctgcacttgtttttccgcctcttggagaatttctgggccaaatacttgactttctccagtctgattccaataaagcggtgttctacactttcgtccatagagtgcttcaaatggtgccatttttagacttgcctgataaatgttgttatacgaaaatt

SEQ ID NO: 107675 - DNA, 875 bp, Zea Mays
cgtcacgatactttgaggatctggcacctgcgcccgactcggtctgccagtgaattttggctctacgtccggtcgtgcgtggtatgttcgcgattcgtacaaatggaaggcatcgcgtacgttaaccttcctttattgggctgggccattccatctttgagaaggggcccaatctcgtatttgatggtcggcgtggcaatatgcttagcttcgtagacaggtttcccagctgttgcaaagacttcgcgagaacggtcaggggcgcgattcgccaagctagggcaaacaaagccgtccggccctaccagattaagaatgcgaaggcctttccttcgaaaggagaaaaaaaaagagctatgctattgaccgaccctttcgtacttacttcgaatcaataggcctatcatttttcatgaggcgggccaaatagagaatgaaatgcaaaaataggggaagggggggatggtcgcgccttttcttttgtttaagggctgctcgccttactaaagtaccaaaggctttcacggctgacacccctaccttagaatctaagccctttgaagcgccagtagttgtagcagtgggtaaggctttcgttcaactcgctccgggttccgatctatatgacctctagacagtacaaagtacacctcttccgtagaggcaagctggtagtaacctaaccttttagagtcgggggagccgagcccttaactctatcaatagataaatcttcgtgcgtggcgtgagttggaatcctagaaaaagatcgattgagactccctccccggttccacgaagatctctacgtacttgtctagtccaggacaactgagatcttccggtctgcgtgcgtgggagcagctgaaacaaag

SEQ ID NO: 107676 - DNA, 391 bp, Zea Mays
gtcaggctgtttgcagtctgaaattcagactaacagtgatactgagtcaactttgaactggaaatcaaccctgatctaatgagaatttggccatggttgctatagcaagattgttgttggatcatcagacaacaactttgttactggccgatccactggttgccatagaaatttgagagagatttgagcccaaactttgactgtcaggtgcactgaaaggaactcgcgatggtacagtaacctgaaacagatcagatttacagctcagctcgccgccgatgatctccaccgtgattcgtgttgtcgccgtcttgatttgtgctcgggttgattggataacgctcggagcacgccgccgtggataagccccggccagtaaacaattccggcc

SEQ ID NO: 107677 - DNA, 711 bp, Zea Mays
gtccacgcgggcgaccaatccaacgaggcaccgttctccccatcaaggtaacctagattttctcctattcccaccaaatattgcatcggttacctacatcgcacatggaaataggagcaacttctttgggtttggtcggctgagagctggtggtgtgctcaccttgtgtagtcatgatttctgatgatgagagacactgatgaaatattcgacaaaaagttgtactcattttctactgtcatcatctcattaaggtgattgcaatgtatagggtttcataacaaatgctgtgaaaagacagatgagacttcaatatcttctgctcagctaagcccgcttggtacatattcactacgccttttaattttaatgatatacattgcttacagatacattgcttacagatacattgcttacatatctaatgtcttttatgggacatcttagccactacgaccaagacgaccctaacctcacaatgacgtgttgttgttctaaaaaatgcatccaaaacagtttcttctttatagtttgtagacattaggtggatatacactttctatcttgattatacaatgaagcctttagccaatcttatggtacttgtgagactaataaaaggtggctatgttttatgtagataaaacatagtaccaaacatgaatggcttcaaggctagcaaatgtttgaggacacttgatctgcaccaat

SEQ ID NO: 107678 - DNA, 312 bp, Zea Mays
catcagctcaaaatccgaccctcagacataccaaagacatccttcatcactaagtatggactatatcagttcacggttatgtcattcggtttgacgaatgcgccagcttacttcatgtacttgatgaacagtgtgttcatggactacctcgacaagttcgtagtggtgttcattgatgatattcttatatattcccaaaatgagcaagagcatgaggaacatttgaggaaagtacttcagaggctacgagagtgctagctgtatgccaagcttagcaagtgtgagttctggatcagtgaagttctgttcttg

SEQ ID NO: 107679 - DNA, 493 bp, Zea Mays
gtggatagggcctctatatcgaatttcgcactgggcctctgaaaagacaggaacggccctgacaatgatcacgacgaaatcacctaaacccaagagctatgacagcgaggagacagagagaacaccccaacctctctcacaggtccgctgagctttaagcctttaacatggggagggcaagggcgagcaccaccggccgctctactgcgtgcagaccacgtaggtcggaggacacagtgaggcagcaaacgggtgaccatcggcatgctgacagggggcaggcaaacaagcagaacggtcatcactgatggagggtaacctatcggcacgcttcccacaacatcactctggacagtgaacctatccaagttatccccccccccccccaaacacctagatgcacctggaaccatagtgggataagatcttttgaaccagatgctgaattctctgaacctgcattcatatcgtgtgcctgcatcgtccctgtcaa

SEQ ID NO: 107680 - DNA, 338 bp, Zea Mays
gtcttatatgagtgttatcgcaacctaataattattggaggcgagtagcgttcataagtcgatccttgtcaaaattgaggaataatctgataagatatgcacataagtgctttaggtcctttagtagcaaatgtaagtattatggagttttacgccatatgtaaatgcctctatgttagacccccaaaaatgtgatattttaggtgacttgtgtgttgtcccatttaagttgagaaatggttaagaaaaattgattaatcggctcccccatgttttgagttgcgatgtctaaaatagtttgctaagtcttattctgtgattatccaactcatgttaag

SEQ ID NO: 107681 - DNA, 490 bp, Zea Mays
tgcccagttgcctttcacttgaggtgttagtaatcatttcttattccagtattggtgtacaaacaattgacagaaatattatttggcatggaaatattttgatggcacagtacgctttttctgccattgaattcaatattgaaaagtgtggcaggtcatttgaacatgtcaagaaatacaaaaataaataacctacttgttgtgttcttattttctcctaattgcactctgtatcttcagttgtgtcttaaatatagagatacaaatcatcttccggatgttcatacaaacctcatctttggtaaagcagaaaatggacaaaaattctctcagatatggttgtgttgattatttgtttatgaatcccaaatagtgtcctcttcccacatccatttcttatttggtgatgcagatcatttgtgttcttaattctatagttgtttgttgttcagttgatatcgatcttgattcctgtgtatgcttaaacatg

SEQ ID NO: 107682 - DNA, 417 bp, Zea Mays
gagaagtgacaagttagaagcattgcgaaattacagaaggaaaaatggattgtgtttcaagtgtggagagaaatggggtcaacagcataagtgccctacccagatctcgttacatgtattagaagaaatcttggatgccattgaattggactatgaacaattcaatagggaagagaatgaaacggtggtggaagaacaagtgttagcagtccaagaaacgatatctgggagtaagaaaagaagtacactgcgattactgggcatcattggcacgcaacaagtcttgatcttggtagactcggggagtattggcacttttgtcagtaagggattagtggatcgtttgatgttaccaacacagagttgtgcccagacacagtttcgggctgctgatggaggaattatgagctgtactga

SEQ ID NO: 107683 - DNA, 959 bp, Zea Mays
aggttaccccaccgaacggccctctgtctctcaccccttctaccaatagcttcagtgaaatgatggtgggcctcatgcagtttatcttcctgactggtgagtaacctgtcgtcacgaaccagcgatctgatgaaatttttccttcttctattatttgccatcaggtgaaaaaaatttgtgtttgcatctcccagacgcatccatacaagtctggaatgttgtctagctcttgccttttggactgtcactagcccaaggattttcatttttagacttctcctgaactctagctcgtccccggagagttgcctggattcctgtgctctctcaagaagggtaaggacggtctgaatgattgctaattgaactttaaaattgcctactgtctttcgtctccagatcaatagagctttagctgtgcggatcatcttcacatgcagcctaagaatggcatcggaagaacgaacactagatgtccaagcttgctgaaccacctcattgaacccatcaatttttgtccaaaaagcttcaaatctaaaccccctatagaaactaaaggtagataaaccttgcataactaaggggcaatgatctgaggtcatggacccaatggcctgcagatcagcctgggggaagatatcatgccactccgtagtcgccaagaatctgtcaatcctagacatcgtagggtcatcctgttcatttgaccatgtgtataatttaccattgagatcaagttctaaaagctgaaggtaatcgattgtgtggttgaactgtctcatcactcttctattaattaatcctttgtttttctcccttgctctccttatcatgttaaaatcacctaaaaccagccattctggcttcatcagactacgaatatgacgcaactctgccagaaaattcattttctcactttcaggttgagggccataaactccagtgaggtcccaccccac

SEQ ID NO: 107684 - DNA, 403 bp, Zea Mays
gccactttagtcaacctgtctactatgacccatattgaatcatagccatcttgagtacggggtagtccaactatgaaatccatatcgatttattcccatttccattcaggtaccttgagaggttgtagtaatcctgctggtctttggtgttcggctttaactcactgacacacgtcacataatgcaacatgagtagcaacatctcttttcaaaccgtaccaccaatacttttccttcaaatcctagtacatctttgtactaccagggtgaatacagtaagctgaatcatgagcttctctcaaaataagttggcgtatgagttcgatttccggtacacagattctcttcttaaaccatattgtgccttgatcatcttccgtgaaatctgtggcttttcccaaac

SEQ ID NO: 107685 - DNA, 623 bp, Zea Mays
gaaaatcaaggttttgacacgtagaccgaggcacatcgagaccaccgatgtgccaaagttaattgatagggtggaaataacccccccagccagagaaactgctcctactgtgcctattgaagccattgcagaccctaccagagcaccagagctagaaaaggtagtaaaaaggtattagagcagcctatgatgatggtgatagcactgccaaagttgtcagctactataggaactccaaggaagaggaggatggctagtgttttggaagctgttttagaatatgtgaaaacgccgcctccctcttctactgaagcttctggcggcaaaattgaagatgccacagagatgatcacttctagtacttctgctcatgccgaggcgggaccttcggaaactacaccagaaaatattgtggaagagagcccctcagaaaaacctttagcacctgctcccgaagcaccttctaagagtattttgaatttcattgttcgacatgcttcgggaaaacaactatcagcagagcaagtcgccgaaaccgagcattatgctcaggagctgaagtacccccagggatccttgatatatgtaggagatgacgatgatgatttcctctactatcttcc

SEQ ID NO: 107686 - DNA, 402 bp, Zea Mays
tgaaaatattagaagttctaagcccttcggcagaagtgacagtgccgaaggcacaaaaatgtcttaaagcgacccccaagaggaaaagatggccagtgtactagatgtgctggagacgataaaaacttcaagctctactccagggaaaactgccgaggcttcaaaagcgcagactgatacaaagctgatcgaagctgaagctacaaagagccaggccgagaccgaagctaggccttcagagcccgccaaggagaaatccttggaaaccggagaaaaggcaacggaaaaagaagctgtagaacaaattctgcctaaaaaagctaccactcctactcctgaagcaccttccgaagttcttgattatattatacgacacgcttcgggaaaaagattatctgaaga

SEQ ID NO: 107687 - DNA, 333 bp, Zea Mays
caactcttcgatgatgaccaactctcgaatgatgaccaactctctggtgatgaccaactctccgatgatgaccaactctttaatgaccaactccaatgaccaactatgaagaccaactctccaccaatcaactccggccgaccaattctccatcgagcaacctggcgaggcaaagatctaagtccaacgctactaatccacgtcagttatgatgagacgcgtcaccataaagccatgcccggttatgcgtgcaccacacgtaatgggcacttaggtcactacagtgacccatacattggaaggatgggacagcgcgccatactgagcatgtgc

SEQ ID NO: 107688 - DNA, 340 bp, Zea Mays
gaaacgtgctacgaacggtgctcctctatctgacacaatagttattgggattccatgcaagcgcactatttggtcaatatagatttccgcgtatttttctgtcttgtgggtggtatgcacgggcaagaaatgagttgtcttggttagcctatccacaatgacccaaatagaatcgtggtgccgggaggtgttgggcaatcccacaataaaatccatgcaaatgtcctcccatttccaagaaggtatggggagaggttgtaaggtacctgctacctttaaatgactagctttgattctttggcaagtgtcgcactcagatatgtacatagcaatctctctg

SEQ ID NO: 107689 - DNA, 466 bp, Zea Mays
gtgcctcggtctgaagtgaactatccagttcccacattttggaagaggtggctgggctcctggttgcaggaatgggtttacatgaaaaatgacctaagtcaaagggaggatgtgagagggattattcaacgccctatatggtctcgcttcggcactaggaggccagccactgcccttgggaatgataaacaagcatgccagacgactttcaatacaatgtgtacttacataggctttcaatatcgatggagtcgtccagtggatcagcggagtcgaagcctttgacgaaattttaagagaccggggagacttctgcgcgttcgctggcgcgcaaggggtcgcggtgatctcagagagagtcggttgtgaacatgttaaggctgcagctcagccgggatttgctttctcagtggatgacaccaaagacccctcggctgaagcttcttcactgggtgggagattctac

SEQ ID NO: 107690 - DNA, 475 bp, Zea Mays
gccgagtatgcaataggggcgccgatgttcgataccttgcctctgagtatcatctcaagccggctcactaagttcacagtaggaattcttctgttggttacccgggttgagtcagccaagcctcggtacagataagccggatatgctgtctttcagtggttgaatgttcttgaaaacaaagtcagcgaccacagcttctacagtcagacccctttctttcagcaatccaacttctgctaacaaaacccctgcttcagccacttcctgatccatgggggactcggtctagctcggagtacgaacatccggctgtctccctgaccgtggggtgagggaattcccatgattctccacgatgaaccattccaggtgccatcccttgatgctgtccttgagggggatgtcgaggtaatcagtcttccttctgcggcgcatctccaagctcgcgccccccaccagcttgtgctgccccccg

SEQ ID NO: 107691 - DNA, 345 bp, Zea Mays
gttgaggatgctatcctagatcagtctcatgaaggtgctatggtaactttagccgacgtcaagattccaatggaggtcgcacttcagttgggagatttgtactcttccgctcttgtcacttcttcccttatggctcttgcaaactctactgcttctgggagggtcttgcctgtgctagctttgcctcttcctatgttcctagcggacttgcaggtagccgttgtgtagtcgtatttctttatatctttctaatggatatttcattggctattttttgctgtgtagggtgttttggaccatgtaaccatttagttgaaggcacaagtgtcacacccggttttcgaa

SEQ ID NO: 107692 - DNA, 933 bp, Zea Mays
attttgttaacctattataggagaacaactttgatgcagatattctcttgagttgtgacacaaaaattagagaaaaacctgttataggttgctctgtcagaacagtttcagaaaactgaaactgaacctaaggttaaaacaaggttccagtgaggtgaggtcaagtttgatgcgccatatcttcgaatcccctcggttttgaccccaaatgtcctgtataaggattgaagactgttaaatcaagaacaaaccttattaaggaattttgcccggttattcacaagaatcatgagagctagtcggtggaagggggacggttcaggcgactgacgaagatgtgccatggtacagtgccccgatggatcagaccgccagctaagctcgccatcgatgatcgccgtccggattcgtgcacggtatagacggataacgccgggaaaagggtgaatcgtacatggtgccatctcctgtgctcggccggagtgattcaccggcggccatcgcgtcaatcctttccgccgcggtgtcctcggcaccgtgattcttcctcattgtaccaattctctacgtgcttggcatgcgcttgtgatggtattcgagccgtgaggtgatcgccggacctccgcggctataaatagcccatggttcgtggcgaggctcggtcatcacacacataccagtgaaccaaatcaagtcaaattcgcactgccctctccacctttgcccaaattgattgtgcacggtgaaagcacagcctcttacggtcctttagccccaatcccatctcccaatttcgctcagagccgccgcgaccccattttccccttttccgtctccggcaagcacgaaataccgcgctccgtggccagatcaccctggtaaggctctgcccaaatcaaatgttgtttctgcaactccgttcgcttgtgaagc

SEQ ID NO: 107693 - DNA, 769 bp, Zea Mays
gcgtaggtatgcagactgcagagcaacggagctgagagagggagcttactgtggcagcagcagcactagctcattgctctatctcctattcgcccaatagaatttcacaagagctggcaatttaagcactgttggttacgcccttataatcttggggctagattggacgtttggtttggactttggagaatgctagggtgtttcgtctggtggcagttggcacccagttgtatttggcaaataaacgaatggcacaaccttgtcctccccaaatctggtgagatctctattgagattatactattagagtttggtgtttggtctttggggttgggttttggggatggacaatgggagtttcttgcctgacggcttttgctgggctggcagcgaggcaaagcagcaatgacaccactagcccagcaggaggatttctgtctagtggagttgaggcttggggaacaccggcggtggagtgagggataaggaggtggttgccgcatgcgggttaatttcttgctggagttccatgctggcttcagcaaaaccctagcctgctgcggcagggtgaaggcgcatgggatggcagtggcattggggcagtaccgcagtagagctcgggaagaagcagtttgctcaaagctgaataggaccctggccattcaatctccatccagtggccagaacatggggtgctggaagagatttttttaccagaataatattgtatagacagatcctttgatttactagtgttgacgagttacag

SEQ ID NO: 107694 - DNA, 503 bp, Zea Mays
gtcgagaggaggacggctgcgccatcttctccaccacaccgcgcccgtcttcaccttcgcgttcacgcaatgaggatgcccagcggcgggccggtgtggatctgactatctgaggccaccaccgcctaagcatcgcccgatcctgtttgtaccctgtcaacggccaccagcccaccaccgttacagacccgctcggtgagcactctattctccctgacgagcctcatcctttcttgcgtattagtatcactttggtgccaaactttgaagcgtaattatctaattatgcgaatagctggagctacttattaatgcatacacatagcttcaaagatgactaatcggacatatgtttatctaatgtcaaatatgcaactagctgcagcttacttagttatgcatacagcatacaaataccttcatagatgactaaaacgtaaatagagttgaaattaccagtttatgaactgatgtgactagtatattcgacgattagatactac

SEQ ID NO: 107695 - DNA, 1367 bp, Zea Mays
gagaccccgctcggacaccctcgggggctgggtcatagtttgcgctatccacttgagccggatcgtctccggcaacaccctcgggggctgggccgcggcttacgcttcccacccgagccgaatcatccccggcaacaccctcgggggctgggtaggtgtcaacaccatcctcgaggcctaagttctctgcggtagccgcctctaaggctgaaggtccctcagctacttccatgggagcaagacgattcaagtcagtttcctgaccctcaagaccgcgctccaaggttgatgaggcgcgggacgctgtccgggatgaccccaacccggcgtcgaacacatcagcacaaacatccatcgcgtcaccatccgccggctctgataacaaatcctctggaaccatatcttcaagagtctgatcaaagttcgctagagacaattcttgtagaccaatgagggcagacagggcaggagaagggactccactactttccccactggcaacatattgccgactgttcttccgagtcaaagggacctcatcttcttcctccccatcgttttcattagcaacacagacagcacccccattgggatcagcgatagatggagcacacccattgggatcagcgacagatggatcacacccattggggtcagcgtcagtaaattcaggcacaggcacttcctcagcagcaggaaccgaaggaccaacatcctgatccaaactagatactcgccgaagacgtctctttttctttttctgctcatcagcaggaaaatcaagttgattggctcggcaagggcgtttcgggtgaacactgacaggcctctgaatatccaaggttgtaccagcttctaggagaggcgccaccaccaatgtcccagcaggagcagcatcagaagagtcctcagccagtatatcaagcatagcacttatctctgcatcactaggatccaaaggcacctcaaagtggacctgtcgttcatcatcaggaatttctccaagcgaggcaaccaaagcactaactttttcggtagagggtcgcactctaaggcccaaaccaccgtcagcagcaggaggattcgacacaaaatgattaaaggccttggaaggaggcaggttctaggccgagtatgcgacaggggcgccaacatttgataccttgcctctgagtatcatttcaagccggttcaccaagtctacagcaggaatttttctgttggcgacccgggttgagtcagctagacctcggtacaggtaggccgggtatgccgtatcctgcaacggctgaatgttcttgaaaacaaaatcagcaaccacaccctctgcagtcagacccctctctttcagcagtccaacctcagcc

SEQ ID NO: 107696 - DNA, 711 bp, Zea Mays
gtactccggtcgaggcggcagattggttgacttacgtggaggataagattaatgtcttcgagattgcgtatggagatcgggttcactttggcacacagctgctgaagggagaggcacaaatttggtggagaggcgtgcaggcagcgcactcctcctcaccaggagtcctgtcttgggatgttttcatcaggcagtttgaaaggagattctacccggtcaccttcctggagaagatgaagattgacttgcagtccttcaagccggagaagaagtctgtcacagagtatgaggtgggcttcaacaagatggtccgctttgtccctcatgtggcttataatgagatggagaaggcgagccagttccgtcagggtctgaagccttctatcaggcatgctctgggagccttttcgttggtggactttcgtaccacggtggagcaggcactgggtgtggagatgcaacaccagtataccatggagtcgtagaagtcttcgggtgttgatcagcctcgtggccaggacgcaaggaggggcaacacgggaggtccagcccacaagatgggcaagtctcagcatcagcgtcaccatccttaccgtggcaaatcttccgacgcgggtacttcaggaggaagtactcagaggtttcgggctgttcctaagtccgagctggggctagtgtgtttccgctgtggtgatgcacatcgttgtgcag

SEQ ID NO: 107697 - DNA, 678 bp, Zea Mays
ggttacaacggctgccgcgacaactcctcggtccaggtctccttgcccatgagccacaggcttcgacgaccaagaacatggtccatctggctcaaagtaggtcttcgctccgaggctactacaatacatggccgcgtggaaagtttttagttgttataaagaagtgaagttatgtttcctctaaatgtatcctcaaactgtcctaaattcttgtttactgttttttatgtttatttaattccccaagctagagtatccatcatatgtttgaattgcttactgagaaacattaggtggaaattatatagttttgatacaggttgttgtatgaattgattactgagaaacattgggattctgtacttgtacttataagttttaaaactgtcatactgtcctggcatcttggaagtagtattccttgtaattattttgtttacattggtttggaatggtgaagttaggacttctttgttaccataagatagaaccggtgtgagttaaaaatgtttctctcatggtctgcatctagcttcagcatttactacaggggtggatctatgatctgatcatgccctgagccggtctatttaatctactagagttgtaatgtgttttgatctaaatgtaatcaagttatacagagatatatggatcacatctcaggccacagaccgg

SEQ ID NO: 107698 - DNA, 1385 bp, Zea Mays
acgaacttctgtgctaacctgctaaaacgtgttgagggcctttagatccaaaatcaaaggataaccttaatccaacctcatactcttggctttttttccaaagaacccctcctcccgttgttctccgcctgctgccagcaggcggcaccgccgttctccgccgccccacaacgattttccccgttgatcccctcaggaaacatgaatccgtcgattgctgccggcccacaacgatcttctctggcacctatcatggtcgacgccaacccacccaaatcatctcggtgcgctgccatggtcgacaccgacctgcctcgatcttctccagtgcctgctggtctaacgagtccttcgccacctgctgttgttctctctatccccagcccttcgatcccggccacattgagctcaactccatggatcccgcacatctcatttcatcctttggaacaccattctgtttgggtttagataacagagttcagcagcactcaagcattctgtttgggtttacatagcagagttcagatcagcagcgttcaacattctgttaagtgcaccaccaccactccatcagcaacatcgaagaaaaccaaagcaacagcaagtagtatcagcggcgtgtatcagtaggagcactgaagaaattggttttgttctggcagcagggggcgatgggtctatttggtccagtacttttctttcgtcttctatccacgatagccatatgctatttgatctatgatacaaattcaaaatcgcagcatttttctttcaatttgccttcatgtttgtctgaaacatgtcgtttagattatttgctgaaacgtgttgttcagaaaacgtttgtgttcgtcttaacagttctgaaacgtaaatgtgccgttcagaaaacatggaaatttgtcgagcggttttccttttttgctgattgtttgtgtggaagtgctggtggctggcctggcgtcttctaggtgacgatgagcagggagcgacaggactgtttggcctcgaaggagaaaatgttttggcggatagcaaaataggagaaagtagtggttctttagaagaaaaaaaagccaagaataggaggtgggattaagtttatcctttgattttggatctaagggccctcaacacgttttagcatgttagcacgtgaatttgttttacacaatatacattgcctttaagaatatttaagcttataggggaatgctttaatctacagtgccaatagatgatatctttgtatatggaggtccacgtccacatcggatcttccctcccccaatgtcatcttctgtgatataaaagttgaatatgacgtagaacaaaagattttcagttctgatgagagagctgtatatgaagaagccctgaag

SEQ ID NO: 107699 - DNA, 297 bp, Zea Mays
gagccagcccacagacgtctgaagcgcatgtccccatgtctgcgctggtgatcttgcacagaaccccctggcgtttcaaacaactaatctaaaccctgagtcactattccactattgctctgtccttatgcctgaccccctcttatctttcttcttcgcaaaaccgtgccccctccatcgacctcgatcgaacacctggcggagccacctgaactcgccgtcggtgactcccctcggcggtagtgagtacccagacacccccctagagattacccgagcatattccatagattactt

SEQ ID NO: 107700 - DNA, 295 bp, Zea Mays
gaggactttgactcacctgctcgttgtggccctacgggaaatacacgatgcatgtgccgacggtggggaggcagatgtgcgggccagcgcacgcatgccatagctccgagttgaggcacttcttctctgcagaccacagtgcaccatcataagcaaaaaacgaattgatcttgaaaccaacaacacaacatagggaagcgaaacctagtaaagcaggcactgacacacttcgcatgtggagtcatccattgccacggagagggagagccctaggtatgctcctccaccaccgact

SEQ ID NO: 107701 - DNA, 395 bp, Zea Mays
acgggcttcatcagtgttacgaggtgcgtcgatcgttggaggctccgtagtaggagcattgactcttgatcggtatgggtatggaggactagcatacgaataaggaaagagtggttgaggagttagggcatggcgatgagcaagaacgttctctcggtgatggtggacaaaagaaaggttgtggaaaaaacttgccacacactggtaggagtctcaaaaagttgcagagattacttgcgagcaagtctatggatgtatggaagttgggactccacgaggtatccatatccaaatggagtttgggaagctattaaatcgaaatggagagagaaaagctacaaatggaaacgagaggttgtgaattagagatgaatgtgtgtaaatgaactctagca

SEQ ID NO: 107702 - DNA, 934 bp, Zea Mays
ggttgattaggtatggttactataacaaagttaaagctggattataggacaataactttggtacaggaagattagtaagttgtcacatggaaaatggagaacaaggctcctcaaatcacgctgtcagaacgattgaacatgatcgccatggtacagtgaccataaagatctccggtgctgtgagctcaatgccggtgatccgccgccacaattcgcgcccgcctaggagattcgtgccacgggaagagtagataacgttggggcaaggtgaaaatatccagtgcggggtgaatctggtcgctggccggaccggccgtcgtgtcccgccgcggtcaatcgcgttggcatcaccggagttcactattatctggccaagctacgtgcctcaaagccttaccacgtcgcagtagaccgccttaggtagcttgttcgtcgcctgagacacagccccgataaatgccacgttacgtggctccggtgactcacctctctctccgaccgcgagctttctctttcgaaattgggtggcaccgctgatggacactataaattgatgccccagtgagctccgttaggttgtcacgaagccagagcacccgcccttacctccgattagccaccatagcgatctaatttctttcttcccccaattcggttctccgcactgccgtgagtcgtcgcgtcgtggaccaccgttcccaggtccgttcataccctccttgccctcgtttcagcacccttgtgtgccatagatgcttatcgacccagccaattgaactagaccacgttagatcgccgggaacacctcgggttgtcctcagtttgtgccatcaccatggaccgagagattttgagctagaacttcgcaattgatagagggattagggtcgctcgaggtggaattcgatgttaaccaagtaagaagcctagtcgt

SEQ ID NO: 107703 - DNA, 362 bp, Zea Mays
cccctactcaggttagctgcatacccatcagggaacatcaacatcttgatccactaaagtacttccttcctctgggccctgcttaggacgaaatcggccttaggccttctccacgtctttccgccacttggcggcttcatctctaggtttggtctatcacataacgccgccagatccactcttgccttcatgttatcctttgacttatcaggaatatccataattgttgcccacagtgcctcagcaacattctttccagtgtgcatcacgtcaatgttgtgtggaaggagcaggtcatcataataggggagccaagtcaagccagacttatgtgtccacatatgctactcaccatatcccac

SEQ ID NO: 107704 - DNA, 400 bp, Zea Mays
cttgtccaaaggggtttgaattagggtttgggcaattctccccattatatgtgcatgataagttaaggcattacatctaagatgggttgcacttacttagggtcttgagttccaagtttggtgtactttgctccagttaagccacatgtgatgatgggcttggcttgtgtagtcttgagtgaaaaccctaagtaacacctcgggtgttacaatatgaaccaatagcaaaactaattcgtaccagcttggttaccttgaccttaccactattgttaagccattgaatgtgatatggatgcggatgcagtttggtcataagtgcaagcttcccaaccatgacgctgctagccaagttgttgcagctacctccattaatgatcaaacgacaagaacactcctt

SEQ ID NO: 107705 - DNA, 459 bp, Zea Mays
gcggatgataagctgaactaaagtttagcttggtatccatggactcatgtagtcttttccaaaagcacgaggtaaactgggttccttggtctgatacgatcttcttcggtactccatgcagacaaacaatccttgacatgtataactctgctacctgggctcctgagtaagttgtcttcacaggtataaagtgtgccactttagtaaacctgtctactatgaccatattgaatcatagccatcccgagtacggggtagtccaactatgaaatccataccgatttcttcccatttccattccggtaccttgagaggttgtagcaatcctgctggtctttggtgttcggctttaactcgctaacacacgtcacacaatgcaacatgagtagcaacatctattttcaaaccataccaccaatacttttccttaagatcctggtacatcttagtacttctagg

SEQ ID NO: 107706 - DNA, 497 bp, Zea Mays
cttaaggcttaacccgtgccaagtcttccgaggtccagtgtcgccgtcagagcaaaatatctagaagcacttaaactacggtcgaggtcacaaactaccagtcgttctcggtagaagcgggcgggtccagcctacgcctaccaccccgacagcggttggaagagccggccggccagaaggggcagcagcgcttgcagacaagaacaacaacgaggacaccgtatccttatccgtccacgtacgcttccacgatctccctcgtcgccgtcctcgtcacggctccgttttgagttctgctgcatgaagcctggagggcgcggaggagtggaatagactgtcttggccagcaattctggagacgtacgtgtcacttctgtttttgtttttattcatggcggacagttccgctgtttttttaccgttgagtcaacaaggagagaatccacctgaatttcatggattatggtgtatagccacgcctcaacaaccttattttt

SEQ ID NO: 107707 - DNA, 1153 bp, Zea Mays
aagagtttgacagacttcaaataaatgggatttggaaggcaaagtgcaaatggtgtaagaaatatttaggaggggaaacaagaaatggtacaagtcatttaagtggtcaccttgagatttgcccggatagatctgttagaaaagggttaaaacaatcatctcttaaactgactgcaaatccacatgatgggatagtaactttagagaaatacacatttgatcaagatgttgctagaaaagagcttgcattaatgattattgtccatgagtatcctttggctatggtagaccatgttggatttcgcaagttttgtgctacactgcaaccattattcaaagtagtctctagaaacacaattcgaaaggacatacttgatatgtatgaggtgcaaaagaaatctatggtgaagtatttcagaagtttaagttctcgtgttgctgttactacggacatgtggactgcaaaccatcaaagaaaaggttatatggcagtgacagctcattttttggatgatgactggaaactaagaagtttccttattaggtaataaccaagcatttgagctttatgctattgatgataacaatcttgcaactaccttgatgataacttatggcttgttaattttgcaggtttatatatgtcccagctccacacacagcagatgttatcactgatgttctccatgaggttcttttggattggcgtattgaaagaaatctatccacaatcacgcttgacaactgtagcactaatgatagcctcatgagaaatatgataggcacaagtaatgaggatctcacaaggactatgactgcaattgaaggcaagttgccactttcctcttgtatgttgcatggtaaattagtacacatgcgatgtgcttgccatattctaaatttgattgtgaaagatgggatgagtgtaatggagttaggaatggatagtattcgtgaaagtgttgcattttggtcagccacacctaaaaggcatgaaaagtttgagaaaatggtaattcaaatgaaaggaaaatatgaaaaaagaatagctctagactgtaagactagatggaactccacttatgtgatgcttagcactgcattattgtaccaagatgtttttgaacgccttgctgcacgtgccccatctgct

SEQ ID NO: 107708 - DNA, 345 bp, Zea Mays
gataacgccgtaaacgtgcatgtggccggtgaggaagtacacgggcttcgtcatactttgattccgtggataaaggatggctctcccatatttttattttgtcgtactactagtaccatgcaacgtgcgccctcgggtgttgggaaacgtcaaccctccttgaatgggaaaggtgaccatgtttacactacttgtttgtacatgctgagctagtagctactccaggttgagtcctctcagtctctcagctatacttcatgtctagttctcgcgggcctttgccgaccgtcatgtagcctttatagtacgtcttttcttttaggttcttcgttctctcactggtca

SEQ ID NO: 107709 - DNA, 565 bp, Zea Mays
tcatttgttctagctagattgtttaaaaccatatagaacaccttcaaatatggtcacgagagatgcactaaatagcagggcttggaaaacttagggtaaacaagatagtgtatgtgtttctgaccgattagatgctagataactcaatttgatatgatcctccaatatatacagatagtgtggactaattctagtaaaaaaaacaattgtacaacataatcttcagatcctcacaagatcaaaagaaaaatcagatcaaaatctacaaagctagagtggaataggggaagtcaaagcatcccatgcccatcaaaagtttccagagtttcatcccttgtggcatggttggagcttacaacacatgttggaacctccggtgtgaatgggattcacaccacatatgtcaaaacttcaaatatgaggaaacctatgaagtgatagagttttgggggcttcagaattccccacagagtcacttctatagtatccaacaaactccgatcctaaatccaaatcaaatctcctcttaacccttttggctgtcaacactagctctcaagcttaa

SEQ ID NO: 107710 - DNA, 860 bp, Zea Mays
ataacttgatagataaacaaacaataactggagaagtattctattttagctaagatgactttaattacatggtaaatagtgatatgatgcgtgtatattttatccatgggtacatgggtatggatagtgcctacccatatatgtacatgtctaccccgatgggtagaggttgtcacccattagcatacctaggggtaaataaatcatcccatacccacctttatatcgggtaaacccaccgagtattcgattttttagtacacaatgccatctctacccacaaatagatccacaaaagagagaggtgaggtttcattatgggtattgtgatatggatgtgcgtttggttgtgttttgctttaggagtaagagagacgagtgacagggttctgagccaagcaggaggaacatgaattgtcgttctcatggtgttcatgagcctcctatttagagacgtcctgctagtcctagaggagctttgcttcatgctgctagatctcaagtagtgagaccacagggtgttcatgcccagcaggatgttggtcgtgtgccatatggccaaggaccccatggcagtggctttggttctcacttcccttgtggaatacagtttccttctcgtgttgaatgttatccccccatgggaccgaggatgtttagtgttttccctaacactttaggggcaaatgttgcagcactggtatccttcacagtttactaaccctagtgttgtgttatttgcttaccccgtaccttattattgatgcaggatatatgtgacaccccagtgtccctcagggtttttctcaaatgccaaaccaagaaccatcattttatgtgaaccaaagtaagcatgaaca

SEQ ID NO: 107711 - DNA, 744 bp, Zea Mays
tgaattttgaactgttcgaatcacgcgcgtaagtgaatacgaaaatcagaagacttctgattttatgaacaatttggagccgcgctgtccgaacagaatgatgcgccagctgattaagtgaatcgttcctctcagcatgagatcgttggcgtcagatcaaatgatcgatcactggtgaggatcgtaaaaattagacggaactaaataatagtctctctgtcttaatctgtttcgtctgtcgcgagttcgacatcgtttttatttattcaggctcttcctaaattttcgtgatgttcggaacatagttgttccgaaaatcggcgccggtgattatttaaaactcatcgctcgcgcgaatacaacttcagaaacttgacctacttttacgatttttatcccgggcaaattaaattgaactcgacaactaaaatattcggggtaaaataatccgaatcgcgccttgtccgagagaaatcgtacgcgaggttatgattcaatttattcttcagcacactctgtcagatattaaaatcaactaggtttagatggcgattaaatttttatccgaggtcgactaaaccagtgttgtctcaaataatgtatcagatatccagtccgtttacgtgttgcccaaaatagtcacgaaagctatctaaataaaatttagccaaaatcattaatcttcggattttttgtttcgtgattcggagaaggatatgtgtagcccgtattgtcgacccttta

SEQ ID NO: 107712 - DNA, 334 bp, Zea Mays
ctgagcctagtgatacccttctggctgttggttatggatcagggtaagcgccagtggtggctgtggtggcaactaagcccaggaggcttgggagtgactcgccgaagcaacggaagccgtaggctgttgattgcccacatactccgggacatatggagaatagcatgaagcagtatgcaagacctgcttcggcgggttttgtcgtgcttcagcttcagcgatttccatctgcttttggatcatgacttggcacgtccttgtcatgtgtcccttatcttccccacagaataggtagaaaagtctcattggctgattaccatatcttcctcccaag

SEQ ID NO: 107713 - DNA, 579 bp, Zea Mays
gactccgcaggaactcaaacatatatcgatgggctaacaacaaaagacctcctcgacggagactgtgtcaacgccctcaacacactgaacaaatatgaagcaacaacgaagagctagagagacaaagctgtcaccctaaagagttcgaagaaggagacctcatccttattaggacaacaagaatagaatccaaaggcaaactcgaacctaagtgggaaggtcccttcatcgtcaagaagacgtccctgaattcatacaggctcgcaaatcaaacatgcgcagacctcgaacaatcctagaatgtagacaatatgagaaaacactacctgtaggacagcacacagccagggccttcgcgcccttgtaaatatatttgatacactgctccatttaggcccatactctttcccttgcagtggggcaaggttttcaacgaggtggcgccatgtaataaataaacaggaacccctgccacaaagagaagcacgccccaaacacgtcgaaaaggccacaaagttggccttccctattcgacaaatggatagtcaccatgacgacaacaatctaagttagccatcg

SEQ ID NO: 107714 - DNA, 702 bp, Zea Mays
tcaacagcaatgacttcacgactttccaatgcagttgcacgggcttgagctgtggtgagatccacatggagcttacggttgagcttctctgcatcttctgctcgggcaatcatctgacggtggtgccgagccaagaaatcatactgggcatccagggtgagcaggtatgcggtgaggtacacgactgtggggtcgtcctcaagcagctgcagctcttctaatgcacgcatcctggccatccaagcgggacagtctctctgaaagggcggaaagaatctgagcggtgtgtcggccacttcttcttcatagatctgacacagggccctcaatgccttgcgagcgacgacttggtaggtgtctctgaatctgtgcccagcaacagtgacactccattccacatggtgcggactggatccaatgtatacagtcacgacacacttctctgtgccatgctcgacgaattcacgaccatcatactctggctgactcctgattccgaggcgaactgtgcatgctctcagcaacttggggaaaccatcttcattctggcaaaaactggtttggcaacggacctccatctgacttctgagagaaggaaaggggaaagcattttcgaaatggagggatgagagcaagatttttttaagaaaatagtttggactcaaaaacttttgatcaggctaagggttacgtcctgcggcc

SEQ ID NO: 107715 - DNA, 592 bp, Zea Mays
atcttccggacctcgaatgtgtagtagcagaggagctgaacgtccgagaatggagggtcatcgctgaggaagctggagccgaaagaatatatggctccaacagccctcactcccgtttcgtccttgaggcggtacagtgacacgtcgtaccagctcgtttccttcctgacgtagtatatgcagttggcttccacggacgcgaacttgtcagcatccacggccaggcacctgcgctctcctacaaagatagctcggctgcctaggttattcacccgatcgagcagatcgctcccggtgtcgatcttgaaaacatcaacgccatgaccatgaagacacaggtagactgccagcatttccccagcagattccacttggaaacatcgtttgttcacgagtgggcattcagcgttgccgtcgaaatggtgattgaagaaatcaataacgaaggatggatcaaacagccaaccctgcagtgtagtagggtagactctacgttcgaaaggcagcctgaccagaagatgagtgaagtgtccctcattgtcctccacgaaacttttgctatcaggatcagcccagtagatcgtaggagaat

SEQ ID NO: 107716 - DNA, 608 bp, Zea Mays
tcaccacatcctcacgcattcagccaccgtgaatcgctagcaatcgtgcaccagtgcgcttgaatttcggttttcccccaaatcaagtttccgccacccgaaatcaccctcaccgtcgccagcccaattccggtcagctcccgttccctgcttcctcgtttaagctttctcacatgccttggatgcttgccaagccattgaattgaactacgggctctctggtcatcgggaacacgaccatatagccgctatgcttacggtcaccgtggccggagctccgtagttgatcattcgtgcaattaaattgggggaaacactcttcaggtagtgaatttggtttacgccatagctaggcgccggtcattgccctaatcggccggcgtagatgctcgctggagctcctccgtgcgtgaacgacgtcgagggcgcgtcgggtaaaggaatagataattggaggacttttctgcatttggtcagtgacacaaaagaacagtgagcaaacctgttttgatttagttaatagatcggggtcttctgtgcaaaactcccgcgggcgcgcacgcgtgggcgtatttctgctggttactgggccgcctgggctggattca

SEQ ID NO: 107717 - DNA, 467 bp, Zea Mays
ctccactcactgccatacacggtaagaagacctccgttgagtttgcttttgtctctattatgagtagcactagggaatcaaagtctgaacgtttgtgcgcaaggatgatgaactccggcgatgtctcctccgtggctagggtcgctccatcgatagggtgagcgactgattaggtgtgggggggaaacaattggcatcggccgttgatctcgttacgtgtgggcgagattagaagtagggtaacgattcacccagttaattccgagtcgtccaatctagatcggaggtgtgtggataggttggccttcattagttttggacccttagatcttgatctgatggccatgcttgcgtaccggttcgggcgcggctgatttgatctatgcggtcggatcatgatcgaacggctcagcccgtccgatacccccttcggcgagtaatctttataaagagcccctgcccttttg

SEQ ID NO: 107718 - DNA, 470 bp, Zea Mays
gtcgaagcgaccacggggcggtgaacggtaagggtgctgaatcccgacaggggcgggagaaccaccatccagatagtggcgtgctgcgctctcatcacgcaattccgcaacctccgcctgaaccttgcccaactcgtcaaggacgtggtccaactctgtgttgagcacgacagccaagttgaccatgttgttcagcctgggattgccctcaccaactggcaaggcaatcacacctcctgcactgtcggtcgaacggcgaggatagtactttaggttgaggccatcagctaccccgctgaacaacgaccaatactgcgaaagtgcctgtcatgctgcatcttgcatggttgcctcggcagtatccctctcagtaatagaatagtgctctgagaaggcctctgcaccccggagatcatcgtccagacggcgcaccaagcaagtagcctcccactggtccaggtataactcgc

SEQ ID NO: 107719 - DNA, 647 bp, Zea Mays
tggcagcctgaccccgtctttcagatgattgaggaaagaaatagagctgtccagttctctaggctctgggccaaattctttgctccggctggaccgactgatcactcggtaggtgtccctgagaaatgggcacctttttttctttcgaatcttcttcagccggaatctttcaactggtcaaagacttttcttctgtcaggtatccctttaaagttgcaggagcaaggagtgaattctatcccttttgtggttcctaaggattgcccagttgatccctccctgggggatgtcacctctggggcctccaaggattccattggttctggtgggctgactccaatcattgtggagacagggctcaggagaagcaaaagattgaaggaatcacgtgacgggttcaggcatggggcatgtccaaaaaggaactgcctcatgtgccagcataacttcgatggcccacccccgctatcctccaaggtgctgcggaatctgggaaccaggctttgcaacctgtctgaggaggacctgtctgagcagaggttgaagcaaaaaaatcgtctgtgggacctgttgggccgcggaaggttgacaggaaggatctggcagatgagaaaactgacgactcttctgatgaggatcaacaagat

SEQ ID NO: 107720 - DNA, 607 bp, Zea Mays
gtttccgctgtggtgatgcgcatcgccgtgcagagtgccagtggagtggtaggtgttctatctgcagtcaggaccataaggatgtggtgtgtaggaggaatcctaatgggaagctcagatgggagccggtgacttcctcctcttctcagggcaccatcaacatgatgtcaagtgttgagcagcaattttcagttcctcttcctccacagcagctctatgtgcctgagacttctcagttcgtgccgatgcacggttttcctcagtatcaggccgcgcctactcctgcaccgtctactcctatgctgtctcagtttggagctccgcgcctgcctcatccagtggctcagtggggttcttctgttaatttcactccaggggcttcctcttctgcgggtatttctggagcttatgtgctacccgctacgaatggcagggagcaaggagacgtggtgataggtacaatttcagttgattcgtttgcagcccatgctctttttgactctggcgctagctattcgtttgtttcggaggattttgtgtcgcgggctggtctttcggtgcagaggttgggtcacccaattttggttagatctgctaatggctccat

SEQ ID NO: 107721 - DNA, 592 bp, Zea Mays
ctacaaacaagggtctgaaaaccgagtagcagatgcactgcctcgcagagcgcatactgaggcatcttgtttggccctgtcagcttgctctcctcagtggtgccaagccatcatcgatggttatctgttggataaagaaactaaacaattgttggccaagttggttgttgacagttctgttgtgcccaacttctccttgcaggatggtctgcttaagtttaacaatcgcatttgggtgggtaacaatggagctatgcagcagtctatcttagaggctattcacagttcggctgttgggggccactctggtttcccagttacttatcacaagttgaaacagctgttcgcttggcctggcatgaggaagatgaccaaacactttgtagcatcgtgtgccatatgccagcagtccaaatcagacagaacaaagtatcctgggctcttacaacccctacccattccagctggtgcttggcaaacaattactatggactttgtggaagggctaccgatgtctggagggaaaaactgcgtcatggtggtagtagataagttttcaaagttcagtcacttcgttgcccttagacatccg

SEQ ID NO: 107722 - DNA, 371 bp, Zea Mays
gagcttgcttcaatccatagagagatttgttgagacgacaaacatgatctgggtgagtagaatcaatgaaaccagctggctgggtgcagtagacagtctcagtcaaggtaccatggagaaaagcattattgacatctagctgatggatcggccagtcctggtgaagagccaagctgaggacggtgcggatggtggcgggtttcacaacaggactgaaagtttcgtcgaagtcgatgccaggttgctgagtgaacacgcgaaggacccaacgcgctttgtagcgctcgagggatccgtcgaagttgaacttttgtttgaaaatccacttaccggagacgatgttggcgtggggcggacgcggaacaagagtc

SEQ ID NO: 107723 - DNA, 376 bp, Zea Mays
ggctgataaggataaggctgaagggtcaaaaattgaagaaataacaaaaatgccagagattttgagcccttcatcagaggtaacagtgccgaaggcacaaaagggttatgccgcaactcctaagaggagaaggatggaaaatgtgctagatgttgtgttagaaatagcaagaaccttgagtcctggtcctttaagaaaaattgccgaagcttccaaaatgcaacccgaagctgaaatgaaacaggcagaagtcgaagctgcaacaattcaagctgaaaccgaagctgggccttcagagcccactaagacagagcctgccgtagttgaagaaaaggcgacagagcaaattgcgtctgaaaaggttgaagctcctgct

SEQ ID NO: 107724 - DNA, 631 bp, Zea Mays
cacaggggacagtccatgaggatggcgggttctaatccaaggaaacctagggtttcttatgctaaaatgccatcccgaaggggtatgaaaagacctcgaccgttggatcttgatctgcggtcaggattagatcggaacccagatcaactgacgtacgctccgagccgtcggatcgagcacgcgcggtcaagatttaaaatactacggagcaacctagcgcgttggatcaagatcgcgcggcacggacccgatcccaccgaaccggtaccaaacttctaatctcggccattgacaccaaatccgacggcccaaatctctttcccccaatccgatcaacagtccgggcacctttcttccacccgcagccaagaccaaatccagtggctccgcgaccgaaatccagcccccccaccggcgagccattaggctttcccccgcgcaaccacgacccctactcgctcaacgcacagagatgacttaggtaaactcaacgacggtcttgttacctccaatcgatgattgcgtgacgctggccacgcggcgatgtggatggcgacgtcgagataactaccagcgagcaatcacagcccagtcgatccaatcaccacttgtcgaggtcccgagcaggttt

SEQ ID NO: 107725 - DNA, 404 bp, Zea Mays
taatttcagcagtacactttgttgactgtttatgagtcattacgttatgttagttttaatggccacagacatagcatatttgtatttccccatatacacatcataaaagagtgaagaatttggcctgagcactagtgaattttagactacatactgtcatactgacttgcattgtttttctgcacgctcatgtaaccctacagcctgatgaaatatcagaactttatgtccacactctgatcccaccttcatgatgaaattttatgttcttggtcattttcagaactatcatatttttgctttgcatctccacagacgacctaccgcagaataactgttgatcagattaagcagtgtttggtttcatgcattgtataaattgagtgaacattctgcacctgcag

SEQ ID NO: 107726 - DNA, 426 bp, Zea Mays
acaattctcttcctcttaaaaccttcgacacccttgtcaagcctcataatctggatattcaaaatctagggcgtccatcacgcgattcaaccttcgtttcggccgggtgccaatggcagcactcattagttggtcctccttcttggtataattaccaaggatttcgttgcacatagtttcaatcatttccagctactcttggcatggtttcttgaactctttctcaaatttgaatcggtagggtagccgaacaagttcgtgattattgctcgcatctttcttcttgggcatccccccagccactagaggtcgggaataccatgtttgccaagaactcttgcaccaaatccctagtactgacctcggccgccaccactctaaactccacttcggctacttggcatggagagcgaagctgcatgtggc

SEQ ID NO: 107727 - DNA, 402 bp, Zea Mays
cgacgcaggtttgcaaattatgcatcttggttcttgttccattaatactaatactctccctcttgcactaaaaaatgttcttcatgtcccccaaatatctaaacatcttttatctgtccataagttaacccgtgataatgatgttttctttgaatttcatccctctcactttttaatcaaggatcgtgccactcggaatcttcttctggaaggaaaatgtgaatccggcctctatcccatcaagcctgctgatcttgcgtctattaaacaagcacatctaagttgctcggcacgacctgcgcagtggcatgctcggtttggtcacccctcagtccaagttgtgaggtccattttaagtcttcatcatctcccgtgtcgtgaagaaactagtctgtctactgt

SEQ ID NO: 107728 - DNA, 483 bp, Zea Mays
tcgataggttatgagtgcgccgcagcccaaggggctcataggtcataagtggaccataggccgagtggctcataggtcatgagtgggaggaggaccatccttctactatggctcggtgccaagcgtagttaatgcagccagctacttatgatgggtcagtcttgggccaagcgaggaatccactcgagtgcattcccttcagctcgcctggcccccttctgtagctctaccatgcccaaccctgggcttggtgcctcggggtttatctagcggcgggtgcttctagggtaaatgattcccctacccattcgctaattggtggtccctagtagtttaggggcccttactcgcacactctctctgaccagtgtatcccaggagcccaaggatcttttcccaatagtagcccctgtcgggagagtgtctccccttgggggctatttctaggctgggcgacgtttgccatgtcaccttttgaatggt

SEQ ID NO: 107729 - DNA, 402 bp, Zea Mays
gtgacaagttatattcatcatctaaaaagtttaatctcctgaaacatgagaaagaaagaaaatatacctctggtcagtagcggacaaattaatttacacgcacaaacattgtgtagagatgagaaggattcaaagcagaaacacaatgacaaggaatggttattcttatttgctatcccttttttataccgtgcaatgtagaacatgtctttcaagaataacatcattatatgaagaagagcatgtagaatccaacttattcaaatttctcccaatagttttacatacaagaggtgagtgtaaacttttgtctcacttttgaagggaaatctgtgtaacctcatcttgaggatatttgctttggtaccactaattgttatcaaaatgtatatttgatgcagc

SEQ ID NO: 107730 - DNA, 3859 bp, Zea Mays
gtcacaagactggagaaggacctgacgcctggaaagcctaaacgggagaggaggcccaatgtgaaatggtctgggccggagtgggccagatgaggtgcgcgctgcagctgtgaagcagtactgtattttagccatccggggagggagggttttggctggcgtgtgacggaagactgaatccggctgcgtccggcgatcgggagagagagccctacgctcgatccctgtaatctctacctattccctgcactctgatttccctgttaattttggatcttcgtgagaggaggagagcaccgggagcggtgctcgctatcccccaaatcctgctgtctgagtgattagctactgaggtgtaatctggagttgacgagggtcttacaaattggtatcggattctggtcgcaatcctggcggatcctccggagtatcttcttcgtccgcaatacaagactcgtctgcaacgtgatctgcaaaccatggagaaaagtgtgggtgatctcacggcgcttctacaagcgatgcagcagcaaaatgaatccatcaaacagtccttagatgctaataccgcagctgtgagggatttttctgtgtggaagccacagatcgaaactgaagtgctgaatcttcgtcaagatgtgggagctctgtcagataagttggatgaattgatggcgagtaaagaagcgcacaccactcctccgaaggtattcgacgcaggggctctggagtctgggttcttaccatcaacttctctgggattatcgctgcaccagacgagtccagggcagcaagatcttcaccttgcatctctacaccggagcgatggatttggggtggtgaccaccctgactccacctccggtcaaaggtacatctaaaatccctcggcctgaggcctttcatactcctctgattcatgcacaagatccttattgggcatcgtatcagtcacgtttagctgcaactttaccccaacttaattttccaaaatttgacggacatcatcctaaaatgtggaaggccaaaagtgagaattattttgatgtgttcaccgtaccccgtgagctttgggttaagattgcaacaatgcattttgttggatcagcggcgttctggttacaatcatctgatccggtgttgcgtctggcaccgtggtcggagttttgtgctgcagtgtgtgctcgctttgagcgtgatcaacacaactctcttattagacaatttttccacattacacaaagtgatacagttactgaatacgttgaacagttcgataccctcatccaccaaattcttgcacatgatcctcaatttagtgtttctgccatagtaaatagattcattgatggtcttgcaccagaaattcgtgccatagttctgattcatcgtcccctcgatttggatactgccgtgtctctcgctttgttacaggaagaattggtgcaaccactggtgtctccatcttcaagccggctgaatgattcttcaacacacaaatctgtttatcggccgttggaacacacaacttcatctccaccagctgcagcaggacaagggatgcaaaaacagacatcacctgattttcgcaaaaggggtcaggatgaccgcaagggggcagctcttatggcgtaccgtaaagcaaaaggattatgttataaatgtggattacgttggaatccagctcaccagtgtagtgcaactgttcctctccatatagttgaagaactttggcaacttttggaaactgatgaagctcctgtggaaaacaagactacatctgaagactctggagacgaccttatggttctgtctgtacatgctgtgcaaggaacagaagctccacaaacagtcaaactgatggctcacttgtttacaaaaaagattatcatgcttgttgattctggtagctcctcttccttcatcagccaacctctagcaaaattgggtacaaacataattcctctttcccaaccggtccaagttcaggtagcaaatggccagatcattagctgcactcattatctccctcagtgcaagataactttacaaggccatacattccacttgaaccttaaagtgttacccctccagtgctatgacgttatcttgggtatggattggctaacttcacgaagtccgatggaaattcactgggaagaaaaatggttggcgttcacagttggacagcagagaattgtgttgcaaggtctggtcccagatttattcacaatggatcacatttcagctccccatctctgtcacttggaaaagttggatgaactctggtgtacagttgaactacatacaaaggttaactcagatctcacaactgctgtcccagaggagatacagcgccttgttcaagaatatagctccctttttgacaaaccatcaggcttgcctccccctcgttctcactgtcactctatacccttacttccgggtgcttcaccttttaggttgagaccttaccgttacaatccggctcaaaaaaatgaaatagagcgacagatcttggaattactccaaagtggtatgatacaaccaagttccagtcctttcgcctctcctatcatcttggctcgtaagaaaacaggagactggcgattgtgtgtggattatcgccggctgaacgccatgacaattaagaacaaataccccctaccaattattgatgagttattggacgaattacatggatcacaatggttcaccagtttggatctctgttcgggataccaccaaattaggatggaaccagtggatgtgccaaaaacagcattccagacccataatggacattacgagtacagggttatgccttatggagtcacaggcggtccggctacctttcaactcaccatgaactctatcctagctcccctccttcgaaaatgtgtggtggtcttcatagatgacattctcatttacagtcaaacttgggaagatcacatggcacatgtgagggcagtgttctccatattggacaaaaatcaatttaaggtaaaattgtcgaagtgtgcttttgcccaaaacaaactacactatctgggatacgtggtcagcagagagggggtggcaactgacccggacaaggtagcagtgatcaagacatggcctacacccaagaatgtgaaagatattcgcagtttcctcggtcttgctgggtactacagaaaattcgtcaaaaattttggcatcatcagtcaacctttgacaaatttgctgaagaaaggacaatcttttgtatggctggaggctcaacagcaagcctttatggccctaaaaacagctcttacttctgcaccagtgctagctctgcctaatttcaatcaaccttttgaaatcgaaactgatgcttcggacaaaggtattggggcagttttacaccaaacaggccatcctatagcttttatcagtaaaaccttgggtccacgacacctgggattgtcaacttatgaaaaggaatgtttagccattcttatggcagtggaccattggcgctcgtatctgttggggggcgaattcatcatacgcactgatcagcgcagtcttgtacaccttgatgatcaaagcctgaccactcaatggcaacaaaaggctctcaccaaacttttgggactgagatataaaatatgctacaaacaaggacaaaacaacagggtggccgatgccttatcgcggagaaccatggatcagctcatcgcagtttctgttactcaacccacctggctgaaggatctggcagacacttatctccagtttccagaaacaaccaaaattcttcaagctgtttctactgattcttattcaggatcttactccttgaaagacggtctcatatatctcaaaaaccg

SEQ ID NO: 107731 - DNA, 277 bp, Zea Mays
gtatgtcatgggtgttgctatactgggggtagagagagaaggccagggagaaagggtgtgtatgtgtgtattggtgcatcgaattccctgtgcaataatttgggttggtcgctttcttggggcagtcttcaggtacaagactccaatccctacctttcctctcgattctctcctttctctcccctccctacgcgaacaatcagtttgatactacgtacgtactttgatgctctacatgtgcatgcatgtatatatgtacgtactttgaaacatatat

SEQ ID NO: 107732 - DNA, 308 bp, Zea Mays
gaacaaaagaactaaaatacaacaaagcatttatcaacagtttaaactaatcactcctaagaacaaacaccgccattttatgattgcttcaatagtatatggctagaatcacaaaatctaattatgctttttgtttgtttcactagtttatcttggaaatcctacatacatattaatatggttggttttgacattgttgtggtatcaagagtcaaatgtcatggtggatggtgctaatttcagctttccctacctatgatataagaagtgactccatggagggacaagggaactagcgaataaagcat

SEQ ID NO: 107733 - DNA, 357 bp, Zea Mays
caattataggacaacaattttgcttaagagtgcaagccatgttcttgtaagaaaatgggagataaccatgcccaaactttggctgttaggcgaattaagtctgaaaatcaggctgacagtggactgacatcaacatcaagcccaagtttatgcctgatctactggccttttgtgacaacaccatatagcaaagatgtagttggtataatgctctccaagtttgctgcaatgcttgacttgtgttgtcacaatgaattaagagaaaatctcgctccaagttgggctgtcaggcgactgaatcaagttttagccatggtacagtgctctattgaagatcagaccgccagcgtaaaaaat

SEQ ID NO: 107734 - DNA, 629 bp, Zea Mays
catgtttcttctccacaaacaggacattggtggcccaagatgaggtgcttggtctgatgtaacctttctctgacagctcatctatttgcttcttgagctcaaccaactctagtccagataccctgtaggctcttttagaaatgggggcggttccaggaagaagctctatggcaaactcaactttccactcaggtggcatacctagtaaatctttcgggaacacgtctggaaattctgacacaaccttgatagtctcgagtggatctgcctccttgctatcaaaagccatctggtgacaacctcctttccttggctcgggcgagactagcttagtcaccacttcttctcctagtggggacaccaacttaattgtcctcttatcacagctgataactgcttggtatttatctagccaatttaaccctaggataacatctattccctgagtacccattactataaggttagcaggaaactctatcccccttattccacacttacattcaagcaaacactatcggctcgaacttttccaccggctgaatcaatttgaatgggtgttgacatggtagttattggaagattatgcgcttctacccatgatgcagtaatgaatgaatgcgttgctc

SEQ ID NO: 107735 - DNA, 539 bp, Zea Mays
caatagggctggtggaagagagtgttcctgaaaaatctaaatctcctgctcccgaagcacctccccatggtgacttggaatacattgttcgacacacttcgggaaagcagctatcattagatcaaattgttgaaatacaacacaatgtcaaggacctgaaatacccccgagggtccttgttatacataggggatgatgaagacaacttcctctactgtctgcccgacagtaaggaggtcaatgtttgccgcgagatgatgaataacatgggatttccgaagctcgagcttggtttgtccgctatgacaaaggatcagcttgcggacaaccttgcttacaatagcttgaaggtttgcacattttggcttcgtatttgatacttttcgagctatttttttggtaattcttacttttattgtttgttcattcttctatttggctgggtctaatccttagcaaggctctgaaggctcaaaaggatgcagaggacgagagctgtcagatagcacttggaaacctccgatggaggttataacctt

SEQ ID NO: 107736 - DNA, 372 bp, Zea Mays
tttttacctgctcgcctgcatgcgtggggaaatggagaccagacatcactagccatccatgccaatgcgagtcaaatcccttgctacctgtcactaagctccagacgctactgttaccctactcgccatatttcatgtcggtcgcgtgttgaccatgtgtgagctgataattggttgcctacgggagcacagggctggcctatacacgctgctgcaactaaggcatcttttttacttgctctctttcatgcgtggggaaatggagatcgtacatcgctagccatccatgctaacgcgagcccaccacgatggagcatgcgaaccaatcacgaattagacgatcctcgttgtgtggcgattgcagtatcaaac

SEQ ID NO: 107737 - DNA, 277 bp, Zea Mays
taggaacgactttttgctgcttcgaagaaattgcactgcgttcgttagaacaaatttttgataattcgaaggtcctccttggcaccataaattcttatgcttcgacaacttaagcctatggagaagatatattttcattatggtaaaaagcgaaactgttacaagagattaaaaaacgataaaaagcacgtaaacttcccataattgttccttattaaaaagaaagtaagactggaatgcgaaattgcgaaaagctgctgtcgaggtaggatatttg

SEQ ID NO: 107738 - DNA, 661 bp, Zea Mays
cgcccctcccagaggctgatacaactttggatactcagaagcctgtcagtactcatccgaggcacccttgccgagctaatcaacctgatccttctgctgatgagcagaaaaagaaaaagagacgcctccggcgagtatccagtttggatcgggacgttggtacctcggttcctgctgctgaagaagtgcatgtgactgaatttactgacgctgaccccaatgggtgtacccaatctgttgttgatcccaatgtgagtgctccatctgctgctgatcccaatgggggtgctgcctgtgttgctaatgtggacgacgaggaggaagaggatgaagttcctttgactcggaaaaacagtcggcagttcatcgctagcggtgaaagtagtggagttccctctcctgctttgtctgctctcattggtctgcaagaactgtccctggccaattttgatcagactcttgaggatatggttccagaggatttgttatcggagccagcagatgatggtgtgatggaggtttgtgctgatgtgcttgatgctgggttgaggtcatcccgtgcctcgtcgaccttggagcgcgatctcgagggtcgggagactgacttggatcgtcctggtcccatggaagtaactgagggcccatcagccttagaagtggc

SEQ ID NO: 107739 - DNA, 391 bp, Zea Mays
tagattccctatgcctatgatggatgagatactggatgaattagctggtgcccaatattttactagtctcgatatgacagcagggctatcatcaaatcagaatgggagctgaggatgaatacaagactgcttttaaaacacatcatggccattatcagtttcgagtgatgccttttggtctcactaatgctccagctagtttccaatgtgccatgaactcagtgttggagagttttctcagaaaatttgttatggtcttcttggatgatattctcatctacagccctagtttggaagtgcattatcagcatatcaggatggtgttggccaagctgagagagcaccaatttttcttaaagatgaagaaatgctcttttgtgaagcatgaact

SEQ ID NO: 107740 - DNA, 339 bp, Zea Mays
agactattgtatcaggctatcggcctggctgtttgtataggccaagggcagcagctaccttggctgcgtacaagtgcgccccctttggttttttgtagattaggcaaggatctccttgattggtggtgtttctataaacctaggacatccttgcctacttgcctctttttgtccttgtagattaggcaaggatctccttgattgggggtgtttctataaactcaagagtccaggacatcctttcctatatatgtatgtgctatgcaccccaacataatcaatctactacttcccagccatacctttcttcatggtatcacgagaccgtgtcctctcctg

SEQ ID NO: 107741 - DNA, 398 bp, Zea Mays
acgtacacgatgaagcaacaaatcttgaaaataaaagcataaagatacaaattggtttatatagatgaaatacaacctgcaacttgctacacgatggtaggggcctgcctccctgttgagcactggcacgtggttgcgctgtcaggtggatccaaacactcgagtagcaggtgagagctcaggtgcacaacgaaacaaactgcgggtaactgtagcttctcgttatgcacgtctcatcccgctacaggatgggggtatttataggcctgttcgagggtaggtggtcaaagtacgactctacccctggctaccaactatattcgagggatatctcgtataacagagtaattacagttctgcccatacagtaatccgcgcacaccagacaacacatccac

SEQ ID NO: 107742 - DNA, 316 bp, Zea Mays
cttcccttctgtttccttgactcaacccaaactcttatgaagctatctttcggatgcatgttgtcatcttcctccacatgatgtttgtgtctccctcttctacccaagggcccacctcgataactctctccttgaaagtttgggccacatcccctttaagcttccaccattttgttctagtgaccttgttatgcttatgatttttaggtataactctagccatagttggctataacgggtgctctgccactgcctaaggccacattcttctaagagctctagccccagccataccccacaaaatagcatcttctct

SEQ ID NO: 107743 - DNA, 972 bp, Zea Mays
acccaccgatgttgtggcggctcactccaccttggtcacggcgacacgaccctcatagctgctaacgcgattgtggctgtagcccaagagcgcaatcatgttgcgccctcacctgggagcacgaacacaccacgacgaatgccctcgccaagcagttggctaaggctaagtggcatctgcttggctctccctacatggatcctccccggagcccccagtcgtcaaccctcccctcaggctacgaggtcgtcatagttgccaaccttcatgcctaggcagcgggtgttcaaaacgtcctctatagtccccatcatcctcgacccaatttcctctacctacgaccgctatcacgacctcgccctcatgctgcaccgctacgccctggacgacaatttcctcaccaatattgtgtgcctcactatcccatcgtggcagcagatggatagtgtggtactctcctggatcctcaggacgatcacaattgagctataggacgccattcgcaagcatgtacaccgcctttcgaaccttcgtccagggggggaagatatctgtcaccgagtactgccaccagatgaaaggcatggtggtcgccctctatgatctcggggagcctatctccaaccgcacgttcatcctcaaccttctttacaacctcaacgagcgctatgatcacctctacacttagatcgctcgttcggtcccgttcccgtcttccacaaggtctaggatgacctcatcctccaggagctcaccaatggccaagggagcgcctcctcactccaatgtcgctactgctctatatagatcctcccggggctagtcctcacgccctccgtccagttggaatgggaaaccataaccttgtgttggggttgggtgatgtattaatagacttgagttaactaagcctgcccattacacagggttgagagagtaattacacggggaaaaccccaaaccataaacggg

SEQ ID NO: 107744 - DNA, 716 bp, Zea Mays
gtgctgagtgcgtagcacgccactatttggatggtggttctcccgcccctatcgggattcagcacccttaccgttcaccgccccgtggtcgcttcgagtatggtaccccaaactgcaggacccagatagatttggatccatagatcgacggagtcagggtctgtaataatgcttaatttagtatcttagtcttagtcagtcttagttagtttgtttatcttatgttggaatggttgtcatgatgaacttgtaatgaagtcggatctttgtaatgattgtcaccaaggtgtgggtatcccctgcaacttggtgtagttattaataaagtcagttatttagttgggtaatccatttatttccactttcctctctatttgagaagttgtcaatgaagatgatcaattgttcagtgctataaagatttttgtacatcttttcttatgctgaaagactgtagagtcagatctgatgtgtgtgtgctttctacagatgtctgagaacaggcgcagaggtgcaaggtgtgctcagccagagcatcaggcacaccaggaagatgcagctcagcagtagttgccaccgccacccccgatgaccattgagcagatgttcctgatgcagacccaagtagtccaagcaattggtgagaccttagcagcgatgcagcaggtgcagcagcagccacccccacctcaacctcaggtgcaagtccatatgcc

SEQ ID NO: 107745 - DNA, 732 bp, Zea Mays
cgttttcgcgtcgtttgacctctatatctccaaatcactaagtttctgtgtcataattctctgtgtatgtatttattcacgtttcatatacttatgactatgtgattaatacgtgctcacctcttctgtcatttcagtgatcccgcctgcccgtgtgcctgtctcctgtcctacctggattctatctctctcttgaggtttccaggtacttatcacttcggtaatgatcttatcagcagttgtctacttgtgcttagtctttcactcatttatgcaacacttacgtcaggatgagcgcacgaagaatatgtcagcgccagggggaggatacgacgaggaccctcctcgccccttcaggcaggtcaagggcaagacaatatatctagagcaacaggaaggccggaagaagcaccgtatggatagagccgcccgtgcagcacttgcagcggcagcatcggtagagcaagcagagcagggtggctagttgcagatctcctcacaccagattgcctatagggttcgtcgcctcacatctggacctcgctcctccgctccctctacacccgccacagcaactactccacctcccacttcgctagcccctgtcgctacagagccatccaccacttccccatacacaccacctccaccacacccgcttccactgttccccctcccgctctcatttccactccacccattccaccagcccactttagggagcgagacgag

SEQ ID NO: 107746 - DNA, 531 bp, Zea Mays
tgcgggccgtcggatttaaatggagggttgagattagatctagaagcgttggctgtcggccgttgatgcgtgaatgaacggtccagatcgggactcgcataccacttcgcgtcgttaaatctaagccgtggatctctgatcccccggtccgaattagatcagggattcattaaaccatgaccgttgatctagcggtgggtggtcacgattagactacacatactgtttcaaaacgactgatccaagttgttgatcggtgcgtgaacgggtaggatcgtgcccttgcgtttatgtttgcagatcaactgtgggccgtgggatctggatccaaggctccacgttgcataccagttcgggggagggtccaatttaatctgagtcgtgcattgatgatcgaacggctatggcgcgtccgcactccctcgttagagcacgtttgtaaatgagcccctcggtttttccagaataaacctattgtcccctggtattgaaagagtattacgcagaggccctagaattaatgaaaacaac

SEQ ID NO: 107747 - DNA, 952 bp, Zea Mays
ttgttcaatttccttggtatctaaattcttatgtacctattgtttcataaaaagttatagcttcagattatagatgtactatacattaatatgagatttcccatgcgaactattcaatttttctcacaaaagaatgcacggaacctttcttagagagtgtgactataaatgctaagagaacataggtttggcaggtattgctttcatagcagtgatgctaattaattaatcattaacaattttctctcaaaaaggttcagtcatataaattacttaccacgctattcgcatccctcccaccacaaagtaagagaagtccatccgagcgtgcacttgcagtggcatacctgaacaatagcaccccacaggaaaattacagaacactaccaaacaaactacttccgtttaaaaaaaaaagaagtcagaaatagtgtaaactagtgaggtcagatcacaagaaactgattagcagcatggtgagactactgtgccacagcaagctacttctatgctatacaaaataaatagtagaccaacttgcatagactcatgaaaacttatacaaatacaacaacgggcctgtttggttcagcttttttctggaagttgtataacatgcattatataacctaataacaaacagcacatgcacttcaaatcagtacaaaaaaatacatgtgtctgctgaactataggacatggcatttgatgaagtataaatacatcatcctgaagcacagaagcgtaagataccaagagaagatccaaagtactgaagtacaactgttatgtatggccaagcctatgttaggcgcaacagggccaaggctgcctaagggggggcgccaggtggggcccaatagctaatagatcagctctatctagatagttatacttatccaatagctaatagatcagctctatctagatagttatacttatccaaagctag

SEQ ID NO: 107748 - DNA, 1880 bp, Zea Mays
aacgggttaaggcacggactggcgcagtggaggagaccaggggatcggtccgcccatgtcgttggtagacatgggcggggtcagcaaagcatgccgcgtggggcacaggcaagtcgacgaggccgcacgttgcacggacgaagtcaatgaggtcgcgcatggcgcagatggaggggacagggttgtgttcggtgcggaggaggtaagtagagaggaggtactacgacagtatcgtcatcgacgagagtcgagttcatgaggtggggatgagccgacaagaggaaatgtcctcatcaaagacaacatgtctagagatgatgatgcggttggtgagaagatcgagacaacggtaccccttgtgatcagaggagtacccaagcaaaaagcgacgggtggatctgggcgcgagtttgtggggagtcgtggcagaggtgttaggatagtaggtgcagcgaaagatacggaggtacgaacatgaaggggcggtgccgaagagggtgaagggtgtgagatgactgaaagccttggaggggaggtagttcaggaggtaggtggcagtgtggagaccatcagcccagtaacaagcaaggaatgagaccaaaaacaggagagtacaaatgaggttggtgatggtgcaactcatgtgctcgtccttgtcgttctgagggaaggtgtagggatatgatatccgctgttggacgccgcgtgagaggaaggcacgagacgtggagttatcgaactcccgcccgttgtcacactgaacaacccagatggtgcaatggaactgagttaacacccaagcgaaaaaatgagagagggtgggaaaggtgtcagacttacgacggaggggaaaagtccagaggtagtgagagaagtcatccaggatcaccagatagtactggttaccggagaggctcagtatcagggaggtccaaaggtcacagtggatgagatcaaaggagcgagcggtgcgaaacgtggaagaggtgaaaggtaagcgagtgtgacgaccaagttgacgagcatggcaaggaaaggcagtgttgccgcgggggacgagaatggccaaggcggatgagagtctagaaaggatgtcatggtcagggtggccaaggcggcggtgccaagtggaggcagtggcggcatagggtggggcaacacaagtggaaggagctggggcgggagagcaaatagaatatagggggccagagttgtcgcatcgagtgagcacgacacgagtggtaagatgtcgtattgtgagcccccagggatcgaactccatagaacaatggttgttagtggtgaagagacgaaccaaaggaagattctgaatcatgaggggcaacaaggacgcgttgaggtagaatggtcccggaagaactgaatcacctgccgaggtgaccagaagggtggaactgttccccacaatgatagagaaaggatgggatggatgggggatgggagtgagataacgtgccgacagtagtagtgtggaaggaggcgccagagtcaaccacccaatccggagaggtgggagcggaggcagtcgtagtgtcaaacgaggcgacgagagaagcctggtcccaacctccaaccaacatggaccaaggagccaaggcagggatcctctggagcgggaggagatgcagagccaacaacaggtagggtagagaaggcaccgagggcagtggggcaccgtaggatggaaccgtcaggtgagccggctgtgaaggacgtgacaaagcaccggtggctaggcctggccacatggagatggtcttagtctaggggttgtagagcgacgaccatgtcggagcagcaagaccggacagggcagtgagaacccacgtagggtcaaggagggtgggcgtgcctaggag

SEQ ID NO: 107749 - DNA, 454 bp, Zea Mays
tcccctctgtgctgggagactttgggagagagatccctggttggtcctgattgggttcagcagacttctgagaaggttcgggaaattcgtcagaatattttggccgctcagagccgtcagaagagttatgctgatgtgaggaggcgagatttggaatttgtagtgggtgactaagtccttctcagggtatcacctactaaaggagttgttcggttcggtgtctccggaaatcttagcccgagatacattggaccattcactatctttgcccaggtgggcaacttggcatatcgcttgcaattgccggattccatggcagggttgcacctggtttttcatgtctctatgttgaggaagttcttgcgggatccgaaccatcagatcaagatggaaccaattgctgtgcagtaggatctgactttagagtgtcgtccggtgcatatcttggagtcct

SEQ ID NO: 107750 - DNA, 676 bp, Zea Mays
cccgaggtgccaacctgttgaatacagatgcttggggtgccccccaagcggggtaatgtggcatcccaaatggatatgatggcataccccacattagattcggggcatatggcggtggcacgtatgtatattgatatggcataggtagatattggggtggaggtgtccatgtagatatgttaggcctgaactggacagtatgaccttccatcttttctgattggtgaggtggtccaatcggtcttacctgttgttgctcctgaatgggtgtgccatgtcgctttgctagccggtcccttggactggccttttttttacatatttggataataattgattaaagatcgggccagatttgaccagccgaccagccgttttaaatgtattagttttccacgtacctatctctggtcgtcgtggtttgaaggtgcgtggtcgtcgtggttcctgggcgctgccggatcgaatgatccggattgtctagcggtgttctggaccgtccgcttctatgcatcagaccgtccgcgatgcgtagaacaggtgctagcgcctgatttcctgcctgcacctgccccccagtgttggaggtagtgatggtaattttcagagtctctcccccatcagaagccttctcggccactactttccagcaagaaattttattattctgatcagc

SEQ ID NO: 107751 - DNA, 580 bp, Zea Mays
gtttgagtgtctgagttgggttctgtccccctacatcttatgtgctctctagtctaaggggagcatgcacaagggagctagaccctgacaagtgggcccagcgtgcttgtcttaaacacatactgcccaaagctataagtacaacagcgggctgagatcttccctcccgactatcgtgccgactccacgatcaagtatgttctccttgtccattgtcctatgtctgctttggaaaccatccagcatgctaacgttgcagggacagggtgtgccgacgtacgtatgtactaatgtgatatctttgtattgtcacacccggcctgcgcagcagcaggcgtatcgggtggccgagcgatgcctcatgatggtgttgctcacacgcccgagataaacacctcgatgactcgcgttatcttgaacatacattaaatacgtgtgtcgtagtcatgctgttgtgtgccttggaaacacatgagacagtcttgttggtctgtacaacctgtcacgctccgcgacctagagagcacgcttccggcaccctgcaataaatgcgggcaatatgactgtaggtggagagttt

SEQ ID NO: 107752 - DNA, 277 bp, Zea Mays
gggactcattaccatgctcataagttttcccttttcttctcatcagcttttacataaaatcattcatttgtacaaccgataggccacttggtgcgatagacaatcgctggagcctttgtgtctttccggtatgcgaaattgtagcatccgaagtttttatgtaagcatctgcccttgctttggtttgataatgaagcttgtgtactctgcagaatccttcagcattagcactttttcctttacttcataagcccatatgtattgtatacactaagcc

SEQ ID NO: 107753 - DNA, 404 bp, Zea Mays
gtgagaagcgtgcaccgttggatcgggcatctacagctgcgattaaataatatgtaccaattcgggccagggaatcagaaccgttgagatctaatcgggtggattgggggggggggctacgggttatttaaaatccgcatcgtagatctcggatcggacggttggcgctgcataccgcttcatcgcactggcgatctggtcctggtcgtagatttaagatcctgcggtcctggtcgaaacataccccttcgaccaggtaaatttgttaaagagaccctaagttttctcagaattcacccatagtccagggcagtgatatattaattacgccgaggccctgaactttacagattaagccctgaacttctcagaaatagtgcgagtagtccagacatctaatgaat

SEQ ID NO: 107754 - DNA, 429 bp, Zea Mays
acttcgaaggacctcattgacagagaccgcgtctttgccctacaggctctaaacaaataccaagctcaaacaaaagcatggcacgaccacacagtcatcccgagggaattcagcaaaggggacctcgttctcgtccggacagcacggaaagagtcccgaggcaagctagagcccaagtgggagggccctttcatcgtcaagacgaaggcgtcccccaacgcgtacaggctcacaacgccatccgacgaagacttagaacattcttggaacattgataatctccacaaattttttgtttgactcctcagggccagctcgcccttgtaattcgcaaaacaattacaattttattctggcccgcactcttttcctcccggggggtgaggtttttaacgaggcggagccatgtaatatacacgcgaaaaatcc

SEQ ID NO: 107755 - DNA, 464 bp, Zea Mays
acaatcaagttgatgtccccactaggagaggaagtggtgaccgagttagtccgcctgagccaaggaaaggaagttgttatcagatggctattgatagtagtgaagcagatccacttgagattatcaaggttgtgtccgagttcccagatgtgttcccaaaggacttaccaggcatgccacctgagcgaaaagttgagtttgccatagagcttcttcctggaaccgcccccatctttaagagagcttacatggtatttggaccagagttagttgaactcaagaagcagatcaatgagttgttagagaaaggctacatctggccaagcacctcaccttgggccgcccctgtcctattcgtggagaagaaagatggcactagaaggatgtgtatcgattatcgagctctgaatgaagtcacgatcaagaacaagtaccccttgcctagaatagaagatttgtttgac

SEQ ID NO: 107756 - DNA, 438 bp, Zea Mays
acatatatgtaatgttgcaatggttcgtctgatatgatctttacgtgcgcataggagttgacatgttttgccagaggccgctgtcaattattgggccaagtaagagtactcgggccatgtctaattgtacgtgaacctatagggtcacacacttaaggggaaggaagcctaattcggattagatccaaaattagactgggctttagggttactaatgggcctcggaatcagaagcccaccataacgcctataaattgagggctggggcgcggttaggttaaccctaattttgcaaccagcaaacgagcagccactcgcctctcgccctcgcatagctgccatcgcgaacctagcagttcgatacacggtgcttcctccgaatacgtgtggctaccttagaggtgctgcatcagtagcactaggacgaaccatgcaagg

SEQ ID NO: 107757 - DNA, 433 bp, Zea Mays
aaatggcttctcattcatagcttcgagtcttctttacccaaccccttagggtctttagtatatgtgcttcgtctccaggaccatacttttgatagtacgagttttggatccctcccttctaccccttttgtgcaaatcttggactaggaactttgattgaccagcaggaacttggtcatagtgaggtggccccgggacaaaagaggtagatacagtccaagtgcttatcactggattgcttgaagcatttgaggccgaaggcaaatgtagcctcaactcctatgattggggttggacatactacaggacatggtgaatagtacgaagatgtactgaacacttcctttgactaggaaggttgagcagctaacgtagcaagttctttcagcttcttgattgtatggttgtaggttctgattgtgtggcccttttc

SEQ ID NO: 107758 - DNA, 674 bp, Zea Mays
ctttctttgtgagttcgtgcaaaggggcagcgatggagctaaaatcacgcacaaaacagtggtaaaatcctgcaagtccaagaaaactccgaatttgggtgaccgtcgttggtgtaggccagtcctgaatggcttcaacattgctgctatccaccttaatgccctgcggagtaaccacataaccaagaaacgagacacgttgcatgcaaaatgtgcacttttccatgttaccaaacaagcgagcagcacgcaaagcatcaaaaacagcacgcaaatgttctaaatgctcctctatagacttgctgtaaataaggatatcatcgaaataaacaacaacaaacaaacctatgaaggcccgtaaaacttcgttcattaaacgcataaaggtgctggtagcattagtcaatccaaatggcataaccaaccattcatataaaccaaatttcgttataaaagtcgttttccattcgtcaccgagtttcattctaatctgatggtaaccgctacgcaaatgaacctttgagaaaataacggcaccactaagctcatctaacatatcatcaaggcgtggaataggatattgataacgaactgtgatgttattaatagcacgacaatctacgcacatacgccatgacccatctttctttggaacgagtaaaacaagaaccgag

SEQ ID NO: 107759 - DNA, 457 bp, Zea Mays
ctgagtggtacgaccggcactacgactatcctgacagaggttcaaaagagtgtcatacttttcctatgatcgagcgtgctcagaaaaggagaagaaatgaccaaacccaacataggacagactcaccgaccattacaaacatggtccaacaaaggcgatacaaaaaccgggcaggagctaggatgcaaccatgccaacagacatagaagtctttttggtacatcacatgaatgatgcaaatagatacagccagccagaactaacaaattcttctatccaatggtgaccatcctagcgaccgattgaagacttcaattgctaactttttgatttgctgacttcctagctctaccatccttcttgttctcctttacagcaatatagcccaagaatccaaccaataagacaagaagatcacataagtaggttcaatgagcctcttgttgttaaaacaaat

SEQ ID NO: 107760 - DNA, 481 bp, Zea Mays
tgatgatttaatttgaacatactgctactacaggcctgtgctctggaatgtttgacgtgcaaacgcaggccattcaaggccaccaggaaggaccatggagtgtggaaaaagcaagggtgaaggaaggtcgttgggggtacggcagtgaaatcctgagcatttgtttgctcagaagatgggtgcaaaccgaatttttgttagtaagtataattgtccataaaggcggagatgggcactcccagggaccaaaggaagaacggtccaggaacgcttagtataagataacagaactggcatggcttagcttgccagatgtgagtacctgatttcaaaagaagttgcatcgggcatacaagagtgcatagaatcctcgttcttgttagttcatgatcaacgtttcccaacatatctgagctgaattgtcagcagctgataggttagtggaacaagaattcatagcatataaaggtcggtttttgac

SEQ ID NO: 107761 - DNA, 444 bp, Zea Mays
caacaacaataatcatggtttttgaggcgttgtggcatactgtgggtctgtggaactcgggtatgcctggatgcctaaggccacgtttggcatgcagggaacatggcaccccgtcagccagcaccggtgggggcaaaacctgcaacgcctatcccatgtggggtgctgccccgcgggcacagggcaacggtgtctgtttggatcagatagcgcgtgttttttatttgccctgtattctgcgtagatattctacgatgaatgcgacagaagcaaggacaagagaggcgtagggcacacaaaaccgatggtcgaaggagtggagccttatccctgtctaaaccggtggtgcacggggtcagcaaaactgtacatgacccttccaaacgcacagatgaagaggacatgtttttattgtccgttggccactcgtcctggcgaaaccgg

SEQ ID NO: 107762 - DNA, 655 bp, Zea Mays
catgagtgcttcaagcagcgatgaagtattggtgaagtggtgaaggtctgacatggaaggtgtaacaggtgatgttgtgtccttgagaaagcatttgctgaatttgtagaagaatcacatgatattgggttagcagatgaggaggacgaagaagataacacatacattgatgctggatatgtagcacctgtggactcgccacgcgacacaaacaatgatgattttttaaagagatgtcatagactattggatatgagaaagatgttaaattgttgtaataatatggtatttcattcaaatgattgatgttgtaataaactttcttattacaaattacactttttgcaaaacaaattacaccctctccgcattgatttgtattcaaatggttcaatatgtggcagtattgtttcacttttgcaaaacaaattacaccatatattttctaactgtggaacaaggacaggagtacttcctcaatccacacaaacactacatatcacactataacaccactgctacagctggaccataacaataaattatcttctcacacaagaaaatggttaatgccacttccactgttctacttatagagtacaacacgaccctttcctttttggtttgatttatgcaatgctccaatatatttctt

SEQ ID NO: 107763 - DNA, 586 bp, Zea Mays
gacaaatcggtcatagatgaagaaaaaagctttgggatactatcataaaatgataaagggcaaagctagacaaagccgaagcaagtcttctctaatttgctcaccaagatgataaaaggaaaatacgtcctcagcatcgccatgctaaatagctcaaatgtataggcttgaggatgtaaatgtaattttaatgaagttgtactctgcgcctataaatagagaaacaatgtcatgcatttcagacgatcttttttggggatcagcggaatgggcgattgactcacgtttacgaagttgttgtccttcctttgtcttgtaagccttgtaaggccgaagagacaggctgtagaaaggctttagtagcctagaatattggaccttaggtccagtgcatcggacccactacagggaactggccgctctcagccttagaagaaaaatcactggacctctagggtgcaacgactacttcggggagtattgatcgacacaatgactagttgatgtggccctcggtccagtggtgcacctgattagtctgatgccagctagagaaggaagacgccaataagaatcttgaaagaga

SEQ ID NO: 107764 - DNA, 565 bp, Zea Mays
cagcctaggcatgtcagaacaatccacaaccccaacacaaatgatgacaaggcaaaccacactcaaggcaaccaacaaagctcacaatctttaggaatgtagcaaacctcttacaggccaccagctccacggggtagaggaggaagaagctttggaggaagattcagcactcaacccaggagattgttttgtttattctgtggggaggataagggacatacaacaaggacgtgccaagtcacgatccaaaagcaaaaggagatagttgaagccaaagcacgacagaattagccgaagtaggtcttgcatactgcctcatgctattcgccatatatccctaagtatgtgggcaaccagcaacccacgacatcatttgctttggcaagtcattctcaagtggcatgggctcatttaccaccaccaccattggcacctaccttggatcataatcagtagctagaagggcatcgccaagcgccacaacagcgtgacactcgagaggagtccaaagctcgcacaatcaacaacactgtgcctgaatcgagacatatttactaaagcaaca

SEQ ID NO: 107765 - DNA, 565 bp, Zea Mays
gacagggtggagtttgactaggttctaagttctatgggttaagacttttcttcactcgccgatatatatgttcaaaggccttacactacatttatcaagtccccctaactagattttactgtggaatacttaaaatattgggtaacttattagtttgactatattccagtggtttctattgggatctatttatacaatgcatacttaggtctcctagattgaactcatgacaatttggattaggaatggggacatgagtgttgtggttggctatattattgcctttgactatgatagtctaggtcactatgccaatgaagaatcatccgttcattggtaagattgtttggcattctagtcggtgaaatgcaagattcatatcaagacttaaaagaaaagttggcaaggatggagaggacttataatttttaattcaacttggttaactagattttagagtataatacttagtgaattgcttaccttaagggttcaactacctcatgttggtcagacaagatgtatatgattaaaaactgatggcagtctagttagggtgatcagt

SEQ ID NO: 107766 - DNA, 274 bp, Zea Mays
ttctggtgacttaaactatatctcggtggagcccacattgcaagagcaaatagtcagggcacagattgaagataagggtgttcaggttatcaaagacatgagcatgtagaaggcagaaaaatacaagtgcttccgtcaggacagcaagggaattttatggtttggagatcgattggttgttcccaaggaccctgaactcagaaggaggatattggatgaagctcacctttccaaattctccatgcaccctggtagcaacaagatgtatcatgat

SEQ ID NO: 107767 - DNA, 380 bp, Zea Mays
aacagaaggattcctgttgtggatctggtaagccggcttgagatgattcttagaggccaggtgtcgaatatcggtgctcctattgcgtattctgcctagaatctgcctccttccaagactttcatcagttttgtgtcaaatcctcctactggtgatagtggtttgggccttagagtgcgaccctctctcgaagaggtcgaggctttggttgtttcgcttggtgaaatccccaatgacgagaggcaggttcattttgagatgcatataaacccgagcgacgcagaaataagtgctatgctggacatgttggctgaggattcctctgattcggtccctgctgaaacactagctgtagcacctatcccagagcctggaaagac

SEQ ID NO: 107768 - DNA, 305 bp, Zea Mays
actgtaggtggcaaatggtgaccggtgtgactgtccaatgagcgtgggtgtgattgcaaaagagtacctgttctgctcgagagaaattggagctatgggaaggctaactaaatatatatatgtggcacacaagtcagtaacagatagcaatgctgaataagtgttccaagtactcgtcctagttgctggcctagaaaatgtaatagaacagttggaccaaagcacaagaaaggaggtacaagtatctagtgggaatggcagttctgtaaatagggcagatttttcagcactagtagaaatcaaag

SEQ ID NO: 107769 - DNA, 411 bp, Zea Mays
cgacgacaggcccattgacgttcttcaggactacgatgcagctggagctgaagggtggcgcagaagaagacacagcagcattcgagaagaccaccagcagcttataatacaacatgagtaggtctctactttgcgcgtgcctcctcactctcgggcagaagcatataagagctactggattgtggggccgtacgtgcgttgatcagaagctttgggacgaaatctaccggtagcatgcatcttactgttattaggtgtggtgcatttttagttctccaaatcctcttgcttggatgttctatcctattccttctttcaaccagctgtatgcatgtgagttagcctccgttaacattacatatgcagcttcaattcgtccttgtgaacatgcatgtgggtttttagctctgc

SEQ ID NO: 107770 - DNA, 534 bp, Zea Mays
cttttgtgatcaaacaaaatgtatgcatatgatgaaggaaaatttaggggaggattttagaattagaggatgaagggggggggtaaaaggtggattagggtttcaaacctagatttggattttgggatgctacaaacctaccccacttaaaggaatctcgccctcgagattagacggggctcgagaaaaggtaagggtattccttcctcagagagtcctcactttcccaggtggcttcctcttcaccatctctgctccactgaaccttacagagtctcacttcggaattgcgggttcttctgactgctgagtcgagaatcttcactggcttttcccggtactggagatccttttgaatttgaattgcttctgcctcgatacgggtttctggtacttttaaacatttgcggagttgagacacatggaacacattgtgaatatctgacatggattctggtagctcaaggcggtaggccacaggtcctattcgggaaatgatagggtaaggaccgacgaaacggggtgctagctttc

SEQ ID NO: 107771 - DNA, 457 bp, Zea Mays
gatttgaaggtaaggaggagacaacttaaagacacacatgacgtttatgtgctgtttcagaaagtttgtaagttagtgaatgttggtgcgctagtagatgttgtatgactgttttaaactgtcctttagattttagagtggcctattatatagcatagcataatagatggacgtcgttttgagaaatggactattggaaaggttctaattcaaaagttaaaaccatatcattttgttggatttataggcttgacccaattgagaaattcaattaaatcctaaaaaatcacaaaagttcatgtacggcaagagaatggtggaaacaaataaggatctgagtccttatcggatcatgatcagatcggatcgcgagcatgtcggattacgactagatcggatcgcgagcttatcggttggtggacatggccctatataagctgtctgccagcccttgcca

SEQ ID NO: 107772 - DNA, 701 bp, Zea Mays
actttcctgcaagcttttcatttttgtcgaacactttcttcctgagtgcttccagtatcattccattggctctttccacctgaccattggctcttggatgcactactgatgcatacttgatctggatactccgttgttcgtagaaatcgaagaattcagagctggtgaagttggatcccaggtcggttatgatgctatttggtatcccaaatctgaatattatgtcttgtatgaactccactgccttggatgaggttaaataagcaatatgcttgtactctatccatttggtgaacttgtcaatggcaaccagcacgtgagtatagcctccctgagctttcttgaagggttcaatcatgtccaacccccagcatgcaaatggtcatgttatagggatggtctgcagctgctgtgccggtaaatgttgttgcttcgacaagaattggcaagcttcacacctctggactaactcggtggcatcactctttgctgttggccaatagaaaccagacctgaaaactttcccaaccagagttctggatgctgtgtgtactccgcactgtccggcgtggatttcatccaatagctgcttcccagtagttgaggaaatgcacttcatgaggacttccatcgcaccccttctgtatagtgcgccccctatgagggtgtagtgggccgactgtcttgcgatgcgttctgcc

SEQ ID NO: 107773 - DNA, 354 bp, Zea Mays
agttctgcattgatataaaaagcttgattacttgcttcggatgattcacacgatcacaaccaagacgacaccttacctagagattgtggtaacttccaattcacctgttctttttggattggtgctgaatttatttcttgcaaagtaagtttatttctcctagaacataagccatttaattttacctttttgcaaagaacaatctaaaacacacacctctgaatttactgaacaacagtctaaattgggtaccaaatttgaggcgccaaatctgaggcaccaaatttacattttccatagaatttggtgcctgacacctctaaatttactgaacaacagtctaaccgacactcg

SEQ ID NO: 107774 - DNA, 349 bp, Zea Mays
gcagcagctatttttataatctcatcgttggattggatgggatatcgccgttctcattctatctggcctaggggtttgtttttgctgttctaaacatatcacgtcatcgtcggacgccatgccaccgtcgactataaatacactgtggcccatgtgggtattccagcgtaaccgataccaacagctgacatctagttaatactgacagcgacggtggagcagctagtcgatgacactactatgtacctaccgacaacacttaaaggccttatgcttagaggtgactatacttagaggtgacgatctgtactatattaaaacactagtttcaacggtcgtactatgtcaa

SEQ ID NO: 107775 - DNA, 284 bp, Zea Mays
gaggagacgagcgggcgtgggcagcgaccgacggatgacacgggcagtgtagattgatcggaggtagaacaagggagacagcttatcccttaccttcttcatagtagtagagataatagatctatgatgccatttagtgataaagctttggagtctgctgtacggccttcgcctccagcgacggccgcgcctacacgtagtggtgccactgctagaatttgtcaggaacacaagcacacaagaatccgaaaatgaaaggcagcagccagcagggaacacgccgg

SEQ ID NO: 107776 - DNA, 395 bp, Zea Mays
ccatgtcttgtgtggtcaaggtgccatgcatgtcggcagtgagagcggttgactgttttttgtttgtgggaacaagagcaagacttcattattccaactactgaaactgactgttttttgtttgtacatagaatcccttacccccttccatctcgtacgagaatcgagtagctccaccctggccgtgtattgtatgtatgcaaggcgacgggccgtcgcgtacttactcgttccatcggtacaggtcacaggtacatgcatgccacatttgccatacgaacaagtcgaaggcgaaacggtcgtcgactagcgggccacatcattccttccttgttggtgccacttacggcgtccaacccttcgccgtgatctctctccttcctttccttcccctc

SEQ ID NO: 107777 - DNA, 700 bp, Zea Mays
aaaaataaccaaacattagaaactaaacgagggcgatgaggataacgaggacgacgatgatcccgataatgagccacaaccacagagagtgatgacagccttgacctcctcgaacttctcataataatcttccttttgttgacctaattctgaggaaaatcttacatcgcttgagctcacttatggtaggaactcaataagtatgtaggaacaaatatagtgtaaggcttactaaggatcggatatgcttgaggctaagcattagcttttaattaagttgatcaaacttttgttagcaattactatgtataaataaatatcatctcaattaaataatgatcatttgtaccggacacttcaccatataatcctttaatcatttagtcttcatccacgaatctttgcaaccatccatacatatttcttcttcaaataaaaacttgtttctctataatagtataactaaattaccgctatggaaagacatgggacagtgtctcttaaacccatggcctcgtgtcctcatcctctacattctcgtataccggtggtcaaatgggtcgcacggcgcgacattaacactagcactattaggcataatattattagagacttagtaatcgtgtcatgatgtgttgatactagcttcaagatatcggcccaagtacaaaactatagtgcataattgtgtcgtgtcgat

SEQ ID NO: 107778 - DNA, 476 bp, Zea Mays
ccggagccaagggaggacgaagttatcgtctttaagagcttcttcagagtaggacttcggttccccctaaatgacatgatagtggaggttctaaagatctttgaaatataccttcatcggctgacccccaatgctattgttagacttagcatattcatatgggctctctggagccatggaatggatgctaatgtcgaagctttttgccgggtgcatgagctacactaccagacgaaggctagagtagatggccttcacaagaactttggatgttataattttgcgtattagaaggatacgaaggccccgattattggctatcgctccaagtggccaattgggtggactaatgaatggtttgacatgaaagctaatgagaagaagagggaaaaactcatgagtatggtaatgagtcccttgaagctaaacttcggcatggctcgacccttgtgcaacatgcagttagggtccccttg

SEQ ID NO: 107779 - DNA, 364 bp, Zea Mays
accacatataattcttcatttacatccacaaacaagtatcaaacacataaatacataatacatagtcttatccaaacacaatcgatcatatatgttaactcaaaagtttcaaccacacaacatataagttttaaacatatgatcattcacatacacatacaagtctcaaccacacaaaaacacaatacatagccttgaccacccacaaatgatcatatatgaccactccaaagttttaaccatacaatacataagtctcaaacacactatatataagttaaattatatgatgtttacaaatgaaaagtgtctcaatgcaaattgtttaaattacatgatgtttaaatacaaattgttatgatat

SEQ ID NO: 107780 - DNA, 616 bp, Zea Mays
agcaatctatgccctacctaattctccatgttaatttcagtgcagaagatatagataactaacacatgtacttttccccattttctattaattgtacaccgatttatgtggatattaacctattttttttactgattccacatatcggtccattgcatggagacatcacagcttcactttccaaaagtcatcactccgaggaaaacatgaatgcttaacacatttcctgtttgcttttctaaatatgcaccttttaatttgtatatttgctagccatgatgtaaataatagtaaattaaccttaaattcatctaatacacacaatagagttatcagcctctattatgttgtccttaagatcattaatctgaaacttaaaatgttgacatctagattgctgatgctgctacatttgtagactaaattgttctactaccgtagacaattgtttgtttagatatatccacatatgctttgctccatatatctaaaacaacacgcttttaaatgtgttcagcattgatcgaagactcgcgctaggcgcgagcaagttactagtagttatctagccttggtcactactacctagctctcgtagttttataataaaacaaac

SEQ ID NO: 107781 - DNA, 483 bp, Zea Mays
gccgaacgcgcgcttgctgtgcttgacgaagagttggtgtctccggagctcagtgagcacgacgcgaagatggcgcaggtgctccgcccatgtctggctgtagataagaatgtcatcgaaaaagacaaggacgaagcgccgcagaaatggccgtaagacgtcgttcatgagcgcctaaaatgttgccggggcgttgcacaatccgaacgacatcaccaaaaattcgtagaggtcgtcgtgagttcgaaacgccgtcttgtggatgtcatcaggccacatgcgaacttggtgatatcccgatcataggtcgagtttggtgaagaagcgggcaccgtgaagttcgtcgagcagctcatcgacgacgggaatcgggaacgcgtccttgatgctgagcgcgttcagggcccgatagtcgacgcaaaaacgccatgcgctgtccgccttcttgacgaggagtaccggcgatgagaacgccgagacgct

SEQ ID NO: 107782 - DNA, 554 bp, Zea Mays
taaatatcaaggcaacatagtttgatcgagcttcatctgcactctctcatttctttattctcaaagaaaaactaggttgatagggtgaagatgaaggtataaacgaacaaatgaaacatttaaagttgaaacaagaatgatgtaagatgaggactcaatgaaagtattcaaatacaaaaaacattgttatgtaatgctctctccttttattaactaaagatttatacaagtaccttaggcttcgtaagattacaaagagggagagaagaaggaacaacttcgtatgaagagtgacgcgtccagttccgatcgagagaaaaaatcccccctcaatgcatggcgttgttcatctatttataggcgcagagtacaactttagcgaatttacaaccatgccctagaacctatttaaactatcatacatgccgagggcaaagttgtcctttccttcttctatcctgtttactaagcttcgaaggcttcttatggttttattcagcttcttcaagtatgcacacatggtgattgcccgaaacttctgccttcgagtagat

SEQ ID NO: 107783 - DNA, 587 bp, Zea Mays
gtgatggatcaagttgtttagcagttgtagcagctcgggaaagatcatctttaacaatttgttcaggtgtcattggacgtataattattttctgacccttaaacatgaaagaataatgattcgaacgaccatgatgcaaggtatcagtatcatattgccaaggtcgaccaagtaacaaagagcatgcttccatgggaataacatcacaatcaacaaaatcagaataagcaccatggagaaaggaacacgcacggaacgtgtgatttttattttaccaccatcattaagccattgaatgtgatatgggtttggatgcttacgtgtgggtaacgacaacttttcgaccagcatggtactcgccaaattgttgcaactaccgctgtcgataatgatgcgaattgaccgctcctgcacaacaccctttgtatggaacagagtgtgtcgctgattcttctcgggcaaagtgacctgtgtactaaagaacacgctgcacaacaagactttcatacctatcagcgtcacccggattgacatgtacctccacctgagctgcatggtcagtgacaagtagtgcacgttcagtttct

SEQ ID NO: 107784 - DNA, 396 bp, Zea Mays
aacactgagctcttccattggtaactgttcctcgggcacacagagacacttctttagttgcgatacgtggaacacattatgcacatccgatagactagcaggtaactcaagttggtatgccatctccccaactcgcctaaagatcaggaatggtccaatgtagcgaggggacaatttgcccttgactttgaatctcctcattccacgcagtggtgacaccttgaggtacacataatctccttcaaattccagtggccttcttctattatccgcatagctcttctgtctggtttgagctaccctcaaattttcttgaattatacggacttgttcttctgcttcttgaatcagttcaggcccaaagaactgtctttctccagtctgatcccaatacaa

SEQ ID NO: 107785 - DNA, 684 bp, Zea Mays
tacaagttctagtaattactattgcattaaaaaacagtttatattccttttctttaattatccaattcctggtctgcgcgcgctaaatcaaagaagcccaggggtctaactcataaaagtcctaagtctcagtgcacagtaaggctagactgcgggttgtttttaggaaagtataggggctttttttgcaaaatgtgtggccgaaagggtatggtcaaacgagatccgttggattagaggccaacgaccctgattctaccggccaccccgtgaaatggaatgtcatcgggtccgtagggtccgagatccatggacggggttgtattaacgcgcgatctatcccccaccgttggatcccaatccaacagcccagattatggttcccacaaacatcatgcttatccgatctcgaccgctggtcttcaaaatctccggctaccaagccgtcttccccaacgcgacaagaaccagagcactggcgcgccgtggccatgccccaccagagataacccgcccggcacctagtgtctaagtatctagcgtgaatcacggaggcaggaagatatttcttacccaaggtcacggtggtgtcaggcgctgttccgcttcggcgtgcagcaggaggattctctggctagcctcatctgtggcggcggcaactcccttctctcccctcggtctccc

SEQ ID NO: 107786 - DNA, 387 bp, Zea Mays
gttgataccttggaatatgccttggtgcccatgggtgagttggagaaggagtgaagctaatctgttgctgactgtgctgtgtgtctgtttgtgtgttggcacacatgcagtgaactaagccatgtgtttccctgtgtttgtagcctttgtggagctggggaaggctgtccacgtgcttttgtgcatgtagtactggtcttcaagctcacttttcctatggacatgtggagatcaaaagggtttatctccttgttctttttctttgcaaactaggtccagagaagtgtatctcggttttctctatgctcttcgaccaaaacttggtagtctagcgtctgctaatgcttttgtaaccgaagcaagccaactaaaactgtcccaccgccc

SEQ ID NO: 107787 - DNA, 459 bp, Zea Mays
cgtaagcctgacattttgaagcataagagggctaccaacacctaatttgacttctcattcttctcgtaagcacgacgcagccaagcgttccttccttctttggtcttgagggtagcaaatacatctctataacgtttctccattaaaagatgagtcgcaaagaaatgtaagtcgcttccttcctctgcaccatctttgatcacttgttccaattgggcagcaacctttttatgcacggggtcgttttcagatgaggttatggacttgtaagagcccctggactcgaaagcatcgacaatccgtttcatgtattcatccctcatatcctttttcttcttaggtttaggagagtcatgcaaaaccttatgctttcccttaattgtagagctagggttaggtgtgctgttttcacccgcaccaaaaatgtcttctttgtgaccatcagatgatgaattagca

SEQ ID NO: 107788 - DNA, 662 bp, Zea Mays
tgcacttcatgaggactctagtcgcaccccttctgtacagtgcgccccctatgagggtgtagtgggccgactgccttgcgatgcgttctgccgcagccttatcatctggttcttcattctttatgtacctgacgataggctctctctagtcattggggtccaaccctggttagctcaaggtgttgcattcttctgcctgatatgagagaatactcaggcgtaacgcttcccggatgaagatcccgggtgggacctgggcccggctggatcctagcttcgacaacgcgtctgatgctgcgttgcggtctctttccacgtggtggaattctaacccttcaaatttgtcttctagttttcggacggctacataatatttgcccatagaatcagtcgaccaatcccagtctttatttttctggcttatgaccactagtgaatctccgtataccaccaacttcttaacgcccagtgacacggcgatgttcaacccgtggatcagtgcttcatattctgctgcattatttgattctaggaataataggtggagtgcatacttgagttgttctcctccaggggcaatgaagaggatccctgcacctgctcgctgcagcttcagcgagccatcgaagtacattcgccatacttcagtagcctctagattg

SEQ ID NO: 107789 - DNA, 787 bp, Zea Mays
ttccaagacttgccaactccgactggagttgaattcgctgaggatgagttcattttgcacatggagggcacggcagggacacagagagtggtgaggcacattggaaccactagctggccaggtaaccactgtgaattgtgatgcactttgtttctggtcgcttccttttctcatgttctagtgatctgaattactactttgtttcataaaaaaaaatctgaattactacttacattcatcagtaaataataacgtataaccttactcgatatgtttcggttttctaggtcgagtgactctgacgaacaaggcactgtattttgaggcttccggaaaattttcatacgaatctgcaatcaaggttgatctctcagacaccggagtagaacaccaaatcagcacggcgtcaacaggccctttcggcgtgcctttgttcgacaaggccatcgtgttcgagtcactgtaagttccatctcacaaaaggacccttgaaacgatcaatcctacctggctacctgaaccattcatccgtgcagaccagagcctgtggtcttggagttcccggagatgaccagctcgacaaggcgcaacacgtggctcgctctgatcagggaagtgctgtccatccaccgtttcatctcagcgtacagcatagtgtcccccgtccacagatgggaggtgcactccagaaccatactaggagtggtacgtctccacgccgcgagggagatgctacggatgtcgccgccgccggcttccagcttcctagtgttctcgctgtacggcg

SEQ ID NO: 107790 - DNA, 627 bp, Zea Mays
tacaaataagcctctgtgattatagtaaataaggtaaaacttccactaaatcaacaaaattgagtgggggcatgtgccccactgctcttaatgtcggtccgcccatgcatacaataacaccaactctcggccaatcagcttcggccgaccaactcactgtcgagcaacccgacgaggcacagatttatgtctagcgccactgattcacgtcagctacagcgggacgtgtcatcatcaaaccacgttcggacatgcacacgacacgctgaatgggcacatggatctctacagtgacccgtatatcgaaagacgggacaacgccccataccgagcgtgcgtctgcgcacgtcggtaggtgatgaaggcgtcatgactacaagagaaggcacaccaagtacgaccgcactttgagattgatccgtggaacccatcgcataccattacgaagacgttggtgatggactcgctacaataaccaaagtagcgggcgaagatgacgctatgccgggagtacagctacgcacgatcctacggaggacccaccacaccaacccagggagcatatctctctttctctctagtagaatggaagtcccattgtaaggtcctacccttgagatataaaat

SEQ ID NO: 107791 - DNA, 389 bp, Zea Mays
gtcaacaaaaggaatcgaagcaaatccacataaaatagaggccatactttagatggacacgtcgaagtcaataaagggggctcaaaggctagcaggaaggcttacttctctgaaccgattcatctcaagatgagcagaacgaagtctgcctttcttcgaagtgctgaaattagcagaagtgttctagtgggatcagcccaacaacaagcctttgaagaactaaaacaatatttaattcagctaacaactctctttccaccatcgctaggggctactctgctcctctatgtgttagcttcgcaatgcactgtaagtgtcgctctggtccaagagaaagtggaagaaaggatgaaaggcaaatgtcaatatactttgtcttcgaagtattg

SEQ ID NO: 107792 - DNA, 708 bp, Zea Mays
gagaccctccatgattattacaaaaagttcctcctgctcaaatcccagttgccgattgtcgaagaccaaatcacaatccactatgccatcaacaacctccatgctagacaactctatagtcactgaataagagattccccaagaaccctacaagaattgtatcaactatttgagaagtatgctcgctcggaggaattacatttccagaaacttgagacccaatggaagttcaatgagactttgcaggataacaagttatgcgctaaaggccagcaccaggattgaccccaccaggatcacagttagcaaccccaggtgcacaacatcgctaatccataatagctagacatggtaccccacttacagtcaggacaacccttcgcaacatggttgagggggcggtgcagcaagaggccacaaccgaggtagaggccctcagcagcaaatgaacctttattgtgtctttcatggagaggatgttgagtacaccactaaagattgcccagaaaccaaagaaactaaagatcacatggctagagcagtcccaacaaatagtccaagagccatagttcacacttatcaaccctagtatccccctcgcgatgaagacccccacccaactttcccttaataccacccaaacatcaatccacaccacaacatatccccccaactcccccattaagaaatactagcactcccccaaac

SEQ ID NO: 107793 - DNA, 315 bp, Zea Mays
tgtaagtcaggtggcagcgtgagacccttacccttctggggtggatgagctgacacagttacacgcctgcgagatcacccacaacgggagcgctctttcgttacgcgcgccgcgtcaaatttccagtagcggctcgcgtacatcagggcgccacatttctttagcaaaccccacatttctttttctaccatttccttgttagtccagactccagatgggccattcgcctattatctcgagattttggtctgatcttgctcaacttgccggctggatttgtaagccgaaattagttggacctcaaccgaaggacca

SEQ ID NO: 107794 - DNA, 482 bp, Zea Mays
agaaaataatgttaaagaagttgtacaaggctagtgtcgacatttcgaacaagcaccgacgagtaaatttgtgatgcgcgtttttggacccagatggtgtgctagtgggatgcaatagtttatactagtttgagcggaatgtccctactccagtcttcagtgcttggtgctaccggcacctaattactcatagtaggggttacaagctgagtgagagagggggcaagctcctaattctttgatttggggcaatatcatttaagttatctattatttttaccttagcatctccctttgccataagacaatgtggagatgagaagagtgaaggagcctccttgatggcgatgccgacattaagcttggatgaagagttataatcatcatcatccgaactttcatctgaatcccattccactagatatgctttgccatccttcttcttgcgatagaatttcttcttcttgtcctctccatccttc

SEQ ID NO: 107795 - DNA, 439 bp, Zea Mays
gtctttttgtgtctgagtcatgctttggcttcttatttttcgggtcgtgcctatgcggccctaaatgactcgtcccaaacttttgggtctagagtgcatatgcacgttgttcttttcgcaaattttgacatttgttcatagactagcccatgctctttatgaatcatgaatccgccactagtcacagagatggaagcacgtgtcatgcctttaaccgccggctcagaccttgatgggaagttgagaagcgtgaagccaaacatttgcaagtcatagaagaaatggaatacattcttaaacccaatctaatttctgaagtgacgaaggtagggtttggtttagagggcgagaagacatggaatggagtgatcccacttctaatggtgttttggattagggacaagaaggacagagtcatcactcatatagaatatacatg

SEQ ID NO: 107796 - DNA, 623 bp, Zea Mays
gcgaagactaagtttaaaaaatgtgggttatgttttggggaatgcatcgatagatgtttatgtgaaaagtgtattggttttatgcatgagatcagtgattgtgatagtcgatgcgattgaggagtatgattggtcctgttgaagtcacctgtgttgttgatgtcatgtgcacaatgtggggacatgtatgtgtgtgtgctgtggtgcattgtagtagtggttgtgtaagatatgtgattgaagtgtgcgggtatatgccgtaatatggttatactcgcgatgaggaaagatgtatgtattgtgtaacatgatgtttagattgctattgtatatcatgtgaaggatgctcatgatggtcatgtaactgtagggtggtgtagtggcaaagcgagaagtaagtttagtgttttaaacggttagttgatagcatctatcggtgttgtcataatttttgttctatggtggatcgatgcttcgctttctcaattattccattccatgccctttggatatataaatgtcttgttgattggttagaggtcctatatgagtgttatcacagcccaataattattggaagcgagtagcgttcataagtctatccttgttaaaattgaagaaca

SEQ ID NO: 107797 - DNA, 478 bp, Zea Mays
gtttaatctcggaatccggtacgtactccacactgctctccgtacagtatgagataacttaaccgtcggcacgctcctttatttacagcatccttgttgcaccggacatgtaacatggcagagttgaccttgagatatgatggggtaaaccaaaagatatttgagctccttgcttgacctgatgcatatgcatgcttcgcacggaactatatatatagggtttttcatgcagcaactgctggtcgatcgagatccctctggaattgtctgggttttggctcggttaaattaaatctgctaattgtagcataacactaactttttttaaaaaaggagagagaatcacacttcctccaacacacctgttaacaagtaaagacctatttggatctatattaattagcagcatggattcaacacatatgctatacgacggcgccatgcattgtttaggataaactccctgcttcaaactttt

SEQ ID NO: 107798 - DNA, 492 bp, Zea Mays
cgaggtgatgttcttgatgccctattgcggtagtgttcaatcggttgagccgacgagctacgttaacattcaaggatgctaaaacatggcacagagggtatgaacagacctaggaacgactgatcacgacaaggtgtctcacggcggcgggagtgacccgatttggaggaaatccattgattggaggctacggtgcacgtgagaggataactgagggtggtatgagcgcgtaacaaaaaggcggagcgagggtagtgctcaatttaaaggagccgactatgtgctttgctaatttgagacgaagacgatcacaacggtggtgggatattccactggacgagttcgtcgtggtgcctgccagtacaacggctcaagggtcgtaattcctggcttgccatagttataactacgtggtaaaatagtcacggtgtggcgcaaccgtgaaggatggcggccaccatggcgatgatcttttacccgagcgcaaatcac

SEQ ID NO: 107799 - DNA, 311 bp, Zea Mays
gccgaccggggctggaacgggatgcaccacatcttcaactgaatctagtggcaacttcaatggtggttcccagttggttacaacaagtagttcaggggtatgagcaagaccccagtgctcaaaaactgttgcaggtattagccactgggacggaccagggtcggtatactctgacaaatggagtgatcagataaaagggtcgtatttggttgagcaccaatcttgttttgcagcagacagtcatgaccgccttgcatgccagcgctctaggaggtcactctggtttcccagtaacataccggcgtctcaaa

SEQ ID NO: 107800 - DNA, 756 bp, Zea Mays
aaggaatcgaggccaacctagagaaaatcgaagccatcctaaggatggaaccgccacgaccacaaaagaaggtccacaagcttactggctgcatggcaacactgagtcacttcatctcacggctcggtgagagaggcatgccattctacaagctgctcaagaaggtggatagatttcagtggaccctaaagcacaagaagcattggaggcactcaaaaaattcttgaccaccttgctagtcctcaaaccagccaaccgagccaccaccgaccaactagctaaagatctattgttgtacatctcatgcacgactcatgtggtaagcaccactttagtagtcgagtgaacagaagaagggcatgcacatccagtccaacactccgtggacttcattagaaaaggtatcagcctctccaagatcagataccctcaagtaaagaagttgctaaacgtagtactcctcaccgcacgaaatttgtgtcactacttcgacaatcacaaggttgttgtggttataggcttcttgataggagacatacttcacaatagggaagcagtgggaaggacaaccaagtgggcatgcaaactcggagttcgcgacaaagaattcagaacttgcacgcaatcaagaccccggctctagtggatttcatgttagaattggccaagcaatagatccccgaaaatcctgagtcaatggaggtatggaatatgtactttgatgggtcattgagattgcaaggagcaggggcaggc

SEQ ID NO: 107801 - DNA, 492 bp, Zea Mays
gcgcccctcccagaggctggtacgaccttggatattcagaagcctgccagtactcgcctgaggcgcccttgccgagccaatcaacctgatccttctgctgatgagcagaaaaagaaaaagagacgccttcggcgagtatccagtttggatcgggacattggtacttcggttcctgctgctgaagaagtgcctgtgtctgaatttattgacgctgacctcaatgggtgtgcccgatttgctgctgatcccaatgtgggtgctccatctgttgctgatcccaatgggggtgctgcctgtgttgctaatgaagacgatggggaggaagaggatgaagttcctttgactcggaaaaatagtcggcagttcatcgctagtggtgaaagtagtggagttccttctcctgctttgtctgctctcattggtctgcaagaattgtccctggcgaattttgatcagactcttgaggatatggttccagaggatttgttatca

SEQ ID NO: 107802 - DNA, 1105 bp, Zea Mays
gcaggtggagagccttggggatgagaagctggcgcttgtggccacccggttcacgtgattccacaacaaccaccagaaccgacaacgtggtaggtccaaggatggatgcttcaactacggtgaccccgagcacttcaatgccagttgccccaagaaggacaagtccgaggctggcccacgcgaccaccactctggtcggcgcaagggcaagcgggagcacacctcttgcaagcacaagtccagggggaagtacctccagaaggccaaggtcaaaaagcatgccttcctcgcctccctgagcgacctcgaccacgactccaacgagtcggcctcctcttcgagcgacgaggagctcgagagacacgttgaggacaagctcaacgggttgtgcttcatcgtcgacaccgtaggaggtctttacaccatggcccatggtgattatgcagttggtggcgacagcaatgacatcagcgacgactctgcttttgaggtatcaaattccgcccactgaggtagaagagttgaacattgctttggcaaattagtacaagttgcttaggcttgctgcttgtgagaggaaagagtttaaatccaagtttgagtccgctagagcttcagttgtggtgtccgacaagactaaatgtgatgggtttgcccttcacatgtcgaacatcgccactttgcagaccaagtatgccaccctgctagatgagtgcggtgagcttcaatctaggtctagcttgttgggcgcatgtcagacttgtcctagcttgcagactgagctagcggagaagaacgctaggatagcctcgcttgagaaggctagctcagtgagtgcatctacacctatgcagtgtgcactctatgagggtttgtagtctgctcttgagtcctacagacatgacggatcagacaaaacgtgtccaacatctcggggctcaaaagaagcaacaaaagctgagtgagcaaagtgggacatctgctgatacctggagcgagtgactcactcattaagctcaccaatcatttgttgaggagggtgatcacgctggatatgtcgtggagcctccctcaaagaagtggcctccccctcaacagcaacctg

SEQ ID NO: 107803 - DNA, 790 bp, Zea Mays
gagcggcatctccgtctcgttctaagtgctcttaggaagaatcaattttatggcaaattgaagaagtgcgccttttggttgtccgaagtggctttcttggggcatgtgattagtcagcagggcattgcggttgatcctaagaatgtcgcggctgtggtggagtggaagagaccctctagtgtctctgaaatccaaagtttcttggggctcgccagatattatcgacgcttcataccaaatttttccaacattgctaagactttgactagacttttggagaagggtgttctgtttgtctggtccagcgattgcgaggtcagctatcagacattgaagaacaagttggtgagcgcccctatcctagctttgcttgagagtggtaagcgtttcacagtttatacagacgcttctcgaattggtcttggctgtgtgttgatgcaagaaggtagagtggtcgctcatggctcaaggtagttgaggaagcatgaggggaattatccaactcatgatcttgaattggccacggtggtctttgctataaaatcatggaggcattacctttatggcgagtcttgtgacatttacaccgatcataaaagtctcaagtatattttcactcagaaggagctgaatttgaggcagtgtcggtggctcgaattgattaaagattatgatttatccattcattatcacccggggaaggcaaatgtggtggctgatgcccttagcaggtccggggttccaaaagtggccttgcctttgatcgctgatctggaccgtttggggatcg

SEQ ID NO: 107804 - DNA, 399 bp, Zea Mays
ctcgcgaggttggccttgggcgagtcatgactgtgtatcccgcccggggttggcctcgagcgagtcatgactgcgtctcccacccgaggttggcctcgggagagtcatgactgcatctcccgcctaggattggcctcgggcaagttgttctgactgcttctcccacccgaggtggcctcggacgagtcgtgactgcttctcccacccggggttggcctcgggcgagtcatgactacatctcccgcctgaggttggcctcggtctagtcgtgactgcatatctcggccgaggttggcctcgagcgagtcgtgacttaggtccctcatgcctaggtaaggttgggagtgtgtttgattatgaacctttcttactcaagcgtctagacactttagggttgtg

SEQ ID NO: 107805 - DNA, 327 bp, Zea Mays
gacaaagccgtgcgacaacgagcctttttagtgggagatctcatcctccgctgaattctaacgggggagagacgacacaagttgtcaccctcatgggaaggaccattcatagtagcagaagtcactcgaccgggatcatatcgcctcactcaaatggacggcacaaaaattgggaactcctggaatatagagcacctcaggaagttttacccctagtcgtatttcaaaagctatcgggacgataatgtactctgtaatgcgggaaatatgtcatcaataaagaaaggcttcaagaatactcagtttgttcatgattgactggcattc

SEQ ID NO: 107806 - DNA, 551 bp, Zea Mays
ctctcctataagcaagcagaaacatatctagtttccagcttccttgagggagctgggattactgtgaccaaatctctctctctgcgcactgttcatccgcgggtactcgcctcctcacagcgacggcgccccagcgccgcccttgtcttccctcttccctcattcacccctaccgattgagagatatccctggtaggatcaggaaccctaccattaatattgccaatttaaaatagcacgcattcaagcacaattctagcatgatatgctataacagtattactatgaaaaaggtgaaactacaccaataataaattataatcaattgtagtatttccaaaactacaatcataactgcaaagtaatatatacaagaaataaagaatgacctaccaacacccatggaggtcagcaacagctgcaaaatgctataagtttttgtcctcaaagtaggcagctttgctattttgaagtactctgttataagccgtatgatactagcaccatgaggtaagagttggctgcaggatgatagtctaaatcagtctttt

SEQ ID NO: 107807 - DNA, 670 bp, Zea Mays
attgaaatgggaaatagaaaataaaaacaaaaaagaagggagaaatggctattgtgcatgggttgaatctccctctccgtggcccactttcccctcagcacagcccaagtgaatgggacggcaccgacacatggggtccacttgtcattcaccgtcacccctcctcaaaccagctggggaattggcgccgacatcctgggcctacatggcggtctcacttgcgccgtgccgcactgtccgcactgtggatttcatcctcgctgatagatcgatccccctcgtctatctccatgcacccgcgaaacagataccccatgcgcttgagccgatttcttcgctgactggtgggccaccactgtcagccgtcttttcctcacgaaacacctgagcagagttgggatctcccagctgaaatcgctagccgcgtgcacccatccctggcggttattctggccgaatttctcgcctataagtccatgcgcactcgataactcagacacaaccattggggacctgtgcatcaacgtgttgttcctctctgccgtcgaatgcagaacaagatggggaaacaagataaccggaatttccgtatttcggttaagatgccacctagcacgagtatataactcggtgccggccttctccgtcgattaacgaagccgccgaccac

SEQ ID NO: 107808 - DNA, 1106 bp, Zea Mays
gcttagatcattcggtggatgggccaggggaagaatatggttcgtcgcctaggtgaggatctgccggtaaccttccacgtccggggtgtgcgacaagccgttggtgatttgagctaggactcccccgacttcactcggcgtgttcaatgcccgagcgaagttagaaaacatgttccgagggagaagcgggttctcgcgttagagcctggtgtcctgctcagcttgttctcgttcgtgctcctaggcgtggtgacgatcacgacgttgggagttacaacgttcacggaatggtatatcgtcatgggtttcccctacttcagaggcatcatcccaggagacggattgtgtaggatcctgtccccggtctcgtggtgatgtcgtatgttacggcgcctattatgacgtcagcgtgcatcgtgctgagggggctcctcccccagtacagtgagctcgtcgtcggagataggcacgtcctctactcttccctagatgaagaggatgtccgtgaagaaagagctttatgcgatgcttcgtgctctgaccatctcctttgagggcagaatgctcagagtgattgtcggtcgtgtccccacggctacgctagtgctgggggcacctgcttctctttgctgagtgattcgagtccatgcccgagtgggtgacgaggataaggggtccgccacaacagaggtgcaaccttagtcggccgagccacagatgtcacaacgactctgggcccacccgacatagacataattctgcgcgaggcggaagcctatcgaggttctcgtgccttggagttcatcggcgtatttcttactggcgctaggcgaggcaatcctcctgctgccgttggcaccaccggggaagatatcttcctggatgggtccgcaatgcggtgtaagatgccctcctgatctgcaatgcaggagagggatccaaagcagaagatctctccagcattgaaggtgaccgggatgttgaagacgatagccattgagtcatcttagatcaatgttgcaccccctacctggcgtgccagctgtcggtgtttgtgacccaaccgtgcaccatggggttacccacatgatgcttttgggtaggac

SEQ ID NO: 107809 - DNA, 609 bp, Zea Mays
cgtgactccacactggtgcgtcatggttctgatcgtgctcctcctgctgcctcagttcactctcatgacagtggtcacgcgaagcgtggatgttgcttcacgtgcctcgcccactgttgatgatgtggcacatgcctctggatgagcaggtgggaggagatggtttgcctcttgggtgaggatttgtcgataaccctctgtgtctagtgtgtggggtaggacagatttccgccaacttcactcggtgtttgcatggcctgagcgaagtcaggcaacaagtttcggggatgaggcgggtcatcacgccggtgcctggcattatgttctgcctgttcccattcgtgatcctaggtgaggtggtggcctcgtcatcggagttccactattcgtaaaacgccatctcattaggggttcccccgcttcatacgctttatcccgagaaacgagctaggtgggatcccattctccagttgtgtggtgacaccgagcattttagcgccgatttcgatgatggagtgcctcatgctacgggggctcctccccttgcaaggtgggttcgtcgtcggagggagtgtcttctattcttccatggatgaagaggacatccag

SEQ ID NO: 107810 - DNA, 579 bp, Zea Mays
gtcaagagaacgccaacctggctgaaggggatgagcctccaaagtcagccagactcggcaacgaggtacccgatgctcctcatacaactacaccgtgtacaaagggggcgtagggtaaccggcagagttaagcacttcccacaagatggaaggaaagccatcgtgagaaaggaagtcagagctaaaacgagtgtctcctccactggcgggggtgggtgaattcatctgcggaagggtatcaaaggtaaagattatggtggaaggaagaaaaataaaaagcctggatggttttgaaaggaagcgggttagctcaagtttttataatgcatgcatgctgaaatcaacgtctcctctccgaatgcaatagaaaaaagggggggctcctagggcacccttcaaaagttaaggattggcccacagggcctacttacttagccacctatttcccctctattcctaaggcctttcgtcctaggtctagcggtctagtcctgacgattcttagcaatttctaatcaagttttagattttgaaatttggtattcatggtttattgtccttctctgtggtggtatttgc

SEQ ID NO: 107811 - DNA, 726 bp, Zea Mays
cgagatgaaccctgtaatatgttttttctttgtcttttggacagcgacatacccggattcaaacagcgatatcttttaaaatataattccaaatcaagcgcataagtactcattggaaagataagacaaatccctacatgattatcatactggttaacactaattacccacgaaaaattcccagaaactgctaataccactgctgttcacccacctgaaaaatctgttttttttggacagcaacataaccggattcaaacaacgatatctcctaaattataactccgaatcgagcgcataagtacttgttggaaagataacataaagccctacatgattctcatactgattaacactaattactcccgaaaaatccccagaaactgctaatactgctgctgttcatccccctaaaaatctgtttttttggacagccacctacccggtttcaaacggtgataacttttaatttataactccaaattgagcgcataaatactcgttggaaaggtatgccaaagttctacatgattcccaaacttattccccttaattgtccacgaaaaatgcccagaaatcactaattctgctgctgttcgtccacccccttaaaattctggacagcccttctaccaaatcgcacacgcaacatctaaacaattggattgccgcataaaatgaacaagagataaacacaaaaatcaccttgggttctcccccttttct

SEQ ID NO: 107812 - DNA, 364 bp, Zea Mays
acaaatagtttgcaaatatcgtaagatagtccaacacatctaacaccagcagtccgtgcaaataggcgtgcaaaacattgttttgtactgtaggcaacactatttacagagtgaagtttaaagtaggaagtgagataggtagcgagataggtagtctgttggagatagctttagatcggctatagtaaccatcttccctcataaaatctggtctagtcaatcttagtggtcggctaggtcgatttttattggttttctaaattgattcatttttaaatcaatttttgaaattggaaacttggcaaacggatttttgctccttagatgtgtgttgttgtcagagggactgtcaccaaggattgat

SEQ ID NO: 107813 - DNA, 749 bp, Zea Mays
atcggattggggatggtaagctgaaatcattctgagttgcacatcagccagacgaaacaattcttgccgtaggtgactaaggaataccttgtctcgatcagacacaatagactgcggtagcccatgatgctttaacgttaagaaattggcatacttggtaaaggtgtccaccaccactaaaatacacgtgaaggattgagagtgtggtaaggcctcaataaaatccataaaaatgatctgccataacccagttggcactgcaaatggttgcagcaagcctggcaaccgagaacgatcagctttggccttttgacagataacacagctgctaacataatcagttacagcttgtttcagccctttccaagcaaacaattgcttcacccttgcatatgtcaccagaatacctgaatgacctccaatcgcagaagaatgaaaagcagctatcaaacgggtttgtaggtccactgaaggtcccacccaaatccggtttttgtgtcgtagcagaccatcttgccaagagaaatgaggcacagccgaaggatcgaccgccaatttggagataatatcatatgctgccgagtccgtggtatatgtgtcggatacctctgtcacccatttgggagtgcaagaagataaaaccaagcatgaagacccaaaagcaggatgacgagaaagtgtgtctgctgcactattatcgacccccttcttgaaaatgattctatactgcagccccaacagacgagaaa

SEQ ID NO: 107814 - DNA, 607 bp, Zea Mays
atcactgtgaaatatccaggtcgccgtgagctgatccccaatccaaatttgtgataagttcgaccgaggcctttaaattgaaggtgcccccagttttgtctttgtgttacgcgcccaacccactctcagccagctcgtttcattccccgtagcctgcagtcaccaggttttccccaaacacggttgtcaacgccgccgagtgtagctccgtcgtggccagcgtgattccggtgaaatcctactcctttgcgttttgttttagtactcttatggtctctggatgctcatggactcgggcggttgaacgttatcgctaccagactccgtgaacacggcgttgtcatccgggaacgccgacgtgaacacccctcgcgtggacgagctctctagtgcttgctctgttcaaattcacacgtgtatcatacctcgagtgagccagtgatgctctccctactcttattctaaacgctaccacattcggctgctcggaacgaactcgccggagttctggttccgccggtgtcgtgagcaaataaactctaggagcgggctcgtcgaaatggtctcgggaacatgtccggggagcctcttggtcggtgcctgtgcg

SEQ ID NO: 107815 - DNA, 624 bp, Zea Mays
cagttgcgggcttgctcctttggttggtgtgagcacgagtagaagtaggcatcaggaagacaggcaggcgaagccgcgcaatcgccgcctccagatcctctgcccccttgccccggattcaataaacattttagataccatgtgtaaagctcgaaccttctgtgagtttggctgaagctcaacctagccaactttcaacaatgctattcctttttttcaaattctgttttataatgtaacaaacacagccccacaaaaagagaacatatgtacattttgcgaggtgcggagtgcagtgccaagtatagcctttaaactataaccagaaaaactctaatactatccccctctaatctttgttacatatcctaagttaaatattactatctttgaccaacagttttaagaatccttagttccacaacatattaataagtatcttgggatctaaaaacataaagatatatagtttttttctaaaaaatcagtaatcaaagatataaatatttgcatgaggcagaatgggtaaaaaatacagaactaatgaggaactgggaagcttgttgttacctagaaaaattcagttagtcatttctagagatccttttgcctgcagagtttcaa

SEQ ID NO: 107816 - DNA, 572 bp, Zea Mays
gttgactagaatggatatgaagtagaacgggtactgggtgcttggggagaccaaggatgagctagagtaaacaaggggagagcaagagctgatgtttaggtgtaggaagtggttgaggcatcgagcacctgggggcatgattgaggaagggtggagaaacaagcttttctagagattaaacccccgtagggactgatgaccagcaaggggaaggacatacatagacatggttcatagagaattgcactagaaatcatagatcagcaaggggactgatgactagcgagggagagcaagagaaccaaatcgaggagctcaccaggcttgggagacctcaccgaaaagaaggatgtcggcaacgagggaggctgtggtggcgctgggagggcacaacgatggtggtggtgcagagagctagcttgggagcacgtgcgagaaagcaacaaaaagagagcaggtgactagcaagcagacccgagtgagaagaggaatttgaatttgtagttatgggaacatctggaagtgaatagaacactgtctggtgcacaccaaacatcttacatagaggcggt

SEQ ID NO: 107817 - DNA, 1183 bp, Zea Mays
ccaactcatgatcttgaattggccgcagtggtctttgctctaaatcatggaggcattatatttatggtgagtgttgtgacattttcactgatcataaaagtctcaagtatattttcactcaaaagaagctgaatttgaggcagcgtcggtggctcgaattgattaaagattatgatttgtccattcattatcacctggggaaggaaaatgtggtggctgatgcccttagcaggtccggggttccaaaagtggccttgcctttgatcgctgatctggaccatttggggatcgctttgtgctatgtcggcaccgctagtgaggagactcggatgcttattcattcctccctcatggagagagtgcgtgtggctcagcagccggatcgattattgcaggaagctcgaaagagggttggcgatggtaaaccccgggagttcaccattgatgagaatgatttggttcgtttcaggggccgtctttgtgtgccacaaaaatcagaggtgaagatggatatcttgagagaagctcataaaacgccttacaccgttcaccctggcgaaaccaaaatgtacagagatttgaagcaaaacttctggtggaagtggatgaaggttgacgtttctaagtatgtggccgcctgtgaagtatgtcagcgcgtgaaggtcgagcataagaggcctgcaggtttactgaagccattggaaattccggagtggaagtgggagcatatcaccgttgattttgtggtgggcttacctcgttctcctcggggaagggatgctatatgggtgatagtggatcgcttgactaagtctgcgcactttattcccatgaagaccacaaattcagcttcagagttggttcccttgtatatgaaggaagtaatcaggcttcacggggtgcttaagtccattatttctgatcgagactccaaatttgtatccaaattctgggagagtcttcacagtgcattgggtaccaagctctcgcttagtgtcgcttttcaccctcagactggtggtcagtcggagcgaactatccaaaccttggaagatatgctgcgtgcttgtgttctgtcttggaagggtagctgggaggatcatctctcattggtcgagttcgcttataacaatagctgccaggctagcatcaagatggcaccatatgaggccttatatggaag

SEQ ID NO: 107818 - DNA, 302 bp, Zea Mays
caagtagtggaggcaccatttgcttcgaatcagatgccgaccatatgagctggaaaggcaagccttcgatttttagcagctggtccagtttgcctctagtggagatggtcttcaccggtgctacggtgacgatgatttttccaccctagaatatgttctacgctgactcaacctacgggctgtgcatgaccgtcatgaagacgactgatgtgggagtccaaatattggggaatcgggcgactaggtccttcggaactaccttcaacattcaaggcatgatatttggcttttgatattcaaca

SEQ ID NO: 107819 - DNA, 575 bp, Zea Mays
accggcgagcagacagccatgaggagagagaaaaggggatagaaggatgcggggaggaagaagacagtcggtggtccgttgagtggtagctggacggtggagattatatggtgcctgggtcgttggattcacatggagtggcgatgatttggttggtgcgtaccacttccgtgcgcccatccgagccgttgattgagtgacgggtggtagagattagatcccgggggcgacaacaccacatccgtagatctaggatcggcctgtccgtaatgcataccggttcacagttgatgccgatctaatcaggaatgctcatccacgatccatcgaccgaaactaaaccataccgtttcgacccccccgctttgcagaaagacccccgaagaaatcactaaacaacccgcggtcctgggcaagcacgttcggagtctgctaaagttttatagttttacccctgcacttgctactaataatgcgccgagtccagaagaatagaaaatatagtaaaactaaatagaaattgatttttaatgcataaataaatgccagaatgttgtttaattcacataaaattc

SEQ ID NO: 107820 - DNA, 911 bp, Zea Mays
tagatcttgtagcctctcagcccattgcctgtagtgcattggcatagacagtgagcacttgaaaaggtgcaggttcatactgtcataaaagagatacatttgcttgaacataatttgttattgatatataatctatatagtgcatgagaattatttcaattagtgtcaattgctaatgatagtagttgttgaatatgtctagttgctcctaatcctgaatatgtccaattgcaaacaaataagatgccttaccagccctaatgtagctcctaaacctgaataggacaaaaactacatcatagaaatgcatattaaaagaaataaaaacaatggttcttgtcatcgttaattgttacgtacattagtttttttacttattcaattgttaaaacgtattcaggagaagccttattactgccatcgacagcatgagtgtgaaccaacacgcaagggatcgaacgagacaaactagatgcagtgaaaagcaaaagatagattagtactggatacctacgcgtcgattagcctgaacccatccttccacccatcagtaatcatcagcaatagaaattgagatacatataagatctagcatctgtcggctcacccggcccgtagcagactgcatcactcgtctgcagatgaacactaggcatcgtgtcgttgaatgttagctactgctaatggaagaggaaatagtagagaggaagaagcggggaaggagaagaatagggaactagagcaggtagagcaagtagagaggaagaagcgggcagattaagacggtatgccacttggccaacccgatcgagcacctggaatgggccaaagtatttgaagccaagcttatggtgggagcgggacatcgctgaagattgcacatatggctgtagcttaaggtaaacccagtc

SEQ ID NO: 107821 - DNA, 412 bp, Zea Mays
cttgcacccactaagcacatcggacctggaaccctcacaaacaaatttacttatcggagctagttcaaaacaccgacatgtctcctattgaacctctatttaggcttatacttgacagggttgtactcacagttgtccttgcccttggacttgtgcattagaccactatgtccgtcagacatcagatttgattgccctgctcgcattttaatgagatgtgggctaacctcacaaaaaatatttcttgcgccccaaaatatagttctttctagccctcttttttcttcccacattcgaacaaatgataataaatgtaaacatttgtacaaactacattcataggttaactaatggatgtaagtttaggtattgtttggttggaccattttatagcataatccattaacgagag

SEQ ID NO: 107822 - DNA, 805 bp, Zea Mays
ctcaactgctggagcgaaatggttgggcgagaggcaagggcgccatgggcgcggtgagtgtgatgtcccaagacgtgtcagggagcacgatttggatgagattttgatggggccgagtgtttgccatatgctggtgccggtcatggggcgctttcagtgcttggaatgccatgcttgttgtgtcttcggatgcatcgacgatcaacgagggacatcaaaatatggacagggaagcattggctgagtgtctcgatcagatggcaatgctatgctgcgaaataaagctcacatgacgtgctactgatccagctgcaggccgcgaagaggcgataaagctgtcgagcaacttctggtggacaggcttaatcagatagactgtatcgcaaactgattagggcgataaagctgtcgaggaactagctgtcagatatcttggacccaatcaacatttggtgttcatggcccatgaggcatagcagcatggcagcacattgtgatatcgccctagccacccagagattgctaccggtggatccaacaggtgccagacattgcagcactccctgtcactgaattatatgccgtgtgtaacatatatatcacccaatcatgcattaaccttcatattacagtgaagatcaaaggcttacactcgttcacgttgaagtgctcaacatcgtcatcatatgacgtgttagtccatctcataaacaccagattatatggtgaacaccagggacaaacatattttttagattaagggatatttattagggatggcaatggatcaaatattgctccgcaa

SEQ ID NO: 107823 - DNA, 495 bp, Zea Mays
aaacaacaaacacacacaacacccctcgccaaacccataacatacctgcaccagcgctcggtctgccctctcctggacgacgccacggccgtgagggcccacatcctatcatctagcgccccagcagagcgcttcagcacgtcatcttcaatctggaacacgccacgatcgaagtccttgttcgctcggtggaagacctcgaaatgtctgcatccctctcgggacaaagcattcgcagccccttcgcaagtgacgagagacgcataggacatgagacccgtcataatagatgggagcgactctagctcatcttgcaaccaccccagaaagtgggtccccgcctcctcccccaatttgtcaaaaggggcggtttgcgcaccaaggtcacggtacgcatccacgaaaagcctgtgcgcccggtcaaccccagcacgggtggaagattctgtcctctcgcggtggccacacatattcttcagcaccagctccaagtca

SEQ ID NO: 107824 - DNA, 993 bp, Zea Mays
aacaaactgactcaaaatatgtatagaatatgaaatgtcaggacaaatgataccaaggtaaacaagactccatacaatatgttgacaacgtgtaggatccttaggaggttcaccatctgtatcacgaagggggatcgacttggttcaattgtccacacagatcaacacctaacgatcaaagctgcctctgtaggtgaattgacgccatcctcaacccccgtgggcacaaaatagggtgccatgttttctttctctacactgtcaagatccgtccgtttcgtcacccgccgccaaactttatgaggtggcagtggtttggtagggaaaggaaatttgttgttgaggtagccatgggaggagatggcgagaaagaggtaggatgtgggatgggatggtttgggtctaggagcggcacttgagctacatgttgtcgatgagtgtcggaaggttgaggcgtggaggattccagaaagagagatgagagaaaaggggagctgtgactctttgaggacgatgggtaaaagaaaaataaaaaaatgtacccatttgcagatgggccttcatataagcatgggtaaacatactagcgtggtagacctaaaaacataccagggtttgtttgaaagttattagatactttatggttaacaatgcatctttttatagctaagaggttatgtagtcaaccctcgatatggtaggtggttatgtagactttttttcaataacatacaaatcatattggcaataaataaataatctcaggtaatgcctttgtctaactttcattgtacggatcttgctcatgctacacctggttcctgccctgctgataggtgttttttggctccaaatgagggccaatttgcaagttttatgctgtaaaagtttgaatttaggtttgaactgtggagcacagacttgtaatttgtttataggtactctggctttgaaacatttagaacatttgagtccctcaataccattccagtt

SEQ ID NO: 107825 - DNA, 546 bp, Zea Mays
catatcccaaatgcttatcaggtgtatcaggaaaccatacatcttctgtacgggaggtctgtcgtctgaattgaacccctttatctgtaccctacttgcagaacatctcctggacacatgttcataaaaagaatgctatccctttttcaccatgctgtgttaaataagcctgatccaacatctacttctgaaaaacaaacagggacttgttcacctccatcaggtcctcgtgttggttcaggattgctactcgaaaatcaagcagctgcctaactctggctctgagaagcaaacaatcatggagagcgagagcttagaccatgtaggtatgcagtttgacttgcccatgttgatactttgctgtcaatacaatggtcagaaagcctatgtcatcgtactgaactttcgccatcgagttcattactcagctgctcaaaccggaattgtaggtaagcgtgtcattgagatgcttgatcaggtgactccagtggtgaaagaaatgttcagttccatggaaagctccagttctgcacaggcggcggcggc

SEQ ID NO: 107826 - DNA, 434 bp, Zea Mays
gcttcagatcgtggtacattttggtgctccccggatgcatggagaatttggagaggtgggcctcatccaagattttcttcttgagatccttgtttttaggaaccaccaatctgctttcaaaccacaatataccctttccatcttggcaaaaacatttatacttctcagtcttctgatggagattctccttgataatctgcactcccttgtcactaagctgggccatgatgatctggtcttgcaaagctagctcaacagaaatgtgagacaatgcaccagaaggaattactccaatcttcatcttgcgcaactcatcacacaaggtgtcaatacgagaatccatcagaacacaattgcattgcaacttccgactcaaggcatctgctaccacattggcctttcctggtgataatgtacctccaggtcataatcct

SEQ ID NO: 107827 - DNA, 503 bp, Zea Mays
ttctgatctgtttttaaaaattaaagactgcaaagttaactaaaaacatataaatgccattatgtgcaaacaactaactgctactcatatgttgtcaatttacattgcatcggtttgtaaagtatttgttacagacgtgagcccttgacatgtgagtttgattctactatactagtaactggcgcgcgccagcgcgcgtttttaattgtagttaagttaaatttaattgtatttgtcaataatcataattgcttagatgagtgatagaagttgattcagtagatacttacatgtaaaatgatataaaatgttctttctgcataaagacggagaggaactttaaaggcaattttgctaggtgttgcatcagtttgaggcacgtcattttgtaggacatatatggtctataatcatattggtacacataaagatgtaacaaatatagaggtatccgcatgacggacatgtggtgttacttgttaaaacaatatgttatgtatccc

SEQ ID NO: 107828 - DNA, 289 bp, Zea Mays
atccacagcctagctgccaccactctttctctagagtgggatgtccaagccgtcaccgttgacctctttcttgttccacacgttgtgctagtacactggtgtcatagtatttcatctctcacatgtgtggatatcatggatgctatgtggttgttgctgtggtggcaatcgataatgaatataaagagcgcgtgtgaatatgtcgctgctattgatacgtgaggatgtatcatgtgtagtgctggcaatttgggtcggcctatttgggctagcacgagcacaactcaaa

SEQ ID NO: 107829 - DNA, 452 bp, Zea Mays
cggtgctcgtctggcttgggactggaggttgactctgttgccccgaaccctactgatgatgcggcggatgctgatctttaagatgacgtggagagttggggtcatgtgagggccagtagatatgttacagaagaggatgaggatgatggtgatgaagaggatgtgccttccctggttcgcagggatcgtcgtagtaaggctagcaatgatattctagaccttgctctctcacggttggttagcctctagggaatgacaatgtctgctattgatagcatgctggataaggttgttcctgaggaccttttgctcgagcttcgtgaagttgggggcatcgacgtccatgtagagtgcccggacggtgtgcccctgttggtctcctggctgggcgacaggcaaccccaccagcttgccatgtgtctccagccccgagggtgctttagcccccaagg

SEQ ID NO: 107830 - DNA, 533 bp, Zea Mays
tgttgaacctcagcattagccgtctccaaagctatgcgagtcgctcccaaatccctcagaaggatgtccactgtccgcctcgaggggatcggcgaggtgaacggatgtgacaagaagtcgtgacacatttgtgcctcggaagaggcgatcgccaccctaaggagcaaagcgaggattaacaagaagagggacaagaggaaaccccgagataaggtagtctggtcataccatttcctcaaataatccctcctgggagatctgctccgatccatgggcgaaaggagatgccggctaataaggagatccccggacaaggctgctcgcactccccctctctttcttttaaagagggagggtactcagaaaagctcacacagaaaggggaagcgggagagactcaagggccctacaatacaaaaaaaccagggaacaaagttttctttattaatttagggaggtactatcgaggtgcagtacattgcgatcaacgcgcgtcacgcacaatgtcatgagctgacaccctaatcacgaca

SEQ ID NO: 107831 - DNA, 435 bp, Zea Mays
catacatgctgatcacactcttccagcttatctcctagctaatagtgaatagacttcgcttatttcgaggaaacccggcacaatcgttctgagctatctccggcgttcaaggatgtcggggcacgggaaaagcgaacaacttcaacaggatcacgcccaagccacgaataattcggacgtgagcccatcgcctttctgggtcgacccatttccaccattatctttacctggcccacggcgcggcgtccttgtggggcaactagcatgtggccccaagcagagttttcgccttctagtggaaccgggggatatctgtccccgacagtctgtccctgtgtcgcggaccatctgcgcctccacagagagcaccgcaaggtggttcgttccagtgtttgacacccagatcgacgctaatagaatcggaacaagtgagag

SEQ ID NO: 107832 - DNA, 284 bp, Zea Mays
tccaaagcttgtattgcaattgtggtctgttgatggggtggaacgagtcttggttctggaaggatggttaattcggtggtccactgggtatgcatgtggttcctattgcaactttgcaaggcaggggattaattaaacgacatgccgtgtgtagtaagttttatttgaagggtttcctcagggctatgtgcttgttcacatattgataatctttgtgacagattattatgtccatggctctattttgcgacaagatttagtttcaattcaaattttgagtactt

SEQ ID NO: 107833 - DNA, 620 bp, Zea Mays
gtgaagttagactcaattgggttgcctttgttcttgagttctacctagcattggaatggacacattattaaccacagtgtatgatgtgtggattgtgcttgctacttcttgtggtgctctttctagaggtttaaccattgtcacatctctcatggtattgttttcatgtaagcactagatgtctgcatgatgttgaagttgagggacacgtcataaattaaataaacttggacaatgttgatacatggtctatacatgcagatttagggaacattcatttcccagaaattaacaatcatgtgcctgaaatcccgttttcatattctgctagcgatcagtgatcacaaacctagatagggtatggtttcatcaggtgttaatgaacccaatacggttggtaggaaaacatcctagatttagaaactaattatctttttcctaagaatttgtttcctatagatacttatagctgcaatcttgaaatgacatcttcaaagtagttctatagtctcatgaagcacatatgtttttatcgttccatttgtttatgccacatttcagagataggccaatgaaatgcatttgttgggggacaaaagaacaactaaaccagatagttg

SEQ ID NO: 107834 - DNA, 464 bp, Zea Mays
gtgatgtggaaacacacaccactatcttcacttcacatgcactggcactgcactccccatgcatgtttttggccgtccgaaatttgtggtacttacactgaagttcagaaaaacagtgtgtcatgcttttagcagccagacagcttgttggaggggaggggagtagaaaccgtatccgaattaaagccgcaaagaacaagtaatcagaattcatccaccggtaaaacaaaagttttactgcatgctttgaattgtctaaagcaggggtgcatcaaccttcagcatttagcggccggataaacttctttaattagtcacgtgattagcatcttcttctagaccaaaaactaaccagctggttgttgtgtgtgccggtgctagctgaaagcattgctggaattcggtcgtagcaggagcgagtacactagctacaccgctaaatgcttggttaacatcctttttcg

SEQ ID NO: 107835 - DNA, 539 bp, Zea Mays
ctcaaggcaaacaagacaagcaagcaaagcacctcatacaacgcaaagggcagcaagcaaccatcaacaagtcaacccaagaaagagaaggaaatccaacaaaacattgattcaacatcatcctcaagtgaagatgaggatgaaggggctgatttcaaggaaatagatgacatggcacttttcatcaagaagtatcataaggggctaaagagaaatggatacaaagtagtcccgaggaggtttccaaacaagaaaaagaggacttgctataattgtggcagcacggagcacttcattgcaaagtgtccttatgagaagaaagatagcaactacaagaaggacaacaacaaagagagcaggtatgagcataagaagaggtacaagaccaagggagaggcacatattgggcatgagtgggactcaactaaggagtaaagtgaagagggtgtgaagattgcgaccgtggccattcaaaagccatcctctacaccaaggctcttcaacaacatgtcagatgatgatgaccacctctcccctca

SEQ ID NO: 107836 - DNA, 342 bp, Zea Mays
gcagtactcagccataaagaatcttctctttggataagtccatcctgtgatgtcaattggatagtctggatgagcatgtgtaacatcctctatatccatagagatgttgcccccagctgaggattgggcctcagagtctgtagctggattataatctgcatcatctacacgatggcgctttgacttaaaacaacctacaagcttcttcttaagaccacccagatcactgcaatttatatgaggaatatccactggttaatagttgatgacgccacaacatagagaaagaaagtgtaactttctgtcagggtccggactgtccacgctagggggccggactgt

SEQ ID NO: 107837 - DNA, 371 bp, Zea Mays
ctggatcatgggaagaaaggcttacactttgggttttgaaagccccatggggatcccaaggtaggtgaagggcatggcccccagctggcattgaaatgtcctagataggatttccattttctcatccgatacattgatggggtacatgttggatttgtggtagtttaccttgagcccggtagcacccgcaaaggagttcaagatggcttccaggaagaagagctgttttaggcatgcctccattaccatgatggtgtcatctgcatattggataattagaaaatcttgccctccaccattctaagtggcagctttaggagtcccatgtccttggctttgtttgtaattgattgcaggagatctgctgcaag

SEQ ID NO: 107838 - DNA, 361 bp, Zea Mays
gatcacgcaaagaccggtgccttactttgaccgagaccaaattcaagacctaaggatcgtttctccccacttaatttcacaaacggtgatctaaccggctctgtccacggtgacagcgggtatcgcggatattcacacgcgttctcggcaatcctagggactccagcccaattgggttggtcggggagtatcagggcacacaagaatgttgaaacaagataacagggggcatgaacagacctagaggtcgctgaccacggtgaggtcaatccgggcggtgttcttgagtgagttgggggaaatgcgaaattggagctctctagaggaggatctgaggtacgggtgggtgcgctagctgctt

SEQ ID NO: 107839 - DNA, 405 bp, Zea Mays
tgactttttagggctggatgttggttttgggagcctgttcggccgatggcattcgttggggatttttgctgctttattacaaggctccaccttattaaaaacttcgccccctttgcgaggaaaagagtgcaggcccgaatgtcgatgtttgaatattacatgggcatcccgaggcccattcaagcgaagtcgtttttacacatagaaccttcgtaagttttatacactctagctatgatcgagatgcatgcctgtttggctagttagcctataggtgtacggtgaagtcttctttgagacgatgtagggcccttcccatttttgttcgagctttcctcacgcctgtgttctgggtgttcggataaggaccaaattgccttcgtcaaactctttggttttgactga

SEQ ID NO: 107840 - DNA, 836 bp, Zea Mays
tctatttacagccataatgtagaaagtgcattgactgaatattatattcttaacaaaaatctgaaatggaaattactgacagatacgtctcctgatgccagtgcaaatgctgcttttgatttttatgattagatagattatatgcatggtggtgtaagcttatttattaaattggatgtatgtccctggctgttttgttaaatctgtgataggcttaggctgatcatatacttctaaatttatcacctgttttgaatgcattccaagcaaaatagttgatgtccctggatcctgtacctattggtgtagttttgttttaattgatttggtgctttcagtctttgcttcgccaatgtttctgtaattgattgccctgggaagtgctgtagtaaaagcacgactccaattccaaattacagagaattccagacaagagggtctgccctggtctgatctataaatcgctatgttcttatcttcagtaatcatctattttcttaggtgcctcatattattgagaactcatggtcccagttcttttggcattaatagattgatgagttattttattggatgacgtcaaatttcctttgcctcactgtccaggttaaatggcctctgattattgacttgaaaactggcatgtgtgtgttttttcattttgtttctttataatctgcaccaactaacctgctttgaatagtttgtttgtgattctactgtttacgtgagtttgactggttagagaatttaaatgtatcaaaaaaatagttcaaccctgcattatacaaaattatgtggaaccataaaaggatttggtcgtgttgcatgatttg

SEQ ID NO: 107841 - DNA, 307 bp, Zea Mays
gtaattggggaaacgagcgattctcggtcccaggtgaataattcggggcaaagtttggtgcaactgatgcgtgattaccctacggagccgcggggacactcaatttatagtgagggtaagcggtggcgtctaattttgcgcagagagaccggcggccgagacgaagggtgagtcatcggcgcggtctatcgtggcgcgccccggggtgattcctccggcgaggagctaaccttcacaggatgtccatggcgacgtggtaagacgctcggatacgtggcaatcgaccggcagtcagccaacgccggtg

SEQ ID NO: 107842 - DNA, 283 bp, Zea Mays
tctgaaatgatggaaatgtgtgagcaaccagtgcatactgtaggggcccattgagtccttctgtgaagtgctcttgcttcctttcatcatctgccacctcatcaggagcatatcttgatagctggatgaatttgtcacggtacttgttgacagacttgttgccttgcttcaatgacagaaactccttcttgatcttcatcaattcagtaggaatctggtagtttccgaactgagttgtgaattccgcccaagtaatagtatcagcagcatcatgggcagcaac

SEQ ID NO: 107843 - DNA, 485 bp, Zea Mays
aacgagatgctacagttctcacccaatgtcctgtcatgcacttgtgttccctttgtctctgagtgtatgggccaacctaaccacgtgtcaccaggtccaacatttggcgcccaccgttttgctacgaagtccaatcccacgatgcctcccaggaagaccacttgtgtcggttcactagcggatgatgacatagcgagggctgcccttgcctccaaaaagggcaaggttgccttcactgacgatgtgccaccagttgatccaagagccactaccgagccacaagacgcaggtcaagccgcaaaataaaaacagctagccaccaccactaaactcgacgatgaagtccacacctctagcttgaacaccccaccaaatgatcccccaatccaaaaagccaaccctaccaggccacaatttggccagacctaacaaaaacatgtcatatgtcccccagacttctacatagcgacaatccaccagcacca

SEQ ID NO: 107844 - DNA, 461 bp, Zea Mays
atcattgtgagatggagtgaaataaggtgagagagattgctgatatggagagaaagtggaatatagagggtaaaatttagggggcatcgttacacatagtcttaaaagtgctgacacacggaaagatagtgagtctgtcaggttgattccgagtcctgacacatgcaccactgcactcggcaccggcgagcaaaatcccatccctatcccatgcccgagtgggagctggtgggcccttgggcctgtgtgagttgggctagactacgttatttatggtaaattccgagatgtaattctagtaaattctgactaaaatcgataaccaaatgaaacagctagtaaaagaccacatcgattactgccggggcggtaattagggacacccggattatccccctaacgaacgcactcagagaaataaggaccaaactcccgaagggtaacaaccgagccacctacaa

SEQ ID NO: 107845 - DNA, 555 bp, Zea Mays
aaaaatataagcgcaaagtcaattcagatcagttcatgaccatacattgcataaatgtatcaacaaagcagcataacacaatattgtaaattgcataaacttgtgagactaacttgatcaaaaaaatctgctcatatgcgacatccaattaatgtataacctggttatttcgtgtgagctggcccaatctgaacagcaataggttttatggcataatgtattgatgtatggatcatacttctgtcaacaaaccagcataacacaatattgtaaattgcataaacttgtgagactaacttgatcaaaaaaaatctgctcatatgcgacatccaattaatgtataacctggttatttcgtgtgagctggcccaatttgaacagcaataggttttatggcataatgtattgatgtatggatcatacttctgtcaacaaatcagcataaacaaagtattgtaaactgcataaaggtgtgatagattgcataatatacatttgtgtctccaattaactataaatttataatgaattggtatttgataaatcaagcaattg

SEQ ID NO: 107846 - DNA, 375 bp, Zea Mays
tcttcttcaagggatagtttggtatattatgtttttccacaaatgactttgttacaaaggaatgagatgctctagaatcaaataaaactgatgcaggtatggagttaataagaaacataccatacaccacgttggcatcctcaggaactgattctgctgtcacatggttgactcttcctctactctggttctgcggagtcttgttttgtgcagatcaacgagcaggggtgttctggtcattcctctggttgttgctcttctggggtgtctgtggcttacggttggggcggttgttgacatagtcaccaagttcgccacacttgaaacagccattcggttgaactagggtagttgcattgttattcttggccggtg

SEQ ID NO: 107847 - DNA, 703 bp, Zea Mays
aaaaggaccacccttgtgctcaattggttaagactaaaaatagtgaagtagggctgactttagggctctgtagatccaaaaatattgagaatttgcctagggtcaacacatcaaacctatagagctatgaaaggagaacaattcttattaagtaaccaagcactgatgctgtgtaaaaattagagaaaagcaagcccaaagttgggttgtcagtcagccaaaaacctgaattttgatattcagtgacatcggatgaactttgggagtcttttcgaagatgatccagtaagtgtttgagcatgtttaccctagcaaaattgtagctggtttattaggctatcactttgatacagagagttgattcagtccttatacaaaatctggagcaaattggtaccaaatatgctctgtcaggccaactgaataagctgcgccacggtatagtgaacgggatggattaggttcagagaaccttgccaccggcgatctgtgcgcctggattcgcgccggtgttgcaattcatgcctgaccgaactcagataagcactcctcggtatgaagcatcacgctggagataaactccgaccgctattctcactgtcgtcgtgtctcgccgtagttagtcacgctggtatcaccgtcgttcgccgttatccggctgggctacgtgcctcgacgctttaccccgtcgtggtgagtcact

SEQ ID NO: 107848 - DNA, 517 bp, Zea Mays
gttcccaagaatagttccctcaccaaagacatattgaccaacacaacagtggaagttaatgtagtttcaaactctaccagaccataataaaacccgatgataaaggctgcacacgaattccactgcatgagcactcatgcaccagatcacatgttgagtatccccagaaatacatggaacctgcgatatatgctgaattgctgacatgatctggagaccttgcaaccaaaccacaggcacgacagcaggatggagcgcatctcttgcatctacacgccaagccaagcgcgattgaggataaccagcggcgcgtagaggtcacatcagtctgtcaacgatcacacggactaaaacacaaggtcccaaaacacaaaccaaacgtcaacagcactaacctagtcagctgcgagcgcccacaaatctctccatccgttgaacacaacacgagcgcagaaaccggatcagaaattctcgacgtcctctgttgagcacagagaatccggcagaccccaaaaat

SEQ ID NO: 107849 - DNA, 1094 bp, Zea Mays
tatgaattaaaccagttctaacatttatttttacattataaatcattttctaaatggttttataaatgttattcactaactggactccgcactaatttcagagaagcacaggggcctcggagtaatagtttctaagacacagagcgccagcagcaggactgcgggttgtttatcagtaagcctagggactctttagcgatttttgccagaccgaaggggtacggatgagctagaggcattcgatcagatttcaacgtcccagattagaacctatctataccgaaccggtaccaaatctcggccactggatcagaatcagacggatatgatttgatataacccagcgctatctaggttccgatccataccgtccatcatgaaggcaacggccgcgagctcgtcttcttcccctcggtgacccagcctggcggcgctgtatagagcctcggcagagggcgtaccggtgaccctcactggcgatttcgcgcgctaaactccgattacccaggtgctaaacgaatagagggactgcaaaatacaaaggaagggtacacaccggtgatcattcagcagagcagcacgacgacgttggggtacgcggatcggcaacactgcaagtccggcgacaaatcctggctatggtcaaccagattccgacaagatcaagcgtcgcgctcctccccacaaatcaccggagtcttcccccacgatcgcgcacgagattaccgtatatcccgtggtctctctctcttcgattcctctctctcagctcgacgcagatgcgtacggcggtggctacgactaggcggtcaggagtttataggagcccaaaggcatccggtcggtaggattcccaggtgagccggcgctacggcatctctactcgatggcgaggcggctgtcgagctcaagttttatagccgcaaatacgtgggtgaaacggctgaggcgtatatcacggcttctgttgtaacagacaacaagatcaaagggtttaccgttcttaccgcggactctacatcgactgctgaggcttcacggtacatgcaggtatggttctggaacccgaacactggccagggcgatggagtcgc

SEQ ID NO: 107850 - DNA, 654 bp, Zea Mays
gcgatttgaggcgcttactgatgggagaaggtaaagaaggcaaaggtggcatcatgggtggggtgcaatggcggcgggtagcgagtcggaggccaacaggacgccctactcgatgtcttctatgatggtgcgaaagaatctgagtgagggagacagagacgttaaaagagagggaaagttggggttaatatatgacagcattagcgaggaggagaaggaagcactcatattggttgcatggttggttgtgcatgcaggaggtaatgcttatcttatctggttgttaggcgagacgtgagtgacaaaaacatatctacgcgtgagtgacgcatgacacatgacacatgaaactcatacattaaaggagtagagaaaatataggtttgctggtttgagaaagtctaaactcataccacatgttgcaagacctttaaagattcttgaaaagatcaattataatgcatataaactttagttgccccagattttgggattagtctcaccttttttttagatttgaagccatatttagatgaggaatatgagtttgagtcgagaatgattccacttcaaaaggaagaggatgaggaggacatcactttcttggatacattacaagatccagttacaagagcatgagcacgtcgattgaat

SEQ ID NO: 107851 - DNA, 479 bp, Zea Mays
gttttaacacatgctgatctgcaccgcacagtcttcagtctacacacatacaataggaagtgtgatgcctactgctcttgtattcctgttatgcaccaggacaagtgtttttgggcaattatttggtctttttatgttggtgtatgcaggttcttaaaggcaagcccatacaataggaagtgtgatgcctacagcttcgacatatgcttaatgcttgtgggaaatctacttctgtgacatgtcatatccagacctcatgcaccgttgttcatcaggtctgttttcagtttctggattcgctgctgatggtcgttcacacactgaccatatactgggcagaacatatcaatggtacgttgtgtgcgcatgcatatgcttgttacaacatgttggaggaactctagaaaaagctggtgaaattctctgcatggacaatggcttgagtattgcacaatggttctaattctgcatagggggtg

SEQ ID NO: 107852 - DNA, 547 bp, Zea Mays
cgagaagagggtagtgtcaggcgtcgtgatgatgagaagtagggtgagggtgtcgcgagggtttggggtctcgctaagttcttgctggccgaaatgatgccgtacgtatctgtcgaatgtctatccttgaacgactggggcaccgagaagagggcagtgtcgggcgtcatgatgatgagaagtagggtgagggtgtcgcgagggtttggggtctcgctaagttcttgctggccgaaatgatgccgtacgtatctgtcgaatgtctatccttgaatgactggggcaccgagaagagggcagtgtcgggcgtcatgatgatgagaagtagggtgagggtgtcgcgagggtttggggtcccgctaagttcttgctggtcgaaatgatgtcgtacgtatctgtcgaatgtctatccttgaacgactggggcacggagaagagggccgtgtcaggcgtcgtgatgatgagaagtagggtgagggtgtcgcgagggtttggggtcggacgacgtcgcgtgtcggaaaggaggtagtggtgggcgatatcagga

SEQ ID NO: 107853 - DNA, 414 bp, Zea Mays
gaggggtgcagctctggttcagtagactgtagatatggttcagtgtttttctccagatttggagctttctggtgaatgattggtgagattctggttcatagtatctttagcaaaaagttagggggttagtgggtgaacaaagttcattaaagatggttcccctgttgttgtttaattctaggagaaaaaagtggtgaacttggtataggagtcgacctgaacatgttcagacgtgagcaaaaatatctgcaaggaaatatccctctccactaccgtttctactggtttccagggggtagtaaatggatgaggccagggcttggacagggcgggatcacctgaggttggctttgctgcaccaaggataagaatggagaggagggttcaagccagttactgtctgtctatctgttg

SEQ ID NO: 107854 - DNA, 659 bp, Zea Mays
tgcttttgggtaggacgatgtcgtagattgtaactcgatggttcgtgccaggggcacgaggaagagagagtcatgccattttctgtaggtttgagccgcttgaggagcgtaataccctacttcctagggtggttttgtatgtgtggggtgtttacaagtggtgtctcccgagtggagaggtgctaatgagatgaaattgatggggatccccctaggcattttatacatcaccgtagggcactccctgcgcacatggtgatcacactattccagcctatctcctagctaatagcgaacagacttcgcttatctcgagaaaaacctagcacctccgtccgagctatccccgacgtttgaggacatcggacgtgggaaaagagaacagcttcaacaggatcgcgcctaagccgcgaataatacggacgcgagcccatcgccttcctgggtcggtccatttccaccgttgtctttgcctggcccacgatgtagcgaccttgcagggtgactggcttgtggccccaagcaaggttttcgccttctagcagacccggggatatctgtcccccacatccacccccagatcgatccctgaccgtggatctatcaaccaacgctcaggattagaccttgatacacgccgaaccggtaagctttcacag

SEQ ID NO: 107855 - DNA, 1010 bp, Zea Mays
ttgtcacaaagaattggctgaccagtccaagaattttgaaagacagacataaaatcttcaaattgcagccagaaattttcaaacctaaaaagcttaggcttggggacctttgacttgaaagaaatcagacaaggaacatggtcggagatgtccctaggcagcgtagttgcgtgagtgtcggggtagaaaactgaccattcttgcgagatgaaaaaccaatcgagtctctgaagaaggggctctctttgcctattcgaccaagtaaaggacagaccatggagaggaatttccatcagatcaagctggctaattgactcattaaatttcaacatcaggctaaggccccccagcgatattcctgttttcgggcctacgagtaagattaaattccccaacaatcagccaaagtttttccgagggcatatttatattggagaaccaatttaggaattcaattttcccatgcggagaacagggcgcgtaaatattcgtgacaatccaggattcattcgacgaattagcagaaaattcaaccgaaagagcataatcattctggtaaataacactgcccaccaacttcgagctattccaaacaataatgaaaccacccgaatttcccaccaaggggacaaaagcgagtgagtcaaaggagttgggacaaaactttctgagatcagccctgtcgaaaaattccttcttggtttcctgcaagcagataatatcacatctggattccctaatcgcacaatgaataccattcactttaaccactgaattgatcccacagacattaaagcttaaaacagaccattcagaaaaaataactgcgttgtgactattcatcgggggcataatcaggtttgtcgacgaaaggaaacccaaacccaattactgggtgggcaaacaagtatctgttagaacagggcacaacgaaataaccagaaaccacaaagtttgacaccgcaacaacaaaacaaatacgccggggcagaaacagccaaaaagcccga

SEQ ID NO: 107856 - DNA, 492 bp, Zea Mays
tgttcggttgattaggtgaagtcaagctcaatgggctgagcagatgacgatcacaaacacgtgtgggtgctaaaacacggacaaaaagagtgagggcggacctggaagcagctagccatgatgaagtggttcaaggcggcgcagtcgaccaaattgggggaagaaggaaattctccggctatggtggctaattgaaggcgggaatgggtgctttggcttcgtgataacatggcgcaacaaacctggccatcaatttataggagcgctaagcggtggtgtcaaattttgcaaggggagaccggcgaccgaaaggagaggtgagtcaccggcgtaaactatcgtggcgctccccggggtaatgcctccggtgacgaactgacctcctacgaatatctactgtgacatggtagatcttctaagcacgtcgcgcggctacaatcaccggcgaactccgacgaggacaccattgtccactgcaaggcaagtgtcacg

SEQ ID NO: 107857 - DNA, 471 bp, Zea Mays
gctttacgcccatagtcttccgagcagcatgatgaactctatatctctggtagcctttcgccaagcgacgtgtcatcctcgatagccttcttggcctattcaatttttgtgagcccttttcccttgtcctctaccatagcagtcttcgtagaactagttttctcttcagccactataatcgtcgaaggtgttactgctagagacactggttaagccttcgggctctttggtttcgtcacatttgcagtagacagtgtagcatccttcgtcgcaaggttgttacagcgatatccttatccttggtgtcgttgtcttcatcatcatcaaaaaaatgagcacatcactgaacctatgcgttcatcatcttcttcttcgctgtctctgaagtggccccttgagcctttggagcaatggcctcttcagtctttgtctcctaggtctctgaagcacagcttcctgggtctctaaagt

SEQ ID NO: 107858 - DNA, 457 bp, Zea Mays
acacaacacttcgcagctcatcaagaaagtggcatgaaaggacatagaatgatcatttggtgtgctacaatcaaggtgggcaatagtcatgggtccgacatatggttggtcacgtttatagattactaacataatgaccacgtgcattctaatgcataacatgatagttgaagacgaaacatagatggtagcaaaccaaaactttgacaaccttagccttcttgttgacaaaaaccaaggaaacacacatgaacatgattcgttcatgtgagtgcactaccgtctacacgataggaacacttacttccaacttcaacatgacctcattgagcacattggctcaacttgctttaggggcatcatactagactagttgcccatttgcattacacaacattctaatagtgatcaagatagtagtgttttcatcaatgtggtagcagcaatcaagatctag

SEQ ID NO: 107859 - DNA, 1601 bp, Zea Mays
gtgaaatctgcttttctaaatggacatcttagtgaagatgtttatgtctaacagccaccaggttttgttgatcctaagtcggggaggaaagtattgaaactaaagaagtcactatatggcctgaaacaggccccaagagcatggaatgcaaggcttgacaaagaattgcagaagattggtttcaccaggagcgttgaagagcatgttgtttacaaaaaaggaacaggtgcaagattgcggctggtgggtgtctatgtggatgatcttctcatatgtggacccgacaacagggtcttgactgatttcaagcaacaaatgaagaagagtttcaacatgagtgacctgggattattgagttactaccttggtatagaagtgagacaggagtcaggggaaataaccatcttccaaagtgcttatgcagagaagataatagatatttgtgggatgaagggctgcaacccggtggacacaccaatggaacatcagacaaagctattgccattggaagcctgaacaaattctggatgccaccagatacagaagtattgtgggcagcttaaggtatttggtaaataccaaaccagatctagccttttcagttagaataattagcaggtttatggaaacaccaaatgttgaacattggtctgctgtcaagagggttgtcagatattttgcaagaacaagtcagcttggctgtaagtactcaaaaggtttagattcagaactgcttgggtactctgacagcgaccatgctggtgatctcgaaagaggaagagaactagtggagtaatatttttcctgggaagaaacataatcacctggacatctcaaaaacaaagagtggtctctctatcatcctgtgaatcagagtacattgctgctgctacagctgcttgtcagtgggtgtggctaagtagaccgttgagaaatctaacaagcaccaaggcaaagaagttcaaactccttatcgataacaggtctgcacaagagctaagaaaaaaccctgtgtaccatgaaagaagcaaacatattgatactagatatcactacatcagagaatgtgttggcaatggagtggtggatgtgaatcatgtgagtaccgatgaacagctcgccgacatccttaccaagccacttgggaggattagcttcactgaaatgagaagacagctggggttcatcagagttcaaggttgacaagattaggggtgattgttgcataagcatcctgtaataatcatgtcaagtactttagcctgcatatatgtgcattagcttgcatatatgtgcattagctgttggtttagtttgctagttttccatgtatttagcgtagattcgcgggtgctgttgaagactgctcaacgcacgccgtgaccacgtctttagcctccccgtcatggcgctcgtcgtgcatgtcgcacacgatgacaggaaaataggcatgtcgtgcaacagctactatggcggggaatctgcatggagtcaatatatttgtgcaatggaaaccagaaaatgcgctgcgccagttagcagacaaaagaccaattctccactaacctctatttcttctcttctctggtggtgaccacgcg

SEQ ID NO: 107860 - DNA, 306 bp, Zea Mays
agtccatgaacacactgttcatcaagtacatgaagtaagctggcgcattcgtcaaaccgaatgacatgaccatgaactcatacagtccatacttcatgatgaatgttgtcttcggtatatctgaaggtcggattctgagctggtggtagcctgacctcagatctatcttcgagaacacactggctcctctcaactgatcgaataaatcttcaattctaggcagggggtacttgttcttgatagtaacttcattcaaagctcgataatcgatgcacatcctcttcgtgccatccttcttctccacaa

SEQ ID NO: 107861 - DNA, 530 bp, Zea Mays
atgggactctggcaaacttcaactggtcggctccaagagaaataggaagctagaacatgaagcaatcggggagttactgacccgaggagtgctagccacagaggagttcttcacggcagcgcgaagagcagggcaaaatggttttgtggactatgtgagttcttctggtgaaattgagtcgattgctcaagtgcttgtgtgcgtgatgtggtgaagaagcaggatccgagctcaatttatagatcgatggccagaattggatgagaatcgtggagctgtaaccgcgctggcgagctgacccgcgcgggcagagccatggcgatggttcagtgaccgcggattaaccgggcagtgccaccgcaacattttaacgccacgtcgcggatgatctttaccgtggccgcaaacccatccccaaccgtggtggcgttcttatcgccggtgagatctttctgaagttcgatgaacagtgcccaatttcagttaaaaatcgcctgacagcccatctttggatcatattatctccaaat

SEQ ID NO: 107862 - DNA, 298 bp, Zea Mays
tctctcactcacactgcatgcaagcatgcaacctactctcccactcacactacatgcaagcatgcaactatgcaagctacggttgtccccctcatccactcatgctgcatgcaagcatgcaactagcctccgaagctaggcctcgtggctcccttccctcacgctgcatgggttcttgtcgaggcaaagttttgcatgtgttcttaattcaaatgaaaatttgaagaagctaagtgtagctcggttggtcgacagtatgcatgtacgcccacaaccgatccctcaagtccaagtcatt

SEQ ID NO: 107863 - DNA, 548 bp, Zea Mays
aaaatattgcaaccaacatgttggtagcttacttcgaatccttatccagggatcttcgtatacagatatatcaaagtcacctcattatctatttcaatagtagttgattagctggctgtttaacagttggtggttgttggcaagttcggtactggcttgcggtctaggcgggcatcccaaactgttgctttgtaactcgttgagatgaaatgtatagttaattcagatcggtgttttctttttgtccatatagatcagatgaggtcaaggaattctactggtaagattatgttggtgtgtgcatgggtcccattgccatctgcctcgtgtcccatgcctgctggatgtttttttgtacttatcttaggtagatatttcttcagaaatagacctggtgctgactgctgaccggttgaaagctatagatgcactgtaggcgtaggaagcttccgacagatgctgccgttttgtatcattagctatttttcaatttcattgaagcaagtagctgttttgggtgctgattgcttccacaattttatttccac

SEQ ID NO: 107864 - DNA, 536 bp, Zea Mays
cactgcgacaccggaaaaagatgaggtggtagttttcaggagcttctttagagcaggattgaggtttcctctgaacgaaatgatttaagaagttttggaaaacttcgagatctatcttcatcagctgactcctaacgctatcgttaggctcagcgtcttcatttgggctctccgaagccaaggtacagacccgaatgccgaagccttctgccgagtacacgaacttcattatcagacgaaggccagagaagatggtcttcatgagaactttggttgttacaatttcgcctaccgtaaagacttgaagactccggtagttagctactgcaccaagtggccaactggttggaaaaatgagtggttttatgtgaaggccgatgaaaagaagagggagaagctcaagacgctagtactgagccatctgagcttaagcttcgggctgactaggctgttgtgccgtatagagccggggtcaccatgccaacaagctgtggcagaattccgggtggtggtcgagcagatcggcacaagagatc

SEQ ID NO: 107865 - DNA, 360 bp, Zea Mays
gccggaaaacctactcatcacgttcacacgcacaaaaaaaaaagaaagaaaagaagcgaacgatattcacgatcatcaacggatagtcaacttacaccagcgtcatccacagctaccatcaggcaccccgcccttgtctttgtctttctgaaggcacgccgcccttctcaccaaatctctccagtccagctccagcacacggagattgacggaaactctgccatttgctaacgtatcacgttttggcatgcgttttccacgagacagggggagaccttctcaatctcagctagccaaccaccacgcaaacggttatttgatgggctgactccacatatatggacgtgctaccagagaact

SEQ ID NO: 107866 - DNA, 1015 bp, Zea Mays
tgaatattgactatcagtgagttttgaggaactttggacttgattcatgctaaaaggggtaagcaaatgggcaagatccctatagcagaattgtagctggtatgtagggctacaaggttgctatagatggattggcaagttcttgcacaaaaatccgagatctaggcactgtaatttggtctgtcaggcgctctaaacaagtgctcatagtacagtaactgaaaaagatcctgggtttcgatcccctcgccaccgacgagccatgcgctcggattcgtgcccaccatggtgattcgtgcccagcgcaaatggataacgaagaagggtaaaaatcttggcgctcagattagctcggacttgctgaccgtcgtgccgccgtacccacttggaccgcgactggtcggaatcatcattgccggcgttagccactcaacggtcgtgcgccacatgccttggtgtcttaccacgtcgtagtatctcgtgttatgcatatccggtgatcgtcggtgagctcgccacggtgaaagcctccaattgcttgcgccagtgcacccccttctctccggctgccgctcgtctttccccaaattagccgccaccgctcatgaatcctataaattgagcgtaccctcagctccgcaaggtattcaagcactcagcacacccactcgtgtcccaaatcgttcaccagagaaccccaatttgggattttccccaaatcggtccaaaacaccgcgagaagtgatctcgccgtggccagcgtgctataggtctgttcatgctctctgctctcccgtttcagtgccgttatggtctccagatgctcctcgacccattcaattaagctagaccgcgctagatcatcaggaacacctctgtccatccgtagttcgcgctgtcaccgtgggcagggtgatttagagctcaactctagcaattaagtgaggggaaatggtcgtgtagggttgaattcggtgtccagcaaaggggagagctagtcgttgcgtattccggc

SEQ ID NO: 107867 - DNA, 411 bp, Zea Mays
atggtgctcctcccacctggtcccttagcgaacacacaggaacaactagacattcatccctatccttctcgttgtaggaggcagagatggggcaaccgtaaccgtgccacccgtgacaccccatgccctgatgaagctcatgggctggctgatgacgcagactcccttgcgaggcatcatcagcgaaacgcgcatccctagcaccaactttattggaacctcctcccacggtgcggagagcttcggttccaccagcccctcacaccatgggtaaggacgagctagccttgccggacctcccacctatgggttgggaggagccggccactccatggcaggacatgtcacttctatcaagggctgctggagaaccgtcagtgttcaaccctatcccatttcagccatgcttcg

SEQ ID NO: 107868 - DNA, 690 bp, Zea Mays
gaaagagctctgactctgctgactgaaccgagatggggtgggtctagctggtctactgaagctgggtcccttgggtggaaatccaaaggatcgagttttctggtgccgatcttgctgctgagcccggaggacttgaaattttctcttgagatggcctttttttcctcctttgccctttccacttgcatggccttgttggagaggtgagagaaactgaggaagtcttggctagccaggatggttttgagttctggactgagtcccttcaggaagcgggccatcttcttgacttcggtattgacgtcatctggcgcgtagcgggctaactccgtgaacttgtgcacatattcactgacagatcttctgtcttgagtcagttcccggaactcgtcttccttgagctgaatgagcccttggggcacatggtgctcccggaaagccgtttcaaattccgcccaggtagcatctctgatggtgacgttgaaggtatcccaccaggctaaggccatcccggaaagttgatgggcagctagttgaacacgctgattttctggacatccgatggcttccagctttcttttaatcgtgcgcatccaatcgtctgcatcgagggggttgctagatccgacaaacgtgggaggcttgagcctcaggaaatcccccattctgtcttgcggtcttccaccattc

SEQ ID NO: 107869 - DNA, 310 bp, Zea Mays
tctgtaattatacatgcatcatgctaagcactatactaataacattttccccctttagaaaagatgccgccacgcaccaggctaacggcacgcaagtctacgggaccgattggggtgcctcggcatcaattggcccctcgtcatgaaagcagcagcagtggaagtaatgaccccataggagaccttgaagcccgggtgagtcgacttcaaacagcgctgcaacacaggaccgatgcttgggtcgccgacggagatagaatcaatgaactgagaagggacatccgacatctgcaggatcagctcgctgatc

SEQ ID NO: 107870 - DNA, 467 bp, Zea Mays
gtggtgctcgtgttacatttcttccatgtgcctcttcatttcatggtggtgttttgtttcagcatttcaaaaaatctagccaaatatgacataaatacaatgttagtccatagaagatggaacaagtaactggagaaattggtgctgcattaaggtttatatcacaaaaggtgttggatgttgccatgctgtgaatattactttaaaaatcgagaagaatccaataattgtgtaaactagagcaggttgcggtacagttgatcatgtcgttaactacagatgttataatatacagattttttttgtcttttcatgcaataaaacaagagaaaaagtcagtgtctttgtagtccggttacaacttccaacacctcagaaggtatttagtgactgcggatcttgtttttacgatcaagggccttacttcctaattttattagaggtgacttggaattttatgaattgtc

SEQ ID NO: 107871 - DNA, 344 bp, Zea Mays
atcgacgtcttctcccctccctctccggtggctatataagccgatgctaaccacacttctcaccttgccccagctacttgtctcacctccattgccgtactctcctctgcgcagtgcatgatttggtcttctctgagttctccactgccagctgctcccatgtcattgtagctcagtccctttcaccggtcatgaacttcctggcacagcctcgctcgcactgctgctcaaggcccccatagttctcttctagtgttgttcaccgcgtacctcagtgctcgctcgcactccccacactctctcactcacccgcgcagcacctcgccagagctccgcctgaacac

SEQ ID NO: 107872 - DNA, 417 bp, Zea Mays
atgaataacttcaatggctagccaacagtagtaaaaggggtgatcaacatggaattgatagttggacacaagaccatccctacatcattttcgttaccagcagccatacgacgtacaccgtcttgctagcaagggattggatccatgctaactattgtatcccatcaacaatgcatgaatgcctgattcagtgggatggagacaaagtgtaagtagtccctcggacgactcgtgcaaaatttcactcacagatatgaacgtgtgggacgtggatggacaggagccaatatcaggaatcgacttggaaggctgcgaccatgtagaagcatcaaaaaatgggttgaggttggtcttatccactggcctcacagagtagaacaggcagcatacgtgcatgtaaaggctgatcccagcgac

SEQ ID NO: 107873 - DNA, 835 bp, Zea Mays
ctgacctctttcaccttgtcgatgttggagttttgcttccgaaagagctctgctcttggcaaatttgtcgtggggtcaccggtccgacagaggatacccatgaatctgttgtttacgttctctttattattcgcggccttgctcttcccgtttctccctttttccgcggcctccttgatttctacgaactgaacctgacccatcttaaccctatatccatcttgcaagtttccatttttgtacatctatgtgaggcctatctcgggattctcccccatttcggtctctagaagtacttgtatcattgtcggcccaggatggctgggggacagcaccaacttgttggcggcgcgagtctggagcttcgtcacaggaggaaaacagagtacctcgacatccccttcaaggatagcatcaaaagatggcgtctcgagtggttcattgtggagaaccactgcaagtccctcccccctcggtcagggaagcagccagatgtccgcacaccgagctggatagaatctccgacccctttggagataacagagactaaattactgcttgctgaaggacagaggtctgactgctgaggctgtggtcgctgatttcgttttcaagaacatctagcctttaaaggatagggcataccctgcttatttgtacagtggcatcaacgattctacccggtttacgaacaagagaatccccactgaagatctaatgagccgagtggatatgatcctgaggggcagagtttcaaatgccggtgctcctgttgcctattctgcctggaacctgccaccacataggccattttccaagtttgtgtccaaccctc

SEQ ID NO: 107874 - DNA, 761 bp, Zea Mays
tgagtccgaagtctctgagtatgatcgggacaagtgccattttcaggagtggggtgaggtgtgaacgttgaagtgttgtctttgacctgcctatagaaggccccgggctcctccttttattgtcgcaaggaggaggcccaggtgtacaggtattgctatgcaattgttgtgttcggaggaggtgtgtccgagccctgtagcagtatggccggcaggatggccctcggctttcttgtcttctttggtcaggagaaggacactcaatccctgtagcctgttcctttgactaggtagagagccaaggccgagttcaagagcatgggcatgtgtctgagcctgacctgtataggggtgtggatgagacgtttccaagtgtgtcgagtcggagtggttgaaacagtgctcagcatggcagaaatttgtgtggtaatctgttccggacatcatcctgaacggtggaatagccttcctgtcttcaacggggttcgcggaagagtaggtggcatttaatgcgcatgcttccctgttgaggcagttgaccaaggtcaagcttgggcatggcgaaaatttcttccaaggtcgaggccgagattagacgttgcatgtagtcacactctcagtggttgaaacagtggtcgaagtgggggaatagtaccctgtattcacgctctgaccattgtttttgtggtaaaagtagattagatcgttgtcatgtcgtcctttgttgactttggcacctttagtggggtaggttgtcgtac

SEQ ID NO: 107875 - DNA, 759 bp, Zea Mays
taaacggagatcaaaagaatcagaaataatctgtgccatagtctcagtggtgaacaatgcagttgcccagttgtcccgttcaaattcctgaactattccgctcattgtcgccaccagtttgctgatttcttctttgatttccttgatgtaggcaaatcaatgatacattatttagagcgtgattggttgcctgctcggcccagcctgagcgtatccagtcattcaggcccatggcggcatgctaaagaggtgcaataggctattgtttggttactttgtttcatctcatgatggcccattagagcttgcctttggttgcaaggctgtacagacacttgagcatggcaagcctcccaactagagaacagaagacaccagtcatgacaacgatgttctttctcctcactaagtatgcaccttttcctcttgttgcctgccgcagacccactagtagcacctgcagctgcctcctagctcttcggagcctccccaaacagccttgaaacatcatcaaccttcatggcatctgtttgtagtgagctctcagcaaagtaagatgtggtacccattgcaaacttgccagttgcaagaccattgccaaagatcacttccatctgcttgtaattttctatttggcatgtttaagtactcagcattcttagcccttcagggtgtgcctatattgcaagctcacaaatgttagtgtaaggctggaattaggttagtgggcacttaggaaaggttacaaaatcacagata

SEQ ID NO: 107876 - DNA, 731 bp, Zea Mays
ctggatgtcagctccggtatctgttgcacgacgggcacaacagcacatggagcaaggcaaggagcaacctgcggcgccaatggtgccactccatcccccatttggatgtcatcggaggaggagtcaaggtacgtgaaaattcgaaccatcaagccgagaagaaaaaataggcgaaaacctaagctaaaatccattacatggagtgccaaatgttggaggtaatcgccaaccgggtggtgcaatgcacccacctaatcctaagaatgaggggttgcctaaggtttacctgtggagacacaagaacacacagagatttagagtggtttaggccaccggaacgtaataccctacgtccactatgagttgtattgcttgagtgtgagagagcttgaggttgtgtagatgagtctcagtgaggatgaatttatcccatgaaccgcatgtgccctaccttttatagtcctagggttgcacgtacaagggtgccgagcagccccgacgggtgggccccaacgaactagtttgaaatagaactacatggagcaataagtgatacggtggacagagatctccttggacgctatgcggatcttctgaccaggcacgtcttccgcctagttggccggtatgtgtgagatgtcgtgtatgcctaggatgctgatgtatgtatgggccagccctgtgtaaaaccctgaatttgggggtataaaatttctttcttatgatcatcc

SEQ ID NO: 107877 - DNA, 367 bp, Zea Mays
tgagttttggggcaggaaagattccagaaggcttactgcagatgcagttaaagaaggcatccttcttcgattccaggcctgtgcctaattccggatgagaaatctagacggtggggtccggagcattcatcagtggaacatgagcctgcatcccctcaactgcaacttccgcaacatcaatgcatcgatcatcctcctatggctgagaatggatttgctggtagtggattttcaattgccttatgcgataaaccttcaacaactgggggtttagaaacgtcctgacaggcagagagcggataacaacctgggcagggggcagagtgccatcccctcccagcactggggtcaagctctgtcctaggtg

SEQ ID NO: 107878 - DNA, 463 bp, Zea Mays
agtcggagtggtgtccaggtcatgggcggtgacgatcttttgacgccgcgaagttatccacatacccgagcatgaatcatgacgccggcgacgtgaatcacggcggaaagccaccggcggtgagatcttttccatggcggtcgatacgatccggttagggtactgtaccatggcgaacaccctatcagagaacctgacagccagagttgagggtcgattttcttccaaatttctgtggcaacgcaaaccaaactctgcagcaaagttatagagctataatccatctatcattttgctacaatgtgctcccacaaaaagtcactggatcctcttcaaaatcgagctcaaagtttatctcacaaaactgttaatctatatttcagacttcaggcagtctgacagtccatctttgattgggtttttctccaaatttctcataagatcatggcttgaacccttaaac

SEQ ID NO: 107879 - DNA, 322 bp, Zea Mays
caaagccagtgatcatcacattccacgaaactacattcttcactggcatttcatcgaacaccttgcgtgcttccaccaagcacctggacatgacatacacattgataagggcgatgtgcacataggcatggaactcgaaccccttctggacaacgagcgcatggagctgtgcaccagctcgatgccaccccagacccgcacaagccttgagcacgaacttgaagacaaatgtgtcatcagccaggtgctggcgcgcgtgcttgaagaggtgcagagcttccaggggaaaggaccgtgggagtaggccttgaggaaggcgcgc

SEQ ID NO: 107880 - DNA, 407 bp, Zea Mays
ctctaaatagtgtacatatttttcctaataatgataaactaactagttgtgcttcataacatatggatgttggtttagactaagattattattttgtaaaacaagtcacttatatattggtatcatgagctaactaaaaacaaaatagtcttcttttccattgatgcggtgggcctgacctgttctagtgctaatgttttatacatatttgcttgcaacttgacatatatggagtggttaataatggaaaacgaagatggaatcatgtacagaggagatcgatcgaatcgatggtgggtatatatcacaccttgttgtgcgagtgatagtcgtagagtagcgtcggcgtcaccgcctaaggactgagccctagggctaagggtgccgacgtgtcatcgaaaaccatc

SEQ ID NO: 107881 - DNA, 1103 bp, Zea Mays
gcgggtgaaggattgcatatgctgtagtgttgtactgatgccgcattgcattttgtcatgaatcaaggaaacaaatgggtagcaatctgtcacacctttgaagcttcctgctgtgctcactcgctgatattttcagtttgtagtcgtcattgtacttcactacaaaacgtaacgtaacattaggcatgcacttgttcttcctgtaccttagattcttctttccatggaattgtactttcattttctctactactctataagaacctaacgtagaccgcggtgcacggttctgcctcctcacggcgcatacgacccacatgttagtgtcttccttcttccccgtgcgcgccctctcccctctacccctgcatccgcatggtatcgccgcaatcccctcatcgattaatgcctcagccatggaaggaaaaatcccgtcactgccacagaagtaaacacatcccctcgcagcaattcagcacgcatgaatcccattgtcgatgacgcgcaggaccacccattgcccaatcgttctttccatgcaccgcggatgccccgcccatatccctctcgccccaaatgcaatccacgcctcgccaccatggaaggaatcgcaacctaatcccctcatcgccatccagcgcacaggaccaccatcggcccgcatcccatcgcaagtgtaggaccaccccgcctggatcttttgatgctcgagtacttcccattctacgcgccagccctgcccagatcttgcgatgctcgagtatgagatggaagacacctctttaagcgctcaaatctgaacatcacacctctcttcacaaacattaatatgatatacagtatgctgtccaaagtgttgtctaaaaatatatctacctgacctcaatattcatggttaccctttatatgaaactgtaattcctgacagatcacgacatttatatgaaattgtagacttatccaaattttttgatggttcaaattatgtattatatatctctactactctataagaacctaacgtagaccgcggtgcacggttctgccttctcacggcgcatacgacccacatgttagtgtctcccttcttccccgtgcgcgcc

SEQ ID NO: 107882 - DNA, 744 bp, Zea Mays
agggtgaggagggcgagagcggacctagagatggcggtccacggtgcggtgactcgcggtggcgcggagaaacgatttgggggaaatcctaaattagggcatggtggtggatgatcggaggcgagggctagtgttctggctttgtaacaacctagcggagttaatggtgcactcaatttatagcctccaagagcggtggctccgaattttggagaagagagctggcggccggagagaggagtgagtcactggcgaacgctatcgtggctttcaccgaggcaatgcttctggcgatgatcaggctaccaacgacaatctactgcgacgtggtaacgctcctaagtacgtggcacggctacgaaggcggcaaactccagcgaggacacctcgatcaatcgtacaacaagtgggtacggtgaacagtctggtgaccgggtccgagctcatcccagcgccaagatctcttaccccgagtcattatctacgtgccattgggcacgaatcacattgtcggcgtggatcgcagcgcgggtcaccggtggcgaggttcactgaattaggcatctgattcagttactgtaccatcgctatcttcttcagactgtctgacagttgaacttgcaaggctttgttctctaatctttgtgtggcaactcactcattcatctgcagcaaagttgttgtccaatgtaccagctacaactttgctacaaaggtcttgcgcaaacatccactaaattcccc

SEQ ID NO: 107883 - DNA, 655 bp, Zea Mays
ggccgccgcggcagagcaacttggtcgggcaacgcggggttcgcggctggtttatgcggcccgtaggggagagaatttcggcaaggtagcgccacaacgaccttgcggaggatccggcggcgagtttgtttcatctggttgaagaaggtggcgagaggggtggcgatttagtcagaggagtggaggagataagtccaagcactggggggtccacctgtcacacacacggtttagcgttcccagctaggtgacaggcgcgtgcggtaggagcaacgagcggtgggtgaagggaatgatagatggggcccacatgtaagtgccaggaataaagaaaaggggaagggaaggagatgggctgcgcaggagggaaaccgagttaggccagccagattcggcccagtcgagttcccaagcttttctctttttttgttttgttttctcccttttcagatttagatttcaagtttgaatctatttttgtgggaagttcaaactcaggttaattttctatatttacatgacaacataaactgaatttttgttcatttatatttttattttatactgtttgtatagtgttttcttctctttttcccaattctaggattttcctttggaatttaaattccaccttggattttttaacatatttctt

SEQ ID NO: 107884 - DNA, 552 bp, Zea Mays
gcgctagccaccatgcatatgcattattgacgaatgctgctgaagctgaagtgctgatgctgtttttaatcatgctgcagtagaatcgtccatcctgctcgcttgtttgtctgagctgtgcatgcacaacgatttgggcttgagtggtggtgctaaagtctccatgggatgagctttaggtgcactactgtttatccggcttctgaagggcgccttcggttttgtgcataggctcattgggttgctaactggtagttttttggttataagattcttcatatcttttttcatttagattaaaagtttgtgccgtgcccttgattgcaaccatgaagctgcattttctgctgtagtgattttggtctgatgctcaaatataatgttgaggtgtgtctgcgtgctattgctttaagcacactgtttttactgggttccttctgaagaagccacacatggttttcttttcgtttcttcttttacctgtttgcttctgttggtttcgatttaacttaccatggtgccatcattattagctcagagtttgcttttccg

SEQ ID NO: 107885 - DNA, 552 bp, Zea Mays
gctgaatgatgaatacatcatatgatccaaaacagtgacgcagagtcgtcagtatatgtactacctagctagcgcgctgtgcattattgaaaataaaatcagaacgagaagtagtaggggttctcgaggacttgtctgcatcaagagcgtagctaaaaacctaaaatctcttgtctagaacgtcgtacgcactttatatatcatctagaaagatcaagttgcagcacaaaataacagtacgtgggagatggaactgcatgctaacacacagtcacacagacaattaacaataccaagtagtagtgttcacgcgacacaagtcgagatctatatatatagcatttgctttgttctcaaacaaatgaaggcacatcaaatagttttgcttggtaggccaaagatttatacagtaaaatacaaggcagaaatagaaactcatatcaggttgattacttcttatgggctcatcacttttaaaaaaaacttttggaggcaaaagactaatcgaatgtaattgtaaccactcaaatctgcctgtgtgtatcaaacgag

SEQ ID NO: 107886 - DNA, 534 bp, Zea Mays
cccacgcggcggtgagtgagctgtgagcaggtgctccgccaacctagtaccagtgcacgctaccctcctatggcaagcgctacgtagagcggatagcaaatcaaaacaaaggttctctacacttaccagagatcacgtcgcggagatcgacaatcatggcgggaggcggtttggcggtggtccgaggactccgacgaatagttcatcaggaatggggcagcgtttcccacggtgacacgagcgacagctccctcacacacaagcggacaccatcggcaaggatccatggcggctgcagcccactgctcctcttctctctcccgtactcacgttcggcagcgaggccgagcacgtacacaggcaccccggcgaccaaacagagtgcccagtcaagaccttggagacgacgaatcacgcgaccgatggaagaagtagccagcaccgagcgactgagggccagtggccatggatcagggagtggcacgacggagcgcagatttgtgaatccacagcactaccgacgagggaggagat

SEQ ID NO: 107887 - DNA, 466 bp, Zea Mays
aaaaggttgtgcgtggtctgtaatgttttacccgtctgcacgcatgttgaaaaaaaacctagctttcttttctgcttgcttgccctcttttgctctcgctctgctggagatctggcccgcgtcaagcaaactgctcgccgccaccgacaatatgtgatcatgccgtcttcttcctcatcatcgtctgctgcgaccgtgtccttgaccatgccgtcatcggagaagaccattagtgatccggcggcggtggtggaactacagcacgggcatacggtcgaatttggtacctcgaggatttacttgggccgcgtgctggagatgcagcgtctaggctattttggaaacggagtcgggcgggctccaggggctgaaaatgtccctaagctagaaggggagttggttgtgttcgaggcgttctttgctgctggccttcgtttgccggtgcatcgctttgtagttgaagttt

SEQ ID NO: 107888 - DNA, 534 bp, Zea Mays
tgtgtttcatacccttgtcggttctttgggcatcaataattctctgtagaagaactgactcaagctttaattgggtcaaagttccatgttgtatcatacccaggtttaacttctccatttcttgacatagtgtggtgtcaggggtccttactgtaagacaatgaaagaaagccttgcgactcagtgcatcttccaccacattggcttttcctgggtgatagtggatttctaaatcataatctttcatcagttcaagccatcttcactgtctcatgttcagttctgactgggtaaaaatatatttcagacttttatgacctgtatataaatggcaggtatttcccagcagataatgatgccatatcttaagggcatgaacaactgcagctaattccaaatcatgagttggatagtgctcctcatgtcggcgtagttgtcttgaagcataggctatgactcggccctcttgcattaggacacatccgagtccacttcctgatgcgtcacaatacacatcaaaaggtttttctatat

SEQ ID NO: 107889 - DNA, 445 bp, Zea Mays
ctagctcctccaactctagtacatgtaaacattgttcaaaatatcatgcttcttgttgtttgactaaccatgcaaggaagaacatctcaaaggtagaggtcaagcaaatattgaagaaatgttgtagcaatgatgggtccaagaaagttgaacccaagtacaaacctttgaagcccaacaacaatggagaaaaggggcttgggtacaacacatacaagatgaaccctagcatagagcataaggggtggagatcccctaagttcatagaaggaactaccttatatgatgccttggggaggattcactcttccaatgacaagtcaactcaagtaaaggtgaacgtgagtaacacaaaggataagatgaagaatattgcttccacatatggagagaagtctagaattcctatctctcactcctacctttgtgactatatgttaacatg

SEQ ID NO: 107890 - DNA, 619 bp, Zea Mays
gttgttaatagcctccggagcagtgccacccagctgtcgccccatgattggccctaacaaaacgatggggggcagtgattttcccccacttcttcccgaactgccccctcaatgtttctggaaagttttgggacggagcgtgttgccacgggaggacataacaggaattttgatagctggagtaggcacaaaattattatggcttgcatattatatattactagtacttcatattcatatggacacggttaacacacgctcggtcatgttattagcatgactggtagggggcgcacaatcttttttccagtcgtccaccactcgccatccctggtggtgaaacaccgtcttcgttgatgctcatgaccacagccatctctaatctcaataatcttcttcaactctaaaataagtgtttgttttcgacatgacttgggtgctaaaataccgcccacctttcaaccgtctaccatcggtctctctcccataactcagagtgacgtcccccacctttatcgtcacctcaaacttcgtcggtctcaacaaaatctcttttagagaacacaaaacccccaattctgatactacaaaatgttaccaactaacctggttcgaggtt

SEQ ID NO: 107891 - DNA, 646 bp, Zea Mays
aaagttgattccataattatcaggttatgcatgcatcatgtttaagaatatactaataaatcttcccctcttatggagatatggcgcgtactaggaaaacagcgcgcaaatctactggaccttttggcgtaccacgacatcaactagcttccaggcacaaaggaagtagtagaggcaacattgacccaattggagacctggaagccagggtggaacaacttcggtcagagctacgtcacaggaatagggcacgggagcaggacaaccatcatatagctgaattgtcagctgaagtcagccgcttgcactatgatattttagaacgggatttggccattgattgggtcgtcaactcgcgttaaatctcttggggccgcgaagcaaaagctctagctcgtgtggtagagcttagtgcatccctcgaaagccctcaagtgtactataatactttacatgaagaagtacatatactatatgctcgactgcacccggacatgccttctaacgttactgcaatgggactaggaccctcgggtacagcaaatgaaggatctgatggagagctagacctttttaggccccctccttccatgaaccttgctgacgaacggtctcctgccgcaggaaatggagcaacaaaggatga

SEQ ID NO: 107892 - DNA, 541 bp, Zea Mays
taggaatcagggctctaggccgcgattgggtgtttctccgacgatgctccaccgtgtggggaggtatacgccgtcgtcgggcgcatcgtgggggaagatgagtcgtcggccgcggatccgcgaatgaatggttaggattaagtccatcgtacccctttggtcaagtgtatctatgcccttagatcttgatcggatgcctcagcgtttgggttggacactttaaaatctggtgcattaatcatcaatcggatgggagccagcgcttaccggttgatgggcaggtagatctaatcctattcgtagatgtaggatcgttcggccctggttgaaacataccccttcggccagatgactttataaaagagaccctgagttatcactgaatcaacccgccgtccactcgggttattcactgagtcttggaaaactttggtttagccccctgcgctttctgaaatttgacgccaagtccagagaggaatagaaatagagaaataattgtagaaattggtttttaatacaaaaataattctagaaactt

SEQ ID NO: 107893 - DNA, 575 bp, Zea Mays
cttggccagacggcggcaccgtcgatgcccatgactgtcctcccgcccgacccccaaacaccatcgccgatagataccatgcgaagctaaggtcaacgctaatgctcaaaggcgagattcttaccagagggtgcgacgcgaagggccctcccacgacacccagcgacgaaacgacggaggagctcactgtgaagcaattaacaagctctggagattccaccgatgccacaaacagatgccacagggatcgaagatcatcccgggttgcgccccgaaggctatggggcagcagggccctggttccgcgtcggtgatcccctcctttctctctctctctacgggacaaaacttcttctctctcgatgaaccgatccctctctctctcttgctccatggcgatggtggctcggttgatgggagggcctgggttctatggtgcgagtgcaatccggatttgacttgatcactagaatcacgcgcgcagagatcagttgatttggttggagtctgcctcgatcggaagctaggaggagactctgtccgcggggcccacgtgccagggaaatcagggtacg

SEQ ID NO: 107894 - DNA, 336 bp, Zea Mays
ctgccgttggctccaaccaaaatggtttggtgtatctaaagtatacctttcgatacaggagccagtttgatgaactgaatgatgactggctagatgccatagaggcaactagtgatgagctgcttggagcatattaacaggccaaagatgaggccatgacaactgccttcggagctcggggcaaaaagaggttgaatagggtatttgatgtcatcggatttgtgtatccagactactgttatcctccgcagaagcaagggaagaagaggaaggctactacctcgtcgacttctagtgcgtcgaggtcaaaaaaggttaaggttttgatgcatcggc

SEQ ID NO: 107895 - DNA, 329 bp, Zea Mays
atgaagaggccgacgcattggccaaggccgccgccaggggcgagtccttgccctccgacgtgttctttcacatcatcggcacgccagccgttcggagccccgaagggctccaaataactaatgacagcgagggccaccgcatagtcaacctaatcatgaccgaagactggcgggcaccaataaccctgttcctacaggggtactatcatccaaccgacatcagcgaggccaagcgcctcagacatcgaagccgggacttcgcactaattgaaggccaactctacaagaaaggggtcagtcagccaatgcttaaatgtgtcaccgaaacc

SEQ ID NO: 107896 - DNA, 694 bp, Zea Mays
tgaacatatacagaggtagaaaggcatcaacagttgggttatatgtatacaaaagcattcttgattcaaaagtgacgatgtccttcataggtatgcaaaaacagctacttgtacacaaataagaagagaagatccgttgcacttaaagtgtttgtcagttattttattgttgtgtaatgggtacaatggagggcgaaggacaatgtgcaaactatattgtaaataagctctgtgcgatttaggagcatagatggtgtcataccttcatggaattcatgacgatctaaccgttgttctttttgggatatgcgggtaggagtttgtgaagttggctaggtttgatcatgtatatatcatgtctgtgctttgttgcatcattatgaagtataagttatagctataaaatatcaagctatttgctatttgtatttttcccaaataatctcctatgtaatatgtacttcgtcctggttaagctgacttgtatattgctcatcaccctgtgattaagtggataagagctgtcaaatcatttttgctggtttaaagtagaagtttagtagttctctcatttttcctttacaaaaagatgtatatgggggaatagattataatatatgctattattacaaaagttaaatacactattataccaaatttacctttgtactctgatgcgcaccggaatcaggct

SEQ ID NO: 107897 - DNA, 885 bp, Zea Mays
caggaaccggtacagaagggtcggcatcctgatccaagcacgatagtcgccgaagtcgcctcttctttcttttctcctcgacaggtgcagtcgggcggttcactcgatgtggatgctttgggcgggcaccttcgggtttctgagtttccacctcttcaccaaattcttgcctagttgtgatggccatcggctcggtgtgggtagagtcggatgattccccagccaacaggctaagcacaacatctatctcagcgtcatcagtgctggctggcatctcaaagtgagtctacctctcatcctcgggaagactccgaagtggagcaatcaaagcctcaatatcctcaggagagggtcacactctatgacccaggctaccgtcacgagcaggagggttggatacaaactcagagaatggcctaagtggcagcaggttccatccaaaataggccacaggagcaccagcatttgaaaccctgcccctcaggatcatgtccaggcgactcagcaaatcttcagtaggaatccttctgttcgtgacccgtgtagaatcgttgacaccgctatataagtaagcggggtaaaccctgtcctttaagggttgaatgttcttgaatacaaagtcaacaactacagcttcagcagttagacccccatccttcagcgagtagatcttggcaagcaacactttggcctctgttatctccggagaggtcggagattctatccagctaggtgtgcgaacatctggctgcctccccgaccgaggggggagagatttgcagtggttctccacaatgaaccactcaaggcgccaccccttgatactgtccttgagaagaatgtcaagatactctgctttcctcccccggcgaagctctagacttg

SEQ ID NO: 107898 - DNA, 408 bp, Zea Mays
aacaaagcatgagtgtaagagttatgaggattcaaattagtcgtggtttaacgcctagattctgaatgttgagtcctccatcaaatgaagttattatacatatcaaaagattgggccatgtctacatcacaaggtggagtgtgatggactggtatcttattttttagatgtgatggcctcatattctatttggctaaggaacatgatcaacttgtttttttgtttgtttgggattccaaaagtgggattagttatctaataagtagggctcattgatagtcacttctcttgcctcttcttccattcttatctcacattccactttgcacacaacacgacaagatcgtcgtcaccttttctcctaagcctggcctcgcgcaccctctgcactcatcatttgcatccatg

SEQ ID NO: 107899 - DNA, 616 bp, Zea Mays
agttcacttcaaaattctggaagagccttcaacaagctatgggcaccaagttagatttcagcaccgcttatcatccccagtcagatggtcagacggaaagggtcaacaaagtcctcgaggatttattaagagcatgtgtgttaacgttcgacagaaactgggagtccagtttgccgtatgccgaattctcatataacaacagccatcaggccagtatcaagatgtcaccgttcgaagcattgtatgaacgaaagtgccagacccccctaatatggtccaatgtaggggaaaggacactagaaggacctgcctttgttaaagatgccgaagagaaagttgccctgatctgcaaaagattacttgaagctcagagtcgacagaaaagttatgcagacaacaggcggagagaactcagatttgaggaaggagatttcgtatacctcaaggtctccccgatgcgtggtgtcaaaaggttccaaatgaaaggaaagctagcaccgcgattcgtcggcccctatcccatcattggcagagtgggacccgcagcataccgccttgaattaccagaatccatgtcagatatccacaatgtgtttcaagtgtcccagctccgtaa

SEQ ID NO: 107900 - DNA, 354 bp, Zea Mays
ctccaccacctccaccatgtggcatcgtcgtctcggccatccaggacccgacgtcatgaccaagctcactagcagtttacacccttcatgtagtaggggacgttttgagggcctctgtcatgcttatcagttaggccgccatactcgtcccccatttagtatttctagttctcgcgctgagcaggcttttgatttgatccattatgatctctggacctcccctgtactcagcatttttggatacaaatactatttggtgattttggatgattattcccattttctttggacttttcctcttcggttgaagtctgatacgctccccaccctcacccaattcttagcttgggtttc

SEQ ID NO: 107901 - DNA, 343 bp, Zea Mays
aatcgttctctcataagcattttcatattagcccaagtttgtggtttatcggatggagttaaggactcccaccaagataacccagaatggggaaaaacactagttgcctttttgatctttttccattcacacataaaatacaactcaagaccttacttagttctatatcgggtaggaagtccggtgcacaactggacatgtctgatgagtacagtggctctccatactcattgcaaccttctttgagtaccatgcccgatggggagtctggtttacagtaacccatgtacatcagacacactggtgttgttgttctaccattaggacattgtctgtatttggc

SEQ ID NO: 107902 - DNA, 351 bp, Zea Mays
tgagctcagggtccttgggaacaactaatcggtctccaaaccatagaattcccttgctgtcctgtcggaaacacttgtatttttctgccttttgcttaatcatatccttgataacctgaacacccttatcctcaacctgtgccctgactatctgttcttgcaacgtgggctccaccgagatatagcttaggttacccgaagaaacaacttccaggtttagcttgcacagctcatcgcacagggtggtgacccttgcatccatgctcatacaattgcattgggcctttctgctcaaggcatctgccacaacgttggccttgccaggatggtaatgcacttccaaatcatagt

SEQ ID NO: 107903 - DNA, 338 bp, Zea Mays
ataatataccagtagcgcccatgtacccacctatgagagttagttcagttggtggaaggacccaaactaatagattttgccctagtgcaaaggttcaaataagggggatagagttccccgctgatttaatagttatgggtaaccaggatacaactatagatgtcatcctagggatgaattggctaaccaagtatcaagccagtcttagctgtgacaagagaacagtgaagttagtgtccctatcaggagaagaagtgttagtggaattggtcttgtctggatcaaggaaagagagttgtcaccaagtcaccgctcatattgaggagattaaaccatca

SEQ ID NO: 107904 - DNA, 588 bp, Zea Mays
gcctggtgggccgttgagcccgttgggatggcacatagggcaacgtctagatcgagagttaagcacgactgactatgacatggtaccgacctaccgtgtccaataatatcctatctatttagggcatgtggggcggggctttggctctatcttttccttaaaaaggtagagttgtgccaaacatcattttttaaaaattatttcttttaaaatgacagaaccattttttattaaacaggagaagccacaaaatgtggctcaactggctctgagttttcagagaagttagaggcaaagctatttttatagaagccaaaacactgccaatggacctttataatcgcgccataccaggctagagctagaccaatcttttgcccatctatatattttttctctcttctcttattctttacaacaaatctgtactgccgcacccatggttaactgattgaaccatgtagagcatgacaagaagtttgtagatgaaacgtgatgtagcttttcagcagtcagattgcttactgacaagctttatggccatttcgtcataccgatacttatgccttgaacgagagactaaaccgc

SEQ ID NO: 107905 - DNA, 995 bp, Zea Mays
ccgctaggagctagccttgtaaacccaacctctggtacatagatctttggtgcccaattatgaaggaagaacacgttcccatccatcattttattttcctttttacaaatcccggtatccctgaggatctatgcttttattgtaatcatggaaaacaaattatgtaatttgccttgcacctagtttggagcctccttttgatgggctctgtttaagggaagagtccacattctctagggtggtccagagctaggtagccacttagcctggtcccgtatcgtaagcctacaccttccaccaaccccgaatagttgacttattaccttctggattgagtacctagggatctggactccattcagattcaagggatcgactccaaaactaggctcaacaaggttaagttgtgtgattcgaaggattggatacaataagagtaaaggacctaagggaacattgctggtcctagaccatgtcttatgatggtccctagtcttatggaagccttgagcatcagaacctgctagaactctagaaaaagggaaaaaagagaaggaagctgacaaccacagttggaggtgttcacatcaggaaaaccccgctaggggttcgcccccgcaaacccagtctaatcatatatgactcacaatgcggtagggtcactcggataaacccggtctctagtgccctctatggtctagcctggtaagaggcgatcttataaacctagacctcctagagatctctacgcaagatctcacacgtctagaaaataaataaaggtttcactctcagcccagtcctggtgaaattggatccatcaatcatgtccatggtcaaggtatgctttctctttttagcccctcttgaggtcctcggcttcgttgttaccatgaaatctgggttatatatctagtattgttgctcggtttatgtccccacttaatactgaacaaaggcacatgttgactgacacctgatcttaaggaagagtc

SEQ ID NO: 107906 - DNA, 314 bp, Zea Mays
tccagatataataggtatacaacagaacaatggtaatcccagtaaaccgtaaacaataatgtgctcaccccatgtggacagttaagtgcgcaacaatttgtgtacaacattaccttggctgctgttgatcttggaaccgaagacgcagcccccgagtttgatacggaaatctgaaggcgacattgaaggaaaattgatttagtacgtcgttgcataaacgttaacatgaactcaaattgtgtatgaaattaccttgtttgcacttgatcttggaaccgaagaccttgacctcgacgtgatacgaaaatctgaag

SEQ ID NO: 107907 - DNA, 1416 bp, Zea Mays
ctcgggtgtttgtggatctcggggtgttacagttggtattagagccaggttgtagattctaggtaaaatgatgataaactgacacacttgcacatatatgatgggttattttctttcatattgttatgacctgatttgtcaatgtttatatgctcttactcgaagttgatgttgtactgctttttatttatttgtggtggctgcagttatgccgcctagaagagctcgtgaccgcacaccgactaataatgtagatccaaatagtccagtggcattgttagccgcgatgcaggcaatgcagcatgagttggaaaccttgaggcaagccattccaattgcccctgctggccctgcttttgccgctactgttcaagctgccggtgttggtgttgtccctgcaagtgctattcctgcacgtgctgtccctacgggtggtgcagccgagtgcctcctctagttagtggcatttctttgatgtagtggatgggtatgaagctggactcttttgatggtcgtggttctccagttgaggcagctgattggctgacctatgtggaggataagatggatgtctttgaggtaattgctggggatctcgttcactatgggacatagttgctaaagggagaagcacaaatttggtgaagaggtgtgcaagtagctcatttatctgcaccggcttacctaacctgggatgtttttgtcaggcagtttgagaggcggttttacctaatcacttttctggagaaaatgaagatagacctgcaatcatataagtaggagggaaggacagttgcagagtatgaagcgggctttaacaagatggttcgctttgttccacatgtggcttagaatgagatagaaaaagcgatctagtttcatcaaggcctgagaccttctatcaggcatgctttgagcgcttttccattggtggattttcacactactgtggagcaagccttgggtctggagatgcagcatcaatacacaaatgagtcatcacagaagtcttcaggtgttgaccaatctcgtggccaagaagagaagaatggccacactgtgtgtctagctaataagaaagggaagtttcagcgccaccacccatatcacgggaagtccacgaaatctagtgctttaggagggagtactccatagtatcgggctgttcctaagcctggtatgggtttggtgtgctttcgttgtggtgaagcgcatcgtcatgctgagtgtcagtggaatggcaaatgttctatttgcagcgaggatcacaaagttgtggtgtgtagaaagaatccgaatggaaaggttaaatgggagctagtgacttcttcagcctctcgtgacactatcaacaagatgacatccactgagtagtagttccctgtaccaccccttagtaaaatttctctatgccag

SEQ ID NO: 107908 - DNA, 657 bp, Zea Mays
gttgagttaaggcattggctgagcattggctgcgccctggcaacatgatgcagtatttgtgtcatacgaacttggctgcgtcatgtgattgctatgtcgcactctagttttgtcggaccgctccggttgagtcggaccgtcatcaccgagtcacatatttttcgcatgccctgtaggcactgtccgtctgtcgtgatcatcgagccacaattgcgcctgttgcgcatgttgcatggacttatcgtgtaccccgattaccgagccataattgtgtctgttgcgcttattatgaaggcttgttgtgttgtcgtagccccctgatggccgtacatgtgttgacaccagacgctagagcttgtagtcatatggattgtggtgggttgttcaagcccctaaagtcacattatgcacaaccttcataaacaattttgtttggctctattttttatttaactgtgttgtgtggcgttatatatttatatatcgccaagtggccataacaactatatcaagctatatagtgcttgaaaatctgggaaattaaattgaaatatctataaaacacagataagttaattttccgctctatcctcgtgcataaagttttactcgaagtaacccgaaggtatataatataatgcatgaaagccttttcgg

SEQ ID NO: 107909 - DNA, 789 bp, Zea Mays
ccatacttgagaggccgctggacagcttctcaggacacgagacagttacctccatttgcatcaccttgccccttccaaaagaaagcctcgtctcctcttatcgattgccttaaaaacccatttagggagttctaaagcaagcataagatagatagagacagaagacaacactgtcttaaccatgacaagacgaccagcccggctgagaagattagctttccatcctggaagtttatcagcaactttatcaacaagcggcaggagatcagagttagcaagcctacggattgatagaggaatccccaagtaagtgcagggaaatttttttgtagcacatggtaataaggcagaaatggtggtcagctcatttgctccacattgaatgggtgtaatagaacttttggagatgttcgtttttaacccagtagcatgaccaaagatgtctaaaatgctgataattgctaagatatcctgatgagagggccgcatgatcaaaacaacatcgtcagcatagaaggagatacaatgtttggcatgttgatttgcaatcggctgcagcatatgttccctgaaagcataactgattgtacataaaatgagcccttgctgctgctgttttcgtcaccaacgtagaaggaaattatagtctaatcttaggtagagattgaatccatgcaaatcaatgtatatcttctactttacatcaaatgttgttgcaatggataggcgatgatgtagaataggtacatgttgatgcatcggcttgcattgtcgtggccgatgcccctg

SEQ ID NO: 107910 - DNA, 382 bp, Zea Mays
agcatagatggtaaagcagcaatattggaataaagatttgatttttttactgtagataaggtagaaaaaacgaatgagtataagaaagtttgtttacgaatacaaattccaactcaacaattaaagcgaagtatatgtatgtataaaattggaaacaaaatattcacacctgctttgcatggtccaaatatctttccagattttatatcttgtaacaactcttgtaatttcatatggaatattcttaccacaatatcaggtgcgtcagaatttttttgtccacagtggtaaagactcaataatttcgggccactttgcattacatgtgaaggttacgaagaagtcaggtgggccatgaactctgcaaatagctatgctgtcg

SEQ ID NO: 107911 - DNA, 465 bp, Zea Mays
taatttgaaagttacaaggccacaaagatgagctcaaaacactgaatttcagacttagctttagaactcaaatagggtccttttgcaaataggtccaaaattcagggtttagcttgcaaatcttcatgattgtgaaccatatgacttaagataccttactttcatagtttttgcactttagtccaaaagtgcactgattttgcacttagcccctagggtttaggtctagggttttccagggttcctttttagggtttttggtatttcaggggtgtgaatgtaatttaggttcattcttagtaacattttatgactatttcacttaagctttagggttttctccatttagattttgttttacccttcagaaccccatttagggttaagtaccctactctagggttttatttttgcaaaaatgccatatcaatacaacttgtttgaaacttctgcctagtgaatgca

SEQ ID NO: 107912 - DNA, 292 bp, Zea Mays
aaaacagcaattaataaaattcagcttctatttacttcaaaaattgccgcattctagagactcgacttattctaacttatagcaaggcacacttaagcatagtcacacaatagatgacgtgacagctacgtagtcatgccatcacttcaccccacaatcccaagtaaaataactctaaccgaacttggcatttagccgatcgattcctaacccatttttcataccaccactacacgacatgcctaatacgttaaatgactcgttcacaattcacctacatctttaccaaaac

SEQ ID NO: 107913 - DNA, 363 bp, Zea Mays
cctcaatgcccgtcgaaacagagcctgttaaatcttttgaacagagtactaggcaaggaccttcggatgccactctgatcttggaaaaataaggcacatctaagaaagttaaatctcctattcccgaagtgtctactggagagttagactttatcatacgacacgcttcgggtaaagagttgtcggaagagcaaattgccgaagctaaacactatgccagagaattaaagtacccaaaaggatctttggtgtacaatggtactgatgaagatgactttctgtactgccttccggaccacaaggagatatctgtttgccgggcgatggcaagaaatatagggtttccgaagctcgaggttggcc

SEQ ID NO: 107914 - DNA, 681 bp, Zea Mays
cgccaaactcaggcaccacggccggttcaatataacgtggccggtgggtaaggactttcaactttttgctcttcggcgcaggctcatctggaatggctaaagcagcagtcttggccaaagcagcagttttcctctattttccccgtcccagcagcgggtagtagtagtcgggataaacaaaaccaatggcatcaaaaactctgttcaatctctttttttctcggcccccgaaggatgtggataatgcgttatcttctgccttggagtaagacccaagaagttcatcacttgtggcttcgatacatttcagccagtcgtcatttggttcatcaaatttatctccatatctgaaggtatacttcagccggactagttcaccttcattagattcgatgatggtctctttcggcatttcccagctatctaaaagcggccatattctgtatgttatatgttcttgaatcaaatctcttgtaccaatgaagaagcatacagtaccaatggccttctggcatgcttcggcgacttcatcgatttcaaccttcggccttcgaaggccgaagcgggaccaaatggggtgcataataacttccttaatatcttctcttgccttcaagtcattcttcacgtaaaatcattcctccatccaggccccaggccacctttttcggtatgttggca

SEQ ID NO: 107915 - DNA, 571 bp, Zea Mays
agctatgtggtctcttagccacacttatcggcagcatctgacacgaggtacagacatcttcctctatgtcttcgtggagaaagccagaccagtgttgttccaggtgaagctcgagaagatcgtctcaacacccttgttggtgtggtggcaggtcttaacaccaacctggacagtgctaccctagacctctccagggtacatgaggagctggaagatgcacatgcaatgatttcagacctggaagcacaacttgaaggaaggaacccccttgaagctcaagtcccggccatggctgtgtccccaccccgcaagaggatccgctatggagaaccaggatctatcaccaggctgctttagatttataagtcatattgtaataagatcgattttgtgttagacaatgaaccttcttatgatactatgcttataataacaaccatgtgatggtgatgtttgcataatggttgatttggatttttgcttgagtgcaatggtcttatgaattgatggtcataagaacattttaaattaacaaataatattaaatttagttataagctattccccctag

SEQ ID NO: 107916 - DNA, 626 bp, Zea Mays
aaaaaaggaaataagtaatgcgcatgtgggttgtacagtaaaaaaaggaaaagaaaaaaatgtgtgtacgagggaagctttacctagataacaaatagtaaatatcgctaggcaatgctaactcttgtcgttggctcttaattagaggggaaaaaagtcgttttctgcacaacattacacgactcggtagcacatatacaagattgactcatcattcatgatcattgggccgacaattatgcagtcaggaatgtactgtaatgtacagcagcacatattttgctattccatgcactcgcgtcgtagctaggggtgacaataaactctaaggtgctgtttggttaggctaacgcagtgggaacgacaatggaagcagctaacagcgctatcaactgcagattagttattaccgtgttttgtttgcttggctcgtgaggaaggtgattagatatgggatcagatgtcacccaatgcagagcggtaacaaacttctactagtctataaacaaatgacggtgtcaacgatcgcagctggactcaaccaaacaataaccaacgagacctaataacgttgtaaactaatctcgtgccataaagaccaaaccaaacacgtagtaaatttttac

SEQ ID NO: 107917 - DNA, 414 bp, Zea Mays
ccaggaccctcctcgccccttcaaacaggacaaggggcagactatctaccttgagcagcaaggggacgagaagagatggttggacagagccactcgtgcagcgattgccacaatagcagtagtagatcacgcagagcagggaggttagttgaggatttctgatcagattgccttccgagtccatcgcctctcatctcggactcactcctccactgctcggtccactccctcagaccaagtctccactccacctaccacttcgccagctcctaccgctctcgagccttccaccacacccgctgctaccaccacctcaaccactctagcttccactgctcccgctcctgcttccgctccacctatttctccacctcgcttccgggagcgtgatgagaccgaggtgcgaccacttgc

SEQ ID NO: 107918 - DNA, 688 bp, Zea Mays
tccgaagtggctttcctggggcatgtgattagtcagcagggcattgcggttgatcccaagaatgtcgcggctgtggtggagtggaagagaccctctagtgtctctgaaatccgaagtttcttggggctcgctggatattatcgacgcttcataccaaatttttccagcattgctaagcctttgactagacttgtggagaagggtgttctatttgtctggtccagcgattgcaaggtcagctatcacacattgaagaacaaattggtgagtgcccctatcctagctttgcctgagagtggtaagtgtttcaccgtttatatggatgcttctcgaattgttcttggctatgggttgatgcaggaaggtagagtgatcgcttatggctcaaggcagttgatgaagcatgagggaaattatccaactcatgatcttgaattggtcgcggtggtctttgctctaaaattatggaggcattatctctatggcgagtcttgtgacatttacaccgatcataaaagtctctaatacattttcactcagaaggagctgaatttgaggcagcgtcggtggctcgaattgattaaagattatgatttgtccattcattatcacccgaggaaggcaaatgtggtggttgatgcccttagcagtacctgggttcaaaatgtgcccttgcctttgatcgctg

SEQ ID NO: 107919 - DNA, 516 bp, Zea Mays
aacaaagcgcttcaattcgctctgtcataacgactgatgaagaacgcgatggtacagtatctgcaaaagatcacagatgcaatgaacgttgccgccgatgaactccgcaccgcgatcctcgctggcgttacaattcatgcgctctggcgtgtggataacggtcgacggtgaaaagatctcgcgcgaggatgaacttggggcactattttgccctgtcgccgtacccacttgcacgggcgacgtggctgcgcgactgccaccatcgtgccaccgtttaactcggttatgacacgccttcagtcgattcaccatgtcgtcgcaagctgtgaagactcggcagtgaccgccgtagaccgttaacgagtgaacgccacattagcgaactctagtgactcttcccccttctcaccgtgagcgcttctccattcaaattcgccctcctcgcggccttcctctataaattgatgcctcgacctgttccgcctagttgttacgaaccctgtgaaccactcctcg

SEQ ID NO: 107920 - DNA, 344 bp, Zea Mays
gacagaatatgcatggaaagtcacgtagggatggactcttatagaggagaccgttgttaacaacgctcaacgggagttgccggaggatcacgaggatgatcagcaaaggactagggaggaagaagcaacggagatgacatagccgatgctggggactgaagaagcgtgtgaaccacgactgaggcgcagtaacgtgcggttgtctggaccagagtggaccgtgtaagcatttgtgatgagcccagttggccgcatatgtatgccggcatgtaacgaaggagagactattctagatacaaaaacactatcgtaagaacacttcgattcatcgtctcccttcttcc

SEQ ID NO: 107921 - DNA, 280 bp, Zea Mays
cttaggtagctgcataatgcactatgtagaccctgtttggatcagctagagtttgtgtattgtggctttaaaagctctagctggtcctgttagacatatatgtgtttatatatgcgtgtatatagctggactgggccctgggccgtgcgcctcctgccctcctatagcctgctgaccttctctgttggttatcgataggaataggggagatcttgattggttatgtttctatataccatgattaaataatctactatttccgtgcaacacctattgcttt

SEQ ID NO: 107922 - DNA, 1016 bp, Zea Mays
ataaggtgaagtgctgcgcaacagggcctccatcccaaattcccaacgcacttgccttctgctgctgctctagctctgtggcccctctcctattattgatcttggattctagcagttactcgaatgaaagaggagattatccacaggtgagatcgatagtctgccggcccagtttgttttcaacttcgttctatcttttttttcttgcttgccggctcttctatatactcgagctcgccgtcgccatgcaacagatgggatctgtgcattctgtgaatcattatcgatcgatccctctccaccgtacccccacctccttcttcctctctctcacatttcgttttgaggactcgttcgctctatatgttcctataagctaaaacaacatggcttagttattcgcatagtaaatagtgtatgcatgcgtcatacacaatttaattgctacaatagatcacgacatcagacatataagttccacctaaaaataccatctcaataaacattttttatttctcatcgcttcctttttatgttggctattgttaatgtgtgatctgttggagagacacgtatgcgtagcaatattggagggagatatttttgtattttacatgatcttttgggtatcctattttgagatagccatgcgtacaaaaggtagttattgagtttgttttactttcaccactgcatcacctactttcccgggtggcgccggtcggggctatcccacacagctctcataaggtgaagtgttgcgcaaccgagcctccatcccatattcccaacgcacttgccttccgctgctgctctagctctgcgacccctctcctattattgctcttggattctagcggttacctaaaggaaagagaagagattaaccataggtgagatcgatagtctgccggcctagtttgttttcaactccgttctatctttttctttcttgctcataggctcttctatctactcgagctcgccgtcgccatgcagcagatgggatctgtgca

SEQ ID NO: 107923 - DNA, 611 bp, Zea Mays
ttgaaattatgctgatctaggtgtgtggattactaatactaattggaaggacagtcgttcaaattggtcagtccaattaagaatgttttgtgtgtgaggtgaggtggtgacatgccaaagtagtcatcgcttccctatgtttataagtcgagtcaataccattaggcgttcatgaaatttcacgttgcatatagtgtatggttgtattcgtgacaaggaggtgtaggttttactcaattagaagtttggttgatgtggctaggaaatttgtttcggcttgggtaatgaagtagtgacgtgaccaagtagtccccccggttatgagtcgggtctagatgtgttatgccttcgccgtgatacccatcgtatatgctaactggatgtatataagaaatgaaatagacgcatcatatgatttagtggtgctggtattgtgatctaagtacattatatatgtgtgataaatgtcgggcttgaggattgtctttcgagtgaggcaggtgtaatagacttatatgtgtagaatgattaagctagtaatacaaaatgacaagaataaaaattagtaagtctacttgttagtcctcattgattaatttaactctaacgaa

SEQ ID NO: 107924 - DNA, 687 bp, Zea Mays
tatttctttacacgatgaggtccccgacggcgcaccgaacagggggcaaagctcaggcgagctagactggccggaaggagccaagactggtgcccccgagcggctaacaccgaatgggaccttcccgatcaattcccccaacttaattttatggttggtaatctatcaagctctgtccatgcggaccacggacgatgaggacaattgcacgcgttcccggtgaccagtggtttcctagtgcaattgggtgggttggcgagtatcacagacgtatgagaatgcttaaacaagggagcagaggggaggagttgacctgaattgggttgaccacgacggggtgtgttttacggtggcggaaaccgaattgggggaaatccaaaattgaggctcactagcgatcgactgaggatgattcttggcggctgggttcgtgatgatccaacagagctcacggcggggtcaatttgtaccaagtgaaagcggtggccggggatttgagcgacgacccgcggcggtcggagaagtaagagttcactggcgcgcgattagtgtcctattaccgtggcagtcattccgacgagccatggagagtcacaagggttcacggcgatgtggtggacaggtagagacacgccgcggacggcggtgatggcttaacagcggtgagaaccttatccaagggatcag

SEQ ID NO: 107925 - DNA, 593 bp, Zea Mays
cccaatcgaagtcagttgtcaatcaagagtttgaatgccttttaaaaatgaaagctttattgatgatgaagtcttctggttacagagtacaacttttcttcgagggtttttgaggcatctctaagggtagaactttctgaggtgttctatgttccatgagttccccacttctgtgccgtccatctgagtaagacgatatgatcccggcagtgtggcctctgctacgatgaacgatccttcccatggtggtgacagcttgtgtcgtccctccccattagaattcggcggaggaccaagtctcccactacaaaggaacggtgccgcacaactttgtcgtcgtagcgcctcaaggtctgctggtacctggccgactgaattactgtgttcaatcattctttctccagcacatcaatgtcttccagcctggttgcttctgcctcaactatgttttcaaaagtcagcctcaacgccccgaagatcagatcggcaagcagcactgcttccgacccataaactatgaagaacgaggtatttccatgcagagcttgactgggttgagttcgcaggctccagaccacatatggcagttctct

SEQ ID NO: 107926 - DNA, 541 bp, Zea Mays
cgaggtaaatccatgccaagatcatgtaaaacggctaagatttgctttcaaactttgccagggcgtgttcaaggtaatttgacgccactttgatatttggaccatacggatttgagttttggaaattagagaacacgatcgatctttatgaagaggtcaaattttagaattctgaatttcctgaattttagttgaagttcctaattaagtggctgatttgtggatgctgcaagctcctttttggtagactttcttactatgttttgtagattatttagtgtgctacatacttgttatttggtacaaaacatgattttatgtttttcatatccttttcattagattccttattggtgcccaaatggctcaattagggtggttttagggtattgaatattttccccacttgaggtatatgatggtgttaaagtatggttcttgagatgaatagacttaacttgggtttttagttccttaaatttgggtgtctcttgtccaattaaaatcacatgtgattgtaacaccccaggtgttacccaag

SEQ ID NO: 107927 - DNA, 352 bp, Zea Mays
ttcaatggttcgatcgagaacccgaagacacttcttcaattgtgacacgtggaacacattatgcacaacagacaaggtttcgggtaactgaaatcggtatgccactggcccatatctttcaagaataagaaaaggaccaatatatcgtggtgcaagctttcctttaaccccgaaacgcgatacgcccttcattggcgaaacctttaggtagacatagtctccctcaagaaaatataagggcattcgccgtttgtctgcataacttttctgacgagcttgaactttcatcaaattatgaattattttctgaaccttttcttcggtctctttcaccatatcaggcatgaagaag

SEQ ID NO: 107928 - DNA, 618 bp, Zea Mays
atttttatgaagttaacgcaactggaatgggtcaattcagagttaaaacaaaagaagttatgaatttgtgaagtttagatttaactttctatattaaaattcattttctaatttgttttattattctagctattccatttggacttcggacaatattttgaactcttctggggtgctctacgcaaaattccagggccatactataatgttactacacctgtattggatggcgggttggttttacaaaagccgaggggctcaaacgcaaaatggttatggcgaaggggtactgatcagttctagccgttgaatcttacatgaagggccatgattagatcggggaaggttattatgaatcgatatgcgttcactgccctaggatcaaagatcgatagcccgaaatcgtccacgctacagatccagcaagggcactctgatcgatgatctaaggctgacattaacccacgcggggagtacgctcatagatccattggatcaacatcacacgatccctatataccatgcgaacgggggtacgcagtccactcatcctgaccgcacgtgggtcgattgatgtctatcctggcaccaccatcaagtaccagatgaacggtccgt

SEQ ID NO: 107929 - DNA, 404 bp, Zea Mays
gctttcgggtatccactgttttgacagtctttggtataaccgcaacaaccattgcttcagcaagggctgagttagatgattctccagccaacatatcaagtacaacattcatttctgcatcatctgggctcgttggcatctcaaaatgaacctgcctttcatcattgggaatatcacaaagagaagcaaccaagacttcaataacttcaggagagggtcgcactctaagacccagaccactatcactagcaggaggattggacactaaactgaaaaaggacttaggaggttccacattccaagcagagtaggcaacaggagcaccaacatttgatactttgcctctcaagatcatgtctagccggctcaccaaatcctcagcaggaattctcctattagtaacc

SEQ ID NO: 107930 - DNA, 931 bp, Zea Mays
taaacaatgaaaacgatgaagctggcaaggcttttgtcatcacattagcaacttgatctttcgttgaaacaatacgaacgtccaactgtctagtagccacacgctcccgaacaaaatgataatccacctcaatgtgtttagatcggcgatgaaaaataggattggcacataaatatgttgcaccaatgtcgttatcacaccacagatgtgctgctcaaggctaagaaattcgaagctctcttagcagtacttgcaactaaatcaattcagtagtagcatcagcaattgatttgtattcaacctcagtgcttgatcgagatacagttgattgcttacgagaattccaagagacaaggtttgagccaaaatagacagcataacctccagtgctgcgtctgtcgtcttggtcaccagcccaatcagcatccaagaaagcactaagtaactcagaattgctcttggcaatatgaagacccatatgacgagtgtcccctaagtaccataatatcctttttaccgcactcaaatgaacatatgttggagaggccatatattgacacacacgattcacactgaaagcaatgtccggtcgagtcaataatatgtattgtagagcccccacaatgcttctgtatttcatagtatcctcagaagagagaggttccccatttgtcagtttgagccgatcagtgggcagcatcggcgtagcaactgctttagaagtcagcatgttggtttgtgtcaagagatcggatatgtacttgtgttgtgacagtagaagcacaaaggacatacgagacacttcgatgcccaaaaaatatgccaaaggtcccaaatctttgaccgcaaagtcagttcgcaactgacgaagcaaattttcaacagccgatgaagacgaacttatgatgatgatgtcgtcaacatatatgag

SEQ ID NO: 107931 - DNA, 311 bp, Zea Mays
cacttgatgttgagaatctgaattcaatcatgtcttgtgttcttttgtggacttgttagtttatgaagctatgaactatgcattatgaacttgttatttttatgaactatcaactacgttattttgcaaactatgttatgcattaggatgaaggaggcgctaaaaaggatgaaggtaggaaaggcgatgggccctgatggtatccctatcgaggtatggagatgtcttggagacatagcgatagtatggctgactaagcttttcaacaccatctttcgggcaaacagaatgcccgacgagtggcggcggag

SEQ ID NO: 107932 - DNA, 471 bp, Zea Mays
ttgtgcgttgcacggttctgcctgtcgtcatgggcctacgtcaccccgtggcgtgtgtagacatacacctcagtatggtgtacatgttatgttctttcgggtatgcgggtcactgtagagactccggtgctaagacccttatgaccgaggttgactggctccatgagtcactgagggtatattcgtgggcgcatgtgggggtgttccgtcacgtcaaccagagccctttgggtactgtacatacggttcaaacgtgacttggtgatgttacgttttattgcgggcgtcgtgggctggcagcgtcgacctatgttcccttcttgtggatcaacttggcgggtacttggtcgttcagcccgtctcgtagatttgctcgacgggaacttggtcgcctgtcccgtctcacagacttgctcggcggggacttggtcgtccaccccgcctcgcagatttgctcgacggagacttgat

SEQ ID NO: 107933 - DNA, 290 bp, Zea Mays
cggcgatctaaggggtcctagctgaactggttgggttagggagaatccagagcacctaaggatattgaaaggagaaaccagagagtatgatcgaacctggaacgggctagccacggcgaggccctttcatggcggcggagaacagatttggggagaacaagaaattgtagagttatggtggctaatcgaaggtgggaatggttgctctggcttcgtgataacatggtgcagcagaccgggccatcaatttataagggcgctaagcggtggccggtgaatttggtttcgca

SEQ ID NO: 107934 - DNA, 383 bp, Zea Mays
ctagagtccaaataggggggatagagttccccgctgatctaatagttatggctaaccaggatgcgactatagatgtcatcctagggatgaattagctaaccaaatatcaagcaagtcttagctgtgacaataggatggtgaagttagtgtccttatcaggagaggaagtgttagtggagttggtcttgtctggaccaaggaaaggaagctgtcaccaagtcaccgcccatattgaggaaatcgagccattagaaactatcaacgtagtatcagaattcccagatgtgtttctcgaggagttactaggcatgccacctgaaaggaaagttgagtttgccatagagcttatacctggcaccgcccctatttccatgagagcctat

SEQ ID NO: 107935 - DNA, 278 bp, Zea Mays
gtcaagtctggttctaaggcaacatccgtcacttcaacggttcgatctggaacccgaagacacttcttcaattgggatacgtggaacacattgtgcactgcagacaatgtttcgggtaattagagtcggtatgccactggtccatatctttcaaggataggaaaaggaccaatgtaccggggtgcaatttttccttttaccccgaaacgagatacacccttcattggtgagactttcaggtagacataatcttcaacttgaaagtacaagggttggcg

SEQ ID NO: 107936 - DNA, 494 bp, Zea Mays
tgtcaacttaagacgattgctctgttagtagggtatagtggtcaccccgagttaagtaagcgtgagcatgtcgcaccgccataagccattgccgacttaagacgattgctccgttagtagggtatagtggtcaccccgagttaaagtaagcgtgagcatgtcgctccgccttaagccgttgccgacttaagccgattgcttcgttagtagggtatagtggtcaccccgatttaagtaagcatgcaggttgacagtgaacaatttgagtgcctttgaagtctttttattgataatatatttcccaatttacataatacattgtcgtcccaatagcttttgagatatagctaggggtaaaacttcctgagatgttctatgttccatgagttcccaatttccatgctgtccatttgagtgagacgatatgatccagtccgagtgacttctgctactatgaatggtccttcccatagtggtgacagtttgtgtcgtcc

SEQ ID NO: 107937 - DNA, 684 bp, Zea Mays
ggggtggttgatattgttgttggtttgcttgttgtgtcagagggggtggcagggctaatctttcttggtgttgaatgcatggttgttggggggaaagcatgattgtagtttcattggtgttgtgggtaatatggatgttcgttttggtagtgatggtggtggtatggatggggttggtaggtatgagcgatggctctatggttgtattttggggcagctctggccatctggtccttggtttccttagtttccgggcagtctctagttgggtgctctgagtcttcatcatggaagatgtagtagaactttcttggctgctagggacctctgcctctgcctttgcctcaagttgcgttgccattgtagccttattgtggagggtagttttggtgccggggtggccctctgtcggttgtagctggtttgtgatgttatggacttggagttgctgaccacactctataagggcagagtcttcctacgggggccttgtccatgtcctgctggtttgtggagtctcttttggattccgttgtgactcaacttttatgtggtggagttcttttgaccgggcatatttttcaaaaagctgatacaactcctggaggttggacggagggtcccttgtgcagtgactatatagtacgcttccacaaaggccactgattgcatagtggatggcaa

SEQ ID NO: 107938 - DNA, 289 bp, Zea Mays
aagagcagagctcttttggaggaagaactccaacatcaacaaggtggaggagatctgattctgagaaaacagacatgtggtttcctgcgaacgataactggctgttggggtcgaggggaggaaggactaccgcagtagaactctggttcttccgcttgggcgccattgcaatctcgccggcgggtcgaacaagggcgaaatcagagggaaacagaggagtggttcgaggcggaaatgtgaagttagggctcagaactcaaaagcgcacgacgacgtgagtataaatggg

SEQ ID NO: 107939 - DNA, 573 bp, Zea Mays
ctaataacttaccagccgatactccaaaagcgtatttacatgggttcatttttacaccatatcgacgtattttatcaaaggctttgcgcaaatcggctatatgagaactaaactcagatgatttgactacgatatcatcaatgtagacttccacagtgcttcccaacagctcgtgaaagatcaaatttatagctctctgataagtagcaccaacatttttagaccaaatgtcatgacaacccactcaaataaacaaatgaagcctggacatataaaggccattttggacgcatcctcttcagctatgaaaatctgattatatccggcattatcattaagaaagctaataattctatttcctgacgcattattgatcaatgtgtcggctatgggcacgggatattcatctttaggagttgctctattcaaattgcgaaaatcaatgcatactctgagcttacctgattctttcttctccaccggtacaatattggagacccactctgcgtatctgcaaggtctaataaaattagcttctagcagccggtgaatttcgtcctttattcgtgggag

SEQ ID NO: 107940 - DNA, 879 bp, Zea Mays
gctgattgagggcagggatggatgctttggcttggtgataacttagcaaagcagaccgtgccgtcaatttataagggcgctaagcggtggccggtgaatttggtctcgcacggtggcggccagagaaagaggagatcactggtgcaagtgattagtggcatctaccgtggcggctctccggcgatcaccagatatagatgatccgagctattgcgatgtggttaagggcctgaggcatggcgcaatcgcggtgaacaacacagattccgctgacgaccgtaaggccaagtcgccggtgaagtggttgagggacagtgcggccatagtgtcccgtacctatccgcggcgtgatcttttcaccgtcgagctcaatccacagacctgaagcacgaatcgtggcgatcagtagcaatcacggcgaagggtcaccggcggcgagattcacggaatctgtagatttttttgccactgtaccatcagaggcttcatcagttggtctgacagggcttatttggggcgaattctctctagattttgtgtggtgactagaccaatactctccatcaaagttgtagcttatcaatccagttttaattcgactatagcaactatcctcaatcgagcactagatcctacccaaacttgatcccaaagttcggccagtggcactggtggccatgtttcagtttcaaaattgactgacagcccaactttgtgcttattttactccaatttctattcagcaccagtgctcagtcacttaatcaaacttgttctcctatgatagctctacaactttgctatattgactttgagcaaaaacttcaagaatcctgagatgtagggctccaaagtaagccttgttcaactgtatttcag

SEQ ID NO: 107941 - DNA, 436 bp, Zea Mays
tgccttctctgtctaactgcattggaaagcgacttggataggtcctggggtgacagtgatcagaaacacctttttagcgatgtggtcagaaacttaataagaactttacaactatgaacagctatagtgatgtgatgtccggtatcgatgtaaaattagtcaaagaaggccagttatggaatctgcacaactcgcaagccatttctgagtagtatcaggaatgcacagttggaagttgatctctggtggagaatgatgatcctgctccggaatttcgtccttcgtaggtagtaaagactatgggacctcacagttactagacattctgccttcctgtttggtggaacggtgttctgcatgggtcacaatccaacagactaattagaaacacactatccgatcagaaaccactctttagttttatattcaaagaaaa

SEQ ID NO: 107942 - DNA, 674 bp, Zea Mays
cttaagtcatcgccaatttaagccgattgctccgttagtagggcatagtggtcaccctgagttaagtaagcgtgagcatgtcacactgtcttaagtcatcgccgacttaagccgattgctccgttagtagggtatagtggtcaccctgagttaagtaagcgtgagcatgtcacaccgccttaagtcatcgccgacttaagtcgattgctccgttagtagggtatagtggtcactctgagttaagtaagcgtgagcatgtcacgccgccttaagtcatcaccgacttaagttgattgctccgttagtagggtatagtggtcaccctgagttaagtgagcatgcagattgacaataaacggttcaagtgcctttgagaatgaagtcttttcattgatggtgtattttccaattacagaatacaatgccgtcccaatagcttttgaaatctagctaggggtaaaacttcctgagatgctctatattccatgagttccctatttccgtgccatccatttgagtaagacaatacgatccaggccgagtgacttctgctactatgaatggtccgtcccatagtggtgacaatttgtgtcgtccctcccccgttagaattcggcggaggacaagatctcccactgcgaaggatcgatgccgtatggccttatcatgatagc

SEQ ID NO: 107943 - DNA, 374 bp, Zea Mays
ggcagaaaatacatgactcctttatattgggatcaaactggtgaaaggcagttctttgggctagagattatacaagaggcagaagaacaagtacgaataataagggagaacttgataactacgcagtcaagatagaaaagctatgtggatacccggagaagactgctagagtttaaggagggtgatcatgtgtatttgaaggtgtcaccgatctggggtatgtgaagattcaaagttaaagggaagttgtcccctcgctttattggacccttcttgatcctaaagcgagtgggggaagttgcctatcaactggaattacccgaccaccttgcagatgtacacgatgtcttccacgtgtcctagttgaagaagtg

SEQ ID NO: 107944 - DNA, 800 bp, Zea Mays
ggttccttcatctccaaagctaaaagccaggaagtctatcccacccaactttgtgccaagaagatccagacgtgtagccaaacttcctccccttgctgggaactctgcggctcacactatctgtctaaaactgggattgaaaaatgggcaggctcctgtttctgcggatgatctggaacgctgcgctagagaattcaataaacctctttccgtcagtcaggtaaaggctttagctaccttgttccgatgggaaatccctgaggaggaattactcgttcgcccagctgatggtctgctgcaagtttcgtagagtggtttatcccacagggtcgtattttatctcacaatgaataattttgatatactggtttggaatgtgaggggtctgaatgaccctcatcgtagggattctcttcgatcattaataaactgtatgatgcctactattgtgtgtattcaagaaaccaagctgaattctatttctcactgggatgttgcttcctgtcttggttcagagtttggggattttgtttacttgccttctagtggtactagaggaggtatcttgatagcctggcgtagagggctcattactgctatagactccaaaattcttaatcattcagtgtcagtctgttttatgaaagaaaacaacactgcttggtggttttcgggtgtctacggaccccatagagatgaggagaaattggcttttctagaagaactctctatggtcagaaccagttgtcctggcccctgggtgattgcaggggacttcaatatgatccgatgtgctgaag

SEQ ID NO: 107945 - DNA, 1261 bp, Zea Mays
tggttgtgtgctgcagattttggatctgacttgtgagaaccgtcgacggacccctgcacacagtacgtgagacgatcgaggaggatggaggcacgcagtacgttttgttctcgatctctgctacagcatgtcatcttaattaagcctactggttgcatgcatgggtgaggattattcatcgctaagtttccatgtacgtagcatactatcacatgtacaatgaaataggcaaatagcctagacgttcttctcatgacgaccatgtctgccaattaaatatattgcaggtagtaaacctcaagtactgatagccattaattcttggttggagttcgacagagaagatcgaaaagacatgtatagaatactgatcgtctgatcatatcgtccctacctatctgtctgtctctaccaaagtgggctacagtacgttagctagctgtctcttcgaagacactgataggatgtttgattacaagtccaacggaaccacttgactgcatacggttaccacttactcatgcaagaaaaaaaattgcattttcaaattcgaaccccaagtcgtctagtgtagggtcttatgttcataaccagttgggataacaaacatattaatcgatctgcatatatatatatatacacaaaagggctacacagataacagatgcagtgcatagaacctaattgcaggtgggggacccggccctcccccggtggacaataaaaaaaatccagtttccaagcccaagctataggtaggcagtccagagcggtggtcttgtcactttcttacttccaaaaccaggccactgttgatgtaggctggctggctggctcatgtgccacagttgctgttcgttattaactgtagtaaacatcagtgtggacgggcgccagaatttcagatctcggtacgtatgctgtgtggattcagcgttatttgaacaccgtaataatgctctccagcagattgtgaattgtgaatacagttcgtagagaacactatttataatgcagacgttatgtttacatagtttagtttaaaatgggagataagatagaagagatagaatgagtaattggctggagatcaaatcgtgcatattattgtgcaaaacactgtttttccatatagtggagttttaaagtatgggacgagagagcagatagcaaatcgtgtatatggtcgtgcaaatattatatatgtggttgtgcaaaactccgaaatttgaaataggagacacagttgataattctacgc

SEQ ID NO: 107946 - DNA, 525 bp, Zea Mays
caaaactcgtctcttttatcttcaacccttcttgtctgattcttcgtctatcaggaaagtctaatgagaagtattgcaagatgatcaagctaggattacggaacttaaagcgaagttggccagaagaaaccctttcgaagctatcgacgatgccctattctctgtcttatccccactccacaagaagttttgctatggattctttggatctattaccagacttcttggttaggttgataggattgttctttagtattaagattttcgactagatcggtaatggcgatattatattataagtggttttctaatccctaatattgctatataacccttgacttcttatactcttgttttctcgccattgtatttccacccttgctcaatatctaccttgatatattaaatctttgcctctctacttttctccttgataatgctttctccctaactcactttatatccttggttgtatcatttatcctcactttattagttcatggttatcttatttcactcgtggcc

SEQ ID NO: 107947 - DNA, 610 bp, Zea Mays
ctcggcatcaagaaattgatggtatatggtgactcgctggtggtcataagccagataaacaaggactgggactgctcgactgattgaatgggcaagtactgtgcagccgtgcgaaagctggaagacaaattcaagggattggagttccatcacgtggaaagagactgcaacgcagcagcagatgtgttgtcgaagctgggatccagtcaggcccaggctccacctggaattttcgtccaagaaatatcacagccgagcatcctctcggatcaggtggaatagtgcaacgccttgagccaaccagaggcagaccccaacgactggagagagcctatcatcaggtacataaaaaatgaagaagagccggataacaaggctgcgacaaaacacatcgtgagacggtcggcccactacaccattatagggggcttactgtacagaaaaggtgcaggaggagtcctcatgaagtgcattcactcagctactgggaaataattgttagatgaaatccatgccggacagtgtggggtacatgcggcatcaaggactctggtcgggaaggcttttagatcctgtttttactggccaactgcaaagagcgatgctgccg

SEQ ID NO: 107948 - DNA, 510 bp, Zea Mays
ctttcttttttacggggttgcatctagtcctagctttcatggagcttgcgcatccagggaaaaggaccggcacgtctctaaaagcacaggctcgttagatagaggaaggaaaagctggggtagtggtagctccacattagcctctgcctcggcatggtgacagctcgagacggaggggattagatctcggcctatttacagctcagaccgtagcagtacctggctctggctgtagaggactaccacgtactttccaagtccacgctgtacagcagcactgcgtgcatccctcacacacaccacaccgtatcgggctactaccggagcatacatacacacacacagacatgagtggtagggaagcttgccaggaaattattccaggcgggcccctgacacgagagcatgattgcagcgggcccaggcttgtaggtgacggaccccccaagtggaaacaaaagagacctgttgtttccagaagcgaaaaaaaaaacagaaagcgaagaggag

SEQ ID NO: 107949 - DNA, 714 bp, Zea Mays
cttgggggtacccctaattatggtccccgacagtccgacaatgacgaggagccacgacgaccacgtaccttcaaaccacgatgaccagaaataggtacgtggaaaactaacacgttcaaggccgctggtcagttggtaaaatccagcccgatctttgatcaattattgtctaaatatgtgaaaagaaggccggccccagtgatcggccaccaaagcggtctcgtttacccacccaggagcgacagcaggttaggtcgattggaccacctcgctaatcagaaaggacgagaggtcataatgtccaactaagacctaacgtatatgcatggacacctccactcccatacacacctatgtcatacctttatacatacataccaccaccaccatatatcccgaatcagatgtggggtatgccaccatatcctttcgagacaccacaatacttcgcttggggggcaccgcagtcatctgtctttgccaggttgacgcctccagtacaagaccgattgagagccccttaatctggtccacgagcacaggcccaacaagattgctgaaccactcgtccccaaaggctgactaatccggtagggggtatatagctacggcctccaacattacgataaaagggatgccattgaaataggaacaccagatgtcatcgtacaacaaaataacgaagggccgatgatttttggtaaatcggctaac

SEQ ID NO: 107950 - DNA, 422 bp, Zea Mays
cttatgagagcatgatagtgattatcctaaaacaatcattttggagcaaatgcttggtcatcacctttgtcatgcgtgaaaagaatggaaggtggtttcacctttggcttgaaagttacgaaacacaatttcacacatcacaaaggcatgaattatgccacaaaaacctaggtttttacatattacacaatgggaaattcaatgttttctttcacgacaaagttacttctctcgcatgtattcgtcataaatgtcctcgtaaatcttcagtacaacatcgtcaatagttttttatgtcactttaataacatccaaggcaaccttcagttccgggtcatcttcgggacgataatccttaatctccccatgtggaagagcatcttccaaagagaaaggcagcgatgagccagttaaaggaaaga

SEQ ID NO: 107951 - DNA, 332 bp, Zea Mays
tcagctcactacacactcattggggagacattatacagaaggggtgcatcaggcgtcctcatgaagtgcattctctcaactactgggaagcgatagatgaggtccacgctgggcaatgtggaatacacgcagcatccaagacgctagtcgggaaggtcttcaggtcaggattctattggccaacagcgaaaagtgacgcagccgagttagttcagaggtgcgaagcttgccagtacttgtcaaagcaacaacatctaccaacacagcaactgcagaccataccagtaacttggccctccgcatgctagggactggatatgattggacctttc

SEQ ID NO: 107952 - DNA, 374 bp, Zea Mays
ctaaaacaaaattcacagctgactcctgaagaaatggatgttgttattgcagccacctagtgcttgcataactgggaaaagtcgacacatatttttatcaggagacctgtcaagggttctgatgaggagactgcttctagtgtcctattcctcagccgttcatctcaccttgtcctccttcatcttgaggaacattttctcagcaagcttcatggcgaggtcgaggatctttgggtcgacttcttcattttaagtggagggtgagctttcctcaaccccctcagtgaagatgtcttcggagcttggaatcatcgacatgaccgtctcctcacgcgaagaagcactttgaatgagggttaagctttgatatcaat

SEQ ID NO: 107953 - DNA, 545 bp, Zea Mays
atggttgtcaagacccattatccttagtcttgtttcataatggtttcagggctgatagaacatattatactcagaggggtagctatacttcaatatgctgatgacaccattatttgtgtaaagcatgatttggagagagcaagggatatgaagtttctgttgtacttatatgaaatgttggtaggcttaaaaatcaattttaatagaagtgaaattgtggtggtaaatgatagaaattggggtcagatatatgctgaaatgtttgactgccaaattggttacttcccaatcaagtacttggggtaacctgtgagacaggatgcatttgaatgattggctttcactaattgataaaaaagggtgaaaatggtcgggacccgttccactccaatttttatattgacctgtttgaattcatattatgggcattacggatgaaaacggttatatgtttttccgactatttttgttttcctcggttttaatcgggatataccgtttttatccttatataatatcatgttttaattaataaatgaacaaat

SEQ ID NO: 107954 - DNA, 659 bp, Zea Mays
gtcggctaggcggtggcgcagtctagactcaagatatgtgtcagtgaagaagaggaagttgtctgcaacggtttctttgcaccattccattgtcccagtggatgcaaattgacagtccaacggcgtttgggatgacataaattccaactttcctcgtttcagggcaaggttcccacaatacagaacgtgggcatcccatgttccaggatgctaagatttagggttagtggctcagaagatgaaacaatgcaactttaacaaaggccatataccagcgtagaactaacaactagttccttagtttctagatggtttaccaattaccagtttattgggattccacatttcagaacagttgtctagcgaagagaataacaatgtagttatttatgatttttatgaatccttcgactctcctattaatgatgttaaagatgttgaatggcctcttatgtcactagtaatggtcaaataccattgttaacaagactttctgcctccttgatcttttacatatcaggcaggtgctcaagtattttgaagcagatgaaacgcatggcatactccaagtatctggttcagagaagacccttgtagactaataggttcaaaattatctgcttaatgaacaattttcacattgtggttgagtataaaac

SEQ ID NO: 107955 - DNA, 548 bp, Zea Mays
aagaagccaacacccgtgaagcataccggactctgaagatggactatgctaagaagttaaagaagctcggccccgctaagaagatctggaagcagactaaaagccaaggatgccagactgaccgaaaagaggaagccccaccaacactgcctccctcaaggatagaaaacttttcagacgttgaggaggtgtccctagctagccttgacgatcttctcacggagtttggggacaccctagaaaacgatcgtgtagtgtgatctatggcaactgtatgcttgtaatgaacttgagtgctgaataaaataatgtgtttgaaaaaaatatggcatatgcatagtagtaatccttgctctcctctggtagaagggagtgagacccacctccccgcaccttcggagctgccattagacttagcccaagttctggacaaccaaacccaactcattgaggtcctcacaagaagcctcgagaaccagcgccccattggaggaaggcctcaggacaggatgagtgagtttctaaggctcaagcctcccacatttgcc

SEQ ID NO: 107956 - DNA, 589 bp, Zea Mays
accgtgaagctgttgcgagaaatctgggagtgggagttctgcgagttgctaggctccgaggaagacggctgcatcgtgcgggtagaagaaacacagtgcaggtgggcccggttcaccagtgggagagttccgcgcctaagacggacgcctgaggctgacggggtggtcccggttgtcggcgccaggtccaaagtgggctgcgcacgtgagggcgaattcgcgagatgggccgaaattcaagccaccggcctaagtagcagggttattccttttccttttatgttcttatctctcttctccttttagattttttttaattcataaagtctaaatgtcattcaagttcaaactttctggtagatttgttttctcattaatcattcatcctagacatggtatggataaatttatctatttttaatattcatttcatgataactagtgctctctttccaaaattctagaatttcccttttagatttttaaattctattttgggaatttaacttatttcttcttcaaattattttttgtcacaaaatgcaaacaaaacaaaatccagcatgatgcatgatttaattgagtgtct

SEQ ID NO: 107957 - DNA, 681 bp, Zea Mays
accttcggtgcacccaacagatttacaataccttgaagctaagtgttgatttcaaaagcataaggggaagacctttgaatgtatttctaaatccactcaaactcgggggctacacccaatgggtgaaccttcggtccacccaatggaggtataaatatttcaagtcatactacgaacccataagcaaggaccaagaacctttgaatcgattatttcaaaatcaactcaaagattgggggcttgtaggggacagataacacctgggtccactagaaggagaataccctacttggggccataagccagtcgccccacaaggtcgccgcgtcgtggaccgggcaaagacaacggcggagatgggtcgacctaggaaggcgatgggctcacgtccggattattcacggcttggttgtgatcctgttgaagctgctctcttttcccgtgcccgacgtcctaaaacgccagggatagcttggaacggaggtgctggggtttcctcaggataagcaaagtctgttcgctattagctaggagataagctggaagattgtgctcagcatgtgcgtagggagtgccctgcagtcgtgtatataaggcctagggggatccccatcatttttatctcattagcacctctccactcgggagacaccacttgtaaacacacgacacatacaaagc

SEQ ID NO: 107958 - DNA, 580 bp, Zea Mays
cgggtgtgacaaaagcactgttgaaatcaagcaggcgcttgacgtccaaagggaagctcttcgcactgttgatgaggaattggcctctgctgaaaagcagcgggcagaaaccatgacgacaattgagaaacttaatcaaattttaatggaggtagagcaaaagagagcgcgacttgaggaaatgtgttctacttcagatttggaggtgaggaaattagagcaggacttgtgtgatgcaattgcagacgcgagcaagaaggctattgatgtttttcagaaggaaacaacagaactgaatcagcaggctgagcaacttcttattgatttaaatagttgttgatctagcagtaactagggtcccgactgtttgggacgatctatgaatgttatttctctttatcattatcaaacgtttgtttgttttcttcatttaatcatgaacgtgttagaccttttattatatatctttttttgtagaaataaaaatattctatatggcgtcttttttttgtaatatactctgtggcgtgtccttttgtgtgtgtgtttggcgttcgtatggtaatgtaatatatccatt

SEQ ID NO: 107959 - DNA, 431 bp, Zea Mays
atttctaacttcttggccattgtcaaacagagcaaattaaaatcaagtgtagacaggagctaacaaaaaagagagaaagagagagctaagctaggagctggtttttgcccaatgttcaacagggccttcctggtgttagaaaccttgccctgcaggacaggaacactggatagcatattaacaatgtattgttgactaaaatagagagtggattgtggcgcactccaataagaaaagggaaaagcacacgcgcgaacagttgtatcctccataaactatcatgaaaccgtatggaacatgagaaggtaacaaacatataaaagttgcaggattcaaaaactagcatagatatattgccattcttagttctatagcaagcactgacatagaggcactaatttcttgggcactacaaatttaagcactgcact

SEQ ID NO: 107960 - DNA, 387 bp, Zea Mays
aaaggatttaaaatgaattagttatgcattttctaagttttaggattaccttggtaataaaaatcaatttcctgatttaattttacaattaaatgacaccaatggaccgcggctaatattttcagaaaagtctgggtgctatctaaaataaaatggactgatatgtaagtaattttgcattcagtaggatggcgggttgattgtttaagaaaccgaggactctttagcaaaagatgcggctgaaggggtatccatcaatatcggcccttggatcaaaatcaagcggacatgatcagatcatcatttacagccaaatgttaagcatttgtggccgacggatattcgatcgacgtcgtggtttaacttacatgagatcgaattcaaatc

SEQ ID NO: 107961 - DNA, 395 bp, Zea Mays
gtcgtggccagacctacaaccatggaaaggtgaaccacttggaggccgaagcaatccaggatgcaccagatatggtagtaggtatgtttctagtcatatcccatccaacaaaagtactatttgatactggttccacacattcttttgtttctacatcattggtagaagcacataacatccctgtagaaccaatgattccacctctaagagttaattcggttgggggaaaattttagtccgataagatgtgcccgaatctaaggattgaaataagggggatagattttcccgctaacctagtagtaatgggtactcaagggttagatgtcatcctttggatgaattggctgcacagaaatcaagcaactatcaactgtgacaagaggacagtaaag

SEQ ID NO: 107962 - DNA, 502 bp, Zea Mays
gttcagaagaatattgatgagcttcgtcagttgaaggaagaatgttatactgtttgcatgtaatgatgtaataagttgaagagcacatttgctaaagttggtgcattctcgactgaacaaaattttattcgcggtgatcctgaaggtattgttaaatggatcgaaggtgaagttgaagcttttgatgaagtcctcgctagtagaggggatttctgtgcctccgtgggtgcccgaggggccgtattattgcttgaaaaagctagctatgaacatgcaaaggctgtaattcagccagaatttatagttttggcagatgacatcaaggaaccttcgactgaagctattgcccttggtgggaaattttactctgaggtctaggtgaacggtggaagggagatagcagatgaagctatcaggcaatcgtgcctcagaataggcaagaagagctgaagaagccgtggagtgagaaagacgtataggtatatgcttctgttgagatttg

SEQ ID NO: 107963 - DNA, 408 bp, Zea Mays
atatcgagaaggctcggactgcatcccgagtacttctctataaggactggtttgttgagtgacaacctgggaagatagtgcatccaaaagggagtcacctggactatgtgaataactcctggcttgagttcaaagttctcgacttcctccacatgaggtccgatgggggcatcatgccgaagggaaccaagaattcgtgcatagtctttgcagtcatggtgcttgacgatgaagtctcacttggtttggaggggttaggtatagagcatgtcttcatgttgatattttgataaactcttcaagatggcactttggggttgcggtttacatttgtcggtaggtcaaaatcggttgtacacctctctgttacaccatagaaataacagagcaagataatcctgctaaaac

SEQ ID NO: 107964 - DNA, 674 bp, Zea Mays
gtcctcgtcatcaagcactgtccacatatgagaaggaatgtttagctatattgatggcagtcgagcactggagatcctaccttattaattgtgagttcatcatccgaactgaccacagaagcctaatccatttggatgaccaacgtcttaccactccttggcaacaaaaagctctgaccaagttgctgggcctgcgttacaaaatcagctataaatagggacacaccaacagagttgccgatgctctatctcgacttcctcatgaccaactttgttctgtcactactgtacaacctacttggctgtcagaagttgctgattcctatgctaattattcagatactgcaccaatcctgaaattattggtagctcagactctttccaatcactacagcctgcacaatggattaattatgtacaaggatagagtggtgctccctgcacaatctgaatttccccagaaaatattctcaaatttccacgacacaccaattggaggtcattctggattcttggtaagctaccaaaagattaagaggttatttagctggactggtatgaaacaaatgatcaaaacttggtgcagtcagtgtccagtctgtcagcaagctaaagttgaaagagtaaaataccccggacttctccaacctctgccaatacctgatggtgcttgg

SEQ ID NO: 107965 - DNA, 333 bp, Zea Mays
ccgcaggtgcgcgcgtaaacggatagatctactacagtattagtagctgatggtcgaacagacaaccccctgagaagtggatcttgctggccaggtggtgcaagggccgacagcgaccactaaccaggcagtgttcctgcgagatgcatgcatggccatccatcacctctcccggtctccgtcgatcgcctgtcaaaatgaccacggggacgcctgctgctaccgaggaccgatgagcgtctgactagtggggcaggagccgaataaaacacagggtccagcactggcaggccggtccggacgcatcaacaagtgggaggaggccccagctgt

SEQ ID NO: 107966 - DNA, 589 bp, Zea Mays
aaatagtggcgcaactttcacgcggtgaggagaactgcattcaacaatttctagacctaagggtatctgatctttgagggcccgaggacttaactgatgaagtatataggatgctggagtggatatgcatgcccttcttctacccgttcgactactaacgcggtgcttaccacgtgagtcgtgtatgagatgtataacagtaggtcttcagctggtgggtcggttgggtgggttgagaactggtggagtggtcaagagtttcttgactgcctctagtgcttcttgagcttcgagagtccactagaatctgtccaccttcttaagcaatttgtagaatggcattcctccctcgccgagccgtgagatgaaacgactcagtgctgccatgcggccagaaagcttctataccttcttctgtgatcacggtggatccatcctcggaatgcttcaatcttctttggttggcctcgattccctgctgactgatgatgaatttgggaagcttcctggctggtaccccgaatacgcatttctccgggttatgtttagaatggtagcgcctcaagctgttgaaaacctgctggagatc

SEQ ID NO: 107967 - DNA, 615 bp, Zea Mays
tggaggggaaagtagctatctgactatggatcaggtttggagttgcagaaaagatcttcccccgctgtcctaaactggtgagctcaggctgagataagacttgggtggacaacaaagggagaccccagaaatatcaagttgggcctgttgagtctgctcacagtggagtgttcacttatcattcttctgtctgtgtttactggacatgggatattttggctggttaagttgaccaggttcagtgaatatggtgtggctacgagctggtgagatattgatgcatgaaagccacatatgggttgctcatataatgttggcaccctcaaaacatttcctcactgcatgttggacaggtgcagggccaccttgccccatattcaggtgtttatagggtaggtttcagcgaggattacctccccgtcttgagctctaccctcagaccacaacaaagaatatgaagttcttgtgtccatactagagatagccctctctccccagccaccaactcggtcagcccttgtgcacagcgcgttatctccctgctagtggtgaccacggccacaacctccttcacctcatagtggccagaacatagtcgtgccaccacaaatcgtc

SEQ ID NO: 107968 - DNA, 318 bp, Zea Mays
cgagatcctgcacaactcgtctcccaagatgaagcctctgaagcaggggaacccctgaaacagagcactccacgagcgccacaactcccgtcaccacgatcgtcgccacgcctaggaacacgaacgagaacaagccgagcaggacgccaggctccaatgcaagaacccacttctccctcagaacatgttgtctgacttcactcatgcattgaatacaccgagtgaagttaggggagtcctggctcaaatcaccaacggcttgccatgcaccctagacacggaaggctaccattagatcctcacccaggaggcaaacca

SEQ ID NO: 107969 - DNA, 770 bp, Zea Mays
attatcagagaccacatccagtatgttggattcccttacggtgagctaaaaaggtgtcaggacatgcatgcatgtgaagatatttctactatggtttgttccggccgggagaccatttttgtgaatattctggtgcagtggtgctaccctttccccagttcgaatctgcatgagcttgctattttgctgggcatacggcagcgtttcagtctttctacgtgatggtcttaattcttttatcgggactctttttgtttcttacagattttggttgacgttctgacaaaggagtccatcgtttgcaagctggaaatgttgaaggcgtcgtcatcgtttgtcaactcccgtttacacgcagtcaaagcccagacgttggtactagccaggtaagtaagtaagtaagaggcttgcagaaagccacgcagagaaagagggaagaagcattcttccatatacatcatatcatatctgccggcctcacgtactcgtaataaagggttcataagaacagtctgaaactgaaacatggagagccaaccatacatggaaaaaaaatatcaactttgaaagaaaagaagaagaagaagaagaagaagaagaagaagaaaaatccctgcttatgactgactgggtctgaattgggtatcccgttttggcagtggaaacgatgagctgctgccaagcacccaagaggccgagagactccgtggcgctctagagaaatgcagaacacgtgttttcagagacaatggccacaagatcttactggt

SEQ ID NO: 107970 - DNA, 463 bp, Zea Mays
actcagttcatagcaacgacatacaatttatttgatgagtgactcaggcaatagggattcacaaacaggaacagacggtgtagagttcgcataaagacttaatactctgattttcgaacacttttaagagctatccgtcataatatcatttggggcagcagctgcacccaccattatgttacatggagaaccaagtaaagaatataagagcttaccaggtaagtagtaggaaaagcaacacaaattaaacgcaaccacaaaatcttagcttgtttcttcattataagaaaactaagtcattccattatgttagattgttggatcagaaacaagcatctaaatttggtataccgacaggcgacagccccttagcgcatagtgggttgaggcattgcatcaaacgcttcaagggcaaacaagcataatggaaagccagacagcaccggaacgatcaggacacgag

SEQ ID NO: 107971 - DNA, 358 bp, Zea Mays
gttggatcccaggtcagtgatgatgttattcggtatcccaaacctgaatattatgtcttgaataaactccactgctttggctgaggtcaaagaggtgattggcttgtactatatccattttgtgaatttgtcaatggcaaccagtatatgagtgtagcctccctcggctttcttgaaaggtccaaacatgtccaacccccaacatgcaaatggccatgttacagaaatggtttgcagctgctgcgcgggtaagtgttgttgctttgacaggaattggcatgcctcacacttctggactaactcggcagcatcgctttttgcagttggccagtagaaactggatctgaaagtcttcccg

SEQ ID NO: 107972 - DNA, 567 bp, Zea Mays
gtctgcttgttaaaaatattaccaattgattgtccgggcttcaaaagattgtcacatctcttcatagttgtgttatgaaaactatcacatttgctgcctacatgatcttgaagcctatcagatttgttccagccatcccaaccatctattacaaaatgcatcattcccaccttggcctttgttgcaatctctaaacaagtagcactgtaaacaaaaacacttatccaccttctcactatactctaaccaaccatatgtagtgaaccattcagcttgacagcgacggggatgacccgctatgatcgcctgtggaaacttaaaaccaggtggcggtctacaaggacctctagtcaaatactttcgccttatgtcatcttgtagatccaggcctatataatctgatattctccttctatcagctggatcatatggaagttcatcgaaagttacctcatgacgtgagactcgtgaagaacaatgaataggacgattggtatttgatctattgccatcccttcttgaagtgcatccttctagattgtcattatcatttgctgggggtatttt

SEQ ID NO: 107973 - DNA, 276 bp, Zea Mays
aggactcctctatattgggatcagactggagaaagacagttctttgggcctgagattattcaagaggcagaagaacaagtccgtataatcaaggagaacttgagggtagctcagaccaggcaaaagagctatgctgataatcgaagaagaccattgaagtttgaggaaggtgatcatgtgtacctcaaggtgtcaccacttcgtgaaatgaggagattcaaaattaaaggcaagttatcccctggctttattggacgcttcagagttttcaggcga

SEQ ID NO: 107974 - DNA, 416 bp, Zea Mays
gtgttggtcgccggcgaagggtccgcctgaacgagaccatgcgaaggaaccgacgaggctagactctagcaagcacgtacgtgacgtagggcggtggccgcggtcgcggtcacctagttgcgcagagagagaaagcgcacgtagagtagtcgggaaaatagacggcaggagtgggaaaagatgattctgaccactctcgttcagggagccgatcaggcaactcgggaggcgatttccgccggagtagccggctccggccgccgctcaagagtctgacgggagcaagctctgaaacgctgctccaggaccaggaggaagaacgaagcgttattgttggtcttttggtgtgtttgggttgggccttgtgttttgtacgtataggccatcttgtttagttatgtggcccatctcacgtt

SEQ ID NO: 107975 - DNA, 555 bp, Zea Mays
tcagggatacatcccagtatttcttcgtctacaccaccaaagagtatagaacgaggctgatagccaccttctatggcgaactccctaaactcatatatgtcttcttcacttagctcctgaccacccaaatgcctcaagtcgaaggtattgtcttccattgaagtctcccctgctttctttgtcttagaagacaaagccttagatgtaacatccttttgcttttgaaccttagtagcggttgcatcttcaacctctttcccaggcgctacatctgcaatacgtctatcactcttggagatggtagtctcaagtggaccaccactatcattggttctgtgggttatatcaacaattctatatgcctcaacaatcgcaatcttcttccttgtttctgctggaggagtcttacatacagccttcataacagtcttaatatgtcatttctttcaaagcaccggatcctcacacgctttcgtcgtctcttccacagcagccttcgaaggacccctcactgccccctcttcggcattttgttctttgtctgtaataaactag

SEQ ID NO: 107976 - DNA, 388 bp, Zea Mays
aacacgggtgccaatctttccaagtctgtaaccacggtccgagataactcttttgcacaaagctggtgaaagaaatagctcaactctgaaagcgctagccagacatgctcagggacatagcctcgaaccatagcaggaagaatctgttcaatccatatgtggaagtcatgactcttcatccctaagactcgcagagtagataaattcaccccctactcaggttagctgcatatccatcagggaacatcaacatcttgatccactgaagtacttccttcctctgggccctgcttaggacgaaatcagccttaggccttctccatgtcttttcagcactaggcggcttcatcttttggtttgatctatcacataacgctgccagatccac

SEQ ID NO: 107977 - DNA, 577 bp, Zea Mays
ggcagctcaagatccctatgacaatccgatgccacgttccatttataccgaggatccagtgtctatacatgaccaaggaaaccgcgaaacagatgacatgacaaaaaaatggaaaatgatacaatcctgacaagatggtgcacacattcgatggtgaagcatggaaacactttgatgccattcatcgtgagaaagtcgaagaggctcgtaatgtacatgttgcgctggccacagatgggttcaatccctacagagtgagagctgccccgtacacatgttggcttgtgtttgttatcccaatcaatctccccccggtgtatgctttcaatggcagaacatatttgtgtcgttgataattctcgaacacccggggaataaaatgggcgtgtacatggagcctttgattgatgaattggtatgtgcttgggaggaaggggtatggacgtatgaccgagttacgaagacaaacttcaaaatgcatgtttggtactagtactccatgcatgacttaccaacatatgggctattctgcgcctggtgtgttcacggtaagttcccatgcccaatttgcaaggaa

SEQ ID NO: 107978 - DNA, 394 bp, Zea Mays
gtcaagtcgcctagtgtatcataggggcaaggaacatgcacccgaccctgaatgcatgaggcccaaggctgacatgtggcataagtggtatcgaggcaatgatatatggttagggcccatttctttatttcaagcctgaggtatgccacatgcctcatggtgttgttccatagattgcaatgatgcttgatgatgtcaaggtaggaccctacatcatggctcaaggagttgtggtgtaaccctagtggccaaagacgaataaaccatggttgggtcccaagatcgtgccaaaggtgttcctcgatctattgcagcgttctctaggttaggcagcatggagagagaaggaccaaggttgaccttggctattgctataaacctagagacatcttgt

SEQ ID NO: 107979 - DNA, 407 bp, Zea Mays
caaggagctagctactggtttcaattggttagcagcagtagttaactgtgatgcttacgtgcgatcgtgcgcattgacactgacaccacgcgtaccatgggaatccgactttttgtccgatgctcaacgctttgtttagtgtattttgtcaaacacccgataaataagtcattactcagtttaccgaaatttttgtattgagtattaccttcagtaaagagtttgtcgaatgtttttagcgtccgactgagtatgccgaatgtttttgaatgtccggcagtgagatgatgcataacgataaagtatacactcaaaattgagtattacaaatctgattagaccctctagtatggtgtctgggtatcagtgctgcaatgacactcaacacactcaaaacttttaaatag

SEQ ID NO: 107980 - DNA, 490 bp, Zea Mays
aaactatgtcgttttactgttgtggataaataaactatttatgtgctactatggttttgactaattgtgtgttgctatctatatgcaaagagttatgcaatctaggtttcaaacctataaatgagtctatcaattaagctacaaagataaagcacccgactaacttacataatgtaaatatggaagctaaaaggtgatagagatacaaactcctattgacgactctggtattttttatcaaggtatcgagaaccatacaagtttacccctagttcttattggtgccccttgcaaggatgcccatataagggccatgctcctagttgcataactctatgaatatccctaagcctttaccatgtgcaagtggttctctagaatagcttctcctagaccgctcaccattgccttcactatcaaatttttggcagaaacactttgcgccttgttccttctagtatatggtggtgactacaccacaaagtatgac

SEQ ID NO: 107981 - DNA, 462 bp, Zea Mays
aaagtcaaaaggagttggagaagtttagctcaaaagagctaaagttgggctagtctgggactcgccgacactctggaggtacgcagtgtcgtccggtggccacatttagacaaattccttagtcttaggaattttatttataaaaatgacgagacagtccggtgtgcaccaaacagcctctccaacggctacttcagctagagcaccaatagtcagattgggtcaccggacagtccggtgccgtcaccagacagtctggggccacccagaaaaataaggggaccaatcaagctgatatgccaatcgttactttgcattgtcccgtgcctcaccagacagtctggtgcgcccacagacatgagggttttggatcttccatttggaggaagcaacgactcctagaccctcatagcctataaaagggacccctaggcgccctcaaggcttcaaccagtacgaaag

SEQ ID NO: 107982 - DNA, 1213 bp, Zea Mays
ggggcaaagctcagcccaggaggagaagcgctttctggccaagaaatcatcgtaggcagggtcctgagagggctgattcaggtgagtcatgaagcccacaatgatgttatcatcagcattcagattcaaattttgcacgccctggtcgttctgatcgttatttccctccaaaaatgggtccgctggggggaggggtggaagagcaagcacaacaacttcttgatcaagggcatcctcctgagggaagttgacagcttgcgggataacgatatcgttgaaaagacccacagattcatctgaaggaaggtcctcaagaccggagaattggtaactgaattgttcctcttcattgttgactaaaggaacaggagcaggcggttgttcttgctggacctgttcaaccggccaaggatcccaaccatcatcagcattattggcattggcatcctctaattcaatttcaccattggggggatgttgaggtcaaaatggaaattgggcacaggttgccccaatccaaaaaattccaccggaagttgatgcccattatgagggtacggaggtacaggttcttcatcctcaggcatgttaccaagcatgaactgctgcactacgtcgcactaaacagtccaggaaaccccatgaaaacctttagctactgaaaacacaataaactgtggaacctcctgcagagaagtcacccgtgctctaacaagcaatctagtagcattagaaatatctggatcccacatgagcacccgaccaaaagaaccaatagcattctgaatgtgctcgtgtgaccagaaatccaagggaaacccaaggagcagcaaccaacattcatgattaaaaaataatgctcgttgattccaagccgcattgtgcctaatcacagtgaaagtaaagcccaaagcttgctgcggacccatggccacgagattgtccctatcaaaaatgaatcggaacctcaccaaagcctgacccaagtgggagcgctaaacactcctaatctgaacatgtctaatctccaaaaggtactctcggacaatgtcagcaaaaaattggaaattgacctcatgctcaggtagtggttggaccaggacaattccccaatcatcatgagcggacggttgcgggcgagtgacagtacgtaccataatctcccgatgatcaatgggttgcgccgtgaagccatgagggagaaaagggcccg

SEQ ID NO: 107983 - DNA, 621 bp, Zea Mays
cgaaagcgttcatcaagtttgaggacgcaagaccatcgattaccgaggaactcgacttcgatcgactgccacgcatggtaggctgtctctaagggcttgtggactcgctcctggagttcgatggagagggtgtcaagaatccatgaaaggacgagcctgtcatagtggtgccagtacacggtggtcttgacattgttagggagaatgtgatcgtcaagggcgtagcggcaaagagcgagcagcaccatgtcacaccatgtggggtacttggtggtcgagagatcaaggacgatcgtgaccaaggcgcggatgtcctggatcatggttgtctgagtgtggaggtgcgcgatgactgcagtgtcacaggcggtagttgtgtcgtctctatccttggtgggtgtcgctgctttctgggcatcgagcaggtggcgttccatggcgcggatagcgtcttgttccttctctagggaaagagcaatggcatgtgcacgctgccaagcgacctccaaatcaggcgtgccttctccacggtggcgcgagcaggcgcctgttcttgctcttgtttcttggtggtagcagttgctttctattcgtctgtcaagttggagtggcactcgctga

SEQ ID NO: 107984 - DNA, 903 bp, Zea Mays
gggaacatcaatatcttgatccactgaagtacttccttcctctgggccctgcttaggacgaaatcggccttaggccttctccacgtctttccgccacttggcggcttcatctctaggtgtggtctatcacataacgctgccagatccactcttgccttcacgttatcctttgacttatcaggaatgtccataattgttgcccacagtgcctcggcaacattcttttcagtgtgcatcacgtcaatattgtgtggaaggagcaggtcgtcaaaataggggagccaagtcaagccagacttatgtgtccacatatgctgctcaccatatcccacaaaactaccttctatattagccacgagcgcatctatctgttgatgaattttggcaccagtcatcgttgcaggtgggcggtctgccactatgacaccttttgtaaagtttatgatgtctaggcggaatggatggtcaggagggagaaattgtcgatgtttatcgaaggacgaatatttgccaccctttttcaaccaaatgaacctgagagcttccttgcaaactgggcatgggaacttaccgtgaacacaccaggcgcagaatagcccatacgccggtaagtcatgcatggagtattggtagtaaacatgcattctgaagtttgtcttcgtagctcggtcatacgtccataccccttcctcccaggcacgtaccaattcatcgatcaaaggctccatgtacacgcccattttattccccgggtgtccgggaattatcaatgacacgaatatattctgcctttgaaagcacacaccaggggggagattgattgggataacaaacacgggccaacatgtgtacggggcagcgctcattccatagggattgaacccatctatggccaacgcaaca

SEQ ID NO: 107985 - DNA, 411 bp, Zea Mays
aacgggccgggaagaaggaagaaaaaaaaggtaggtcgtttcttgtccaaggtccacatacaacctacctgtgttgatctgtttgtgagatcaggaacctgcagcaaggatggaagtcgcccctcttgccaagccgatggcccatccatctgctccctttatataggagcaagtcttaaagaaatggagctcatgcactctgatgacctaatctatgtgtgaacagtaactggagatagatgatacctctctctctccagacttctcagttcccaaggaaaaagctagctaatccttgcaggatcagtacatacatattgcagacatggcccttctgttgtagtacttctctaatcctagtactgaccagaccaagacctcaaatcaaacgaagaaaaatttacccagaag

SEQ ID NO: 107986 - DNA, 481 bp, Zea Mays
gggagctggagtacaggggagggagcgacactaagcaggggaaagtacatgatatgtcagcagtcaagtgtgttgaacagttattagacaaacaaaagcaatagcaatatctaagatttactggatcagaaggacaacttgcctggaaggctccatgtctaacactgtaatgcatttcctcctctatacaatgaagaagaaaagctataacatttgattcttcctgctcatgtgatggtcctgaaaagcccatattgatacaaaatgtgatagcataatactttccatttgaataaggacagcttttcttgccttttaagaagataatacagtagacttgtgcagtatgtaaataatgaaaaatgagaaaactacgaaagaacattatttaaaattcaggaataagggctaaccagcacagcaatcctcagtgagaaccgcaaagacatccaaagtaggtggcacttttgaaaaagctgtc

SEQ ID NO: 107987 - DNA, 634 bp, Zea Mays
ctagaggatgccttcgccttgactatgtaaggcccttcccgctttgcctctagcttgccctaggactctattcgggtggttcttacaagtacgaggtccccttcattgaactctcttgggatgactgtgttgtcatgccaggctttggtctggatttgatatttgttgagggtctgcaaggcgaggacacggtctccatcgataagatctttggaagttagtacatcgacttcggggacgactgatttgtttgttcggggggacccatgctttaactcttgcggcgtcattgcctcagaaccatacatcaagcggaagggagtgaacccggttgctcgacactctatcgtattcagggcccatactacttcagctaattggtcggcccatttgccctttttgtcatcgagaagtctcttcttgatggcactaaaaatcttgccattggcgcgctcgacgacgccgttggattgtggggtgtatacagaggcgaagacaggcttggtgctgatggaacagcagaattccctaaagtcttggctgtcgaactatttaccgttgtcgactgtgagttcggacgggactccaaaacggcagacaatgttttgccagaagaatttttgggcggtctttg

SEQ ID NO: 107988 - DNA, 372 bp, Zea Mays
cgggcgggcgggctgtgactgaccgccctcagcgcaggcaggcacaacaacccgatgggggtggttggtgttgttgttggtggatgtggtctttcgctgccgttggggtttattcctctcgttgcagctgcgtcttcgtcatggtcatcctggtcgtcgtcttcgaacgctcggaattcggagctctctgttcctttcgttgcgtgccgactgcggagtactactccgtactagtatgcagcagctgttttttctttcttactcgggaatcgggattgaacgaatcagcgtccgtcttggtgatcaaacccaacacgatttccgcgcgctctgtcttcttttctttctcccacaccggaactcagttttttt

SEQ ID NO: 107989 - DNA, 366 bp, Zea Mays
ccgggaggtattgggcaatcccacaatgaaatccatgcaaatatcctcccatttccaagatggtatgggaaggggctgtaaggtgcctgctaccttcaaatgactggccttgactctctggcaagtgtcgcattcagatatatacttagcaatttccctcttcattctggtccaccagtacaaagatctgagatcatgatacatcttgttactgctggggtgcatggaaaatttggaaaggtgagcttcatccaatatcttctttctgatctcggggttcttgggaacaaccaatcggtctccaaaccatagactccctttgctgtcctgacggaaacatttgtattttttcaccctctgttcgat

SEQ ID NO: 107990 - DNA, 570 bp, Zea Mays
aagggaagtgagtgagaaaaatgatactataattttgtttgtacaatttatttatcctgactttgcaaacttatttttctcattatatttgcagagattggatgtggcgtaaactatatcgcagatgaggcacatgcaagatacgttcaggaaaaaatggcgatggtggagctgatggaggaggacaacgacacatctaggttgagtgagtttatcgctctcgcagaggaaggattacatggggaagaggaggacgacacatcaaggttgagtgagctcatcacactagctgaggcaggattacgtgctcaagaggaggaggacgagtttatgtcttaggccaccgaagaggtagaggcggcttattacaagcagaagtgtgatgaggctgaggatgagctattctcccaagctgcagatgaagcagaagcccattattacaagagaactgctgaaaagtgttatgctggacaatgcagcaagtggaacgaggttgtcgttgaggattgcgcgacggatgactctgaagatgagttacttatagattgtgattctgattgaacaaacttg

SEQ ID NO: 107991 - DNA, 315 bp, Zea Mays
tgctgatcccaatgggggtgctgcctgtgttgctaatgtggatgatgaggagggagaaaatgaagttcctttgactcgaaaaaacagtcggcaattcattgctagcggtgaaaagtagtggagttccctcccctgctttgtctgctcttattggtctgcaagaactgtccctggccaattttgatcagacactcgaggatatggttccggaggatttgttatcggagccagcagatgatggtgtgagggaggtttgcgccgatgtgcttgatgctgggttgaggtcatcccgtgcctcgtcgaccttagagcgcg

SEQ ID NO: 107992 - DNA, 979 bp, Zea Mays
ctctctgacatttcttagctcctgcaaaaatgagatcttctcttcatccccttgaggaccatacacacaggttaaccaccaggtacctccttcctgcttatgaaactaaatggagacactatgattatcaactctgctcgcacttgtgtatctcaaatgatttttccaagccaccaaaattcccccactggccccatccgaaggcaagaaaacatactcagtaaattcagaacccaaaacagagactaaggtgcttctagcaatatattgcatcttagtttcctgcagacataccatcttagccttaacggacagaactagatctctaactgaatcttggcgagcacgagaattgagacctcacaagttccaaatcagaattttggatggatccattaaaaacatagattacagcaccgaccagacatacaattgcgtccagtgaatagcaacacccttactgaagggggactaactcaggggctctccacccaaacagggcagatagatcctccacctcactacaagttaggggcgcttaaaaagccgagcatattcttcccaggcttcctgactaatcccctcattctcggtaataatatacagggatctcatgactttcctggtagttctccctcccaggtcatgtaaattaaattccactccaacacccgcaacacgacgacttcttcttggcatgggagcagcaggtggggaaggtggaggatctacatgcaaatcagttcgcggaacaggaagaatcccagaagattgcttggtgattccattgaaaaactcatgttttctagcttcaaagcttgctgcttcatgaggttggacttcagcagcaattctatgggcgggggcatcagcagtgcacacaggcatagagttacccaaggactccgaatgaggcaggcaaaccatctctgtaatgttggcctcctcgacctgtatcacctgtccctcttgaatctga

SEQ ID NO: 107993 - DNA, 899 bp, Zea Mays
gccgaattctaacgggggagggacggcataaactgtctccactatgggaaagaccattcatagtagcagaagtcactcggcctggatcatatcgcctcactcaaatggacggcacagaaattgggaactcatggaacatagaacatctcaggaagttttacccctagctatatctcaaaagctattgggacgacaatgtactctgtaaactgggaaatatatcatcaataaaaagacttcaaaggcactcaaattgttcactgtcaacctgcatgcttacttaactcggggtgaccactataccctactaacaaagcaatcggcttaagttggcaatgacttaaggcggtgcgacatgctcacgcttacttaactcggggtgaccactataccctactaacggagcaatcggcttaagtcagcaacgacttaaggcggtgcgacatgctcacgcttacttaactcggggtgaccactataccctactaacggagcaatcgacttaagtcggcaatgacttaaggcggtgcgacatgctcacgcttacttaactcggggtgaccactataccctactaacggagcaatcgacttaagtcagcaatggcttaaggcggtgctacatgctcatgctcacttaactcggggtgaccactataccctactaacgaagcggtcgatttaagttggcaatgacttaaatcggcacggcacactcgctcctacttaatccaacacaagcacgtttgcgattactcatcttagggcgacctctatgccccacgaagaaatttcaaaaccatcatactgcatttacttctgcgattgtagataatgttgtattctaacaacgggaaaacaatagcggcattcaatactaaaaagtgttttctaacaaaa

SEQ ID NO: 107994 - DNA, 486 bp, Zea Mays
tgcaggctgtagtttgtattagacatcgaagaaataaagatcctccttagggcgggatcatcttgggtcatcctggctgggcacagcgccgacacagggaacctgggtggttagcgtcctctcccctacgcactgtgtcattccaatatccccctccactcacctttgagagacaccaggaaacacaagttacagacttaccaaagggaagtcggtaacagcatatcatcatccaagcaaaaagcagcagcagcttctccaatagattcatcagaattcagacaataggaaagataggaagggggagatggggggggaccttgagatgaggagttcatctcgtcgctagtgttttggagccaccgccggtgttctggagctgctggtggtgttctagagccgcagcgtgtgttctagactcggcagagcagaggaaaagtttcaagggctggcggtgcgttgcctttattttactgtagatgggct

SEQ ID NO: 107995 - DNA, 549 bp, Zea Mays
atgcaaagccatagcaagcctagttatgtgcataaactgtccacattttcacttttttgtttccctaattgttctgaatgaatatcacaacatgtgttcttgcaagctcatataagatgacttcagttcaactaatagttagcttgtcatctgatgtgtttgacatctgcttcggaagatggtaatcagattagaagagctaaattagatgctatgacttttcacagatgttcaaactagaggatgtagcaatgggcatatgggtaaatgaaatgaagaaaggtggattaccagtgaaatatgaaacagacaagagaattaacatcgacggctgccatgatgggtacattattgctcactaccaagaaccaagacatctgctatgcctgtgggagaagctcctaacgacacatcaagcagaatgctgtagcactaagtaatagaaaaggaacttcaatgcttagatcttggcccggtttatgtatcaggtcacttgctaaccttgcgatgacaattgacaacaaagaagcctctaacatcttctttttc

SEQ ID NO: 107996 - DNA, 291 bp, Zea Mays
aacaggtgttagaagaatatcgatgttttgatggtactctaaatagttaccttgaaaaatgttggggaataattcattctttttgacgaattcagtattcggcatatcttgagttgagaatcatagagctaacaacttggcacaagatgcatcaggttatcggataaagcgagggaaatttcacaacactgaaaatctgataaccggtgcagggccaattccccaggtcgcagaccatccgagtagagactccggactgtccgggtttacctggaaagttctcctaattga

SEQ ID NO: 107997 - DNA, 823 bp, Zea Mays
atattacaaaattatagaaactggaatgggtcaatttggacttcacatgaattttctaggcattatacaagttctagtaattatttttgcaacaaaattcaatttctattttattttcccctgattttctagttttctggactgagcgaatgaattcagataatagcaggggctaacacgcaaaagttcctaagactcaggattaactcgggtggtctgtgggttgattttactgaaacccgagggctcatatgcactttagcgcgaccgaaggggtatgatgacatgtggaccgcacgatagaaaccagacggcccagattagaccgtcatcataaccgaaccggtatgcattattggccatgggatccgagatcagcggcccagaatgatccacgtcatcacataccacaagcccttggatggccaatcaacgtcccagattgaatgcgctgaaagggtaccttctgcgaccaatctgagtcgtacaacacgatctaacggtgtcggtgcatattctccaacacgacccttgcccggccgacgttgtgcacgctccggcgtgattcagctcgtagcccgatgacccaaaccctaacctaacgtgagctacatcatgcaggtaaccaggcgaaaccgaagggtgtgcttaccagatttcagtagcgacaggcgctgctggcgacgttggacagcggtccggtggtgaaattctcgccccgacctaaaattcgtcgagcacagaccgcccccagcccaagaacacgacacagagatggccgtagaccattggcgaagcactcgagcgccaatctcgcccagac

SEQ ID NO: 107998 - DNA, 380 bp, Zea Mays
gaaatataagacaaagccctacatgattaacatactggttatcactaattacccacgaaaaattcccagaaactgctaatactactgctgttcacccacctgaaaaatctgtttttttggacagcaacatatccgtattcaaacaatgatatctcctaaattataactctgaatcgagcgcataagtactatttggaaaggtatgacaaagctctacatgattatctcactgattcccactaattaacccacgaaaattcccagaaatccctagaactactgttgtccacccactcacaaaattcctggacagcacctctaccgattcgcaaagataaacgcataatccaattgattgcagcacaaaaacaacaaaagtt

SEQ ID NO: 107999 - DNA, 422 bp, Zea Mays
ggttattctgtgttctgccacaattccctgttctgcctttctgattctctcctcctcgcgcacagtccattcccaccattcacactctatgctcatctatactacttattaaggctacaataataatcggttattctgtgttctgccacaattccctgttctgcctttctgattctctccttctcgcgcacagtctattcccaccattctatatctatatctatcattatgattccccttgccgcaaagcccattttcattcccgttcctccatacagccgacgtcctaaaattaaaaaaatatacatggctccaaggggattcgaacctatgacctcttaagtaaatgacagtagtagctaccgctacaccccatgtatatctatatctatatctatatctataatctctactacttatta

SEQ ID NO: 108000 - DNA, 552 bp, Zea Mays
cacaacggtgagcttgtaattgatgcgttcactatggcagatcatgagcctttgcgcacaacgggtaaaatttggcgaaagtctcctccaagcacaataggtttgccaccaaatggtatgttcgcattttctgctttatgttccgatagaatatcaagcatagtcctatctagagcctcaaagcaatgcctatgggtcatcgacgcctcatcccatatgacaagagaagtccgttgtataagtttagacagcatggtacctctcttgacaccacaaacactactctcatctagatcaaagggtattttgaaccgcgaatgagctgtgcgcccttttggtaacagcagcgaagccacaccagaggacgctacaacaagcattattttttgtcgagatctcaaatgcgtgagtatagcgttccacaagaaagttttacccgtcccaccatgtccacataaaaaaataggcccggcgagcaggagagcgcagattcaatcagcatttcaaaaatgaatcgttggtcagcatttagctgcgagacagcagcagcgg

SEQ ID NO: 108001 - DNA, 376 bp, Zea Mays
actaaaggtgccaaagacttagaagtcgttcctaagggaatgtagagtcagaaagaaaagcactaaagtaaaggtgtcgaagacacagaaatcgttcctaagggaatgaagagtaaaaaagaaaagcactagagtaaaggtgtcgaagactcagaagtcattcctaaggaaatgtagagtcagatcctgaagaccttcagatggaaggcgggatcagttatatttcgatgtatcttcgtcattacatctttggtaacatgtacttttgcatcatagcatacatttgcataaccccttcatcaagtagacattatgacatcatggcatcaagcatatatcattccatatgtcaaaaaaagaaagaaaaaagagagag

SEQ ID NO: 108002 - DNA, 383 bp, Zea Mays
tgtatttcgtcgacaggtgtaatcgaccataaatgagggccgattgagctctaggaaatgcataatgacaaataccccttccttgtgaatatgatagatctaaatgacaagaaagtcttagttcgactggatgtggccaataaagacaaagggaagatcattgtcatcggtaaacctcgagtccttgatgaggacaagagggtcctctcgagggaagtagtagctgagaagacccctgatggaagggagatactgaaaaacaccattagaaatgaagacactggggcaagcccgatcggaccaccgatcaaggcttcctatccagcaccacacggatggtctagccaactcccggatggtctgggcaacaagcgaatagtccg

SEQ ID NO: 108003 - DNA, 330 bp, Zea Mays
aaaaagaccgcatcgacggtcttcggcattcgaccacaccaaagtcacagcgaggggcagcgctgactaccctcgcgtgcgacactacgtgcaaaagtcgcctacgggtgcagccggactagcacaacaagtgcgcaaaatcgaagtcttctccaaaagactctccatgcaaaagtcgcctaagggtgcagccggaccctccgtgcaaaagacgcctatgggtgcagccggactagcacaacaagtgcgcaaaatcgaagtcttctccaaaagactctccgtgcaaaagtcgcctaagggtgcagccggactctccgtgcaaaagtcgcc

SEQ ID NO: 108004 - DNA, 351 bp, Zea Mays
accagtaaaccttaaggcgctatcatgataaggctatacgacatcgatctttcacagtggaagacttggtccttcgccgaattctaacgggggaaggacgacacaaattgtcaccactatgggaagggccatttgtggtagaggaagtcactcggccaggatcatatcggcttactcggatgggtggcacggaagtagggaattcatggaatatagagcatctcaggaagttttacccttagcaagatttcaaaagctatcgaggcagcattgtattctgtaattggaaaatacatcatcaataaaaagacttcattcgcaagggcacttgaactgtttattatcaatcaa

SEQ ID NO: 108005 - DNA, 545 bp, Zea Mays
gcttagccgacatctggggcaagcgtatggaagcctacattgtttaggttgtaatcaagacaaaagactcaaaaaacttcattgatgatcttcagcaagttttcaacagtctgaggtgctaagctggaagcttaaccccgataaatgcgttttcagcgtgcccaccggaaagctgctcgatttcatcgtaagccacatagggattgaaaccaaccctgagaatattgaagccatcctacgaatggagctaccaagatcgcacaagaaggtccaaaagcttactagttgcatggctgcactaaagcgtttcatctcacatcttggtctgaggggcatgccattttacaaacttctcaagaaggtggataggttccagtggcccctaaggctcaggaagcgtttgaggcactcaagaaattcttaacaatcccaccggtcctcaaaccacctaaccgagccatgaccgatctgtcgaccgatgatctattgttgtacatctcatgcacgactcacgtgttgagcaatgtgcttatagtcgaatgaag

SEQ ID NO: 108006 - DNA, 348 bp, Zea Mays
ctccatcccagcaagcctccaaggctcaaatggtccagttacttggtgtgtgctccaagtgtgtagcttcattcgcaaattttgaacagcctctgcaagtgcttaattgtacacagtgctttcgtaaacctagagctgaccagctgtgatttcgatgtattccacgaccacgagtgagcaatacgctgcagtgtgctttcgtaaggtatgctccagaagttcagatgagaacgaaagcgtttatctgatcgttactactccgcctcgtctgtggccaagaaacgttcgagcaccttgaagcgactctcgaaaagtacccgtcagtttcgtcattgcttacgtcacgcg

SEQ ID NO: 108007 - DNA, 938 bp, Zea Mays
ttcgtgaatgtttagttttttttggattttgctggtgtgcgtacgatacgagcagtttggattggagcctggaggatgcgaggttctgtgttttaggtgaggttttgggattgactgtatcggctggacttcggattgtgttttcttgtcgccggatgatggtggtgaaggcccgtttcaaattttgaatttgtgtgactgggatttggacctcgtagcgtagagatttagtcttctcggtttggtggggccggtttctgttttagggatgatgatggtgaaggccccgttcaaatttcgcattcggatgtctgggatgtggagcttgtatgatagggatttcgtcctcttgattttgtggtcttatttggagctcgtaggatgggaattttgtcttctggatgctgcgcttcttgtctctgctatcgtgatgttggtggtgcagttaaaatttctcgttggaatggttggggtttggagctcatagtatacggattggatttcgtcctcaggattttgcacttatgcattgctgtttgtgcagtggtattgtgcattgtagtttgcgcagtggtattgttacaactcaattttttccagagtgaactgatacattcttttgtgcgtgggtgggaggaaggttattaggcttggaatgactgatcatgtttgaaaaacaaaatatcgtgctttgttattgttagttacacttcatgtagtagcactacagatttgccacgactatggctgtgcagtagaccagtatccaaggtctaacagattaacatgtgtaaaatgggcagctgtatgtgctttgtcttagtgttagcatgtgtgcttgagtgcttctaagtttgcaggggcatactgcacaatctgttgatgttgttggagtccgcaagcatctgaaggggtattgagattgttttgattctgat

SEQ ID NO: 108008 - DNA, 671 bp, Zea Mays
tgctgaaacttccttcacaccgtccccattccccacataaagttactgacggtcctgcatcctgaaattgcagcactttgtgcacccagtcacatttcatggggttgtgttgcattaaccagtcataccccaaaatagcatcaaaagcagcactctcatgtatgtacaataaaaatggccatgagaccaccactccaagttcttgaccatagaattgcaaaccatagcatgcccactggccactctcaccttcactggttggcactcttccaccccaggtctaactgatgcaccatgtgttccctaataaaagttaaggagctgtctgaatccaccagcatcaacataatattcttccccacaatagatctcaccttcataatgtggttacggtcagaaccagatacaacctggaatcacaggtgacaacacacctctcctttttcatcctattgctccaattgccgcaacacctcatcagatagcaccatctatccatcatcagcaacaacatcatttaactaaacctgccccctcttggcacacttaacaaatggccaggctcaaatttctcacaacaggcgtagcaaagcccatttaaccttcgaaactccctatcttgcctttctctatacaagtctccaacagcctgttgaaccttcccctccatc

SEQ ID NO: 108009 - DNA, 638 bp, Zea Mays
gaaaaaggtcttcgataaaaatgaaaagttcgcaggaaaatggataagggaattgccctacgtcgtttggagcctaagaactcaacctagccgagctctgcatggaaacactcctttcttcatggtctatgggtcagaggcagtctacccgctgatctcaagtttggggcggcaaggttggtctttgaaagcatagcagaagccgaagctactaggcttgaggatattgatatactcgaagaagaacggctgaacacagtaattcaatcagcacgataccagcagactctgagacgctatcacgacaaggccgtgcgacgacgacccttttcagtgggagatctcgtcctccgccgaattctaacggaggagggacgacacaagttatcacccttatgggaaggaccattcatagtagcagaagtcactcggccgggatcatatcgtctcactcaaatggacgacacagaaattgggaactcctggaatatagaacacctcaggaagttttatccctagctgtatttcaaaagctatcgggacgacaatgtactctgtaaaatgggaaatatgtcatcaataaaaaaggcttcaagaatactcagtttgttcatgatcgacctgcattcttatttaac

SEQ ID NO: 108010 - DNA, 459 bp, Zea Mays
gtggtcagagtggtcataggtaatggcatggttgaatcagtctaggaaggtcgggggcgcttgcacagcctagagtacctcacgtcgttctgtcttccgatcccttattgacgtgtagtagtcggacccatcgaagatcagcaagcacccgatctcgtcgaggaaagtggcccccattttctcccactcgccatcctgctaggggttggcccctttctcgggtggtgatcccttactcaagaacttcctcaacatcccatattctctgtaggcatgtcagaccgggtagcggtggttaggacatgaggcctcaagcagtttctcgaaatggtcggtggcttttttagtcaatggactctttgttttttgacccactgtggctaccagcatttcgtcgtgcctccacttgtccttcttccttaatcgagccaacctcttaggcccttatcgggctctttg

SEQ ID NO: 108011 - DNA, 1083 bp, Zea Mays
tccttttgaggggaagttgtagcttttgtgcatatgggcggtgcttgttgagtgcatttatcaacaagggggagaattatacacatacacaagcgtcttgttgagagtgcattcatctgtgaagttttgtgcacttcttcagggggagttcaggaggagatgtttttgttaggaggagatggatgcttttgctattcatgttgagcctttgcctcgttctagagggactgtttttgcttttagagtttttggtgcttttcatcttttgctcttatcattgtatagtggtgttgagcctttttctacctcttcttgagggctagccatttttgtttggttgcgttgagtcgttgctaatgtcttaaggaaacaagctttgctcattttcaatgtctttggtttggcttttgtccggcctttggtcatttgagtgagctcttccttcttccttttttgttgatctttgtgtttgtgcagtggtgttgacaatgcacacattaagtgatagattgcaaccacaaggttgagatgcttgagtttgtgatgagtgattgtcaacagagtaacttcttggttgagtcgtgtggactaactaggacatgagtgtgtgtgcaacatgtctcttagcttctgatgcataggtgtggagcccagagctagtgtcaatggtgaaggtgaaaggtcatatgggtttgtgtttatggatcaagatcggtgaaagatgagcactaggtctttactgagaggctgaagaagttgggtgactggtagcaatggataacacctaggtacatcagcatgtgcgaggacatgtcgtgcgaatcatgtttccaatgtgtctgaggactagcgggatacatgcccaggacgtgggggacgcgtatggagtgtgctacctacaaaaatttggtggttgagcctcaaaatcgtctagcaaaagttcacgaatttggcctcaaaacctgatattgagattctagagggaatcgaagacgacacgtagagccatcatggagagtgtgtcaaggcaaaccaactttgtgaagggagtgtggccatcagatcatcatattatgagttggc

SEQ ID NO: 108012 - DNA, 431 bp, Zea Mays
gatcgaccatgaagacctccctatcatcaagggtagtctttgcaatctaagcaagcctagtcagatgcaccatagcatccccttgtagggaatgtagtcgatacaatgcactcatgcactggatccttctaacctggtcgagatgcatagcccacacatccttggcatggcgcactcggtcgcaccacatcggatcatccctcttctcagcggggaagagtccgagcagaagcatcatcatctctagtggatggtatccgcagaaggtcatcaaggcctttagtgtcgcggcctcggtggtgtcatccaccctgaatctgacagtttcggaatccagcgaatgccacccgggctacaaagggtggggctccaggttagccatacagctgcaccgtcaaagggtggggctctaggttagccatacaaaggtg

SEQ ID NO: 108013 - DNA, 541 bp, Zea Mays
tgcaagtgggtacgacacagggaaaacagtgccccaagttcatcccctgcgcgagattttttagcctacatagttatctgcactccaccaggcacgaatcgcaatggtggcgaggatcatggcgtgggatcaccggcggcggtgcactgaacatggcgatcttcgtcaggttactgtaccatcacgaactcccttcagggcgcctgacagagcaagtttgagagcgttttactccaaaaatggagtaaaatcgtttagcacctggtcaagcttggtataacaaagttgtttactaatgttagagcatcaactttgccacagtgaccctgaccttatctccattgaattaaccatgaactgcttccaaagttaaccaaatgtcactgaacttaggttttcagagctaaggctatctgacaggccagtttcaagtctcttttctcccatttttatgtagtactagggcttactcacttaatcaaatttgtaccctttacatagctctacaagtttgatgtattgacctagggcaaattcctta

SEQ ID NO: 108014 - DNA, 468 bp, Zea Mays
gtgtgggccagagtaaaattgtttttgcgaattacaagggcgaatcaaccctgatgagtcaaacaaaaaatttgcggaggttgtcgatgttccaggagtgctccaggtcttcaccgcttggcgttgtgagcctgtaagcactgggggaagatttcgtcttgactatgaaagggccctcccacctgggctccagcttgcccctggactctgtccgagctgttcggacgagtacgaggtccccttcgctgaattcccttgggatgactgtgtggtcgcgccatgcttttgtctgggcttggtatttgtttagagcttgtagggcgaagactcggtctccatcgatgagatcctttgacgtgggctcgtccacgtcggggacggctgaaggaactgttcgcggggacccatgttttatttcttgtggggtcatggcctccgatccgtatagaaggcggaaaggagtgaacc

SEQ ID NO: 108015 - DNA, 964 bp, Zea Mays
gtgcgcacagcacatgagcatagagccatagacacatcaattcagagacagaactgatagggtgaggttcatgcttgttctggccagtctggcacatgggtatcgctgtcatttcgggtatgtgtttagagaaaataaacaagaaataacatcctctaagccgatcaattctaacagattttccataatgtttgtacctttcagtgatattttatggaattaagttctttcggtaaactcctcctatgttgatcggaattccttgagtcgtttcaacatagccggtcccaagcccggtaaaggaggagggttgtgttaggtccggcaaaccaacgtaaaaaccagccaaatcttatggagatgaaaccacagagaaaatcgttggggtgtaaccctcttagcgacgcgccatatcggaacccgggtatggtgttaaatgagcaagggtcgggccgtcaccccttaagtgacgcgtcgtctcttgatctggagccggtgataagtgagcaaggatcgggtcgtcgcatccttagtggcgcgctacatcggcgcccgggtgtagtggaaaatgagcaagggtctttgcatcttcctcggtaggtgcgaagggtaaggaagctagtcgagccaactaggatccatgtaggtagttggaacgtaggttccttaacaggtaagttacgagaaatagtcgatgttgtggtgaggagacgggtaaatattttatgcgttcaagagaccaagtggaaaggacaaaaggcgaaggaagtggaaggtacaggcttcaagttgtggtacatggggactgcagcaaacaagaattgagtaggcgtcttgatcgacaagagccttaaagatggggtagtagatgttaagaggctaggagatagaatcatcctagtcaaactggtcattggggacttggttctcaatgttatcagcgcgtatgctcctcaagtaggcc

SEQ ID NO: 108016 - DNA, 1170 bp, Zea Mays
cttcggatgaagacttggattattttgctgcgttagatgtggccgcggtggagtcctcgccgcgggtggaggttggcgaggtggctgatcttcctagtgcgaggaccaagtgtcggcgacgaagggtggtgtcgaagcatagcgtgggcgaggtttcacgaagtggtaggcgttgtcggatggggatggagcgggaccatcttcgagtagatcggtttggtaaacgagagctattatctttgccgattgggacgagcattggtgagggggatctgcggaatctttttgagggtgaggaattgaaaataatgttgttcaattatagggaggcgggcatcatcccgaaggttgagccgatgtagtatgtggtgccctcgctgagtgtgtgtaactgcaacttgtattgtaatgtggcctgttggccgtctttgagtgagagactggttgtcgcgcacttgtgctaatccggctgcacccttaggcgacttttgcgcggagtgtctttttagtaaaagactttgattgacgcacttattgcgcttatccggctgcacccttgggcgacttttgcacggagtgtctttttagtaaaagacttcgattgacgcacttgttgtgcttatccgactgcacccttaggagacttttgcatggagtgtctgtttaataaaagacttcgattgacgcacttgttgtgcttatccggctgcacccttaggcgacttttgcgtggagtgagacttcgtgtcgtgcacttgttgtgctattccggctgcacccttaggcaacttttgcacggagagtatcgcacgcgagggtagtctgcgctacctgtcgcggtgacttcgaattggtcgaatgccgaagaccgtcgaagcgatcttttttgacatgttgcacctgagtttttgtttttgcgggggcttttgctggtatattacatggctccgcctcgttaaaaacctcacccccgggaggaaaagagtgcgggccggaataacattgtttgatgaattacaagggcgcgtgggccctgagggttaatcaaaaaattttcggaggctgtcaatgttctaggagtgctctaagtcttcgccggaaggcgttactagcctgtacgcgctgggggatgccttcgaattgacgatgaatggaccctcccatttcggc

SEQ ID NO: 108017 - DNA, 328 bp, Zea Mays
gaaacgccagttgtcgatataagactaactataatattcgcgcttcttatgctcatccggtgctagctcaaacatcacgaaacaacacactaagcataaattttatatctttcttagctaacacataacaccaaagactaacaacacttaagttaattaatctagtatacctcggacttcgagtaacaattagtagctttacaattagctttagaattactattctaaaatatcatgcaaagcatatcgactaaataaagcaccacactaattgttctaataagtagaacataatcttacagcatagagttctacaaaatggcttccc

SEQ ID NO: 108018 - DNA, 645 bp, Zea Mays
aaaggagttatccagtggattggtgaagaagccgaagcttttgatgaaattctcggcgatcaaggagatttctacgcgttcgccattgcacgaggggtcgtggcaattttggaaaaaaccggctgtgaacatgttaaagcaatagcccaggcagaagctatcttctcagctaacgacaccaaagaccattcggctgaagcctctttgttgggtgggaagttctactctgatgtttggacgaagggcggccatgagatggccgataaagccattaaaaagatcgaaaaagaaactcacgacgcccgagaattggcaaagcaagctgaagaagctactgaacgagccatgattataggtacttctatttaaagtttcgcttcatcgttcgcttctagcttcaaggtttatcaacatattcttttattgcagctgggctttcacccccgccagagccatacaagtcgtcgacagactattgcatgaagctgctgagaaaatactaaaggaagattaaattcttgtacgcttgaaaaatgtaagtcttgtgtatggttgccgccatgtgtacaaaacaaacatgaagtacttgtatgtacattaatgtaatatatctctttatgatgcatgaaatctgcgtacgtaccg

SEQ ID NO: 108019 - DNA, 586 bp, Zea Mays
cccaatgtaataataagttggcaccttcgagtgcaatgatcaagtgttacgatcgtctaagtaacggtgaaaaaatatccaaagtcgtttctaagggaatgcagagcttcgtttcaatcacctaagtaatggtgaaaaagctcctaagtcgttcctaagggaatatagagcttttctcaatcacctaagtaacggtaaaaaagctccgaagtcgttcctaagggaatacagagctccgattcaatcacctaagtaacggtgaaaaaagctctgaagtcgttcctaatggaatgtagagatttgtttcgatcacctaagtaatggtaaaaacactataaagttttcctttgtaatatttgaaaagaagggaagatgtttttcacctccggctaaaaaatgcacaaatcataagtttcacacatcacaaaggaaaaaaggaaaccaacaaatcaaaatagaagtacattatattacaataaaggagctaaagagcttcgaatgtttgatcccatcacatcacaaatattacaacaaagagctccaccaagtgttcacaatccttgcatcgtctcatcataaatttgtt

SEQ ID NO: 108020 - DNA, 281 bp, Zea Mays
gttaatttagaagaatttatatctgcctcactcagaccacgcatgcattgtcagccatgttcagaacattttgaatatgcgttaagtactgcaatccatattcaaaataaccgtgcggttgccagcatgcagaaggcaaattgatccataatcagaaggcaaattgatgcgacatgtcgacatgcaggctgcactaacaagaggactgaggttcagctacatcatgtactattgtcatctacggtaggtgccaacaaatataatgagttttgttaaaacta

SEQ ID NO: 108021 - DNA, 455 bp, Zea Mays
accgtcgagtcgaatcgatcatgtcatgtgcaacgcccatcaatggtggttcattaatgtccataggttgagactccttcccccttcccttatacacaaaagattgagaggggtctgaaccaaaccgagaacatagacataattcaactcactctcgtatggctcgcccttgagccctgggcgagtcggccaggtcttcccttttgttctgtttccgccatgataaagatgtacggaaggactatggtatggtatgcctagcgcgtggaggatccgttgagagtgtcccttgtctcggtagggaacaatacctattgccttgaaaaaagaaagatcagtgctacggtcctgttggaacctgcctatcgaaggacagcaaaatccaataggaaggaaatgggagtagtttaatcctctaaacacaaggcatcagggcaataatgtttcttcttctc

SEQ ID NO: 108022 - DNA, 786 bp, Zea Mays
gacgcttcgggcgaacactatcagacctctgaatatccaaagctttgccatactcgaggatgggtgctacaaccagtattttagcagggctgcatcagaggaatcttcagccaacatgtctagcatggcacttatttctgcgtcactcggattcaaaggcacctcgaaatgaacctgcctctcgtcgtcggggatttcgccaagtgaagcaaccaaagcctcaacctcttcgggagaaggtcgcactctaaggcccaaaccgctatcacctgtaggaggatttgacacaaaactgatgaaggccttggaaggatgcagattccaggctgagtatgcaacaggagcaccaatattagacaccttgcctctgagtatcatctcaagccggctcaccaaatccacagcaggaatccttctgttggtaaaccgggttgaattagcaaggcctcgatacatataagctggatacgctgtcttttagtggctgaatgttcttgaaaacaaaatcggcaaccacagcctcgacagtcagacccttctccttcaacaatccaaccttggcaagcagagcccccgcctcagctacctccaggtctgtgggggattcagtccaactcggagtgcgaacatctggttgtctccctgaccggggggagggaattctcgtgattctccacgataaaccattccaggtgccatcctttgatgctgtccttgagagggatgtcaaggtactcagttttcctcccacggcgcatctccaaacttgcaccccccacaagctgg

SEQ ID NO: 108023 - DNA, 783 bp, Zea Mays
aaagcaaagaccacaagtcaaagaaggtggttgaaacatcaagcgatgaagatagctcaagtgatgaggacacgacgatgttcatcaagaccttcaagaagtttgtacggaagaatgacaaatatcagagaaaaggaaagaagagggcatgctatgaatgtggccagaccggtcacttcattgcggattgtccaaacaagaaggaacaagatgccaagaaagattacaaaagggacaagttgaagaagggaggcaagggcaagggatacttcaagaagaagaagtatgtccaaacccacataggtgaagaatggaactccgacgaagagagttaaagctcggaggaagaagaagaggtggctaatgtcgccattcaatccacctcaacctggaaactcttcaccaacctctttgatgactcctacacccctacttgcctcatggcaaaagaagataaggtaaccttatttaatgatgatttcactaatgatgatgatgaacaaattgccatgaaaaataaaatgattaaagaatttggtttaaatggatacaatgtaattactaaattgatggagaagctagataaaagaaaagtaactcttgacgctcaagaagacttgctcatccttgaaaaggagagaaacctagagctgcaagaattgctattcaataaagatgagatgctataagccttgactaaggaagtatctttagtcaaaatgactatagaggataaagagaaagaaatgaccaatatgaaaacctctatagctagtcttgaaa

SEQ ID NO: 108024 - DNA, 643 bp, Zea Mays
taagacataaattaataccatattatacaaaagtacaacatatttatataccttccggtggatgggggaacctgtccgcataagttatcaaagtatcttgtaatactcttgtgtcatgtacggatcctggccatcctgtgacaacaaatgtgaacctcatatcgaagtcacaaacgaccattacattctgcgatgcgtaaccgtgccggccaatatatttcgcttgctccgaggctgggactgccgctggaaagtgactaccatcaattgcgcctatgcaatccttgaagtgtggccaaaacctcgcctctcgcaaacgaggatgaatctcgatgaaatttgggtctttgggcttgattatgtcagatgacatcttaaacagtgcattaaggacttcactatacttgcgactaattgtttccaaggagtgaccaaacttattccttatctgcctaaaagattgtggtcccccacatgcccacaagaatatgccaagagcttccatagtactgacaccccgacttggaagcagaccataattttctaccaacgtgtcatgcaatcgtctaaaaacagttcgtcgcatgcgaaacatgtcgaagcagtcgttactattctccatcgttctctcaacctattgaat

SEQ ID NO: 108025 - DNA, 358 bp, Zea Mays
ggcaatggtttaagcttcacagctagcttggaaatggtttaagcttcacagttaacttggcaatggtaaccaataacatccattatgcccctacccctattagcatctttagccattctacatctgctctgctgcttggcaaatccttagaagaggaattgataaatcagggtatgcaggtaaagccacagcaagggtctaaggttcaccttaaagcagctaaaccattttttggctagtaaatcatctcatcacaaaatactttcattaatcatgatgaagtataaacactaataaattctatctacaagccaactctgcttaaattagcactcaatgattcttagaagctttttgg

SEQ ID NO: 108026 - DNA, 1140 bp, Zea Mays
cgtgttcagctcccatatgacttcgggtaattggtctgcccatttgccctttttgttgtcgaggagccttttcctgatagcgctgaagatcttgttgttggcgcgttcgatgacaccattggattgtgggtggtagacagaggcgaacactgccttggtgctgatgggactacagaattcctagaaatcctggttgtcaaactatttgccgttgtcgactgttagctcggatgggactccgaaccggcaaacgatgttttgctagaagaatttttacgcggtcttcgctgttattgtggagactgctctacccttgatccatttggtaaaatgttcgacggcgatgaaggtgaattttaggttccgttgtgccgtaggcagtggcccgacgatgtctagcccccatcgctgaagtggccaggtgtgggcgatgagcttggtaaattgcgaaggggtgcctgagcgaggagaaattttttggcttgcttcgcatgacctagtgactcagttggccgtgcatattatcgcgggccaataaaatctctgacgaatcaccttggctgcgagggccttgggtcctgagtgtgacccgcaggttccgtagtggacttcgtggagaatctctaggccttcggtttcggttatgcatttcagcataggcttgctgataccctttttgtaaagctggccctcaactattgcgaagtctctgctcctgtgtttcagccttttggcctcgttgcgatcgaatggatggtaatggccctggaagtataatgttattggggctgccagtctggccattatgaggttgacgatttggtggccatcggcgtcttgcgttatttgcaagccttcgggattacggacagctagtgtgccgatgacatggtagaacacgtcagagggcagggcctcgcccttggatgctgctttggccaatgcatcggcctcttcgttcttgtttcgctcgacgtgctatagggtgaaacccttgaattgtttttcgaggccgcggacagcggtgaggtattgcattagcacagactcctttgctgagtactccttttcgatctgaccagcgacgaccttggaatctgttctgatgatgcatgtggtgacgccgagggcccgtagttt

SEQ ID NO: 108027 - DNA, 387 bp, Zea Mays
gcatgatggggctagtacaccgacatcgcagtatttcatcgatgcacgtgtgcatatcgtagagatgtcgttattgttgtgctattgattaacaagaaataagaggagaatgggtaaattgatgatgttgttgttatgcgaggacgtacgactgctttcactataccattgcgcttttctccacaacgctgctcttctagtggtaatgacccataatcttctaatcttatgttatcttggttcaacatgatagatatgcatgtgcataacatacatattttcatgcaatgatactagagtcgttcatgcctagtttattatttagatggtttatatatatgttggagcggaggtccaacttgacctcgatctgtctaacccaactac

SEQ ID NO: 108028 - DNA, 459 bp, Zea Mays
ttctttggcaatcacttttttgatcttgttgatgcgactgcatgccatgacaatcaatatgtagacgttgtgatgcgactgcacgtaagcattaatgtatccttacacaaccaaacatgccaatgcatgtcctatgcgtgcacctaattccttggagatcaaaatctcttcgtatcgtaacatgcccagtatatctcttgtgaatgtaaagttatttatgtgattgtacctagctttacactatatgggagatcaaagaaacacaaccttgtgttggcttcactatatgggagatcaagaatgcaacatgtgttggtttctcatgcacttcaactagcttccttttcatctattgcaacacctatatgatttgcttgttgcgaacttgccaactgtctatttgttgtagttggtgaagctagtgagctagtgaataaacacattgtttatatgtttgag

SEQ ID NO: 108029 - DNA, 501 bp, Zea Mays
aaggggagcaggcaccgtcgtctctgctcagccgcgacatcgttgacgtcagctacaacgaccatggtggcagccattcctctgtgtccactcctccccgttcgctttgtcgttgtctctccgattgccataagtatgaacattccttttcaccataacttcacagatctacgtccccttagtgttagggttgtcttccagcctcccgcaatgtgcgctcccatgccattactacacatcgagtagcaatcgccttcctcgtgtttttccatcgctcgctccccctacagtgcagagtttgcttaggtattgcccaacccgcaggacggacaggccacaccatgatactatgaatcttctcttcatcaaaaaacctaagtcacgtcagcgcaggagtattactacattctaagccaggaatgcaggtcctgatgaatctgtggaacctgtggttcctattttagtgttgggtagcagagtcttgattattgggttccaagc

SEQ ID NO: 108030 - DNA, 311 bp, Zea Mays
ggcttttatttattgtcatggcatagcagaggcgtagtgggaattgggtcctctgcaaagtgaaaggccattttacatttgttgtgttcagcgcaatacgtggaatgaatacctcatcgccaatcctggatcctgtgagtattatgcatcgtagaacacgctgacctagctgggaaataagcagccttgtcccattacagaggcccatagtttggttcagattgtgaagcagcatcaccatcgcaccctctttaagcacaagtttgtggcaaggaaaattgggtgcattcatggaattgagaaattcggtt

SEQ ID NO: 108031 - DNA, 330 bp, Zea Mays
ttaggggtcactgctggacccttttggctttttgttgcctcagtttttgccgaaggactcaagatttctgatgtctttgcttcttcagccctcgtttcttctattttttcagtcactggcacttcggccagcacttcaatatttggcaggggagttgtctctttagcttcagtggccgaaggagttccaccgacaaatgcaggcactgtggccggttcaatataatgtggccggtgtgtgagaacttttacccttctcctcttcggcgctggctcgctaggagcggctgaagcaattttcttcgcagaagatgtattctttctttttttt

SEQ ID NO: 108032 - DNA, 435 bp, Zea Mays
ccaagatctttacgcgaccgtgattatctccagaccagagggcacgaatcgtagtggagacgtgaatcacggcgcaacggtcaccggcggcgaggggcgatgtatctgaagatcttcttcagctactgtaccatgggaaccttattcaaagtgcctgaccgagcatatttgggaacgatttgctccagaatttatgtagcaacttgatccatcctctgtaacaaagttctagccctataatctagctacaatcttgctatggtaaccatgctcaaacacccactggatcatcttcaaaagggctcccaaagttcatcctatgtcactgataatcagaattcaggctttaggctgactaacagcccaactttgggcacatttttctccaatttccattcagcaccagtactcaattacttaataaaacttgttctc

SEQ ID NO: 108033 - DNA, 435 bp, Zea Mays
ttttccaaattccccatttcgagcgatcgtttccgagccgtgtgcccaaatctctttttcttcgcctaaattcaaaccaagcacacacttcactcctattcacccacataaacctattcgtgaagtatcggctcaattccacgtcgtttcatgcctcaattcgaattccaaacctcctatggcactttttatcgttcaaacgccgttttcacgtcgtttgacctctcgatcgtctcatctcttgttttctgtgccttatttctctgtgtatgtatttattcacatttcatatacttatgactatgtgactaatacgtgctcacctcttctgtcatttcagtgaccttgattgcccgtgtgccgtctcctgtcctgcctggatcgtcacctctcgtgtaagctttctaggtagtcatctcatcctttgatattcta

SEQ ID NO: 108034 - DNA, 431 bp, Zea Mays
gtgacagtgaactctgacgaactttagagccagtttgagcttgatcgagtgagcggatgaccaaggtccctatggtcgaattggagcttgtatataggttaataactttgttgtaatccagtcggtaacttatcacgtagaaatcaaagaaaaacacctctgaggatgctctgtcagaacagctgaagaagattctgatggtatagtagcgaaaagatcttcaggttcagtgtatctcgccgccggtgaccttatgccgcgattgacgccggtcatcgcgattcgtgcgccctggtatgcggataacggctggcggtgaaagatctcaatgaagagaagggttggagccttatcaccggcctattcactttgccacttgccgcgcaattgaccgaggtgtcctcgccggagttcgccgcccttcgtagccg

SEQ ID NO: 108035 - DNA, 342 bp, Zea Mays
cagccatgtcgctggtgcaagtgggtacggcgacagggcaaaacagtgccctaagttcatcctcggtgaagatctttttactgccgatcgtgatccacaccacagagggcacgaagcgcgggcgtcaccagcggcgagatacactttatctgcaatcttgttcagtaactgtaccatcgcgaactcccttcagggcgcctaacagagcaagtttgagagcgatttactctaaaaatcgttcagcgcctggtcaagcttggtataacaaagttgttcactaatgttagagcttcaactttgccacagtgaccctggttatttgcacactcgatcacacttaaa

SEQ ID NO: 108036 - DNA, 546 bp, Zea Mays
aacaagacttggacgagaattgtctgaaggcagtgtgcatccaaacatgtatgtccgcatcctgtgaaagtgttaccccctcattgcatcccataaattcaaatattgatgtagcccaattggagagagagggttcacaatatcactaacccactgccaattatcaagcacctgagctacagttctggtggaaatggctcttcggccaaccatacagaccacagctggtgcaatttcctggatggcacttccatttaataattttttctcgaacaacgcaggagatctatgtgtcatttcattaagaagaaagagagaaagtaccacatacatcaaatgaccgaaaacaaccaaaaccacaagacctttacccctatagctagggactaggcaactaaaaactttggttgtaacaacggtgacacctagaccatttgaatacaaaaaccacagaggggtaggccatcaagacctacacattcgtagctcgtgcccagaccaggaagtcttgcagtttggaggccccagcccacctccaaagccgac

SEQ ID NO: 108037 - DNA, 338 bp, Zea Mays
aaacgatccttaggtcttgaattcggtttctaccgaagtagggcgccggtcattaagtgaatcggccggtgtgagctcgccggagctcggccatgcgctgtccaccgtcgtggacctcaacctgtgaagaaatagaacatgaagggggtttctgtaaggtgtcagtgactctagaaacagtactgcgaacccgccttcagttattcataacgtccgggacctatttgcaaattctacgcgagcgcacactggcgtgcttctaccggtagtgggctgacttgggccgctttcggtccaatactgttcatagttttcctttttctttttctaccagagct

SEQ ID NO: 108038 - DNA, 377 bp, Zea Mays
gccaacgaagtgtagccgccagcttctgttactcctgattcctcatcttcttcagacaactctgaagggttcaccaccaccgcgacttcctcaatcggcctgcacttcatatgagttcctctcctttgagcaggcttgttcctgcatgcatcaagcactaacgttcagtgacttctaaccattcaactgataatccctcaacttcatcataatatatcctttgttccatctgcatcataaaatcacagaggtgagaagtcagaaaaatgaaacaagtgttccttctgtacgagggttggcaaaaaaatcataccgcaagcttgggaacataaactgacatgaacctgggaccaagtcccagaactctagcattgcat

SEQ ID NO: 108039 - DNA, 452 bp, Zea Mays
cggttctccatcctctaacagaagcctagcaacagaaaatttcggcagcacctcccctgcacggggaggtttcgaaatcctgcaaataaaagtatcaacacaatggctgtcttccactaataattcaacggcacgatggccggcaatcatatatatatatattcaattcaacggcacgacgacgaggaattgtagacgttggcgtggtgagggtaggtgcggtggtggataggatggggagtgtgttgtgcgagtggcgtggtgagggtcggtgacggcgtggtggataggatggggtagtgtgttgtgggagggtcggtgcgagtggcggcgtgcggtggtggattggatgggagacatatactgagtgatcaacacattaatataaacatgtgtttattcaaatacataatctatgaaacatcaatacattaatctataaaacatcaata

SEQ ID NO: 108040 - DNA, 441 bp, Zea Mays
agattgggtgaagctggactcttgtttagggtttaatctttcgctagaattttagagaagcccaattcaccccctccccccctcttgggcattgtgatcctttcaattggtattagagtcgtgttgctcctagtttagcttaaccgatagagtaacgatgtccagtggggatggatgaaagtgcatctagcccttttatgggttttggtgatttggataacaacactcttaaaggactaatcaatttgctaagtgttgataaaaaagtataaaaatctatcatgattgaaaacaattaagagacggattgatatgaaaatgtctcatatacatggatttttcatgatagaagtatgcataaaggatcaacatcaaacaatgataattagacatcaacagattcaatgtacactcaagacgcatggcttaaggaaagcttga

SEQ ID NO: 108041 - DNA, 344 bp, Zea Mays
ccttcggctctggagctgtttttgttttcttcaaaaaaatttcatcttcctttactaaccatgcaacttgcctatttaggatgctgacaatcctttttcttttcacccatttggcccctttgtcaagtttctcgtaatccgggtattcgaagtttaatgtgtccatcacccgattcagccttcgtttcggccgggtgccaaaggaagcagttattaattggtcttccttcttggtatagttgccaagaattttgttacacatggtttcgatcatttctagccactctttgcatggcttctggaattgcttctcaaatttgaatcgataagggagccaaacaagt

SEQ ID NO: 108042 - DNA, 297 bp, Zea Mays
attcttttggcttagtgaaggagacctctttaggaccaaaatcgaattgagcaacgacaaattcatcgtcaccgataatagtacaatcggttgagaacataataacattaacgtccatacctgagtgttttggtgtagctaagtagtcgaccaagtcctctcccagcatgtcgtcctcctccataggcgttggtgcgttatcggaggtgttcttgcatagagcggacgatccgaacttgaggggtcggatggtccacgacatctacggacaatccaacttttatagccggactgttc

SEQ ID NO: 108043 - DNA, 801 bp, Zea Mays
gtcaggccatcacttcaccacacaatcccaagtaacaaaacaactataaccgaacttggcatttagccgatcgatttctaacccatttttcataccaccacgacacgacataccgaatacattgaatgactcgttcacatttcacatatatctttactaaaacattcccacatcccttgcaacttaacctaagcttccctacacaattacatgacatctacttaaatcacgaatatcattatcacacgccttgcattacaaatctaattgtccactcgaaaacatctattcaaagtcatgaacacaaccatacactatgtgtgatgtgaaattcaataaatgcataaggtgtattggctctacttataaatatagaggaagtgatgactactttggcatgtcaccacctctctaattaagccaagacaatttccacctataacgaccaaacattcatgtcgagcacactctattttatcatgtctcgcatacaaccatattgtggcgtgcactcgagacccttcggttcaacttaacgcaatcactactacaacgtatttcgacatacacggttgacaacatcgtgctcaaacaaacccacacttccaatctacttatcacatccaaccaacaccacgtttgattacacacctttctaactaaacatatctcgtcttccaaacaccaatcatatgtcacataatttacatttcccacttaatctaacctacaccaatgatgaatacataaatataattaccgtagactgactcattagccgagtgcggaagtaaccaagca

SEQ ID NO: 108044 - DNA, 911 bp, Zea Mays
gtgggaagttgttcccattgagagaatgtaggaactctataggatagagtaaatcatatgttccatttctgtttgagtgtggtgcaatcctatcgctccttgtatattctttagaatggccaggaattaactgcacaaccttttcattaattaaatcagcaatttcatttgttggtgttaagatggcgcgttgctctaagtagataggatcattaaaattctctataatatttgtataaatgcttccaatgattgctgatatgttgtcgtgttctggcattaataagaattctgatggtatttttatccaagcaggttcagattctcctggtttcgctgtagctggtatgttaccatcaccaatgtctagtatccatttgctgaattcagcaatatgagttctttccttatttgttaattctgctgaagctagcctcatattttctgtgaggtgaagaacaacaattgatgaccaaagtggtgagtttgttattgcagcattaacaatttgtgcatgatctccaccttctataacaggcaagatttgtcttggatcacctcctaagacaattactttacctccgaaaggagcattggtagatgtagatgcatttaagtagagcaaatctcggagggagcgatctaaagcttcaaatgcacatctgtgtgtcatgaaagcttcatcccatattattagagaagttgattcaattaattcagctagcattgttctcctttttatgttgcaagtagtagattcatctagatcgcatggtatcttgaatcgtgaatgtgctgtgcggccacctggaagaagcaaggatgctacacctgaggaagcaactgctagtactattttttattggctcataggtgtgtgatgatagcattccataagaaagtttttccgg

SEQ ID NO: 108045 - DNA, 379 bp, Zea Mays
ctaaagtaagggtcatccaccttgctactaggaatgtcaatggcatgagaagccttagcccaagccctatcaagctctcttgcagtcttaccgttacttgtccatgtgccagtgtctatcctctgttgacgtggtctagagcttacaccaagattgtagtctataacttgttttggtacttgtggtcaagtccttaccatcatcctaggcagtggaccagatccttgtggtgcctcctgacttaacctagatccatcacccctatcatatcatgcaccagctctttgtctgaattcatgctcctcacaagactgatatataacatcctgaagttcatcatcataatcatcatattgttcttcaccataatgggttcttg

SEQ ID NO: 108046 - DNA, 437 bp, Zea Mays
aacgatggcgttaggggtcagctgatgaagaaaaatctcaaaattatccaaaacttccccaatcatctcgttcaagggaaaccacaatcctgctctaaaaagcttttgaaaaccactacttcgtcatctttcggctttggagtggtttcttctccggcaaaacgaataagcttcttttcagcttctccgaagtaacccagcttcatcatcatgggcacatcagcctcagacacagtagatttttcataatccaagtggctgggttttgttgggatcagagtgctatagtattcctcttcttcatcaacattttcttcctcgatatcagcttgttcagcttcggcagtaggtgcaccttcgttaatggctccctccgtcacaactaatcccgactgtctcatgacttcggagatcagagctgtctcagtggcttcaat

SEQ ID NO: 108047 - DNA, 313 bp, Zea Mays
gcgaatatgatccatcggccttagtcaaagcatatgttctgattgcagattcacgtggtctgtaataactctcctccgatgaactcgccctactgatgatttgcctcacgaagaggttcatcttgatgatgaagttcctagcaatgcgcacaatatcattgtgctgggaatacggaacaatgaatctttcgttttgggaaatgatggagatcattattaaatgtgggagacaaatgtgtcgacacctatcttgcctctatagattgcaaagggatccaaaaacaaagtcctaggcatgagtgctttaagctct

SEQ ID NO: 108048 - DNA, 450 bp, Zea Mays
cgtaagtttggccaacaggcacaaccaaatatacgcaaaaaattgtagttaggtgactcatgaaacaaagcttccataggggaagaattctgaagcacacgggtgggcatgcgattgatgagataacatgcagtaaggaaggcttcatcccaaaaccgtataggaagggacgagttggtgagaagagtaagatcagtttcgactgtgtctgtgcctgtgttctgctacgccgttttgttgggaggtatgtggacaggtaattctatgatgaatgcactatcgtgtaatgtgttgagagaggcgacggaattcgcctccccaatcggactgaagagtgcggagtttgcaattaagctggcgttcagcatgcgcttgaaatagatgaaaggcatgctcaacatcagattttcgtttgagaagataaatccatgtgaaacgactgaaatcatc

SEQ ID NO: 108049 - DNA, 458 bp, Zea Mays
gggggacaggcgcaagcaaggaaccaggtgtgtgcacctattttgcgcagcgcagactgtccaacgcatagacgcggacggtccgggacaccgccggacagtccgtactattccagtggatggtccagcaatgctcaggaaccgcgacggccacgtaccttcaaaccgcgatgaccagaaataggtacgcggaaaactaacacggtaaaggcagctggcccactggtcagatctgatccgaccttttaccaattattgtctaaatatgtaaaaaaagaaggccgacccaagtgaccggccagcaaagcgacctcgctcacccactcaagagcgacaacaggtaagaccgattggaccgcctcaccagtcgaaaagaatgataggtcattatgtccaattacgacccaatatacctgcatggacacctccacccccatatccacatgtgccatatcaat

SEQ ID NO: 108050 - DNA, 607 bp, Zea Mays
attgaatagtatatagaatataatgagacatacagtaaaccattgtatacaattaggttacataaatggtaggcggatcataatccaaccatcaagacttatgtctaagctacactaagcgcttggtgttcatggctgatagaacaccactgctgccattttttgagacaacatatgcaaaagcagcatacaaacataattcatttataatttgaacggatccaaaagtagcatacacacatagttcattacgaatctaagaaacacgtaagcaagtactgcttgcaaacaaaagcgcataatctgtttgtcgggcaatgatattagtatcacaagtgacattttcgatgttcactaaagcgccaagttttctcttttctgactaaacgccatcttcgctagacctacgaagaaaagaagctctttaggaatcctttaaaaatgacatacaaacgatagattggtaatactgtgaacagggtccactattgaaagaatcaagaataaatgacgcatatggcatgtctagtgattttacattgcagaagttgattttgaaacctatacttgtctctatagcttaactaacgcaggacgtgatgaattt

SEQ ID NO: 108051 - DNA, 500 bp, Zea Mays
cgagtatgagactaatttagccccgcggacatgagactaattttaacaagtaagctgatgacaaacatgttttactgatgctgtttcatgaaaaattttagacacttccatggacgagccatgatcttattcaatgtctagctttttttccttctattctagcaccacaaaagtacttaaatgtattccagtacaaaatgatgcatcggactcaatcgtcattgagcaactttagcagcaagccacactggccaatggaggaaggggagctcgccgaagatggacttgatgcagacgaggagaggaaggactgcgccatcgaagttgttgcccgaaccctgtaccaccactatcgacaccgctgcagggtcttcctccacaacgagactagggtggatataggagatataggtcgagtgggagaggaagcaggtgaaggtgggtggacgacgagaaaattgccgacattctttcttgtttcgagagttaataaaaggttg

SEQ ID NO: 108052 - DNA, 699 bp, Zea Mays
ctggcgtctccctctcccccccgccggcgatctccaccggcggccaccatctccggcggtgctccggtgactttgggctcccctcttcttcctcctcggtgagcagatctgttttcccctgcctctctttctctctgtctcttaggcagtgctccaccctttgcaccaattccaaatccttttgaattcttgtcaatttctgtgaatccaattggtggaatgagttcaagtgtctctattgtgtatccctgctagcttgtagctccttcgggagggtattcccacctcaaatggtcgtttcaccaaaaccctagctctccgcacgccacatgctcggtgaaatgcccaaaccagccaaacttgctccaattgaacccaaatttttcaggcaccttcacaacacttccagcaacatccttgccaaatttcacgccaatccgagatcccaggcttaaatttcaccaaaatccccgttttacgcgatcgtttccgagccgagtgcccaaatccctatttcttcgcctaaattcaaaccaagcacacacttcactcatattgacctatataaacctattcgtgaagtatcggctcaattccatatcatttcatgcctcattttgaattccaaacctcctatgtcactatttgtctgtcaaacgtcgttttcacgtcgtttgacttcttgatcgtcccgtctcg

SEQ ID NO: 108053 - DNA, 722 bp, Zea Mays
ggtaggtatagttaggaacgataatattttactaaatatgccctccatcaagcaaggtgtggtaagtgtcacagcagtctgcctcaaaggtgagtggctctttgtagaagttatctgacgcaccaaatgtgacacgaaggcgggtgcggacaagggagaaggcttcgttgcctcagatgaccccatagaacgatgttctattcaggtatgcgtttgtttcgtaggatcgtcttatggagggtctcggcacaaaggatgatgagtctaatgatagtgtccatgaggaccatggagaggtgtgtttcccatgatcaagttaaccacgagtgggtagcactctaggtgggagacatggtcgggatgattgcctcgattgaagattataaccatctcagtccaccgaagccacatcagggcagttatggtatcaagggtgatcaactctcgcttgtaatacaccattagtgcttcaacttataggtctgggccatcaaagatcatcaagagctagtcagggttgggaaacttgatgcccttcctctgcttgtcgctagttcccctatttagccccatgctcatgccattggtccagtgccatcgttcgtacgtgtacacccatgtgttgccatgtcacgacttttccaatcaaatccacaaaaccgtgaaactagagttgacctctaaaccaaacacttttaaaaaactcaacaactttatcgtga

SEQ ID NO: 108054 - DNA, 398 bp, Zea Mays
cgcctggagcttcgtcgcgggagaaaagcagagtacctcgacattcccctcaaggacagtattaaggggtggctcctcgagtggttcattatggagaaccactgcaagtccatcccccctcggtcagggaggtagctagatgtccgcacatcgagctagatagaatctccgtccccttcggagataacagaggctaaagtactacttgtcgaggtctgcttgctgaaggatagaggtctgactgctgaagttgtggttgctaatttagttttcaagaacattcatcctttaaaggacagggcctaccctgcctatttgtacagcggtgtcaacgattctacccgggtcacaaacagaaaaattcccactgaagatctgatgagccgactggacatgat

SEQ ID NO: 108055 - DNA, 520 bp, Zea Mays
gaggaacatatgcttgtcactgtacgtttcttcaatgaccaccatagccaaaacatatatattagtgttttctagaaatactgagttacattactagccaatttctagaaaacctaagacaagtatccgtcaataatcccattggtcctcatgtacgtgtcttccaaacactattcatttgttcacagtattttaatgtatgctgaaattgattaatgtaaaagtttcgtccaaaaatttaaccacagaagaatgttcatggattagtgccctatcatgctaggaagatctaccaatgggggtgggtttaaagattgggatgtcactactgcccactcaaaaccgataacaaggaaagagaatcatttgcacaaattgtcccaggactgagtagggactgagctcgcctttgctccatcgtcctaggccgccgaatcgcatctctccccactcaagcagccaaatcctaggacgagaacaaacttgtgctcgcccaaagttgtatgcaccaatgtcccca

SEQ ID NO: 108056 - DNA, 345 bp, Zea Mays
caccgttagtcaacatttattttgactctaacggacaggataaaatggtgaaattatccttgttgttctgaagtcaaaattgcagtcccttaaatagcatccttacgaaattgcgatctcttaaatgctactgtttcgaatcttaacgtatccagtaattttaacacatccgactagagaaattacgtccgagtgacatggatccattcttcttcggatactcttcctcctcctctgtcactactgtccgaaattcaattctgctttgctggaccagtaattttagaaacaaattacctccagaggactccgaagtgaaagtgagtataacgacatagtccaatc

SEQ ID NO: 108057 - DNA, 471 bp, Zea Mays
tttagatcaagcaccgatgcttgtgtggccttccttgagaacaaggataaagtatcttatgctagggtatcattcaatggaatgcattatgatctacctccctggtccataagtattctcccacactgcaaaacaacagtctacaacaccgctagcgtgagattgggcacctgattctttttgttcattctacaacttccttttgttcttattttaattgggttgctttcttaaattgtatggtttccctaatattgagttcatacaacatttccttggtgctattgtactgtataattcttggcgaaaaactgtttatgttgatatgtttatacaggttggaagttagatttcacaaatgaaaatggaatgtgctggaggattcacatggcaatcatacaatgaggatataaacttcttgggtgacgaatcatttgcaacagttgggttaatggaacagataaatgtgac

SEQ ID NO: 108058 - DNA, 632 bp, Zea Mays
atctactgttggtggtattgttcatctggtattgtttatgtgaaaaaaaatcgttgttgtgtaaaactatctattggggccaaattcacgtgaacagagggaatagattgcaagcgtagctcatgctgacaacgacaattggagccaaattcacgtgaagacctgtgaaaaactatctactacataaaactcaaaacccatgcatccagaagatcaaaactaaatttattgtttggcaccactaaaaattgtctctgctcgaaggctgactgtagtgtaaaacaatattttacacaatcatatgtacaatctgctggagccagtctagccacatgcatgacctgctagagctagtcagaagaagtgaagtgactacatatcccatccgggctccgacagacatggccacaatcgaagcctaacggtcacactgacttacttgtagcaacttgtggcgctagagaagttcttacggttacatcgatctcaacagtcacgtgagtggcaagagaaagttacaactgcacgaaactaccttacctctctttgcccatgtgaacgacaccaccagacgattgaaaatggtagctcaaatgatgtaataccagaaacgcatacgacataccagaaac

SEQ ID NO: 108059 - DNA, 375 bp, Zea Mays
gtctatttctccgtcatcgtgtgtcgcgctagggaggttcttcccccagcatagtgggttcattgtcagagatgagcgatgactccagtctcccctgaatgaagaggatgtcggggaagaaaggagtaggtgcagcagtgtgcttcttcccatcctcctttgagggcagaggtataggggtgatcgtccgttgcgcttttccaccccggctcggaatattcatctcctttcgtcgggtgatccgtgtccactccttagtaggtgaggtggacaacagagttcgttgggttggggagaccgtggttgactggccttctatcctctaagggatcccagcctcatgcaggaccatgtcccatcacgtcgttagcgaga

SEQ ID NO: 108060 - DNA, 439 bp, Zea Mays
cgcaggtggcgggatagatttaggggtgttggatgtaggactttatttttgtgatactgaaagtcggttgctacgcacgttctgacgtctgggcctacgcaagcaacccctactgatgatagtaattttgtggcggctgcgagtgcgatgcctgttaatgaaaatttgtctggtacaaaactgggtcttggtcatttgatgggggtgagtttgggagcccgttttcgtggacggaggaatcttcggctgaggatttggattattttgctgtgttggatatggccgcggcggagtatgtgtcgcgagtggaagcgcgtgagtccccggcggaggcgaggaccggggagtcccaccggcgaagggtggtggcgaagcatagtgttggtggtacgtcgcgaagtaataggcgtcgtcgaatggggatggaacgaacccgccc

SEQ ID NO: 108061 - DNA, 306 bp, Zea Mays
tgtgctttggcatattatattttccaaatgttctttgcctcagatgtcgtccaggactcgtggataggatggtgcgggaacctcccgtggaagggagactactcctaacccgccaccagtacccccaaacttggctgaggctatcgctgccttagtcaatgcaacagctgacaacacctgcttccttcgcgaaatggcgggacagcaatatcaacagcaaggcgggcgagcttatctacaaggaccccgcgaaacttcatatttggatttctcggaaacacgtcccccactattcgtcaaggccga

SEQ ID NO: 108062 - DNA, 485 bp, Zea Mays
gaaaagaagtatatcactgacataatctgagcgcactgtgtgtagcaagaaagcagtcatcgtcgtctacgaatcgcgaggagaagtgtaaaagcacgacaaggaactaacctcccaaaaggaatcagcgacgagtagccttctgcaaattctgtcaaaagctatctgcgcaggaaggaacaaaggcaccgaatcaattagatggtacaacacaacatgtggataacgcgagttcacttaactaaaaatagttctgtggaggtacgacataaacccaaaaagccacacatgggatttgagttcaacacacttcacagttttgactccaccatttcaacgaaaacacaatactttgcaccgccacgatagaagaacaacaccaacacacacttatgtgtagcgtgtagaataacataaacaaaatactatgccactgcaaaaagtatgttactgacataatctgagcgcgcagtgtgtgtagcaag

SEQ ID NO: 108063 - DNA, 506 bp, Zea Mays
attctacagacaggagaagcacagatcttatgagtatgcaaatgtaaaagcacagcggattaaaattctacatcatatagcgtgctccaagtgcttggaaacaacaacagtattcattttataattcttgagttatagaaatcatcgttcaattaagagggatccacaatatattaagtaagtaatgcaatgagctcagttcaaaattccttcaaatcctctaagagaatacttttctagatcatgaatgtcctttgaaaaaccactcttactccccacaaaagttccaccttggttcacttcagttttatcaatacttgctctttagtttcaaaaaccggttcaaccggacctgaaatcggttcaaccggtttctgtactgtttcttctgccacctctgtcctgccagtctgacagtcaaaaactgtcagaaaagtcgtgtgcagagatttttcgaaaaccggttcagccggatttgagcccggctcaaccgattttgagtccgg

SEQ ID NO: 108064 - DNA, 362 bp, Zea Mays
caagagcatacatgataacttcttggcagtgcatactgcggctcgctgttttcatacaaacaagacaccaacacttctgttcaaattggacatagcaaaagactttgattcaatacattgggagtatatcctcacccttcttgagcacctaggcttccctataagatggaggggctggattgcggcaattctctccacctcaacctcaagggttattctcaaaggcgtaccaaaccctcccatctagcatgggcgaggcctaaggcaaggcgaccccctatctcctcttctttttgtcattgcaatagatcccctgcaaagactgcttgaagcagcaactaaactcggaatgctctccaaac

SEQ ID NO: 108065 - DNA, 796 bp, Zea Mays
acatgtctaagggaactccaaagcctaatgaagtaacaatctatccatttcctatggtgtttcttttgcaggtttgatagttcatcgtttcattgccaccatcaattagtaacattatcaactgcatggttccttgatcttaggtttaaagcacttgtgggcgttacagtgaacaacaaagaaaaaatcgttcggtggaaaaaattgcagatgcagaggaatataaaacatcacccaccaaaaacatatgaacaatgtagtgtttgtgtgatgggttactaacaaagcaactccccgatgaaggcgcaaaatgacactatgtgaaggatgggatgaagaagagaagatgacgattttctctatgccactctgcaatgtcgcatgagatgagtgatgagttggagggtgaagaaaagtattggcatatcttcaacaagcatcaagtgctcaaactagacaacaaggagtggaagatgacttcattggctctgaggagccgtggttcttagggatggctggggttggagctggttcactggcatgctgcttgatgtatccaatgagcatgacgtatcagaatgttggggtgagtctgagtccagcaatggccaaactgagcacaacaagcaagcatcagatgaagaggacaaggattattggaatgtggtccttgacagggtaaacttagagctgacacccgagtcacctcccttgcctaaaatacagttcaagttacctggctactttgctcaacaaaaggaaatgtcaagtaatcaagagatgatatcctagaaaa

SEQ ID NO: 108066 - DNA, 409 bp, Zea Mays
ctgtttcttactcttaactgctagtagtagaaggggagggagcagagtcgatttgctgtcactgtgtacatgttagaacccacttcaagtaactgctataaatgatatccctactactaattaagcacctaacgtgggtgcccacacgtccatgcccccgccataccgagaaaatcgtgcacagcaacagctcacctcgcctacaccgcaacagcaacagcaaaatacccaaacccggttatctgtggtttatgcaaatcatgtattgagaaatgcacttggtatgtaattttcaatgattttcttggatctctttgctcctatgaactacaaaagaaaatatattattttgaaaggctaaatcagcaagaatgtctatgacctatccattctataccgtcaacatatg

SEQ ID NO: 108067 - DNA, 295 bp, Zea Mays
gtcgcttctttgcccgctctgtgatcaacatgaagagactatcaaccatctgctggtgggctgctccttcgcgcgacatttctggtttgagttgctaaggccttttggtttgcaggacttccttccaggacaggatatagatgattttgatcactggtggtgcttcaatagtgctcggttgggtggactgagtaaaaagggctttgactccttggttgctttaggcgcttggatgttgtggaagcatagaaatggtgttgtcttcaatggctcccatccaaatttggtggtgacc

SEQ ID NO: 108068 - DNA, 746 bp, Zea Mays
ctagggtcaccgggagtgggtccctgacccgaatagggaggaggaggatgaggaggatccgaggtgtagtaggggtcatcaaagtcctcgacctcatcctctaaggtaatgaatggcacaccaaactcttgttggtgccagtcattaaggtctgcggggaaggtaggggctggaggtggaggggacccgagagggagaagatgacctgtcttggcttgcgacggcgcacagactcctcaaccgctcggatgcggcacatggcgaagacgccaagaaggcccttggccagacgaatgaaaagtcctcggcctccaccccgtccctggcccggaccacttcctctcccgctgcggtccatcggacgtgaggcagcggcgacgtgagaggaggatgggtgatgtggaggctgaggaggtggctcatcaaaagaggcagggcctccaaaccctgagggagcccactttgtacgagcagctgggttggtggaatcaacccagtagggtacgtagcgggagtgtttgacaggtttttcgaagtgagtctgggtgaccacttcgatcatcttcataataaagggtgcatgaagacacccattgagaggagaccaggaagcacgaaggatctcttcccagatcatgtcaaacacattgatgcgggcgagactgttgggagcaaggaggagaaggaagacccgactctccccaaggacgttcatttgattcccgccctttgggagaacggtcatc

SEQ ID NO: 108069 - DNA, 432 bp, Zea Mays
ccccacaaatgctaacaaatagaggtgtggtgcaatatctttggtgtataatctctctgtaatcattgatcaaaatgtatccccttccccctcccttactttgctggtaataaatgagccttgtaattgtgattccctcttcctatgtagatagaaaaagagatagactagaaacaagatcatgtatatccatttctattgtattggttggatcaccgtgattgatcctatccaatttgtatgccatgttcagtgtgttttggtataaacatgtagatgatgcaacctcaataggcatgtttaactcattcgatagggctcaatctcccatggctagccagcatcgagtgctcgtggctagatgttgttgccctaaagcctaggtaggggaagggaagggtttataacctcaagagttgttggtcgacaatg

SEQ ID NO: 108070 - DNA, 976 bp, Zea Mays
caaggtcaacgagctagctaggtgcctacagcatttctgattttctggcctaatgggccgggttgacaaacgcattacgcatgcatctggttgtaaacattatctcgggagtccgtccgtccgtcagcttttttatttcggccggatttccactccattcgcgtatccacaggagcacaactttcctgtggaatggttccttctccccgcgaatcggccggtagggcacgcctgcggcatggaattcgacgcatcgaaaccatgatcagatatggagcgaccacggcgtgattcgcgatcgcagtaaatcccgcggagcaccagatcagatcgtgggccccccgtagcagcgacggattccccgtgaaagaagcgtaattgtcagatttgcatcttccatcacctgacggatttccccacaggccacagccagagcccatcttttattattcctgtgaccacgaaaccattcgtcatccccgatcacgcgcgccattgcacaactcagtcacaggagccgtgttggtcgtccatggcactgctcgatctgcaggtaccaccacaccactgcgtctacgtacgttctccgtctgaatactcgcatctcccgacgggttcgcgccactgcgttgcatgaagtgtagtgtgtatatatacggtaccggttaatgcgtgtaggacagcctttatgaggcgtactggcgagaggatcagtacgctatggacgggctggtttgttcattagagatccacgctcgaattcatcccaacggcctgtacagtggctgcccggcatcgcctccttcaatggctgataaagttgtgccagtacaggctctggagatgcgccgcgcccgtcgagacggcgagctggtgtacgagccatgccactacgattttatatggagtggcgtagaaaaggagagggcggcatgtgtccgtgcggtggttgtggcggtgcggtgcggtgccgaac

SEQ ID NO: 108071 - DNA, 696 bp, Zea Mays
gacttaagccgattgctccgttagcagggcatagtggtcaccctgagttaaataagaatgcaagtcgatcatgaacaaactgagtattcttgaagccttttttgatgacatatttcccattttacagagtacattgtcatcccgatagcttttgaaatacagctagggataaaacttcctgaggtgttctatgttccaggagttcccaatttctgtgccgtccatttgagtgagacgatatgatcccagccgagtgacttctgctactatgaatggtccttccctataagggtgataacttgtgccgtccctcccccgttagaattcggcggaggacgagatctcccactgaaaaggatcgtcgtcgcacgaccttgtcatgatagcgtctcagagtctgctggtatcgtgccgattgaattactgcgttcagccgttcttcttcgagtatatcaatatcctccagcctagtagctttggcttctgctatgccttcaaagaccaaccttggtgccccaaacttgagatcagcgggtaatactgcctctgacccatagaccatgaagaaaggagtgtttccatgcagagctcggctaggttgagttcttaggctccaaacgacgtagggcaattcccttatccattttcctgcgaacttttcatttttatcgaagacctttttcctgagtgcctcta

SEQ ID NO: 108072 - DNA, 549 bp, Zea Mays
ggcgagtggctgatattgatctggtttgttcagaggatgctatctgccttcgaccaacctttgctcaagaggaggaggatctggtagcacaacaagagatcctccccatgattctttggtggatatgggaatgacggaataactctgtctttagagatgaaacgtccactatgcgcgccatgttgtctaaagtggtggatgatctgtacatttggagatattgtttctcccccttttagaagagtgattgatgtgtggtgtactcgagtttcttctccattttggtactctaatggacactcgtcttgaatgccctagactcgtgtccttttaatatgaaaaaaggtgagcgtcaccccctgtgtttgtaaaaaaactgcacgttactacagaggaaacaggtacatggcacaaccccgcgacatatatatgaccacaaatccatcctcaacttgttaagctatctccaaaagtttgcttatcctcatctatagtgtaaaacggtattttacacagtgatatacacgatctgctggctatagccttagc

SEQ ID NO: 108073 - DNA, 292 bp, Zea Mays
cgttttttagtgtatcctaaacgctaaactgtaagcggtcggtcaacctttgtttagagtttaggctttttagatagtgtttatgttgcattgtgctacatttgggaggatgcagggacgagggggccgagcagaagccaatgcagcagtcgacaccggaggttactgtggatgtgggctaggttccatggagggatagattgagattgtgtggtgttttgtttcaggttcagcctcaccgcctgctgtggagaggacaacactgtagtctgagactgttgctctacaagtt

SEQ ID NO: 108074 - DNA, 926 bp, Zea Mays
ctttataaggaccagcaacacgtggcatgagtttagacttcctcaaattaggaaacctatcctttctcaaatgaacccacactaagtcatcatgttccaattttacttccttactaccttttctagcagcaatgcgatacttttcattcatattttcaatttgcaacttagttgtttcatataacttaagaatgaattcagaacgttgtgtagcatccaagttcactattttagaagtcagtaatggtagcaaatcaattggaccacgaggattaaaaccataaactatcataaatggactaagcttggttgtgaaatgaatggaacggttataataaaactcaatatgtggcaaacactcctcacacaacctcaaattatctttcaaaacagcccgcaacatggtaaataaaatgcgattaacgacctcgttttgcccatcagtttgaggatgacaagtagtagaaaacatcaactttgttccgaatttaaaccacaaggttctccaaaatggctcaaaaacttagcatccctatcagaaacaatagtatttggcacaccatgcaaagacacaatctcagtgaagaacaaatcagcaatatgccaagcattatcagttttgtgacagggtataaagtgtgccatattggagaaacgatcgacaaccacaaaaaggctattgctccccctctttgttctagacaagcccaaaatgaagtccatagaaatatcctcccgaggtgcactaggaacaagaagaggcatataaagaccatgtgaaattaagtcgggacttagctttgttgcacgtggtgcaatgagagacgcagcgctcaacatcacgacgcatccgaggccaatagaggtgagtggacaacacatcctcggtcttcttaacaccaaaatggtctgtcaagccatcccca

SEQ ID NO: 108075 - DNA, 443 bp, Zea Mays
ggattctttttcatttttatttatagcttcgtctgatatctcccggccgcccttcatccaaacgttggaatagaatttccctctcatcacagtagcctcagccgaaggatccttcgtgttgtctacagagaaaagagtctctgcctgggttgcagctttaacatgttcacatccagttttctctaaaattgctgcaacccctctagcaccggcgaaggcgcagaaatcaccacggtcgctaagtatctcgtcaaaggcttcagcttcttcgccgatccattcgatgattcctttgggatcgcctctaataaatttttgctcagatgagtatgcacccacctttgcaaaactatctttcaacttcttagcacaatccaaggatttttcgtaatacccctccttcgattccctaagctcatctacattcttttgcagtcttgcgc

SEQ ID NO: 108076 - DNA, 639 bp, Zea Mays
ccgcaacaagacacaacatcaccaaaccacgtctagaccatacatatagtaccaaaaggtctatggcagacacgatggaacaccccccgcatgcgcccacggatataccctcactgactcgcggggccggtcaactccagtcgtggagaccttggcaccggagtctctacagtggcccatacaccggaaaggatgatacaaaaccccatactgggcgtatacctatgcgtgcttgacagtgacgcaaggggtatgacggaagatgaaacagtactggacacaaccctgaaccatgtcgtaagcccactttttgcgggacacgccaggtaccataacgttgacaccgagcaagctacagggactcgtataccagacggacaagatggaatgccatactaggggacgatagcgcacgaccctacgaaccatgtcaggaggacttcgccatccgaaggcagcaagtcgagctccctccgagtaaaatatgaattcccactgtaaagtccacctttgagctataaaagggtagggaaactttctttcgacacacaagcacacctggtataacacgcctcaaaaaaatactatggtcagtactacactggactagggtgaatgcctgaaccagtataaactccg

SEQ ID NO: 108077 - DNA, 378 bp, Zea Mays
gttgagggcgccgtcgcgatgaggacctaccgccggtcggtatgtgcgatggaagaagaaggggcgccaactgttggatgagctatgggcgtctaagattagatctccgcgtaatgtgttagcaccgttagatttgaatccaatagatctcgtgacgtaccggtttgcgggaattggggatcggatctggtccgtgcgatcttgatccggtgtatgtggatcgatttcatctacttaaaacctggggcgtagatcttagatccatgggctaggagcgcttgcggattcagatctactttgatctgttgatttagaatctaacggcccagattgggcgatacctctttgctagggcagttcagcataagtgcccctcgg

SEQ ID NO: 108078 - DNA, 469 bp, Zea Mays
gctcacattaagcaagcaaattggtctatactgttgtatgacattgacctcttggagtttgggtattagagttatcacgccaaagttcaaactaaacagaggtaagttaccatgaaacagatcgttgaacatgagcataatatctcccttgataatttcccagaatttttgatagaattccgcaggaaagccatcaggcccaggtgctttattcttttccatttggaaaatagcttcctttacctcctcaattgtgaatggagctgttaagaattcattttccgagggtgagacttgagtaatatcctgaatgatttcctcatcaagggagatattgttatccaaaggatcaccaaagaggcccttatagaactcagttatatagttcttgaggtttgtttgaccttcaatttttcccccttcgtggtctaaggaacgaattagtttctttctatgcttgccattagca

SEQ ID NO: 108079 - DNA, 1009 bp, Zea Mays
tctcctaggtaaggaccaagcttcccaattcctctgttccaaatttttattcgttcttgcagatgcaagaaacgtgctctcatgattcctgaagcaattaaactcataaccttttctttgtcacatatagaccattcttttttgccgctagttgtctcaagtatcaagatgttcgcaatagctactctttttttttatgtagagaaacatccccttgtaccttgtgatgatttgagatatgttttgaccatttctattttctcatttttattgataaattgacaccattgtgtgttctgtcatatggttaccttatcagttgatcttgttgcatgttgttccttcattcaaataatcaaatgtgtcatctgcttttgtgcaaggacaatgagagtaataaatgccaactgtagtcttatgaaatatgcacatgcttttcttagatggtcacagtggatgcaacaaatacgcatttgctgaatcgtcatcctattgttttctctctatttggtccaggacttccagactgatctgcacgcatcatgaactcgtccatgtctttctcagtccctaagtatgcgtagcattaaaaccccccgcaaacaatggcccaatgtacacagccatcggtgaactaagccgtaaaagtagctccattgcatctgtgtactgatacacaaatttgcttgcttgagctcctatacacattacacacttgctgcttcactataggactatgtctcgcctcttcttgttgttcattggctccgcaccagctgtccctttcctcatcattgccacaaactctgaataatctatccttccgtcctacatgtgcaaaaaggtaaacttaagccttttgatataataggaaactaaaactacatatatattgctcagtacgaagaacagctactatgtcaactgaaatttacacaaagtttgttccttacgttgtcggagtccgcatctgcgatgacctctttgattttgtcggcgtcgtacaacc

SEQ ID NO: 108080 - DNA, 291 bp, Zea Mays
tggttttgagtcatcctcgactcaaagtcattggtgactgcaagaggtgttgatgtagtgcttgatgtcatccaacctagctcccctttcttgaagttgaccctgttgttgtataacatacaaagaaggacaagtggaacatgacatgatatggttagctttaacacaaccctctaattgatcatattgtttcatgagaaaaggagatttcatatttgaacaagtatatactcgatgtaccatatataggggtggtaatggatcatgatccaaatgccccttcataaaaag

SEQ ID NO: 108081 - DNA, 459 bp, Zea Mays
gaattttggcacgattattctgttgccaaagtcaaatgatgcgtcctggatagagcaatatagaccaatttgtctgctgaatgttagctttaaaatttttaccaagacggttatgaataggctaatgacagtggcccacaaggttattagccctacccagactgctttccttcccggtcgtaatatcatggaaggtgttgtgattcttcatgagaccttacatgaattacatcgtaagaagcaaaatggggtagtgtttaagattgattttgagaaagcatacgacaaagtacggtggtcttttgttagacaaactttgttaatgaaaggtttctcgaacaagtggtgtgattggattgaggccttcacccaaagaggtcacgtgaacataaagattaatgaccagctcaccaataactttcaaacaatgaaaggtctaagacaaggtgacccgttatc

SEQ ID NO: 108082 - DNA, 465 bp, Zea Mays
agagcgcagttagaatgatgaggactcagagcactaggaggaggaaggccatcatcatcatccaatttacacaaaccacccttctccttttcctgggttcaagagggctcgacttggcagtggttattggaggctttgggggtggtcatcgagctggccaaggaagtggctagggcctgcttcatcataatcttttgtcacccaagcagggcactatggtggaaatcaatgttccaacgtctatatcagtatgaagaatgctccaaacaagattggtgactgcaagaaacatacaagcaaaagagttaccgaagataccttaggacgtggctcaaagagtatgcctctagaaagcactcttaggccaattttcaatagaagaaaatatatatatgttagagctgagccttggattatggcatggttatggttttaaccttggatcgataaggatcaacatcctca

SEQ ID NO: 108083 - DNA, 930 bp, Zea Mays
ggaagcagccatccaacgttagtgaagttcgaagctttttgggaatggcaggatattaccgccgttttatcaaagggttctccagcatagcaaggcctatgaccgagctcctcaagaaagacaataagtttgtgtggaccccgaagtgtgaggaaagcttccaaatcataaagaagaagctcacaaccgcgccagtattgacactaccggacatccaccaggatttcatcatcttctgtgatgcctcaaggcaaggtttaggatgtgtgcttatgtaaaatgagaaattcatcgcctatgcatcacgtctactcaagccgcatgagcagaattatccaacacatgatttggaattggtagccatagtgcatgccctaaaaatatggaggcactacctaattgggaacaaatgtcacatcttcacagatcacaagagcctgaagtacattttcactcagccagacctcaatctccgtcagcgaagatggctggaactgatcaaagattatgacattgagatccactaccaccctaggaaggccaatgtggtagcagacgccctcagccgaaaacctttcggggagaaagaaaccaacttcttggaagactggaagaaagaatccgctcaactgaatgcttgtctgggagacaatggcagcctagaagttaagccaatgctagaagacctcatacgcaagtctcagcgcctgaacactgagacgacaagtcttgtggagagaactcgcaaagaacaactcccggacctcaggacagatgaagaaggaatcctttggttcagaaaccgcctgtgtgtacaaaaagaagaggcacgagaagtcctgctcgacgaagctcacaacttagcctactctatccacccaaggactaccaagatgtacctagacctcaagaccagatactagtggagag

SEQ ID NO: 108084 - DNA, 525 bp, Zea Mays
atcaccactaaagactgaacttggctgacagtgaacaccgaagaactttagagttgatttgagcttaatcgagtgagcaaatggccaaagttcctatggtcgaattggagctggcatataggtaaataactttgttgtaatccggtcggtagcttttcacatagaaattaaacaaaaacacccctgaatatgctctgtcagacagactgaagaagatccacatggtacagtgaatgaaaagatattcagatgcagtgaatgtgccgccggtgaactccgcgccgtgatcctcgccagcgtcacgattcgtgcgctctgggtgcagatatcggccggcgatgaaaagatcttgaccacggatgaggtcgtgagctgggccaccgtacccacttgcccctacggccggtccagatgacctcgctggagtctgccgcttgtcgcccagacgccatgtactgagaagcgataccacgtcgcagtaaaccgccttaggtagcttgtccatcgcctgagacattgccccgg

SEQ ID NO: 108085 - DNA, 324 bp, Zea Mays
ggaagtgtgggatgctattgccagtcttccttcagataaagcgcctgggccagatggctacacagggagattctacaaaacttgctggtctataattaaggcagatttgatggctgcccttgctgcccttcaccttggtaattcacaaaagtttgggcctctaaacacagcatatattactttgatccccaagaaggcagaccccatttctgctgatgattacaggcccatcagcctcattcacagctttgctaagctgtccacaaaggtccttgccaataggcttgctcctctcctcaacaagttggttgaggctaatcagag

SEQ ID NO: 108086 - DNA, 297 bp, Zea Mays
tatttttaaggcatcacctaggcaatgaggcactcgagggaacaaggtgtccctgacacctagccaaaagtatgagatccaatggggtatagtcataacggaggaaaatgatagggaacaaaccaggaaggccatgcatccacctcctgactcatcaatcatccccaccaactcgagtgccacatgggtcaccttcggcggcggcgactgatctagaaggggtgaagtggttaacgatagagatctatctgagggagcagcacaacgaggagtgagtagcagcaggaaaaggaggga

SEQ ID NO: 108087 - DNA, 444 bp, Zea Mays
gcttggactgcctgagtctgcatcaggaacatctgctctattgtcgtcggggtggtggtggcagctgctgctgaggtgcctcatcttgtggtgctggctggtcctgctgagcacgccttcctcctctacgcctattgtctgacatctgcagggtacaatcacagatcagaactgatcttacaaatcttggagcataagaaaaggatatagaattcttccacaatattaaacatgtgagcttctccactgactaccagcacaggcaaacacaactttttggataaagaggaaagtagaataaaaaggcttcccaactaaataactaattttattaacattaacaggtaaaccaaagtgtagagggtacccacactctggtgacagtcattacaaagatccaaatccatcatagttcatcatgacaaacataaaaacacaggataa

SEQ ID NO: 108088 - DNA, 431 bp, Zea Mays
gcttgaactctatccatttagtgaatttgtcgatcgctaccaatatatgagtgtatccccccagagctttcttgaaaggttcgatcatatccaatccccaacatgcgaagggccaagttactggtatggtctgcagttgctgtgctggcaggtgttgttgctttgacaattattggcaagcttcgcacttctgaactaactcggctgcatcgttctttgctgttggccaatagaatcctgacctgaagaccttcccgactagtgttctggaggctgcatgtattccacattgcccagcatggatctcctccagaagttgcttcccaatgggcgagaggatgcacttcatgaggacgcctgacgcaccccttctatacaatgtctccccaatgagtgtgtagtgagccgactgtctagcaatgcgctcggcc

SEQ ID NO: 108089 - DNA, 521 bp, Zea Mays
cttggagtcttgcatactctcatattttttatgtatgcttatcttcataccctcggtgtctgttcaagacatttaagttaacatgtccttgaccaacccctgtttcttaatggtccatgagcgatcgttttacgttgcacatccttggtgatctcgtttttcctttataacttattttgataatgaattcttacttcaaccattttattgcaacctcatctatcttgcccttgattgttttctccacttcgccacttcgcgagtcttaccttaactctatcctttgttatgcctttcattactatcaccttcacctttgacacctctatatcttacttgatgattatcttatacctaccctttaaaatctcctctcttccatctcaatctaagagttgtaacttacctactttcccttggtcgtaccctcttccgtgtcacttgcgagcttttaactctatcctttgttgtgcttttgctccttattacctttacgtttctcatctctcgatcttactttg

SEQ ID NO: 108090 - DNA, 420 bp, Zea Mays
aaagtaattagatattgtttagtctaatctggtgatatcgatctaatctagactccatctaatctactatgatccaatctaaaatgagttacctaacaggatagtcaatcctggtggaatacattagaccctgctcctataaacaagtttgagatcttagatcaactcgaccctacccaacaacttgacctacaggttacacaactaattccatctagcatatagctattgaaccctctacccatcttgtcacaaacccggatgaagacaccaaagctcaaggaagaaaggatcaaccgcgtcaaggaaggataagagtcaagccaaatctggtcttcagccccaactcaagccttcaaagatcaagctagatcatcagatgaatcaagatccacaaatcttggatggagtctttcctta

SEQ ID NO: 108091 - DNA, 575 bp, Zea Mays
cgacgagacacggaggcgcggagaagtgaattgggggaaatgcaaaattggagcacggtggtgcacgataggagctagctagggatgggttggacacgtaactaagaagcggagtagagggcatcctcaatttataggtcccgatcgaattggacaagaattttgggattgagatcatggttatccggctagaatatttcaccatggcctgctcaccgtggcgcataaagggggaactggtatgcagtcgataaccgatggcttgccatgacccttacgacgcggaggggtggttactacgtgtcacggccggaaaaacgacgagctccggtgatgccaacatgactgaccgcggcgggacagaacgaccagtccggccagcgactagattcaccccccaccagatattttcacgccaccccgacgttatctactcctcccaaggcacgaatctcctaggcgggtgcgaattgtggcggcagatcaccgacgttgagctcacggcaccggagatcttttctggccactgtaccaccaatcttcatcagaagttctaacaacacgatttggagagc

SEQ ID NO: 108092 - DNA, 862 bp, Zea Mays
cgctacatctgtttaattcttaaggcggatttctaattgcgccgcgtggatgttttggtcgtagtttatatttggagagagggggggggtgtgctatttgtatttgaatcctacggacggagtagtacagggctttgcaatctggttctacttgtttgatctctttcattttcgggtgcaacgagaataatacgaacgggactgttggactccatgcaggacagcgagacactgacattgtattgatgggtctgggtctgggtgagccaagagttttgaaagcgtggtcagcctacaacgcatggagatctggtccatgcaacgagaacagtcttgatggcagtgacagatgcgtcatgcgtgtgtatactactagtctactactactattaagcacggactcgtctagtcgtctgctacggtgcggagtgggactgtgggagaactgcaacatctcgtctaccacaaaagaaaatggcatggcgcctgcaatcagctttgcatatattttacgcgtccacttggtgaaagaataaaaggaggcaagcagtcagtgcgaccgctggcaattaagacccatttggtagggctcctatggctcctctgtctttttggcttctctataggagacagtggcagagactgtaattttatgaaatattattgtatgccggatagaaggagccaatagaagcttattttctcgtgcttcgattttcgatagtaaaatggctctcactctttgatgactctcgatgatgagctgttttttaagaccgtttagtacgccttcggaaccctgccaaagggggcctaacaaggagcagataggctggagatgggccagtaagatttgatcccg

SEQ ID NO: 108093 - DNA, 486 bp, Zea Mays
gagccatcgcgtgcatttactttatgcgagtatgtgtttggttgtcagtgtgccggaaatgcagtcggtatgaacggatgcaaaaccatctttttaaaaaggcatttacccgcatctgccatatgaccaaaactggcgtaaccggccgcagtcttggacgagcctggcttggcgtgtccaagcatccaaacagccgataaatcgcatggtcgctggcagctagtggcaggacaacacaactgtgtacgatagcatgcatgaacaatgcgagagtagccaaaagtccgatatagggtagggagcagggaaggtcaccgggaggatcggtagggggccgaccgccgggaagttcgcaaggggcaaggagcatggacgaagggagctcacgcggtcgggagcaacatatccacagaagggtggggtggcggactaggtggcatttgtgtcagggatggggatttggcgaaatgggtggtggctgcggct

SEQ ID NO: 108094 - DNA, 648 bp, Zea Mays
cgaaaaaagaccgcgccggcggtcttcgacattcgaccaatacaaagtcaccgcgaggctcagcgatagccaccctcgcgtgcgacaactccgcgcaaaagtcgcctaagggtgcagccggaccagcacaacaagtgtgaagaatcgaagtcttacgcgaagactactcgtgcaaaagtagcctaagggtgcagccggaccagcacaacaagtgcgaaaaatcgaagtcttacgcaaagactatccgtgcagaagtcgcctaagggtgcagccggaccagcacaacaagtgcgaaaaatcgaagtcttacgcaaagactatccatgcagaagtcgcctaagggtgcagccggaccagcacaacaagtgcgaaaaatcgaagtcttacacaaagactatccgtgcaaaagtcgcctaagggtgcagccggactagcacaacaattgcgaacaatcaaagtcttccgcaaaaactatccgcacaacagtcgcctaagggtgcagtcaggcgaagcttaacaagcgtacaccaatctgtccgtgcaaagaccggctacatgtgtacccgactaacacaacaaatacaccagacaacgtacgtaacgccttcgtaagcatagccgaatgtgcgaaggcacacaacctcatca

SEQ ID NO: 108095 - DNA, 634 bp, Zea Mays
tcgcggaccaccccgaagacgggacctttccatacccattcgacgacgtcttcttccacttcgtgacgactcaccagtgctctgttttgacacacccattcattgcctttgcaagtcttcaactctcgcatcagtcgaggtcgccaacaccttgcgagggacagatcacaacggagactccgaagcagccaaatccaacgcagcaaaataatctaggtagtccacaaaagattcgtcaacccacgagaaagggctcccaaattccccttcatccgaataccacgacccaaactcagacccctcagacacattgccactaataaacgttgcatttgcatccttcgaaacatcattaatatcaacatcatcactgtttgcttgcgtaggcccggacatcgaaacttgtgcagcaactgaccttcagtatcacaaaaaattaaaaccaccaaccctaaacccctaatgcatctcttcaacctgcgccggagcagacgccgtcgcagggtcttcgctggagccgcccggaggcgctgagagcccttcaactctcgcttccaccgtgccatccatctgggtcatcgagctttcaagactggcgaggtcatcaacttcttcttcattcatcatctgcaaa

SEQ ID NO: 108096 - DNA, 1037 bp, Zea Mays
cccgcaccacgctgctgccactcatcgtcctacctccgctgccctccatctctgctccgcttcggacctcccccacttgcacgagacgtgaccaacactgcacaactatcgtccgaactgctgggtatatgttagtacaccaaggatgaagacgacaatggaacctgcttcaaagggcatcctaggagcggagggtgcgctacatgaaccaagagcaaagaggaaactgagcccaatagcagggcgaccggcctagactgggtgcactcgttcccctggcctgctccaacgtttgttggttccccaagctgcttggcatacaatctcgatggactttattgaagggctaccacggtcttaaagttttgactgcatattagtggtggtagacgtatttactaagtatgctcactttattccattgtcccatcctttttcagttgttaccattgctcagtccttctttcagcacgtttacaagttgcatgggcttttagttgctattgtgtctgagcgcgataagattttcacgagtattttttggaaggaactcttcaagctagccggggtcagtctccacatgactagcgcttaccatcctcaaacagacgggcaaacaaagcgcattaatcaatgtctcgatacttatcttagatgctttattttcacttatccttccaagtggccagttggattgcttcaacagagttctggtataacaccagccaccattcctctattggcaaatcaccatttgaagtgttgtatggatatgttcccaggcactttggtgttcaggtcccgaactcttcttctactgatgcaacatctccaccagaccaaacaacatctgttactgcagtagcatctccaccgggccaaataacgtttgaagcataaagcggataagcacaactctgagcgtacattccaaatggggaatttggtattcgtcaagctccaaccgtatgtcaagacgtctctagtctcccgtgctaaccaaaagttgtgtttttgctactttgggtcctaccgtg

SEQ ID NO: 108097 - DNA, 512 bp, Zea Mays
tttggaggaacttggatgaatcggtgaggatttgatcgcctgggagtagctcgatacgtggcatcgttccgcgggccgagccacgtgtggccggagttggtcaccggcgaccgccgtgactcgattaacttttgtcgtggtgtcacccgtgcctcgatctacctcactgtacttcacctctacgtggtatacatgcgctagcaaggttatccgcggccgctgatcgcttgtcggtccgctgtggctttaaatagcgtcatgaaccacggcgaggcactcaccgcctcaaccgcaagcttgagaagaacccaaaattcgcactgccttctccacctcctcccaaattgattgtgcacggtgaaactacagtctcttacggtcgtatagccccaatcccatcccccaatttcacccagagccggcgcgacgtcattttccccttttctctgtcaccggtgagcacaagactccgtgctccttggccggaccactctggtaaggctctgcctctc

SEQ ID NO: 108098 - DNA, 322 bp, Zea Mays
gggtttctcgtgtttctcccactggcacgcacaggcgatccttgaaccagagggctccttgcttatctgtcctgaggtccggaagttgctcctttcgtgctctttccataagcttggtggttgttgcgtccaggcgttgggccttgcatatgagatcttctagatttggcttgacttccaggccactgttgtctcccagacatgcatttagctgagctgattctttcttccaatcttccagaaggtttgctcccttaatcccgaagggttttcggctgagggcgtctgctactacgttggcctttccggggtggtagtggat

SEQ ID NO: 108099 - DNA, 434 bp, Zea Mays
tgaatttctgcagcttcaatttcgtccggcattgtttcagcttcggtttgcactttcgaagcttcggcaattttccttgaaggagtagagttcaaagtctttactgtttctaacacatctagtacatttgccatccttctcatcttgggagttgcggcataacttttttgtgccttcggcgctattacttctgatgaagggcttaaaatttctaacacttttgtttctccaatatttgactcttcagccctatccttatcagtcttcgtcccagctggctcagctgaaggtagctccaacattgtagttggctcttcagtcctttgcgcaggaggagtagtttctcttaatccagcagctaaagaggcctccccgccaaactcaggcaccacggctagttcaatataacgtggccagtgggtaagtaccttcat

SEQ ID NO: 108100 - DNA, 279 bp, Zea Mays
gggagagtcatgtctttatcatgcttatgactcctacctgcaccggcaagatcaatgtttttgatacgatctaggaagagattattcgagcatcttggtcaccactgaaggcttgccttcatgcacccttcatcatgaagatgatcgaagtagtcacctaggttcgctatgagaagccagtcaagcatttccattatgttccttattgggttgattccaacaatccagcggcaaggtcgaagtgggctccagctagttcaagtggtcatgcgtcttttg

SEQ ID NO: 108101 - DNA, 417 bp, Zea Mays
gactatgacccttggttccgcgtaaggtatggggggctggccctacatcagactttgtgtttgtgcgtggtcgtgatcgtggtgtggtgtggtgtggtgtggtaactcttatctaaagagatttaggattgggtcggttctcagttggggatctgtttggtgcgcttgagcccttctgaacttgatcatccatgtttttgatacttaaggcatccaatttgtagctactgctctagttctaggatttggaaaactccttgtcgaattgtcccacagagctaatgattgtgcgaacaaaatgacatgatgctgattgttctacgcctcttgcttaataccctgtgaagtttaattatttggtggtacacttgaccttggaagtcatgacctcccaaaagcatggtgtagcatgtaggt

SEQ ID NO: 108102 - DNA, 1030 bp, Zea Mays
cagcgcctcttcacagctttggcatcaccgtcttggtcacatcagccacgacgcccttcgtcatttaactagttcatcctctatttcatgtaataaaggctctactgcccccgatatctgtcacgcatgtcaacttggtcgtcatgttcgccttcctttttccatttcccagtctcgtgctccacgtcactttgatctcgttcactgtgatctatggacttctccaatacccagtatttctggttacaaatactacctcgccatccttgacgactgctcccacttcctgtggacattccctctccgcctcaaatccgacacatttcccactattgctaattttttctcttttgttgccactcaatttggcaccaccataaaaagcttgcaatgtgataatggtcgtgagtttgacaactcccacacacgagctttcttcctctcccacggtgtccaccttcgtatgtcgtgtccctatacctcccagcagaatggtagagcagaacgtgtcctccgcactgttaacaacatcgtccgttccctactctttcaagctcaccttcctgctccttattgggttgaggctcttcacaccgccacatatcttctcaatctccaccccaccagcaccctaaattcctccactccccatcttgccctctttggtcgccccccatcttacgaccatctccgtgtctttggctgtaagtgctatcccaacatctctgccactgccgcccataaactcgctccacgctccaccatgtgtgtctttcttggttactcgtctgaacacaaaggctaccgttgtcttgatatctccaccaatcgtatcatcatctcccgccatgttgtgttcgacgaatcctcctttccgtttgccgagacccctcccagctcggctcttcccactaaccttgattttttggatttattttctgaacaggtcccggttccacccattggcgcattgccctcgtccactgctgggcagcgcaccagcgccataccacctggaccgctccagcag

SEQ ID NO: 108103 - DNA, 347 bp, Zea Mays
gattatgacacagaaaacgagtgaattggcgatatagaggtcaaacgacgcgaaatcgacgtttgaacgaggaatagtgccataggaggtttgaaattggaattgaggcatgaaatggcttggaattgagccgatacttcgcgagtaggtttatttgggtaaatatgagtgaagtgtgcgcttggtttgaatttaggcgaagaagatgaaattgtggcactcagctcggaatcaatggctataaaggggaatttgtgaggaactagtgcctgagatatcagattagcgtgaaatttggcgaatatgttactagaggtatcataaaggtgcctgaaaaatttgggatc

SEQ ID NO: 108104 - DNA, 685 bp, Zea Mays
cttcggcattatagccggatctttagctttctgcgtaggaggaatgggttcctttggttcagcaactgaagaagtctccccgccaaattcaggcaccacgaccggctcaatatagcgtggcctgtgggtaaggactttcaacttcttgctcttcggcgcaggctcatttggagtggccaaagctgtagtcttggtcgaagcagcaattttcgtcttctttccccgtccccgcagcgggtagcagtagtcggggtaaacaaaaccaatggcatcaaaaactctattcaatctcttttttccttggcccttgaaggatgtggataaggcattatcttccgctttggaatacggcccaagcagttcatcacttgtagcttcgatacatctcagccagtcatcattcagttcatcaaatttatctccgtatctgaaggtgtatttcagtcgaaccagctcaccttcaccagacttggtgacagtctcctttagcattttccagctctctacaagcggccatactctgaatgctatatgttcttgaatcaagtctcttgtactaatgaagaagcatacagtgccaaaggccttctggcatgcttcggcggcttcatcgatctcaaccttcggccttcggaggccgaagcaggaccaaatggggcgcataataacctccttaatatcctcc

SEQ ID NO: 108105 - DNA, 392 bp, Zea Mays
gttcttctcatgcttttgtttccaagttttcagatactaggattatgcagtttgagatgagcatgatgggagaactcaacttcttccttgggctgcaaatcaagcagacccaagatgagacctttgttgtcaggtgtgaaaattaggggtacccggattatcactctaaaatgcactcaggaaaggttaagacataaccaccaaaggaaagcaaccgaaacacctcctaaacctgaggcccctccccgagggcctcctgcctcaaacaaaatctccacctcgcccgaagtcatcgctgctccgtctgtcttgcccgagccgatcccaagcagataagacaaaggcaaccgaagaccggtgggggacactcgcatttaatgcacacacctaac

SEQ ID NO: 108106 - DNA, 487 bp, Zea Mays
aggctgtctgcgaggtcatccttcgacatagcagagaggccaacttcgagctttggaaatccaatatttctagccatctctcggcaaacagatatttccttgttgtctgggaggcagtacagaaagtcatcttcatcagtaccattgtacaccaaggatcccttcggatacttcagctcccgggcatagtgtttagctttggcaatttcctcttctgacaattttttacccgaagtgtgtcgaatgataaagtttagctcttcagtagacgattcgggagtaagagatcaaccttcttgggtgcgtcttcttccaagattagggaggcacccaaaggtccttgttcaatactctgtctcgtttcagtgggccctgtttcaatgggcactgaaggcccagctttgactttagcacgaattgtggtagctgcggcggcctcctttgcaggtgcaggagttgacgcccttgtcgattccaagactgtgtc

SEQ ID NO: 108107 - DNA, 594 bp, Zea Mays
ctcatcttatcaccagagtgctaggtgggtctgatggcgatgatgcacaacgtctatgtttaaagcatgtatcaaaactggactctatatccatgataattaactttacataaggttttcttcgacagttcaggcatctgtctgtggactgacatttggatggatgcctctcctacagtgtttgtttgcgtggggcatgtagaaaaggtaggagtgcaacagcaaaatgttgctctcctatactattggttcgtatgaggcatttgttgaagacgtacatattccatcaaactaatatactaacaaaatgcacactaattagtaaactaaccacataataatcgaatttactagcttaataatataaaatttgtgaagggcttaataatactcaccttgtcgggtgaaagcacaaggctagcgttgaagagatgagacggacacggaaggggtcgggtctcgggtggagaaaggggactttgtacgtagggacgacgtggcgtggccgggcaggtgcacggtggctgcgacgtatgtagtaggcgtggaggcagaggcgacaatgagagaaaggagtgtgagccattgtaattc

SEQ ID NO: 108108 - DNA, 292 bp, Zea Mays
aaagaagcaacagatgatcagaggatgtgtgaaaacaacaacggggcaagcaggctatttatagagaccggaggcaactgttcatctcctaccacgctcaccgaacagtcgcaagtattcaataagcaattcaaatcgcctgaaggcaagttaggcaacagacgccgcttcgcgtaacacgataccattttgacaaaggtcaactgcttgggcgatatgattacgccccgcggtcacgtcaagttactactccaggacagtgtgctaaacgctctgcgtaccaagatgtccc

SEQ ID NO: 108109 - DNA, 653 bp, Zea Mays
ctaaatatgaccttaatggacaccggcccgaatagcggaacatacgacacccatttctgtgattcctcgccctcacctctttctctcatcttcgacccctttctctcgtcttccgagattcctcacctcccgcaaatgttttctaccacctacttaacaacgttccatattctttatcattattgtcgatcatcactctaaagtctaaactcaaaggcagcatatccagtgcgcctggctacctcgtgctcccatgcgcataagccagaaagagcttgcaaatcactcatgagcagatggtgcaatataaacataatgctcgttttttcaggttacatgacaacttttcttcgtgagaatcctagtggattgtctgacactgacatggtactttgttgtagattgatttgtaaatgcccttttttattgttgcatatatctatcatattggctaaagtaattttgtttaccttaccatgtagacatctatgtcggcttctcagaatgcagttgttgaaaagcactgatttactcttttatattgttggtccattctaaaggatgagcccagatggatggatcacaacactgatcgacaagcatagaccgctgaagctgctcaacttgggtcaaacactatcaagctatacctc

SEQ ID NO: 108110 - DNA, 468 bp, Zea Mays
cgcgcatcaaattctgtaaactacaggggtcaaactataactttcctagactcaggcgaacaaccctacggacgtcgggttgatttggttaaagcagggggtctattttgtaaaacgtacgggccgaaggggtatgcttcaatctcagccgccagatcagaattgaatgaccctgattagatcatcgtagtatacatatatgaacccatagatccggaaccgagggtggcgattcaaagtaacatggacccgatctcgaccctagacgtgaagatcaacggtgtggaagcgatctacccaaaacggtgtcgacgttttaatcacgaccgttcacggatggatcaccggtccgcgacccctcgcccatccattgtcgatccaacggcggatatcggagccggccgaactacatcctcgaccgaatcccagccgttcgtttaccactccacagcttacgtatcatctccc

SEQ ID NO: 108111 - DNA, 389 bp, Zea Mays
cttttagtgcaaagtgaagaatgtgggagaaagacaaaagcaaacaagcaagctctatcgaagtttggtaccgacaacacactacaggatataccatgtagtgcttttgggtggatggcgaagtcgattgtaactagatggttcgtgtagggtaccatagaacacaaagaattatacaggtttgggcctttgaagtgcgtaacaacctacgtcctatgtgtttatgagattgtatttctcggtggttatgattacatggagttctggggctagaagatgactatgcctactgcgatctgtctcgtttcataagggtgactctttttccttactctgatggaaaaaccaagttacacgcaccacgcccacgaacgttgccaattcaaaac

SEQ ID NO: 108112 - DNA, 695 bp, Zea Mays
cccgtgcgaccgcgtttcgtgttctgcgatcccgcaccggattccgtcgcacccatatcagatcctggtgatcctatgcgaccgtgatccctaaagccctctgcatggcttcgatccggccgatcgcgtcacgccacatcgccataaatccacataatcataagtattcaatatatggtgtgttataaatctattttatactgttttagttgcgttagctccgtaataatattatacacatgttaaaacattattttgtcttgaagcatgttttatttatgtaattaattatttgtttatattagttattaaaatagctttctaattaaaactagtctatagttttagtttgtacttttataataaatgttagcatgattaatatcagatcaaatgtttttgagttaatacttttttagcataaacacgacatatgttaataatttcccgcttgtcgcgtctttcgtgcatgttgcgtgtcgacgtttgcgtgtcgtcgtgccgtttgcacatgccgtcgtcgcgatttgtgtgttgttcgcgcgtgctgttcacgtgtcgtcgttcgcgcgagtcacgattcgggcgctttaaggaaattgtttattagccacgaattgttagctattcaatatataatacgccataaactcgtttctattcgcttcagtcgcgtcaactctatagcaacgtcg

SEQ ID NO: 108113 - DNA, 497 bp, Zea Mays
caagtctgtaatgctgcatatggtcattggaaatagctggttcttcagaaggaaacaaggaagaagtggagatagaatcagagggtgtggaagatgaggcaaaaggaaaaacggcttcatcgaacacaacatctcgagaaatataaattcggccggaagatcgatctaaacatttgtagcctttgtgcatagagctatagcccagaaacacacactgggtggatcggaaagctagttttcgactgttgtaggggtgtaagtttggccaacaggcacaaccaaatatacgcaaaaaattgtagttaggtgactcatgaaacaaagcttccataggggaagaattctgaagcacacgggtgggcatgcgattgatgagataacatgcagtaaggaaggcttcatcccaaaaccgtataggaagggacgagttggcgagaagagtaagaccagtttcgactatgtgtctgtgcttgcgttctgctacgccattttgttgg

SEQ ID NO: 108114 - DNA, 773 bp, Zea Mays
tgtttctgggctacaagaccttctgaggtttcttcatatttctcaatttcacttgtagcgacacgtaaagatttggatggctcattttgcacatacagacttgttagtcctgaatcatcttccagagaagcatcgcctttggagtctcgcaatgaatccacgaagtcactgatttcttgcttaggagaatgtaatgtttcaatgaattcagtaagttcatgggtggcttcagtcatttgtttacaaatattctcggacccatttcgtatagacttccaaatttgttgtacttcttgcagcatttcttcaactatcctcaacctgtcagccaagttactagaatcaacagccaaagctacattgtcttgctccaaagcatgcaggcgctcatgaagtccatctatctcaatcttcattctattgatgtgagcattctgtgaagtagtagcaagttcaaggttgatcaccttttccacaagtcgatcaaccttttccgctaattctgcaactgatagttcaggataagattcgattatatcttttactgtttgacatatttcctggaggtcaagcctgctctcgttcagagcagaatcatcagcatcatcgaggggcagtgcattgaccagttctatttcatagtgatcatgtacattcattggtgcatgaggcagctcacattcattcttgaagcttttcagcttttcaattgcctcattggctcgtcggagctccaccttcgcctcttcagtcattctgtttttctggtcctg

SEQ ID NO: 108115 - DNA, 1054 bp, Zea Mays
ttcgaggagatagccccaattaactgtgtcgaaagccttctgtatgtcgagcttcaggaagagcgccggtttttttgcttgtgtagtcttctaacaacgttatgcacataaaggaagttgtcttgtatacatcttttttggatgaaggcactttgggacttggagattagagtgttgaggaggggggccagccggttagcaagcagtttggagaagatttttgcgatgttgtgtatcaaactgatggggcggtagtcccccactgtcaaagcatctggctttttaggtataatcacgatgttggcagagttgagtaaacgaaaatccgccccattcatgctatgaagttggtgaaaagcctcaagaacgtcctgcttgatgatatcccagcatactttgaagaataaacctgtaaagccgtccgggcctggtgctttgtcgctctgcattgagaagattgtttcctttatttcttcgagggagaacggcgcttctagcgatgagaggtcatgctgcactaaagctagagctggccagttgagggtgatccctctctccggggttgtccctaggtgagatttgaagtgttcctaaatgatttattctttttcctcatgggctaccgctaaagtttccaattgggggctgcaggcaatggatgaagtttttacgtgctctggagctagcagataggtggaagaacttagtgttcgcgtcgcccaacctaatgcgagtgaggcgagcccattggcggatcctcgatttttcaattacagcaagtcccagtgccctggctttgagtgccttcaggagatccagttcctcttgggtgagcacacgctcctcttgagcagtttcgaatcggaggattaatttttttggaaattgcaagctgtaatctcgtgtctcccactttggtcttacaccatagtttgatggcctttgctgcatgcactagtttgatatgaaggcgcttcatgggtgtaaaggaggaataaagtggtttcagccaggcagtctgaaccgcctccttgaatccctccatctttaccca

SEQ ID NO: 108116 - DNA, 314 bp, Zea Mays
ttaaaaaatgcaaggatacgagcatgtcaataacaaaatggaataaagatggtcaaatagtagcaatttaataatggatgaggaaagagtcccaaaagactaaaggctatggtcgggggcatctacaaagatgtcgcaagcacaagataagattagatataatagattgagagaagtatagatcatactagaataaaatattttttggcaagggggcatataggagcacaacatagaattagtcgaggtgactaatattttgaagcagaatcaaggatgagatggagtaataatcaataagtccttaaaacggc

SEQ ID NO: 108117 - DNA, 753 bp, Zea Mays
aaggaactccactactttcaccgctggcgatgaactgccgactgtttttccgagtcaaaggagcttcattctcttcctcctcatcttccacagtgacaacacaagcagcacccccattgggatcagcaacagataaggcacctacattgggatcagtagcagtttgggtacacccattggggtcagcgtcagtaggtccagtcgcaggcacttcttcagcggcaggaactaaggtaccaacgtcttcatcaaaactggatactcgtcggaggcgtcttctcttcttcttttgctcatcagcagaaggctcaggctgattggttcggctagggcgcctcgggcgagtactgacaggtttctgaacatccaaagttgtatcaacctctggaaggggcacaactgccaaagtaccagcaggagcagcgtcagaagaatcctcagctagcagatcaagcatggcatttatatctgcatcactagggttcaggggcacctcaaaatggacttgccgttcgtcatcaggaatctccccaagcgaagcaaccaaagcactgacttcttcagcagagggtcgcactctaaggcccaaatttccatcagtcacaggtggatttgacacgaaaagggtgaaggctttgggaggaggcaggttccaggccgagtaagccaccggagcaccaacatttgacaccttacccctgaggatcatttcaagacggcttaccaagtctgcagaaggaattctcctgttgg

SEQ ID NO: 108118 - DNA, 425 bp, Zea Mays
tagtgttgtggggggccattctggaggacctgctacttatcaccgagttaaaagacttttttggtggaaagggttgaaagctgaggtgatttcttttgtgcagcaatgtttggtgtgtcaacatgccaagtcagaaaggattcatccacctgggttgctccaaccattaccaattcctagtggggcgtggcaagatctcaccatggattttattgaaggattacctaaatctgagggctatgacactattttagtggtggtggatcgtttttcgaagtatgctcatttcttaccactcaaacatccattttctgctgctgttgttgcccaggtttttctggataacgtggttaagcttcatggagttcctaagacattagtgtctgacagggtgacatggaccttcggtccatggggatagctgt

SEQ ID NO: 108119 - DNA, 662 bp, Zea Mays
gagaattcaaggtgattttgagattatctcttgtttaattgtgctgcaatccaattgattatatgtttacctatgcgaatcggtagaggtgctgtccagaaattttgtgggtgggcgaacaacagtagttctagaggtttctgggaatttttcatgcgtaattggtgggaatcagtgggagaatcatgtagagctttttcatacctttccaacaagtacttatgcgttcgattcagagttatattttaggagatatcgctgtttgaatccgggtatgttgctgtccaaaaacatattgcaggggttatcttgtggatggttttgggataattagatgttggaatttaattataatttgtatacaaaacttgtggagaactttatgtagatgcctctgtagtttttgtttgttaccactgctatcataattttaaagatatgaaattgttaagcagcgccgctgcagtttggtgggtgttggggagagttgtcgcccgcggcggggtttgaattgtgcgtaggtgcggcatcgtttatgagcgttgttatgtgaaatttatgcactaagttgtgtgtcaaaaaccggtggtggacttccggatcttacttagggccttgtccaaacttccccggtgaagacaagtaaaatagtggtggtttat

SEQ ID NO: 108120 - DNA, 375 bp, Zea Mays
ccccaatctgcttagagttctaaaccacacatccctcgcaaagacacaagctacaagaatgtgttgcactgtcatcctgctggtcacagaggggacatcttttcgggtgatccattccccgacgagctagccgatcagctgtccaacaccggttgagagatgccaaccaaatgaagtatttacagcacgtaggatcccaagtcttccatattcttttggccggctcaagatgttgcacaaacatggaagaacttatttatgttagagtgttgtttacgtttctgtgtatacctctattgtaatgggccttggtcctcaatacttagctatatatatacactcgcaaccctgattagggttagagttttattctcc

SEQ ID NO: 108121 - DNA, 334 bp, Zea Mays
acgacgtctaccattacctcccataccttgtcgattacgtgcgaggcgttgtcgcagcggtgcataaacatcgtcgtcatcgtcgtcgtccataggagagtgagctggggctggagttggtggtgggggatgagcctccagtacgtccatgcgtgtaacaagttcagcaactcgtcgatcaagctgctcataggacgtcgccgtagagtcctggtattttttaaaagcttcagtcatcgcgcgcatcatctccttcaattccacccgagagacacagtcatcgtcgttaagcttaggccccttgtccttgtccatttgattctttggtcctgtc

SEQ ID NO: 108122 - DNA, 283 bp, Zea Mays
ttctaattctggcaagtggaggggctcttaagtaaaatggacccgcgaaggggtatcgagagatcttggccgcccgattcacgatggagggcacagattaggttgaaatgatcatgaaaccccggccgcacgatctccatcgaatggaccggatcaccccccaccaatcggtacgcttcataaaatcgtagccgcacaatcgagcatccacggtctcgattaccccaaccctggatccaatcgtaaccgtacgcgcccgatccaacggccgcgccatcttcgc

SEQ ID NO: 108123 - DNA, 347 bp, Zea Mays
tttctcatttaatatagacattttttattcgtaggcagaccgtggatgtgaacactatctttgtataggggtggtattggattctaaaatgtacactataaaattttggatcggattggattaggattagttctatttctattcatttttgaactagttataaagaaatatttggattgcaatccattaccatctctacctatacatacctatacatgacccttggatattgttcatgttggcccgtttcgagcctaaatggacgttgtagcctagagccctacaccatggaggtttctcttggcatgcttgtcctaactttcaggcctacaggatgttacgtcttc

SEQ ID NO: 108124 - DNA, 387 bp, Zea Mays
ggcagaaggtgctcgagtcaggctcgagcaacatcggatatgaatagggggaggttgcgaatgatgagcttgtcgtcactggtacatcctaactaacatgttaggcggtaatcagcgagccatagctcgggctttgtttctcctgagtacttggtgagggtagtcggtgcacgaaaccaatccgagaatgacgccttgtgtatatcttgactgaagacttatgggcctaaaggtatcgtagtcgttccttctcttcaccgagcttggcttgaatctcacagatgtgctcgagttgttttccctgactccccacgggggtctagaccacatcccgttccctcgggccctcgatgtgtggtgctggtgctggggtgttatcattcctgg

SEQ ID NO: 108125 - DNA, 539 bp, Zea Mays
ctaccactctaaactccacttcggctacttggcatggggagccaagctgcatatggcacaagggccttgtcattccgaagctcaaagtcagtggactcataaccatagtcattagcttctccctcttttcttgtctgctttcatataaaaccatcactcttccagccagttggccacttggtacggtatctaagaactggtgccttcgtatcctttcgatacacaaaactgtagcaaccaaaattctcatgaaggccatctgccctggccttcgtctggtaatgcagctcgtgcacccgacagaaagcttcggcattaggactcatcccctggcttcggagggcccagatgtagacactaagtctaacaattgcattgggtgtcaattgatgaaagtatatttcaaagttcttcaaaacatctcctattatgtcataaagagggaaccgaagccctgctctgaagaagcttttaaacacaacaacttcatcatcttttggctctggaaccacttcctcgccagcaaaacaaacaagttt

SEQ ID NO: 108126 - DNA, 575 bp, Zea Mays
tgatcccccggctggggcgaggatcgaacaccgtcaacgaaaagtggtggcgaagcatagtgttggtgagagttcgcgaagtggtaggcgccggatggggttggagcgaactcgtcttcgtgtatatcggggtaatcaacgcgacttgttgtctttgtcgtttgggacgagtattggtgagggggacctacggaatttgtttgagggtggggaattgaaaatgatttttgtttaattatcgggaggcgggcattatcccgaatgttgagccgatgtagaatgtgtgatgccctcgcttgtcgtgaggtagtagaggacgcaattgtatttatttgtgcggtgggtctggtgacccttcgctgtgtgtatgtaatctgcgacttgtattgtaatgtggcctgttgcccttcgcttggcagtgtgatgttgtaagtgtctggcggcacccttgggcgatttttgcacggggctgtcttgtgggaaagactttgtgtcgcacattactgtgcttgtccggctgcacccttaggcgacttttgcacggagttgtcttttagtaaaagacttcgtatcgc

SEQ ID NO: 108127 - DNA, 652 bp, Zea Mays
gcgatgagcatccaatagctagcattcagccgaagcggacgacgaaggcagtgggaggaagaggaacgaagcgggaggaatgaatatggaggggagaaagaaagacgaagcgagaggaacggggacggagagtgtctttcaccaaactgcagcggagaagggaacgtgaaccatgtagaagcatccagagatggaaagcggttgaacgatagaagccgtcgatgaacaatcgtgcgggagacgaaattctgcatacgtggatagcctagtatgcgtcgtttccgtgcggctttaaagataaggaaatacactagtaaagtactcgctcgtgcacaagtctttcatcaatatgtttttatagtttaaaggttgttgttttaaacatatagaagcagcaatatatgcaaatatatacacatataagggataaaattattcgaagcgacaattgtttacaatagtaaagtagttaagtatgcaaatataacaataaagggtgttgttttaaacatataggagcagcaatatatgcaaatatatacacatataagggataaaattatttgaagagacaattgtttacaatagcagagtagttaagtatgcaaatataacaacatatgctatgatgcattataactctacgcagaac

SEQ ID NO: 108128 - DNA, 683 bp, Zea Mays
gatggctcgatgaaggaacatcaccagggatcaattcgacgccactaacaggcatcagaactccagcatccagtgcgccgacctctaaggcgactcctttacttgaagcatgcactgctagtacaccttcagaatggggtggagaagatccgacgtggacatccatggaggtatgagaagaggagcctgctcagacaccctcgagggctgggttgcagcccgtactgcccatcggagccggattaccaccggcaacaccctcaggggctgggtcgcagtttgcgctacccacccgagccacatcattaccggcaacaccctcgggggctgggcaaccgctagcaccatccttgagaattgagttctctgcaacagccacctctaaggctgaaggactctcggtcacctccatgggaattgaacaaccttcaccaatctcttgactccgaagaccgccctccaaggtcgacaatgcacgagacactgcccgggatacctctaatcccacatctggaatgtcagagcagacatccatcatatcaccatcaacgggctcggatagcatatcttcagggacaacatcctcgagagcctgatcaaaatttgctatggacaattcttgcaaaccaacaagagcagatagagctcgagaaggaatatcgctaccctccccattgactctg

SEQ ID NO: 108129 - DNA, 609 bp, Zea Mays
catcttgaaatcgaagcttcctcaaacaattattatactgaaaaacatgctagttatgtttttttgaggattttcggaggaggaaggccctcaacagatgattttggaccgtcagatgcctctaaccaaacacgctactagtgtttcaggaatccgagttgaagaaagtagtatcctctgatcaactgttgagttcagatttgcctgaccatgcatagtgatgagttgcaggtcccttatgttgtactcgaccgacgcctccgcaatgtacaatacaagatggtggcctagctactcattcacttgtccaactcttcaccaacaattgctacctgggaagatcatgtcaccaagcagcagttctcttgtgcgccagcttggggtcctttttcacctacagcagagacttcaaaaacaagcccacataaagaagtgcataaagacaggccaccgcaaacaagtgttcctgaattagattctttttagctatttcaaaaactcaataatttaccgattttttaactattagagacgctccaagtaaaataaataagtgcgtaaagacagaccaccacatacaagtgcataaagacataccaccgagttgca

SEQ ID NO: 108130 - DNA, 552 bp, Zea Mays
ataattgaaatacgccaaacattggaagcaaacgattaaccatctcacaatctggaaaagaaaagcatagaattttgtaacagataacataactagacattctggtaacacttatgtttgacacacttcaaataaaaactgatacgaagtagcatagacactggacacatcgaacataagtggcatatggagtatcatacacatgagcaacgcctgacataagtgacttaataagtaacataaacagttttgtggatcccatagggaatcatgttcagctatgatatctaagttttggctttcaaacaatgtcgtctccttggagcatacttgaaaggcagcagttctgcagggaggagggcaaccctgttgttgcgatgaaaggtcaggtaatgcagaacaaaggcacgttggtccaatggttcatcctgaaatagtcataatatcgaattaatgctaagattaaatatgaaggagtaatatatgcatgatcaaaacactaatttagtaacataccggagtataaaattctgataagtcgccatcatcaaa

SEQ ID NO: 108131 - DNA, 293 bp, Zea Mays
cgaaggcacgtcttcaattgagatacatggaacacattatgcactgcggataatgtttctggcagttgaagtcggtatgctgtaacaccccaggtgttacttagggttttcactcaaggctatacaagtgagcccttcatcacatgtgacttaagttgggaaaagtacaccaaatttggagctcaaagatcctaagtaagtgcaacccatcttagatggcatgccttaacttatcatgcacatataatggggcgaattgcccaaaccctaattcaaacccctttggacaagtg

SEQ ID NO: 108132 - DNA, 446 bp, Zea Mays
attttgtgtcgcgggtggtctttcggtacagaggttgggtcacccaattttggtcagttccgctaatggctccattagtagctgttcagtttgtcgggggtgttccgtcattcttgctgatgaggttttttcggccaatctggtggtgatttccttgggggcattcgatgttatcttgggtatggattggttatcccagtatcgcgcagttatatcctgcttctggaagacagtgttattgcaggcgccgtcgggtaaggaggtggtattcttgggaagttccccgaagttcacattatccttgttggcgcaattgcttcctgatcgccggtcaaggaagtcggggatctttttctctatggtggtggagggtgaggctgccttgcgggtgcaggacatccgggtggtgtgtgactttgctgacgtgtttctggcagagcttccag

SEQ ID NO: 108133 - DNA, 351 bp, Zea Mays
atttgacacaaaatgaaataccacgagaactaagtgtggtcacggccacactttctcaaaaatccaaagacttagatgttatggttccaaacatctaaggatctcttagctagaatgagaaaagatgggattacaaactacatgagggaataaatgtgctcaagagatggtagaatggttcagccctctgtccgatttataatgagttatttgtctttcctgaactaccctaagatacatatagtgtatccactcagcctatggtaaaatggaccaactcttgatatgttgatatgacaaccacaccctttcacaaagttgctttgccttgatagatccttcataatgatg

SEQ ID NO: 108134 - DNA, 403 bp, Zea Mays
aaaaaattatgacccataccttgtccatgaattatcgtgggtcaaaaaatatggctcgtttcgttagtaggtctaggtagcatcgtcgtgaggcggtcgaggagtgcctaggtggtgatggcgctaaaggaggagctagagggcatccgatcgcggtttcatcggcggcagaccaagctgggacctcgggctagagatctaagtccccttcgagtaaagaccggtaacagatgtcgcctatttctgacaactctacaacggagtggaccgaaggggagggggcggtcgcatattttggtgggagagcctgtcggttgccgatgaccatacgattccaaaaaaaactaaatctaacggttgtgatgcaccaaagaaaactgtctgtctatagtatagaccgaat

SEQ ID NO: 108135 - DNA, 520 bp, Zea Mays
tgatgattcgtttggctctgtgtctaagtgttttgagtctgatggttctgggagttcgattgcatggacggaggagtcttcagatgaggacttggattattttgcagcgttggatgtggctgcagcggagccttcgccgcgcgcggagggttccgaggagctcccgggcgcgagtactgggtataggcggcgaagggcggtggcgaaacggagagtgagtcaattgtcgcgaagtggttggcattatcgtagtgagatggagagtggtcgtcttcgcgtggacgagactggtaagcgagaattgttgtcctcgccgattggggtgagtgtaggtgagggggagctgcaaaatctttttaagggtgaggaattgaggataatgttgttcaactacagggagatgggtatcatcccgaaggctgagccaatgtaatatatgatgccctcgctgtgtgtatgtaaccgctatttgtatgataaggctgcgcgctttcgttgatccggccgtgcccgtgggcga

SEQ ID NO: 108136 - DNA, 433 bp, Zea Mays
agtatctcctgctggtttgttggctaggtcagaattaagcctactagtccaagggagtccatgcattagtcggccatgctaccgatctagtccagactctagagggcactctagccctcgagggtgtcgcggttgattctccttctgctccttcaatggaagttcaggttgggtcaccaatgcctcgcgatgaactcctccccacagttgaagttagacatggaaaagaaaactcacaaggtaactcattgagagcttcagtttgcttattctatgctatcaacatattatcaagaattctcccatccactgaacgagatctagagactgaaggatgaaaatcgggtgttgctctcttcttgaaataatctggacaagttgtacaaggattcctccaactcccttaccactctgagaggagtcaccgatttac

SEQ ID NO: 108137 - DNA, 588 bp, Zea Mays
tttctgagaacatgttcaaactccaccaactagagcgagatgatcgcataatgaatatggacttggacaaggttgctccttatgcaagagactactatgtgtatatgcaaaaggacattttggcaaggcttcctccaccatcagacacatgaccttcaaaatgtgtggaaattgagctcagttgagcgtcatcgtcagttgtatgcaaaccatatgtttgttagtctgtcgtagactatgtcgtcacttgtccattttgtttctgtgaacacaaactatgtgctttgacccttttaatttgctggagttctcagtttgtcgccacagcgtctggcaaacagatggtaccatatttccattcttgaaatacacaagtcacatgataattcttgaaatgcacatacccgtttgtactaacaaactaagtaggcaaacaaatacttggttgcaataccaactaccaaatttatgcctcctcgtggatgcttcatagtctgtcccagcaagtcgttgtagatttgattcaaacttgatagccatgttatgcaatatgactacacagtctacaatgtacctcaagtcctcctg

SEQ ID NO: 108138 - DNA, 395 bp, Zea Mays
catactgacaaaaaatgcagacagcatcacaatgaccagaaatagcctacacagatgacttggatatgaacaattgccagaattaagtaaataataatgtgatttatctttgatgggttatgatggttggctttacaacaaagcttttatgcacttttttcccatgttgctagaataactgcatcatgaacagggatgtcaaatcctaaacatgggcaatctttttccaacaggcggacctgaattttcattagctaagaaatgaaattacagaatactttttttaccaatctcatatatacttagcacctagccacctactaaccatgggaagctaacaggaccacaacacaaagggctctcagctgactaaacagaggaaatctggacccaaa

SEQ ID NO: 108139 - DNA, 549 bp, Zea Mays
caacagttgacaacaacatgactagttcgtggtcatgtcgtttggcttgaggaatgcgttaacatcattctagtcccccttgagaattgaatagcactcctagctgacaccatggactcatcgcactcttcatgggttgcctggcctcacgggcttctaccgcttcttcatcaacaactacgacatcatcaccacaccatgaacatccctcaagcgtgttgccttccagtgtgctgatgtggcgactacatcctttgaggccttcaaggcggccctcacctatggactggtgctgcagttgttgagcatcacggcttcgtccatcatcgattgcgattcttcgggcattggttttggcgtgctcttgcccgatcgccttgtttagactgtggatggagccccagcctaccaaacttgccacctaagagcgcgagctcattggccttgtgaaggctgtgcggcactagaggtcgtatgtctgggaccggccagtggagatagaagattgggtccctaatgatttctcccctactagaatactacaacaga

SEQ ID NO: 108140 - DNA, 360 bp, Zea Mays
cgatgatgggtgtgggcggcgacagatgcaacaaagagcgaggatgagagagttgtggggtgcacaaaaccacctatctaaggactggaaccccagccccgtcaaaaccgctggtacatgggctcagcaaacccgcgaacatgcctcctaaacatgcatacggagagcccatgtcatctttgcttgtgggccgtttgtcccgtgaataccaaccggtttgggtgatctcagatgaggccttaggctctgtttgggaatataggtaatagccacctcggccagttatcatcggtgggggcaaaacctgcaatacatctcccctatctagtgctgcccagtggggcttgactgccctatgac

SEQ ID NO: 108141 - DNA, 410 bp, Zea Mays
gttggagcagcaggtggaagtccgggacaacaccattgaggtcctcgaaaatcaactccatgacgtgcaagtggaactggatgaggcaaatgctcatttggatatgcaccatcaggagatgaaccaagagatggatgcagatggaaacaacaaggaggagaaggaccccgaggagatcgagccagcttctagcctagacacggctcactctagaggacccccttcacccgaggccagtgttgcctctgctactcagggttagatgggttaggaaaaggcatattaggaagatgtaaaactacatagcttagcttttggcacgaaatgatgtactaggctagagggttttatcttttaatatgttgtaacccaaaaaatctttatgcttaatgaaaagatgattgttatta

SEQ ID NO: 108142 - DNA, 484 bp, Zea Mays
tcatcgcaactcagaaaaaactatggcgtctagctttacccatgtcgacatcatcgagtgattcctctgcttcttttgtctcccattcttctagtcgtgaaccaacccagagtgggatcctatagcggcatatgaaaaacaggcacctttgcactgggatgcagatggatgggactttgcagttgcatcggaatccgacggtgacctcaccgacggggacgacttccagttcctcgttgacagggagctagactccgacaccagcactgagtggtcttggacgtacgacggagaatcgtcagatgtggagtccttggacaacgatgatgacccgatgtctggacattggatgggcatggtctcctccttcgacgaagatgacgagaacaacgacagcagcagtgactacgacagcagtgacgaggacatcgacgacagtggcgatgatgacggcgatgatgatggcggggcaagccaatgagat

SEQ ID NO: 108143 - DNA, 404 bp, Zea Mays
atttgatgatatagatggacagtgtagattcatggaaggcagaaccaggggaggcaagctaccctcttgcagccttaatatagtagtgtagattttaaacttgtttctacaaattgtttgtcgtcctctattttacacactctaccggacagtctcatgagaaatctttttaagcgaaacacataaatgatacattataatagacacttatacagtgataagggggcctaatttttctaagggagaaagtaaaaaaacgggaagaaaaaatgggtcgtatagttgaatgcatgtttcaagcaatgtaaagccctcactaatttgccaatgcagcagcagtgtcactcctccgagcgttcagagccttcgtcgctgtcgttgcaagggacggtgtagtggatcac

SEQ ID NO: 108144 - DNA, 575 bp, Zea Mays
atcgagttcgccttcttctccacttagtgtagcacccatctgtttagacgggggaatcctggtgcaccgcgtcaacattctccagtgtgggcgccgtcgtcccaagcgcgtgccccaccgtgctcggtcgtcgtgcagagaagaagacctctagccgtttgatctaaagctggcagctgggatcatatctgcgtacccctttgtgtgtctcaatccgggtcgttggtgtagatctgtgtggttcccgtgggatctcaattcattagattttggtcgtagatcatcaattcaacaaatgtgaatgcttacaggttcaggactaggtcacggttgtctatctcgcgatcaatggctcaggtagcttaccggttggatacaaaagccgatctaatcctgaccacgggtgggtgatcggacggctctggatggcctataccccttcggccatgtgattttgcataaagccataaaccctcaagattctaataaaccaacctgtcgtcccactcctattgaaactaatcacagttagatccataaattttacaaaaccacccctgaaatttattttaagc

SEQ ID NO: 108145 - DNA, 798 bp, Zea Mays
gtcagggtaacagaccgaccattcttgcgacatgaaaaaccaatcgagtctctgaagaaggggctccctttgtttgttcgaccaagtaaaggagaggccatggagagggatttccaacaggtcgagctggctgattgcctcgttaaatttcagcatcaagttaatgtccccccagcgatatttctattttcaggcctacgcgtaagattaaagcccccaacaatcaaccagcgcttttccgagggcatattaatattggagaaccagtgaaggaattcaatcttcccattcggggaacagggtgcataaacgttggtgataatccaagattcatccgacgaaatagcagaaaattcaaccgagagagcatacttgttctggaagataacactgccatccagcttcgaactattccagacagtaatgaaaccccccgaatttcctatcgaagggacaaaagcaaactcatcaaaagaattgggacagaaccttcttaggtcagccctatcaaaagattccttcttcgtctcctgcaagcatatgatatcgcaattggattccctaatcacacaatgaatatcattccccttagccaccacgttaatacctcggacattaaaacttaaaacggaccagtcggaataattaatagcattgcgactattcatcaaaagggtcaagttcgttgatgggaagggacccaaacccaattactgggagggcaaaagtgtatctgctaagacgaaacaaagcacaaccagaaaccaccaagttcttgtacacaataagcagacagaa

SEQ ID NO: 108146 - DNA, 391 bp, Zea Mays
cccattaagcaaattcctggttgaagtgctaaagaccttcaaaattttccttcatcaaattacccccgaagccattattaggatgggggtttttatttgggccgtgagaagccaggggctagagccaagcgcaaaatgcttctgtaacatgcacgagttgttgtatgagacgaaggctactgacaaggagcagtatcacaacaactttggttgttatggctttgtgccccgtcttgatgtaagttacctggttccaacattccgaaaaaggtggcccggggcctggatggaggagtgattctatgttaagaataatttagttgagagggaagatataaaaggaattattcaacaccccatatggtctcgcttcggcatcaggagaccagcc

SEQ ID NO: 108147 - DNA, 389 bp, Zea Mays
ggaaactacaaggtacttctgctgtacattttactgcgtgtgtttaacaatgtgccactacccagcagctagagaacctgttgatgagctctactacccagcaggtagagaacctacgagataaacaataactgaccacttgcgaaccggattgctctggtccacgagtgcctgtaaaagcctaccggaaagaatctgatccccattaatcaacgatttcgccgccgcgtctttggaacaaggaaccttggcgtttcaaggctttcgcatgatcagccacgccgctttctcttaaacaactcggagccttttgcgtccaagcattgttaaaatctcgtgctaccagcacgtacaccagtgttttttttgttgttgttgttgcagaagga

SEQ ID NO: 108148 - DNA, 356 bp, Zea Mays
gtaggaggctgtgttcgtagcatgcccttcgtagaggctcatggcagcaatcaccagcggtgaggaggatgcttagggttcaggtgcgcgagagtatgggtgagccgcgaccagtaggaccggcgacaatgcgggagcataggggaggagggacccacgcgttagggtttgggagctgccatgtggcagacgaattagggagggaagttgggtccaaaccgaatcgggtcgaggggcaatctctagtgagggctcgtggtcaggagagaaattgaagacacaaaaagaaaatgataaataatttttcacacgtcagcacgatgtggtgtcgtcgtacgcgccaaacgttaacgtgg

SEQ ID NO: 108149 - DNA, 313 bp, Zea Mays
catatcacaccttgatcgtcttccttgaaacatttggctgttccagcccttattttctcccgtatgtgcttcatacccaaattatccttttgagcatcaattatcctttgcaaaatgattgactcaagcttcagctgattcagggttccttgttggaccatccccaggtttagcttttccatctcttgacataaagttttgtcagaggtcttcaccataagatagtggcaggaagccttacggctcagggcatctgccacaacattagctttgcctgggtgataatgaatttctagttcatagtccttaataa

SEQ ID NO: 108150 - DNA, 588 bp, Zea Mays
cctcattctactattttactggtgaatgcttcccaaaaattccaaaccccaaaaacgcaccacccgaaagtgaaacaacaaaagaaaacaaagcaaaaatgacctccaacttctcttctttgcaaactgggtatcacactctacccccttaaaaagaattcgacctcgaattcggaacaacaaaagaaaagattaatgaatcaacaatactcacccatagcgaaaagttccggatacttctgccacatcagctcctcaagctcccaagtagcctcgcgctcagactgattagtccacaagaccttaacatacttgattgatctcttcctcaaaacacgctccgaggattccaagatacgcaccaaacgacactccagagtcagatcctgctgcacaacaattggttccatctcgatctgatgatccggatcccgcaagaacttcctcaacatagagacatgcaaaaccgggtgtacccctgccatggaatccggcaattgcaagcgataagccaagttgcccacaggggccaagatagtgaacggtccaatgtatctcgggctaagctttccggagacaccgaaccga

SEQ ID NO: 108151 - DNA, 694 bp, Zea Mays
ctgaaggtgatcatgctcttgaaacgacgaccgtggagtcagcgttgctcgacgatgcaccccttacctggcgcgccagctgtcggtgtttgtagtctgactgcacaccccggggttaccctcgtggtgcttttgagtaggacgacatcgttgattctgactcgatggttcgtgtggtagcacaatgagagaaacacacaggcttgagtaggtttgggcagctttgagaggtgtcataccctacttcctgtgttggttttctgtattgtggtgagtttacaagttgtgactacgagaatggtgggctgaggatgagatgaaaaaggtaggggtgcctcctagccttatatacacaactagagagagccccccgcaaaggtgtcgattacaatctccttgcttatctcctgatttgtagcgaactgtcttcctttatcctagggaaatcttgcgctctcgcgcccgagttattgccagtggttcagtctgtgggtgggcgcaacaaacccggcccgacatacccacgctcatgcaacagctaactcggacatgggcctctttcgtatcagaaccgactagcctttgctggtttcgtttatccagtccaccaccagtcacctcaggagggcgcctattgtgtggccccgaacacattttcgtgctaatgtggacccgagggatatccatcccctac

SEQ ID NO: 108152 - DNA, 619 bp, Zea Mays
agcgacggtagcggtggcgagggcggacgtggtggtggtgaggcaccaccatcttagttagtatagcatggtagttgtagttgtagtgtagggtattgtagtagtagtactataagggtgatggttatcttctgctagtggtcggttcataatgaactgatacttctataaagacaatgacatatatataagtaatgaacttcgtctcatcaccttctatgttatgtgtgactatgacaggggtttagaaatcactcctttttatttgtgagaacatgcaacgacgatttaggtcaagcctcgactcaatccaattgtttcatcgatagggttaagtgatcacctttttgtgtatgcgtgagcatgtaacaccaacttaagttagactgtgacttaagccaattgctctgttagtagtaagcataagtataacaaaattgtatgagaggatgtaattgattgctcaaagtgaggagaatagtgttttattgaatatgaattttagagtacaaatgagagcttgccatctagaattcatggcactactaggggtataattttcgaagatactcaatcttctaggagttaccaactggagttccatccatctagaatagcc

SEQ ID NO: 108153 - DNA, 845 bp, Zea Mays
aaaactgataccttggcaagcaaccgaccgtgacacctgagccggaggcgaggtaaataacacgtgatggagcaacgagataatacgcccgcccccgcacgcacgcacgcgacaacgctactccgtgcgttcctgccgccttcggcttgccggccttgcgaccttcctcgtgtccgcgcggcgagaccaactgggtactgcacggccgtttgcgccagtgcccatggatagtggagactggagctggagtcactgcttgctcctgtggccactcctttgtacagtcggaggcgacgaaattaaaaaccctagccacctcatttctagagggaggtagaaaaacgaattcttgctggagcgcaccaataaggagctagagctggagttgtttagcaaaccgagatgttttccagaacgctagctagtactcgtatttacaactgcatgcagtacttcctaatcaccccgatggggtgttcattttcagggttaacgactcatcaggcaacgaccaggccgtcacccatggcgtttagctaagcgaaacgtcactaccatttgtgccattagattatttgagtccattcataattttggaggttacttgaattctcagcagcagccgcctgcagcaaaggcaaaggagatccagcagatccaaccatacaaaactgtgcgcacatttttctttgaagggtggatagattaggtagtacatgtacagtatgatcaccaccaaatccacgtacgtccaaaaaataaacgatcaacaaaccgcaaaactaaacgacgcaggaaaaggactctgcgtttgtcaggttgcggagctcgtactccaggaatcg

SEQ ID NO: 108154 - DNA, 379 bp, Zea Mays
gtaaaaggttggtcagttctgatctcagaggacttatcagcttgaatggtggggattcagtcattaccttcagaatttctgccacctcgacagtagtgggcgacgaagggctcaaggtctcctttggcatttcatctacctcctgttcggcagaaggcatctcatcaaattttcttttcataggggcttgcgctttcggcttcggtaccacttttatcttcttcaaagccttttggtctgctttcacggactgggcagcttctctacacagaatgctgacaactctctttctctttgctccctcagcccctttgtcaagtctctcataatctggatattcaaagttcagtgcatccattactcgatttagccttcgttt

SEQ ID NO: 108155 - DNA, 403 bp, Zea Mays
caacatgtcctccaatacttgattagtcctttcagtttgtccatcaatctgacgatggtaggccgaactaaaattcaacttcgtaaccatattctcatgaaaacatttccaaaatctagaggtaaactgtgatcctctatcaaaaacgatcttcttcggtacaccgtgtagagacataatccgggccatatataactctaccaattgagatcccttataagtagtcttgaccggaatgaaatgagccactttggtcagtctatccacaataacccatatagaaccatatccttgcgaggcaatccagtaatgaaatccataccaatctcttcccacttccactcgggtatcttaagtgggtgcagtagtccagctggcctctggtgttcagccttaactcttt

SEQ ID NO: 108156 - DNA, 737 bp, Zea Mays
gtcggtgttgagacgatcttcaccagctccacctggaacgatgctggtctggcttcctccactcagacgcagaggaagatgcctgaacctcgtgtcatgcagctgctaccggtaggtgtggctaagagaccacaaagttggtctggcagcatcgctgaccgaagcagcgtaggtggatagcggtgtcagggactcatgggcagacagagtcctgaatcccctatcccctgcatccatcaccctgacgtggatgcgagtgatgtagtagcaagcccggggaggctcgctcactcgccttgtttcgtacaaggggcagacataggttcctagcacgtgcagcacatcttgcagcaggttggggaagtgccctgtctcgaacattgatgtgtaatgtttgacgacaggcccaaaccccatgaagtagtcctgctgggcgtagttggcttcttcgttgacatgttcctcttcgtcagcgtcatcgccatcctcgtcatcatcgtccccagagtcatctaggttgtcgcctccgggtgcaggagcttgaacggctggtgcaggcggtgctgatgtcgatgacctagttgcgaagggcagtgattctgccaacggggtgggcgtcggcagctgttcctccgagctgtcctccaggatgactccattctctactcgaatgtgagggagatccaccggaacttcctcgactaccactgggtagacagggatttgtcggggcggag

SEQ ID NO: 108157 - DNA, 377 bp, Zea Mays
tgagaccatactgttctgattctgattttcagtgtcgcccaattcgtgcgacttgcttctgacagagcaacttcatgccactggttctttgatttttgtacaacaacatagtaagacgattgtaccaaagttactcccctacaaagcagctctaactttgttacaaaggtttcagtcaaacactcatcgaattgagttccacatggtcccaaagttgaccccatacaactgatcttctgaattttacagggccttagtctgatagctcaagtttgagggggttttcattaaactcctctaggttttagggttgggtctttcaatcaaacttatactcttatcatagctctaccatcttgatgtactgatctagggca

SEQ ID NO: 108158 - DNA, 682 bp, Zea Mays
cgatctacctgctaacccccacaacacgaggattatcagacaatagcaaacagaaaatgaatcctccaaatcttccaccggcaaggaccgatccagtggttgccgctcaaatgcagatactacaacaaatgaccaacatgatgcatgaaatgcaaaatcagatgaggcaacaatgccaggaaatgcatcaggaatgactggaaatgcgtcaagaaatgaggcaagaacggttggaacggcaacaacaaccacctccaccaccaccagatccaccaagggataagcaccggaagtttatgagtcacaaaccaccgacattctctaactccccagacccactacaagctgatgactggttaaagtctctagacaagatgctcaacatagctcagtgctcggacagagagaaggtgctaaatgcatcgggttgccataccggccccgccgcagattggtgggatgcatactgtgctgccaatgctgctgtaaacacaatcacctgggcagaattctccactcaattcaggaattaccatattccagctggactcaagaagataaaaaggaaggagtttctatccctcaagcagggaagcatgtccgtgagcgaatatagggacagatttattcagctatcacgttatgctcctagggatgttgaggatgatgagaagaagcatga

SEQ ID NO: 108159 - DNA, 308 bp, Zea Mays
ggaagcacctgccactgaggcagaacaagctgatgttgaggaaactgagtctgaagatgattatagcgcagtgccaagtaaacccagccacctggatttcgggaaatccaccatcttcgaagatgatttgcctaagatgttgaatttgggctattttaatgaagcgaagaaagaactgattcgtttcggtggggaagagactactccgaagccaggaaaggatgaagtagtggtctttaaaagcttctttaaggctggtttaagatttcctttgaacaagatgattgctgatgtattgaataagtttg

SEQ ID NO: 108160 - DNA, 365 bp, Zea Mays
ctttatctgtccaacaaggaaccctaataaaagatactctaaaatttagagtctctgcttcagccgctacatgtagagaaacactgttcgtcctctatcccgcaatcaaagcgctacgacctgacacttgtgcacgtgacgaccactgttgattgacttacccacgttgcatgcatgcatattgtgttaaaaaaatggtgtccgatgctggattgttgcataatgcagttgcgaatagcttagtcaaactattttaattttggtagagactaacgatttttttgtttgcgtatacaataaggaaaatatataatacaaatttgtgatacattgttttgctatatatgaatgatgagtaatttctc

SEQ ID NO: 108161 - DNA, 428 bp, Zea Mays
gaggcaccttcaccaaattcaggtatcacgaccggttcaatgtaacgcggccagtgagtcagaaccttcaacttcttgccctttggctcagctgtggtggccgaagcagcagcctttccataagcaacaatctttctttttaccccttgccctcgcaacgggtaacaatagtcagggtatacgaagccagtagcatcaaataccatgttcaaccttttcttattccgacccccgaaggctgcggacaaggcattgtcctcggtcttggaatacgctccaagtaactcgtcgctagtagcttcaatgcacttcagccagtcatcatttggttcatcaaacttaaccccaaacctaaaggtatacttcagccggaccaaaccacctttgctagagtcagtgatggtctccttcggcatttcccagctttc

SEQ ID NO: 108162 - DNA, 540 bp, Zea Mays
gccagaggaggctgttgctgaaggtacctcgattgctgaagctgaacagatcgcagttgaaggagggagtgagaacgaagatcaagaggattacactattctgagcctagtgaaacccagccacattgaatttggtaaatctactgtgacggcagatgataaggttatgatgaagaaattgggctactttggggaggccgagagcaaacttgtccgatttgctggggaagaggtgattccagatcaaaaagacgatgaagtcgtagtttttaaaagcttcttcagggcaggacttcgtttccctccgcgtgagatgattggagaagttttgaaaaaaattgagatataacttcatcagctgacacccaatgcaatcgttatacttagtgtctacatatgggctctccaaagccagggtatgagtcctaatgccaaagctttctgttgggtgcatgagctgcattaccaaacgaaggccaaaccagatggtcttcatgagaacttcggctgctacaactttgcgtatcataaggatatgaa

SEQ ID NO: 108163 - DNA, 671 bp, Zea Mays
acaaacagtggcttttgtgtctctatgcagcggattaatccaaacttctgttccataactcttatccactcatcagcttctaaaggttcttctgctttgatgaagagcgggggtcgagtctcagagaattccgaatatgtagtatcacacagtccttggggaggagctctgcctccgtgctattggaactgattgcctgccatttcacgcaataagcgcgtattatccacagtggcattgaccagggcagcgatagcctcgaccaaagttggtggtactggtggcgggctaggagtatcttccgaacagcgggaagttcccgcaccatcatgttctcgagtccatgatggcatctgaggcaaagaaacatttggaaaaaatataacatgccagcacacaccatcatactacattaccaaaatgtagtaattatacagactccagcgtacaacttgacttcagtacttattttacataagtataacatctaaactatactattcgtcatccttggttgcttcatttcctgctgtaggagactgttcgtcagcaaggttcatggaaggaccgggcctaaaaaggtccaacttctcatcaggtccttcatttgctgttcctgatggtccggctcccattgcagcagcatcggaaggcacatccgggtgcagtca

SEQ ID NO: 108164 - DNA, 483 bp, Zea Mays
tcgtcatagtggttgtcaagggtgtggagatatcctgccatgtagactactgtagggtcatcttcattaggatctctccctgacaaggcctggagtcttttcctccaagcaggagtatttttgttgctagatggaaagtagcgaaggggtgtctcagagacctctctgctgtagttttggcatagctggcggagggctttttgggcagcattctggcaggtgtctagggagcagtgtccagtggcggtgatctgaaagggagggtgatttgggtagttttggctttctcccaagtagactgccatagagcatttctcaatcccgttctcgtggtattctttccagacatactccagcttcttgcggatccccatgcgaagcgcacaactctgacgaaggtgagggaatccttccacctccgagcaataggatgtcttaaggacaaaggtgccttccatctggtagcaagagaagaagggttgt

SEQ ID NO: 108165 - DNA, 967 bp, Zea Mays
tgaagttgttacatgctctggatccgagggtttggggagtgaagatctcggtaatcatcaagtcatccaactattagacactcattgtggatgagcttttcagcaagcccaagtccattgagattgaccaccagacctgggctaagatagagaaccctggccaaccgaccatggtcctaatctctggaggcagttcttcctctaacccctcacctgctatgtttactttgtcttctttgttgaccattacaaaggagaaggtggaggtcctaagggatgaaaagctggtgcttgtggccagtcggttcacatggcatggtgggtcaaaggatggatgcaacagctatggcgaccccgaacacttcatcgcaagttgccgcaagaagggcaagcaggaagctggccccgcgcgaccactactctggttggtgcaagggcaagtgggagtacacctctagcaagcacaagtccaagggaggattcgacatggaggcgctcaagaagaagtacctctagaaggtgaagatcaaggagtgtgccttcctcgcctccctgagtgaccttgaccacgacttcgatgatacaaagtcttcctcaagttaggaggagactgacaggcgggtagaggataagctgagtggactatgcttcatcgctgacaccacagaaggcctttgcaccatgcctcttggtgatgacgcggtgggcagtgatggccaggacatcggcgatggctcttcttctaaggtatcacactccaccgatgatctcgtcgctgagatagaagagttgaatgttgctttagcaaatcagaacaagttgcttaggcttgctgtccgtgagaggaaagattttaaattcaagtataagagcacgcttagggagcttgagtttgctagagcttcagttgtggtgtccgacgagactgaatgtgatgggtgtgcccttcacacgtcgaacatcgcca

SEQ ID NO: 108166 - DNA, 462 bp, Zea Mays
atttcaaattcctatcaaatccagtgaatggagtgaatcccagtgcatggttgtgtgccctagttctccattgaatcccttgcaggttcttagctccttcgggagggtttccccaccaccaatagccatttcattcaaaacctaaatccccgcacatcacatgttcgatgaaatgcaccaaccactcaaaattggtccgattgaacccaaacttttcaggcaccttcacaacacctccagtaacacattcgcgcaattttacaccaatccgatataccaggcttcaatttcacacaattccccgtttcgagcgatcaattccgagccgagtgcccaaattccattttctttgcctcaaaacaaaccaagtgcacacttcactcatatttacccatataaacctattcgtgaagtatcggctcaattccccatcatttcatgcctcaatttgaatttcaaacc

SEQ ID NO: 108167 - DNA, 389 bp, Zea Mays
ctcaagctgaagcacgtcaaaaatcaatcaaaggaggtcctacccatcgcctcatactattccccatacattacagaatatgttcgcaaccaacagccaagttcaaaaccctcgggcttagttgatttggcaagtcactcttcggctatatggatgctgccccagccatttacaccagcaccttcgtcatatgagcaacaacatccaggacaacatcagatccaatagtagttctccacacaggacataccacatcgagacgcaagggaacaatctgaagccaacatagtgaacagtactgtactggagtcgaagcacatctactgaaatgcctaaggggccgaatcaaacatctaaagttgtttcaaaaaatctattgtaatttcaat

SEQ ID NO: 108168 - DNA, 440 bp, Zea Mays
gtgaaaggaggtcggttcagtaaaacaatgaagatcagagaaccagaaatatctgcagaaggaaaagatctctggttactgtggttttggatgtgtgcaggtgaagtggagataggaacgaccgcggcaagataactacaggctgattcacggtcccgcgagcctaaccggagcctggccgaagatttttcgccggtgctcgccgtggcgcggtattttgtcaccgtgtcactcacgccaccaccttacctcactatgcctcttccttacatggtagccatgtgttaacaacgtgtttcatggccgctgatcgttaaccggaccgccgtgcctataaatagcgccatgaacaacggcgaggcactcaccatttcaccagtgagctcgattgaagccattctccgtgctccatggctagccgttcccaggtctgctcccgc

SEQ ID NO: 108169 - DNA, 382 bp, Zea Mays
ctcatgtgtctggttgtattcttggagatgaacaaacgtttcaaccgagttataagaggcatgtaacgaacctgcttacgtgctatctcggttttcacggtcaaaccattgtcgttttcaacctctacgaatctacgctcaccacatactttacacttcttctcactcatggtctccttccagaaaagcatatagttgttgtcatagacatcgattttttcgtagtccataccgagaccagatagcaacttcttggactcatacatgtcctttggcatcttgtgattctccggaagtacatcactgatcaagttcagaagctccttgtagcagttgtttgagaatgcaaacttagacttaatagtcataagtcgagtcacga

SEQ ID NO: 108170 - DNA, 480 bp, Zea Mays
atctgaaccagccgcaaagcagaaagggggtgcggcggccagccggaacagtgcccatactcaacagcggtgaagatctttctaccctggggtgttatccgggcctaagcgagcacgaatcacctcgccggcggctaggggatctgaatctgctgatattttcattactgtaccattgcgaacttcttcagtgagcctgacagagcgaatggcagagaggtttgctccaaattttatgtagtgacttgatcatatctccacatcaaagttatagcctcatagaccagctttaactttgttacattgttcaccatcaaatagtcacaagatcttactcataatggaacacaaagttcatccaacttcactgtttctaaaaattcagacctagggttgcctgacagcccgactttggatctatttatcttcaaatttctcatgacaccaaagcttaattcctatagcaaagttgttctccta

SEQ ID NO: 108171 - DNA, 556 bp, Zea Mays
tttttgtgcagtcaaaaataagttgatatttctgtggtgaagtatggtagatgatccctgctcactataatttttgtagtatttttggaggagtctaattagtagttgttatgtaagtccaaataagtagtgtgaggatttaagtgattataagtgattcttggtttagatatggttaagacatgtttaatgaagaaacacatactgttataatagtccaattcatttagtaagtccttctcactaagtgatgaacaactcttaaaatatatgaagtatgttgaatgtgtgtgcatatgtatgtgtggtgtgattaggaataaaaggataccctccaaccctgctaagtgtaggaaagtaagtggttaggtaagaaaatgaaagtatactatgttttgtgaataatggcttgcttgagggtaattgacctgctaggtaggactaccttgtagtggagatggtgatgggttgtacgatttcttgaaacaataatcaggagcgaccaagaaaagacaagctacaagttcttggacaatgtagactatcttgtagaacc

SEQ ID NO: 108172 - DNA, 591 bp, Zea Mays
aagcattgttccagtgcatttaggaaccatatgagtatctttaggcctatgtccgatggttcctttgcctttgtgctcaagcgccaagtgtcctcgatggcattgtcgttgaagcaatggtcaagggcttttgctcaagtctagtatctcaatattttgcaaggaagccaccccattccctagtaaaaccgcttaaaaatatgaataaatacaccagagcagataatgattttcggtagagtcgaaaggaggcaaagatgtatacagaatcgtccataagatttaacataaacccaagacacgtttgacgcattattcataatttcagacaaaatgaagaggaacaacctaaatcataggaacaacatttccaaccttaggaatcagtacaaccttggagtgggtacctgcagaattcacaaggaaccttcgtcatcctccagcaccaagaggcggccagggaggccgtggctttggcggaagttttaaccaggatgtgcaacgacaacaaagatttgacagtcgtaggacaaaatagccagatgaaggaagtataccgtacaacatcctactaccatctgcatatcccac

SEQ ID NO: 108173 - DNA, 577 bp, Zea Mays
ctcgacatcagttggcctccaggcatgaaggaagtagtagtggcagtaatgacccgattggagacctggaagcccgggtggagcaactcaggtcagaactacgccacaggaatagggcacgtgagcgggatagccaccatattgcggaactgtcagccgaagtgagtcgcctgcagtacgaaattttggaacgcgatacggccattgattgggccgtcaactcgcgctctttcgattgggactgtgaagcgaaagctctagctcgcatggcagaactaagcgcatcctttgaaaacctgcaagcgtactgtaataccttacatgaagaagtgcatgtactatatgatcggctgcacccggacgtgccatcagacgttgctgcaatgggagccggaccatcgggaacatcagttctatgccaaattcaacaaatgcatgttttggttggaggaaatctagtttcttggacatgtattatttgcaaaaggaattgtggtcgatcccagcaaagtcaaggatattttagagtggaactcgccaacaatagttcatcaagttcagagtttccttggactag

SEQ ID NO: 108174 - DNA, 446 bp, Zea Mays
gctacatggctattagctagtgcttaagtagtggcgtgtatcatacatacaaagtggagagtttgtctcttgcaagctaatatatataataaaaaaaggtagcaggttaggtttggatttgtgtgtatgcatcgaactctttgtttatatactgtagtattaggtagagctatagctttaaaacagtagtagactgatttggttgatccggcacacacatgcagtttgaatcatatgcatgcctagttagctagcttctgcatcttttgacaggatatatatactacccgcctgctgcatgaacaggacaagacttgggcggttttatataaagcgtatatctatagaaatttctcccaaactaattaatatataataagtgttcacgatcgagtgcctgtcgtttcttccttgttgttcgaaaagtgtcactatgctagattgca

SEQ ID NO: 108175 - DNA, 272 bp, Zea Mays
tcaaaacatgaaagggtataatgaatcatgggatgtttggctatgttgagccaattcatctcacgccatgacgaatgaggaatccccctttaccaactcttgaaaagatccaaaagattcatatggacacttgaggctcagaaggcactcgacaaggtcaaaatcatcttaaccaatgcacctatgtagtcccactaattgatggtgaaccgctcttgctttatgttgccaccccgcacataggtggttagtgtagcccttagggatggcag

SEQ ID NO: 108176 - DNA, 313 bp, Zea Mays
ggggtacggaggtctctgagccatccgatcacatgtgggtggactagatcacagcgcatgtttatgaaccagtattgaaccgtggccacccgatcgcgatccaacggttgaaatcgaatcacgcgaaggggggtgcatgatctaatttgaatcattcatcgagggatcgacggccaggagggttttcttccttgggacagtgcccagacggcggtgcgtgagaaccatggcggcgatgcattctggtgaaccggcaacccgacgcaatggcaccccaaatcggtcgtagaccgacgctatatgtatagaggat

SEQ ID NO: 108177 - DNA, 377 bp, Zea Mays
attcggtcggcgtgaacagctttgtccatcgctttgtcgcatagtgcttcataataccacggtcatcctctaagaccttgatgtcacgacaagcaatttccaactcctgtgaaacaagtttcttcgaagcacgcatctctccgatgatagaatctcttgaagacagtaacctattaagctgtgacacttcgttctgagaaaccttcaactcgtctctatggtggtcaagctccgacatagtaaaacgatgactcctctccaaagtagtaagggagtcgctggcatcacggtacaaattgtctagactgtctcgagaatcaagaagtcttcgcatctccttctacagacaagaagaacactaagcatccaagcaaaag

SEQ ID NO: 108178 - DNA, 434 bp, Zea Mays
attcggcatacggcaaactggactcccaatttctgtcgaacgtcaacacacaagctcttaataaatcttcgaggaccttgttgaccctttccgtttggccatctgactgggggtgataggcggtgctgaaatctaacctggtgcccatagcttgctggaggctcttccaaaattttgaagtgaactgcgtccctctatctgacactatcttccgaggaataccatggagcctgactatctctttaagatatatccgggcaagggtggctcctccaaaagtggtttccaccggaatgaagtgggccactttggtgagacggtctattattacccagatagagtcattccctttttgcgtccggggcagtccggttacaaaatccatgcctatttcctcccacttccattcaggcactgggaggggttgcagtagg

SEQ ID NO: 108179 - DNA, 738 bp, Zea Mays
aggggatttcgacaagcagacctaagacaagtatcaaggcaagatctacatattacaaaggtaaggatgatatcaaacagaagctcaacaaaggatgaagttaaggtaagacaagacttgcaaagagacaaagggaaagaaaacaaacaagagcgggatagggaaaacaacactcttggattgaaataaaataagtgaggcaaaaaaaaggtaaacatcatgataaatatggagagaggtcaagggtcaaaggtgataataggcgaggatataaaggaagaggtaaatgtgcataaaaaaccaggaatctaggtacaatcaacaatagaaataagataagtcttgcaagaggtaaagcatatgatataaccacaggtgagataagtaagagaccacgcttgaactaaggtgggagattggaggttttagataacgaacatagcgtaatcaccaaggtaatattgagagatgagaagggtaaaggcaataagaagcaaaagcacaacaaaggatgaggttacaaactcgcgagccaaagaagaggatacgatcaagagaaagaaggtatgagacggaagagggacgattttaaatggcaggtatgagacaaacatcaatgtaggatatagaggtgccaagggtgcatatgataataattaaaaagcataacaaatgatatagttaagacaagactcgcgaaatgacaaagtggagaaaacaatcaagggtaagatcggt

SEQ ID NO: 108180 - DNA, 453 bp, Zea Mays
ctggcggcaggctgctgctactataaaccatgtcacgggctgctggagctggttgttgcatgctgtttttatttatcaatttatcatggcgcgtgtgttgttgattaataaatattaatttgtgctaacagtcaactgtaatgtactagagatcaatgagacattgacaatgttatattgtgactctcaactgtcatgaactcattaagcttttattctctatactcgaatttaaatatattggatgcgataattatgagtttagatattgtatcgacgtgtagccaaatatagtcattctcgtgttgtactagtgcttagatggaaactaaaatattttatgtatttattataacactaattgaatgttatttagtctacagtaacatatccactggatactcgatacccggtggatacacgggtacaggtacagtttctcgcccgattggg

SEQ ID NO: 108181 - DNA, 348 bp, Zea Mays
gcagtaggaagacttgtcaacactggctccttagtctgaactggtggtgatccgacatgaacatccatagaagcagccgaggaggagccgagcttggcaccctcgagggctaaagcacccttaattgtacccataggagcggggtaaccctcgcatgtaacatcaggaaccgaggtgtcaccatgaattaggccgcccttaaaggttgaagaagaatgtgaaactgtccaggttatttcttgcccgactggattactagctgagggggtgtcatctgggacctctgcacggatggcagcactctcagtttcgggaagctccaataaaagttcttcaggataatctcct

SEQ ID NO: 108182 - DNA, 469 bp, Zea Mays
gacttaagtcgattgcttcgttagtagggtatagtggtcaccctgagttaagtaagcgtgagcatgtcacaccgtcttaagttgtcgccgacttaagtcgattgctccgttaatagggtatagtggtcaccctgagttaagtaagcgtgcaggttgatagtaaacagtttgagtgcctttgagaatgaagtctttttattgatgatgtatttcccaatttacagaatacaaggctgtcccaatagcttttgaaatctagctaggggtaaaactttctgagatgttctatattccatgagttcccaatttccgtgccgtccatttgagtaagacgatatgatccaggccgagtgacttctgctactatgaatggcccttcccatagcggcgacaatttgtgttgtccctcccccgttagaattcggcggaggacgaggtctcccactgcgaaggatcgatgccatatggc

SEQ ID NO: 108183 - DNA, 299 bp, Zea Mays
tcttccaataccgagaagtaaaatgtgatccccggtctgacacaatcttcttaggcacaccatgtaagcatacaatctgtgccatgtacaactctgctagcttggctcctaaatacgtggtcttcactggaataaagtgggctactttagttagcctgtccacaatgacccatatagagtcatacccagcagatgtgcgaggtagtccaacaatgaaatccatgcaaatctcttcctatttccactcaggtatcttaagcgggtgtagtaaaccagcaggtctttgatgttccgctttc

SEQ ID NO: 108184 - DNA, 751 bp, Zea Mays
ttcacttgtggcaggctcattccccatgacagccaagagctcctcaacaagtcccatgtcattttgcacttgtacattgcctgaattcgtaatgctttcaagatttctgtaatgacatggtgcatcaccatgatctgcatcaaggtcgggggtcactgttggtggtgttgcaaactccacagtgctgggtactgctagggtctgcattgactgtgtaccacctggagtatctgctgaagattgcactagcatgtgttgtgctgtgggtggcgacctggatggcccagccaagtctgtctccctgactggagtattgtacagctaaaaatcaccatcgctctgtataaaatcaacacagaagggattctcaccatctatcttctcggcatcactccagttccatgcccggctttcttcaaacacagcatcacgggacaccactacccactttctagcagggttgtaaaacctccaagccttgctcccatgctcatagtcgatgaacaccatcggcgtgcttctgtcctccagcttcaacaagtgtttggccccctgtttgacatgtgctacgcatccaaacgtacgaaagtgttcaacagagggcttaaatccataccatacttcatgaggcgtgcgaccttcaacactctgagttagagatctattcaatatgtagacagccgttgatactgcttcccccagagccgtcctagaaacctcatagccttaagcatacttcttgccattccca

SEQ ID NO: 108185 - DNA, 627 bp, Zea Mays
tggacgatagaaggcaagagtgggtgctttggatgcgcaatgacttagcgaagctcactggggcagcaatttataggatctatcggcggtgacatccaatttggaagaaatgtgctggcggccggagagagggaggagtcaccggagtcacataacgtggcatttactagggtagaagcctcggacgatgactaactaactcacacgacaccttacgaaatggtaatagggtcagtagcgtggtggatttcggtgaagggtggtcatgacggcaatggccatgcggccacgttactgggcaagtgggtgcggtgaggccaaccatagtgcccccaaactcatccgcggggaggatcttttcactaccgagcgcaatccacttatccgaggcacaaatcgtggcagccggcgcgaatccaggcgtgaggtcaccggcggcgaggggtgatgcatctaccgatctttttcagtactgtaccatgggaactcaattcaggcgcctgacagagcaagtttcagggtcttgatctcaaatttctatgtggcaattcatcaatccctctgtaacaaagttcttgtcctataatccaacttcaattttgttataatgaccatacccaatccatc

SEQ ID NO: 108186 - DNA, 355 bp, Zea Mays
tacatatgccaaaagaagggacatcaatgcaaggattgtcccattggtaacaatctcactcctatcttgtcaattaattctcatgtaactaggccacccaaaattgtaacttgtgctagaaaggtaatgagtttacctagtgctagaacaaaggacgtttgggctcctagatctttgttgactaaccttgatggacccatcaagagatgggtaccaaaatatgcttgacaagctttgcaggaaaaggagatggtatgaagctttggggtgcttgagaaagtcaattcaatttttagtaactcaagctatcaatcttcaatgatctatatccaagattgacccaaagttatttcga

SEQ ID NO: 108187 - DNA, 318 bp, Zea Mays
tttgagtatcattagacaactccaattcgaacacattggaggactcaattcttggcatttgtgcacgcatcatgcacttggtgagggacaaataaaacaaacaaggtagaccttgaggtaggtgttaagcaaacaagaaggtacacacaaaagagtattgctttggtatgatggcatttattttactggcccaaaaaatgcaggattacagagtttgccgcttagctagtgagttgacatagatagtggaaacattttctaagacaacacaaatgctattgatgaccttaatctttttgcatccttactttaggcttg

SEQ ID NO: 108188 - DNA, 319 bp, Zea Mays
aattaatgctggtatgaaagataaggccatactcctaattcacttacgcctaaatcggtgacttagatcaactcggccatacccaacaacttgacctacataatatgttacataacctatccaaaccattcagaagcaaaacatccaaaccagattctgactaatctcacttaactgaagccacctactaaactaactgctctacctacatgtcacctacaaatatgtctcaaccacatgttcctaactcggttggagacacaagataatcaacctcatcaagaaaggataagcaccaactcaagtcttcagggaccag

SEQ ID NO: 108189 - DNA, 525 bp, Zea Mays
acacagtgcttttgggaggacgatgtcgttgatcgcgactcgatggtatgtgcaggagcacatcgatacataagggaactatacaggttcgagccgcctgaatgtgtaacaccctacggcctatttggtgctgaatatttgagtttgctagtggtgcacagattacatatgatttacgggtggtgatggatgagatctcctatcagtctaatggtggacgtgattgcgatgagaggaatgttgacagagagagttttgtaggggtaccccctcacccttatatagctagctagagagaagtccctttatagaccgtaatagcttatccaatcatatctgtgtctatctacttccacttctatagcgcgttgactcttatgaaggtatcaatgaaatacaaactttgacactgcttgtacattcattatgagataagtatgtgacatgatatcatatcttgcaagtatatttttatatttgcaatgtggacttgttatttatgaccttcgtctaaggtccattaaa

SEQ ID NO: 108190 - DNA, 380 bp, Zea Mays
tggtaagaaatgagctgtcttggtcaacctatccacaatgacccaaatagaatcatggtgccgggaggtattgggcaatcccacgataaaatcgatgcaaatatcctcccatttccaagatggtatgggaaggggttgcaaagggcctgctaccttcagatggctggccttgactctctggcaggtgtcacactcagagatatacttagcaatttccctcttcattctggtccaccagtataaggatctgaggtcatgatacatcttattgctgcccgggtgcatggagaattttgaaaggtgagcttcatccaatatcttctttctgagctcagggtccttgggaacaaccaatcgatctccgaaccataggattcctt

SEQ ID NO: 108191 - DNA, 465 bp, Zea Mays
tgaaaaacaaatggttagtcatgtttttaaggaccttcggaagaggaagacccacaacattaaccaacttagttttttttgataatggaaacaaaaaatgttccagccttttgtagtttcctacatacggcattacagattgaaaattaataaaacatgcatcattacaaaaataacatccttgacaagaacttgttctcgaatcaagcgtcctttaatctggcattagaactccaaccatgttttgcaaggatctccattgccatcatctctaaggattgacataccacaagaatctcttggtgagcttcttgtttctgcaataatctccagagtctgagccaatacatccccctgaaaagaacctgcaaaattgatggtattggtttaaaattaaaggccacatcattgcggcacaaccaaatagaccaaaacattgctgccactccaattaaaagttttttc

SEQ ID NO: 108192 - DNA, 468 bp, Zea Mays
gagcacatagccttcagagtgtggccgcttgtggagcaatgggaaatgccaaaggaaactatcagtaaatctaacgaaggcggactggttagattgaaatacaccttcagatacgagggtaaatttattgagccagatgatgattggctgaaatgcatcgaagctacaagcgacgaacttcttggaccatattcaaaggcggaggataacgcgctgtctgcgaccttcggaggccggaagaagaagaggttgaatagagttttcaatgctattggttttatgtatcctgattaccgctaccctctgaaagggcaaaagaggaaaagcgccacttctggaaaaggagatgtttcagttgctctaagcgaggccgcgccaaagaggaagaaggtgaaggtccttactcaccgaccgcgcttcatcgaaccggcctcagtgcccgaatttggtggtgagacctctatggct

SEQ ID NO: 108193 - DNA, 487 bp, Zea Mays
gtttgccagaaaaatttttgggcagtcttcgacgttattgtggatactgcccttgcctcgatccacttggtaaaatacttgacggcgatgaaggtgaacttgaggttcccttggtccatgggtagtggcccgacagtgtctagcccccagcgttgaagtggccatgtgtggacgatcagctttgtgaattgcgaggggttgcccgaacggggagagaacttctggcaggcttcgcacgacctcgtgactcgatttgcggcgcagattatagcgagccagtagaaaccttgacggatcaccttggcagcgagggccctaggccctgagtgccgcaagtgccgctgtggacttcgcgcaggatctggaggccttcgatctctgtgacacatttgagcatgggttgactgatccctttcttgtatagctggccctcaataagtgtgaagccccggcttcggtgtttgaggggcttggcctcgttgacatc

SEQ ID NO: 108194 - DNA, 336 bp, Zea Mays
aaagtttcggatacttctgccgcatcagctcctcaagttcccatgtagcctcgcgctcagactgattagtccataagaccttgacatacttaattgatctcttcctcaatacacgctccgagaattccaatatacgcaccgaacgacactccaaagtcagatcctgctgcaccgcaattggttccatctcaatctgatggtccggatcccgcaagagcttcctcaacatagagacatgaaaaaccgggtgtacccctgccatggaatccggcagtagcaagcgataagccaggctgcccactcgggccaaaatagtgaacggtctaatgtatctcg

SEQ ID NO: 108195 - DNA, 488 bp, Zea Mays
gtttagttggttgaaggaggcatggacattgtgccccaacacatgactgatgacaacacacatttaggatctgcatgtactttaggtgggttactaatcaacctctggatcaagtttcatgctgcttacaaatgggttaggtagtattctagagagcatggtttctggtagtgccctggtgggcgagggcatctgaaaacagtcatatgcaaagcagttcggtggtattttcggggcacatcatttggaagcataagaaattctagcagtttgaagcaactgaaaatttcaaacctggatgaattatgcgatcgttctcgtgtatcagaaaagatatggtgcgcccttattatgttggtgtcaatgaaaacaaaactgaaccacctcctgtcaggtgggttgtgagggtgtgcatcatatcgctagagatctgattcttcactccgtgttttttcaagtttaagcgaagtcttgagccttcattttta

SEQ ID NO: 108196 - DNA, 801 bp, Zea Mays
gaaatatcccttgttcttgcccccctttttgaacttatcctttttgtattctttattggcttcttgttccttctttttaggacaatccgctatgaaatgaccaatttggccacattcataacatgccctcttctttcctttcctttgatacttatcgtttttcctcacaaacttcttgaaggttttgatgaacatagctgtgtcttcatcacttgatgtttcgaccactttctttgtcttgtggtctttgttcttcttgggggaatcttgttcatttgagatcaaggcatgagtgtctcttgtcttgattggggcttcttcagactcatgttgttgaatatttgcaaatagttggtgaggtgtcatttcctcatagtcatcacggtcccttatcatccttgctagacttttgtccttttctttgtatgctctcataaatagtctagtgaccttggagtcactccaatcttcacttccaagcactcttattttgttgaccaacaccattagccgatcaaagagtgattgaagtgactcacccttagtccaatcatattgagcaagctcactctccaaagcttcaattctatgtctcttagctttgtggggtctcattcatgtgacattttgagaatgttccaaatgtcacgagcatcctctctcccttggacttttcggtattcttccgaacaaaggcttccttttattatgctcaccgcttgagcattgtagtgtacttcttgcatcatttccagagtcatctcttctccttgggcgggcttatacatacctatattgaca

SEQ ID NO: 108197 - DNA, 795 bp, Zea Mays
tacctatcttcagagcatcaattaccaggtttgggaaatttgcctcgatgcgatttttgatgctacatgtgaccggatcactccaattcaaatggagttccatgattcgaacaacaaagctcgaaacgctttgttctcgtgtctctcgcttggtgagtttgagcgagttggacatctgactacggctcatcagatctagtctaccctcgagagattccatgagggcaatgaacatgtgaagaccagactgtttgagatgtataggcgagagtacgagaacttcacacagttggctggagagaccattgactccatgttctctaggttccagtcaaatgtgaacaagatgcgtgccaacaaggcacaactaccttatagtgatcatgagagagcgctgaaattactacatgctctagatcggagggtttgggaggtgaaggtctcggcgatcatcgagtctcccaactacgagactctcaccgtggacgagctctttagcaagctcaagtccatagagattgaccaccagactcaggccaagattgagaaccctagtgcacccaccatggccctggtctctgcatgtggttctgtttctaactcctcacctgctatgtttgctctatcttctttgttgtctattacagaggagcaggtggagagccttggggttgaggagctggcacttgtggccagccggttcacgcggttccacaacaaccgtatgagccgacggcgtggcgggtccaaggacgaatgctacaactgtggcgaacccgaccacttcgttgcgag

SEQ ID NO: 108198 - DNA, 327 bp, Zea Mays
tctgcgcagaacaaaacgccacagaaccagaatagaggaagggttaatcacatcacagcagaatcagtgcctgaagatgccgacgtggtgtatggtatgtttcttatcaactccatacctgcttcagttttatttgactctggagcatcgcattcatttataactgagtcattcgtggaaaaacataacataccaaagcaccctcttaagaatatgttacacattagttcaccgggaggtgacatgaaggccacacattcatgcctccatgttaatctcaatattcaaggaatagattttccagtcaacctagtggtcttaggatcc

SEQ ID NO: 108199 - DNA, 344 bp, Zea Mays
actaaacccttgcctttcgacatgctaagtcctctaggatcggagctaacaagcttattacagccaaaggaaaaaggtgctagagaagttgcagaagcaggtccttcagaacccggtggggaaaatgcccagaagaagcgacgcatgatgattgtgatgagggtcatccttgataccccccactggtagtacaaaagagaattgccccatctgccgctgacgaagctgctgaagagcctcaagaggctaaaagtagtggcggtcctctcagcaccaccttatcagagattgacataattattgatggtgtgtagcctgggagagataccgagagggtgattcca

SEQ ID NO: 108200 - DNA, 462 bp, Zea Mays
tgcatttttaatgcgccttgaggcgatgcctctggttccaacacatgcacatgcacgcttacctacccatccatcatgcaaaaaaagaccatgaagacgcaagtgaggagtcgaactgggcaccataggctccaggaacatggacctaagcacgagctgagtggcagtattgattctaaatacaacgtggctctattcaatatgggtaaaacaggaaatatgaaccctaattaatcacttctgggtatgtgagaacgtgtcctaaaagtcaagaattttagacttggagggagtacattattactctatggtgacaccggtcattgatacacctttgaccaccggctaatcgctgtcaacatgagcatacaagaaatacaagatttggagtgttagattcgtagagcgagggaccatcctcagctctgtcaagtgtttaaagaataagcaaatgaactaagt

SEQ ID NO: 108201 - DNA, 463 bp, Zea Mays
acaaacaaaggtatgaaatatggctcaaaccgtgaagtactactccaatgctatgaatcttagtgagagatgtgaccgcatgtgaacaatctacaaactaacttttgtataatcctctgaattttttatcgcaagcaactagaaccaagttaagactccatgccaagtttcactattttttgaccacctttggtatttatttgatttttttcggattggaaaggcatttagaccatagaaatcaataaataatccgaaatgggagatcttcagcggaagtaagtttgtagcggttagaagaacatatggtacacttttcaagcaaaaaacaaacaaaggtatgaaatatggctcaaaccgtgaagtactactccaatgctatgaatcttagtgagagatgtgaccgcttgtgaacaatctacaagctaaacttttgtataatcctctgaattttttatcgcaa

SEQ ID NO: 108202 - DNA, 967 bp, Zea Mays
aaattagggagagcatctttgaccaaccgattgttggcaagacgcaagggcaccatatcaaacattgcaggagttatgtccttaatacatctcccatccaaccatctgtccttccaaaaaagggtattagctccatcaccgagcttagtaataacggttgcagcaatcagattttgtaccaccttacaaacatgagtggggaagtccgcccaaggcctactgggatctgttttctgcagccatggccaacaagctctcagagcccaacagaggctctttaactcattaatcccaagaccacccagctccttgggacgggtaaccttaggccaagccaagaggcaatgaccaccacagaactctttcctgcccctctagaggaagcccttcctcagtttatcgattgctttgatggcccatacaggaaggtcaagtgctaaagctgcataaatcatctttgccgtcatgacgaactgcacatgaatagctctaccagccctggtcataagctcagctttccattctggcagaaggctggccactctatcaacaatggcctgaacctggtcccttgagagtttcttaggagacaaaggcaaatcgaggtacttacaaggaaaatctgaaatattacatggcagctgtaaacaattcaccttttcttccccacaatagattgggaacacactactcttttggatattagtccttagacctgaagctgagccaaatagatgaagaatatccataaccacactgatgtccggggcagtaggacttagaaataacactgtgtcatctgcgtacagcgagatacggtgctgcatattccttgtagagagaggttgaagaaacccttcctcagaggctcgctgcacgagcagattcaagacatccattacaagaataaacaacatagatgatagaggatcaccctgcctcagcccgcgttaatgcccaatacatt

SEQ ID NO: 108203 - DNA, 369 bp, Zea Mays
gtttggggatgtttataaggcactaaacatgttcggtgaacactgaatgcccaacactagatagggtactcatacagggtcacaacatgactagagagggccataatgaactagacatgtctagtgaatgcactagataaaacatcagatgccccatcttcaatagtcaacaatggatagctagtatgcacacacaccagacatgtcttatgagtgcatcaatcatgtccactgagcatgctgaaattttatgtcacttctaatgcctagttttggtcttgggggctctatatatcattctgaccagccatttgagaagtctaggagctaaggatcataccaagtgaactgaggttcatgtatagtagt

SEQ ID NO: 108204 - DNA, 476 bp, Zea Mays
cggaagatctgtcagtgagtacatgcacaaattcatagagttggcccgctacgcgtcggatgacgtcagcaccgaagtcaagaagatggcccactttttgaaggggcttagaccagaactcaagaccatcctagccagccaagacttcctcagcttctcgcacctctccaacaaagccatgcaagtggaaagggcaaaggaagaagaaaaaggtcatctcaagaggaaattccaagtcctccgagctcagcagcaagaccggcaccagaaaactcgatcctttggatttccacccaagggaccaagcttcattaggccagctggacccactccatcgcggtttagccagcagagtcagagctcctttcatgccccctcagttgcaagcaaccaaccatcggtgaatgcgtgttggcactgcggggaccccagtcacttcaagaacaactgcccacagttgaagacatcagggtctg

SEQ ID NO: 108205 - DNA, 853 bp, Zea Mays
agaggttggaaacttcaggatttattctttggtcgtgtggaggttgtagagtaaattgtcatcatggtacggtcatgctcttgtagaaactcggcatccttcctgctcgtctcctgactgctagctggtgttaagagatcagagcacttttggctgctggaaggaggaatagttcggatgaggagggcgggaggcttggcaaagcttctttctagtgtagcgtcgacttttgttcagatgcacaacacatcactagaggactacggttgattgttgaattggagattttgatgctggaattcctcgataagttggctagcgaaagcataataggattgagactcaagtcttatttcttagtcgcgtaccttaaattttgtattaccttgtggtaaagtatagtctaggtactatgggcctatattgaacggctgtactcattgattcgtggatgttggaggccagaattttataatctaaaaaatggccgtgctcttgtgtttgtcaggtgataagcctatgtgttttttatctcctagtggagataagtaggtttccttgtcaggggtttcactcctcatctttttctctttagggcttgtttggttgcatgaggattggagggggttgagggatatataatcccttactagtcatttttaactagcaagatattatatgtccctcaattccctccaatccccatgaaatcaaacaagcacttaatataaaaggtgcacaactctcctacatgttgaagggaaaaaaaaggaaacagaacctttggcatggatggcagccctggtcctgcacaattggccctgtgtcgtctatctgtacctcgctgcttgcc

SEQ ID NO: 108206 - DNA, 483 bp, Zea Mays
gtcataattttggagctttggtgttttttgacgcgtaaaagcatcaccacgttctctgtcgggtgaggatgattccacagtctgagaatagaaaatggtagacaaataaataaaagaattctcacatgtttgcatgttactagcggtttgaaccaccgtacctgtacttaaaatttttgttgttgttgttgtaaaagacaagatctgcatgctagtggttggtacaatggtggttgacgaggtcgtgcatgcgacccaaaaccatgtgccactcgcaatttttttagaacagtattactttcaactctgaaatggtccagctttctagttgaactgcaacttcaacagtttgggcagatttgagccgtccgtttgaccatggccgtggatggggatgttatgttacccttgctttgcctcttctagacgcacgtacaatctgtggcccagaagtatgtacttgccctgaaaagcccgacatga

SEQ ID NO: 108207 - DNA, 305 bp, Zea Mays
tagcagttgaatctgttcaagttcaacaagatgcacctatagaatcccaaggctctaaggtacaaccaagtttagggactgcagccaaacacaggtgtgcaacctatctgtgcaaggatacaacatcaatgaagaccaaggcaaatcaagcaagcaagcaaaagtcaattgtggagatgcttcgaaaatcatctgaagatgtagttgatgaaaggcgtaaagggtgttctcaacccacaattccatccaagatgaagtccaaagaggagaaggattatgtggatatggaatggactttgtggttt

SEQ ID NO: 108208 - DNA, 575 bp, Zea Mays
caacttcttcccagtcattcctacttccttactgattcgtgtgccaacccttgtatacataacctttggcctcttttatttgccacccttgtaaaactatcatcagtgacgaagttattgttaattctcaagaaaacatgatttctaaaaagacgagaaaggggtacaatgaacacaaattgagaagcaagtggacacaggcaacatcttgacgtgctaactgaagttgtgttataaaaattgtggagtccctattctggagcatataagcttagttgaactaaatatataaatattgtctcattttgacaggcggccatcgtaacttgacaaatggctatttgcaaggaattacctagactcgccagcgacgtcttcattcctgatcacaattgtaaacagcttatttgcaacctttttgatcggtgacgaccgagctctaatagatcggtatgcataggatctgcaaggtcaagcacaacaactaatatattgtgaagacaagactccacaaaattcctcgaaaaagtttagaaagcaaaacaacacttatgtatattgtgaagacaatcgct

SEQ ID NO: 108209 - DNA, 383 bp, Zea Mays
tcacctgaggggccctttttacgggaagcaaaaatttgcctcacccgaggcatctcggatgaaggtcagcctcgagcctggcctcgcccaaagttctcgagaaccacaagacgtgtgcattaaatgcaaccgatatgaatatctgttccaccaatgacaccatagtcaacagaaggtgatgggacatcgtggtcccatctactttcaccatttacgatgatacacgcccgcgaatactaggcactgctcctccgcttcggtcactattctcaacaactccggatggggcatgagaagtctaggcatagcctcgggagagaactccgcctcgcccgaagttggcctcgggagagaactccgcctcgcccgagctcagtttcggc

SEQ ID NO: 108210 - DNA, 933 bp, Zea Mays
gttctgccatagctggtatcggatcgaataccattgtataggagtcaataggtcatgaatgccaatctttcaaaataaaacttgcttagaaaccagtattggattgtcaggactagaacgctagacctggtacgaaaggccttaagaatagtggggtagataggtggctatataagtaggccatataggccaacactatgatagaagggatgccctaggagcacccctatgattgatgataggacgtttcttcaagcatggatacattgtaataaatcagcactaaaaagggaaaaagtgattaattaaaagttgaagggaatatattgaatcatgacccctaacaacattagttaagaataagtagcaggaaggtgggttaaaaacagattaatccaaactaatcatcctcctttaacttaagcatgcttatccccttaccactaccgtagcacttacacttacccctccttcacatgtgacttcacctacccccaccgatggagaagacacctgcttcacctttgactacctttcccgagagggctttccctctatcttgtgggaggtgctctgctccgctgggtaccccacaccccctctatacatggtgcagttgtacgaggagcaccgggtgccacgctgtagggttcggctaaccctggagtatcaccccctgcggcctgggtggcgttcacttgattctgaaactatcggattcagggcaggacaccactgatgccatggcactaaaggccttgacgaccttctatggataccacccacttgagatgatgatgcacccacttggactcttccccgcgaagaagagggatgatccgatgtggtgcaatagagtgagccacgtcaaggatgtgtgggccatgcatcccgaccaggttgggagaatcaccgtccagtgcatgagtgcac

SEQ ID NO: 108211 - DNA, 880 bp, Zea Mays
gtcaggtgatgcatgtatacttcatatttcttcaggacaatggcaatcatcctatacatcgacaaccgaagcctagctcagaagaagctcttgaaaacaacaacctcatcatccttcagcttgggagtcgtctcctcgccagcaaggcggattttgtcctcatcatcgatttacccgagctccttcataacctccaaatcactagccttcataatagatcggcccatctcaatgtagcttggcttaattggctggccctcatactcttcctctaaaaattcgaaaatcttctcggttgtatccttaagatcccccctttgatttagctctgcagatgccctcatgacttcagaaatcgatgctgcaccagaggcaacttcatctctttgaagggtttcagacaatttgggagtggctagcctagcattcgaatgaattcaagctatctaacaaactcattaagtttgcgcgaaggacggcgactagaacaaagcttcagaggccgagaaataaaacactatcaggttggtgcaaggcagtaaatgctcaccgatttgcacatcgtcggtctgtttatataatcaagtaagcagagaagccgaggagcggcgttgatgccttctcgctatcttgtgcaccaaaaaatacaactcttagtttcaaagcttcacatcattcatcattttctacaatgagctcctgaaaggtgtttttcggaccttctatgaaaggcctcccaagtatatttcatagtctgagctcattatgaaaacgaaccaattctgcgaggagctactgttgggggtctttattgctaaaggtcctcaaagcttggtataatcaatcaaacacgtttcaggtactattaaaaatgacaaaa

SEQ ID NO: 108212 - DNA, 496 bp, Zea Mays
cccgacaacacataagaaaagcattactttaaagatgagtgacgcacaagcagccttaatttaccttttgaatactcatggtgcacaacgttctcttttttgcgtgactcacgacatttcttcaattcattttttcaacactcatcgccactatcgtgctctttccctttctctcttacattgtctcgcatcagttcgacctcctgaaccatcatatattacccatcaataatcttcgttgtcaatacatggtaaacaaacaaattcaccttgagtgttatcacacaatatagttaaatcaattatgcttttgtcgcttacaaggacctctggacattcatctacacaatatgaacatcgttttagttaacattcgcatcaacaatccttatgtccgttgtttaaaataacataacaaacaaacataattacctggagtggtattagacgacaaagtcaaatcattatgctctttttgcttttagacacctcaagt

SEQ ID NO: 108213 - DNA, 1087 bp, Zea Mays
aggatagtcgaagtgctcagcagctggatcaagattgacaatatgaattgtccttcccacggtctggcaatggtcgtataaactggagcaataagttgactgcaagcacgccacaagtaaccaattagagcaagctatcatctacctcctccttaatcagaccctagaccccagtgcggcaagtattcaaaagttaaacatctttttgcaagtgatcttaagggtacatgtgccgtaacccaagattaattcatgtgtacagcaggggattgagttgggaaatcagttcattgccctctgtcccctgtaatctaaaagggaatttgtttatccaaacttaaccccacccgaaacagagaaggaaatcgcctcgcacgggaaacaaaaccctaccagatcactacgaaacaagaaggaactgaaacattatagcagagggaacaccggaacaccatcagagcccgtcccccagcgggcgagcaaagcagtcacccaaaggcaagggggaaggctacgggagtcgaaaggtcaggggacttaccttgccgctcccagcggggccgatgacgagctgcgcgtaccccatggtgacgcgagggcgggtagatcgaagcgagtcggcgggagaggttgcaagtatagtaggacctacaaagctggaggtggggtgtgctacaggggggaggttagggttggggagtggggagtgggaatcagaaggcggaggagatggcagcggcgaggtaagcggcgcaccagatggcggcggcgaggagggtgctgattagggcggacaaggccatcgacgccttcaatacggaatagaaaattcaaaaatatcgcaagccgagatgaagatgaatatatctactggcgccctcgtggcctccccttcctctttgctctcctatggccagttcaacggcggggatcaggagcaccaccaccgtcgacggaggcagaagaggcggcgcttcggggtgggggaaggagcggcggcgctggggcagggcaagacaccgacgccaggatggatgaaggtggtagcggaaggagccgcggcgtttactgggatagggtttttatt

SEQ ID NO: 108214 - DNA, 352 bp, Zea Mays
tcatctgatgcaacctctgctaaaacactggctgtagcacccatacccgagtctggcaaagctgtggatattcaaaggtctgatagtattcgtctgaagtgtcctcgccgaactaatcatccaacctctcctgctgaggggaagaaaaataaaaagagacgtcttcgtcgagtgtcatgcttgaatcaggatgccgacccttctgctcctgctgctgaggaagtgccagtgccagtttttgctgaagttgaccccaatgggtgtgacccgactgatgctgaacccaatgggtgtgaccttgatgatgttgatcccaatgggtgtaatccggccaaagttgatcccaatggct

SEQ ID NO: 108215 - DNA, 403 bp, Zea Mays
ctgtgagtgtgtgattcaaaatttttatgggtttttatactgtttaatgatgttttaagcttgctgaaaaccgttggactgaattctcagggaggtccgatattcatatcgaaggatccgatattgcaccctgagcaggttcattttactctgcattttgtaaggcctttttgtggttctttcccttcccaatttcaatctttttcgctatgttctctaagctttttagtgcatctagccatcaattagcatatcgatgggttttggacttttggtgggctctccgctgttatttgcttcgctcggatgtctttgcacttttggcaggcctgcttgataataacaacgtaaatgacatgcctgtgccacacgccatgatgcgtcatcatgggcaacaattgtg

SEQ ID NO: 108216 - DNA, 707 bp, Zea Mays
caaggttctagcccctaatctctctatccacggtgacagcgcgatcaacggacaaaccgggcgttccggtgatccaacatgttctagctcaattggccaggtcaagaagcatcaagagcacataggaatgctaaaacaagagcgaggagggcatgatcggacctgtggagagctggccacgacgagctcacacaacacgatgttcttgaccgatttggggaaaatctcaaattagagctctctggtggacaatccgagacacgagtgggtgcgctagatgctggactacctagcggagctaatggcacactcaatttatagggcccaagggcagtggctcctaatttgggcatggcacgctggtggccggagagagggactgagtcaccgcggcgatctaccatggcgatcactggttgaggagctacggctgttaccagtgagctactatggctagcagcaacgtggtaaaagggtcctggcatggcgcaatcacggcgaactatgtatacctcgacgatggccgctcggccacgtcgccggcacgagtggatggacgacagagccaccacagtgctccgaactcatccgtggggaagatctttttactgctgagcgtaatccacagacccgaggcatgaatcgtagcggccaccacaaatccagatgcgagggtcatcggtggtgagggggactgaacctgaaga

SEQ ID NO: 108217 - DNA, 315 bp, Zea Mays
caagtaaaatgaccatcagggtctagcgctcacaagaacattcattggttgcattgtgctttcaagcacataggagaatttgcgcatatataatggtggtaaagtgcatggcatcaggccaatgctgtcaagcagagatttttatatgcagagatgtatagtccagctcgtttttaccattgcccatgggtgacccaattactcataccattctgaaattaggtatcgatttatgcaatatttttaggtattataattttgagagagaacttataataataattaattatttgtggtgttgccagcagggcaaac

SEQ ID NO: 108218 - DNA, 411 bp, Zea Mays
ccccctcgtggtttttctatattctcattagcagtttactaaatttgtaatccatttataccatcattgttagtctactggcgacgtacaacaagcggcagaaacagacttgcctgacagtggtccatgctttgatcagactccatctgaacatgtcagctcagtaatttacatttttttgtagttttcaactgttcacagattttgtacagtcatgcttcacagtctaaataggttatgcatcatacaaatcagtgttatgcatatttgcacatacatgtatgctaagtagatgtgcattcagtttttacataactgttagctgcctatgataaattacacatacatttatgcagtttgcaagaatatttctgtctcttgatctgtatcagtaatgtcagctcattaatt

SEQ ID NO: 108219 - DNA, 390 bp, Zea Mays
ggtaatggtcccgatttggaggaagcacgattgaacaatccggcgtcaaacttcctttgatctttgcgtactgtactggtcatcactttctcctgcaacagtgctagtgaacaagttgtatccaagtccacaggacgttgtatgatcaccaccattttaatctcatctctcaacccatccacaaatcgtgttgttaccatggtcggtgtcagttggttctcatgtgccaatagctgatgcagtaatatatcaaactgctctatataatcataaacagatccagtttgatgtatatgatagaactgtcgaatcaacagattatgctgatcacgaccaaaccgagtaattagtgccaaacacaattctccccagttcatttctctagttcta

SEQ ID NO: 108220 - DNA, 491 bp, Zea Mays
ggcagtccacaatgaaatggagtccattctaacaaatgggacttgggaaatatgtgacctgccagttaggtgtaaacctatgggatgtaaatggatatttaagaaaaaactgaaacgagatggtactgtcgataaatataaggctaggcatgtggccaagagatttactcaaaagaaaggtgaggattattttgatacctattcaccagttgccagattgatcacaattcatgtgctaatagcacttgctgcgagtcatgatctactcatccatcaaatggatgtgaagacaactttccttaatggtgagcttgacgaggagatctatatgaagcagccagagggatttgtgatgcatggacaagagaacatggtgtgtagactaaggaaatccttatatggcctcaagcagacgccaaagcaatggcatgagaagttcgatagaattctgacgtcagcaggctttgtggtaaacgaagctgacacttgtg

SEQ ID NO: 108221 - DNA, 488 bp, Zea Mays
tacatgcccattgtcctggggcaggatgcattgcaatggcttcgacatctaccacggcactgcattgacaactgggatgacttcagctgtcgatttgttatgaatttccaatctctctccgacaaaccggcgtagccgtgggacctcaagtccatcaagcacagaacaatgagaccctctgcttgttcctcaggtgtttccaaacaatgaggaaccgcatccctgacgttgtagaggcagccgtaatctaagacttctactgagggtccaatgactcagccttcatctaggctatcctcgaaaaggcaccaccacctcggaacaaccgttccgagaagcgaacatctagatcaccgccgatgaacgagcccaagacctcatcgagagagcaaagcatgcacctctagcaccgaggaaggacatgaactagcaattggacatgctctgggacaagaggcatcgggaaaaagtgcacgttgctggaccgc

SEQ ID NO: 108222 - DNA, 576 bp, Zea Mays
ctggtgatggatcctggttccctatagtgaatcctcttgcggggaggggacaacgccatgatagggacttaggctttagggggatcccttccttgtagctgagcttccagcgttgcaatccttgcatgggcatcctccagctccaagtgaaccctagagaggtccagggtagcactttctaggtcggtataaagacctgccactacaccagctagggtgttgaggcgatcctctccagctccacctgaaataatgctggtctggctccctccactaagacacagagaaagatgcctgtacttcgtgtcatgcagctgctgctggtaggtgtggctgagaggccataaagtccgcctagcagtatcgctgaccgaagcagcgtatgtggatagcggtgtcagagactcatgagctgatagagttctgaaccctctatcccctgcatccatcaccctgacatgaatgcgagtgatgtagtagcaagcccgaggaggctcgcacaatcgccttgtctcgtacaagggtcggacgtaggttcccaacgtatgcagaacatcctgcagcaggttagggaag

SEQ ID NO: 108223 - DNA, 327 bp, Zea Mays
tgctggttttaaggcattttccgacttaagccgatcgcctggctggtagggcataatggtcgccctaagataagtaggcatgagcatgtcgcattgtattaagtcattgccgacttaagccgattgctccgttagcagggtatagtggtcacccttggtcaagttagcgtgagcatgctgcaccgtcttaagtcgtcgctgacttaagtcgattgctccattaatagggtatagtggtcaccctaagtcgagtaagcgtgagcatgtcgcaccgtcttaagtcgtcgccgacttaaaccgattgctccgttagtagggtatagtggt

SEQ ID NO: 108224 - DNA, 337 bp, Zea Mays
ttcttctattatcaagatagctcttttgctgagtttgtgctaccctcaagttctcccagattatacggacttgttcttctgcctcttaaataagttcaggcccaaagaactatctttctccagtctgatcccaatatagaggagtcctgcacttcctgccatataaagcttcgaatggtgacatcttcagactggcctggtaactattattataggagaattcaacatatggtagactcttgtcccaacttattccatgctgaagggcacaagctctcagcatatcctcaagtacttgattagtcctttcggtctggccatcagtttgagggtgata

SEQ ID NO: 108225 - DNA, 343 bp, Zea Mays
gggctccccggcgatgatcgaatggcttaagcgagtcacggcgatgtggtaaaagtgcccaggcatgtggtgcaaggccatgaagcggttgtctccggcgaacacatccgaaggatccgtgaccagctcagtacggtggtcggagtaatttagtggccggagtatatccacggcgatgatatttactcaaccccaagcactatccaaccgatccgagcacgaatcatggcggcgaaagcacgaatccgcgcgtggctcgtcggcggcgagggacagagctggcgacctgatcgggacactgtaccatcggaactgcgattcagagctcctaacagcccaactt

SEQ ID NO: 108226 - DNA, 601 bp, Zea Mays
gtggatgtgaaagggaggtataatgttttgctagggcgagattggatacatgctaatggttgtgtgccatctagtttgcatcagtttttggttcaatgggtaggtgatcaggtggaggtgattgaagcagacaccgctatgtgtgtctcactcatggaaacgccaatggaatggcagcacaataatatgtggtgtttgacaggaagagatttgtcaggatatgattttatcagtgtagagcgagatagttttgtgcctattcatgtaaagccggatgacatagcacagctcaatgagtcagcgttataaatgaatgaacatgatagtttaaaatggttacaggagaggacgaaagttaggataggggttctcatctgttgatgagctagaggaagtgaacattggagacggaaaggtgccaatgccaacatttgtaagtgctaaattaatagccggtcagaggcaaaaggtatgtgctttacttagagagtttagagactattttgcatgggattatactgagatgccagggctgagtagggagttggttgagcataggctaccaattaagcatgggtttaggccacataagcagccacct

SEQ ID NO: 108227 - DNA, 399 bp, Zea Mays
aggaggactagacatggcaccttagaacgtcgataagtgcaaaagtacattgaggagaagaccgtattgacggagccaagacgagaaccgactaaatcaatcaatcgaagacactagaggccttggtaatcagacgaccaaggatcaacggtggcacgtgtctagattatggagggagcgtactagatacgctttttggtggttcgaacctcaaaatcacaccggtgggcgatttctcgggcttgacggtcagcgaatctccagaaagagaagatgaagtcgattggcaagcgtagagaaatttacagtggcagtaacaagcactgaagtaaagaaagcgtgagcgccaatgcaagggtggggtctcttttcccgtttctgctacgacctagattaaga

SEQ ID NO: 108228 - DNA, 691 bp, Zea Mays
atcgcgtgatcgaacaggagtgcatgctgtcccaaagcctgaactggattgtgtgtggggggttttggattgaattcagcctgctgcgatctctttgctgttgtaacttttgggatttatcgagccgtttgcactggttcgtgcactctgcatcgattagggcttgatggtttaacgcttcttgttttggcaactaattgatgcagcgccggccgtaatgcgaccaggaaagggatgacttcaattgacattcagctactagcctactatgctctgtttatgttctgaagtacacaaatgtgctgtatggactatggagtggtgaggacaaatttgcaacggttatttaggttggtcagtatgtggtagttggtcacttgatcacactagactggtggtgcagttgatctcatcgctattagcaatttagcatactcccactctaccctgcaaattcactcgattgatcacacaagtaacaagtttagcaactggttaaaatattctgattgaggtgatccaataccaatgagataataatcttgaatcatttctgtgctgttaggtatcgctgggatgttgtattcctgttcttgcatgtttacactttacaataccagacaattatttattttctagagcagcaactccaagaggctctctatattcttcctaattgatataacgaaac

SEQ ID NO: 108229 - DNA, 361 bp, Zea Mays
taagtggtcgttggtgggtgagtaacaaaaaagatacaattttaaattgttaccctctttcacgtggaagcatctaaatcaactgagatattatttggatcttgtcagacttacgttaatgtacattttttggaaaaaggaataaatagcttgctccagccactgcatgtaaatatgcatgaagttgtccaacaaacaaagtttaacaaaggtcctcacaacagcataacctgactacaaaaccaaggtagagatgaaatacggtctactataaagtaatcctgctactaaaattccatccattggtatcgaaagttcgcatcgtagttgcagacaacattctagctttacttgtgattcg

SEQ ID NO: 108230 - DNA, 652 bp, Zea Mays
gatcgcgtaataatgtgtctcccctgaatgtaatactctctaactttaagcatatcgctccatacctgagaatcacccaccctggggccaatattaaggatactattaccatgtatgtatttactattcataatttcttgccaaatccccttctcgttttcaagtttccaccaccacttgcacattaaacaaatatttagcagtcttaagttcttaattccaagcccacctttttttttgctagtacaaactttatcccatctaacaagatgatatttctttttatcccctccaccttgccaaaggaacttcttccttctcttatccagattatcaatagttgttttcggaagcaaatacatcgacatatggtaaattggggaattggataagcaagcattaatcaaggtaattctcccagcaacagataaagaactacccttccagctatcaagtcttttttccaatttttcctcaagtttcctccaatcagcaatatgcaaccgattcggactaacagggactccaaggtacatcattggaaaagaaccaatttgacaattaaagagattagcatattgcatagcaatatcatcatctccattaatcacaaagatttcgctcttcataaaattaattttcagaccagcca

SEQ ID NO: 108231 - DNA, 503 bp, Zea Mays
gactaggagagcatacttatcccgctattatttctgtggaatataagctggacaggttgagttaaggaagattatggcaaggaaaagacttcatctgaaccgtttaagtcttgattcatctcgagattcgccttgactgttatatccttcttcgtcgatgttgatcgtttcatctccggttttggtctcattgattcgaggtgagtatatatcatgggagttggggcatatggccgaagtaggtatgggtgagttggactacatgatgtaggtcaaaatcttgtttgatgttaggcgaggatagacagattaggcaatccatcatgacactattggttgggttagctcttatgctcacggttgagttggtctaatgcactaatttaggtttaagtgcatgaggggaggacaaggtttataggagtaggatatagtttatttcactagtgttaacttcttaagttattgtccttaggttagctcaacttaaggttagacttcgt

SEQ ID NO: 108232 - DNA, 368 bp, Zea Mays
aaaacactgcacaaagttgtgctgtcagataaaagagtattgactgttgtgcagtagcctaagtctgaaatatgtgtgtctggttaaactttggagctttgtggtgcttgatctatatggttttggactgaagttattgtggaaagtttgaagaccatatgttagtgaataagttcctttaagtgtgttgggcgtgaccctacacaaaaagtggtgtaaatattgcccaaattgggactgtcagtcacacaaactgaatttcattcagtccaatgaaaactgaatttcagtgcaattagctgaacttcagagctcttttgtggctaatccataaaatgttggaccatggtgtctatagtgaattagta

SEQ ID NO: 108233 - DNA, 366 bp, Zea Mays
aatgactaagttataaatgaatgtgatgctctagagtcaaataaaactgaagcaggtatggagttgataagaaacataccatacaccacatcggcatcatcaggcactgattccgctgtgacgtgattgacccttcctctattctggttctgcggcattttgttctgcgcagatccacgagtgggggtgttctggtcattcctctgattgttgctcttctgaggtgtctgctggttgtgcctagggcagttgttagcataatggccaagctcaccgcacttgaaacagccattgggttggactgatgcgttgttgcttctggcctgcgtgttcacgacgccaccttgacgagtctgcgaactacta

SEQ ID NO: 108234 - DNA, 305 bp, Zea Mays
gataaatcttcggtaataaccaactaatcccagaaagctccgaatctgacggacagttgtcggtggcttccagttcatcacctcttgcactttatcaggatcaacagctataccagcctgagagatagtgtgacccaagaatttgatttccttcagccaaaaatcacacttggataacttggcataaaggtggtgctctcgcagacgttgaagtactacatgcaaatgcccgacatgttcttcttcattctttgagtacaccaaaatgtcatcaatgaaaaccactacgaacttgtccaattccg

SEQ ID NO: 108235 - DNA, 300 bp, Zea Mays
atggcttgtgcccaagaaactcaccacactcagggtccatactggtgactagagaaatgaaatgaccctatcaaccatccattccttaactgcattgcttccctcacggttggcgcgtaggacatgtccttggcaccatattagtctgggtagcttccatgttcacgacgctcccactttaccggtggcattctgatagatatcccatgctcccccttatagtctagaaatgatgtgatagctaacaaaagtagcatggatgtccttgtatattacgaatcactcatattgctctgagct

SEQ ID NO: 108236 - DNA, 709 bp, Zea Mays
tcactcagaaggagctgaatttgaggcagtgtcggtggctcgaattgattaaagattatgatttgtccattcattatcacccggggaaggcaaatgtggtggttgattctcttagcaggtctggggttccaaaagtggccttgtcattgatcgctgatctggatcgtttggggattgctttgtgctatgtcggcaccgctagtgaggagacttgtttgcttattcaatcttccctcatggagagagtgtgtgcggctcagcagcaggattgtttattgcaggaagctcgaaagagggttggcgatggtaaatcccgggagttctccattaatgagaatgatttggttcgtttcaggggtcgcctttgtgtgcctcagaataagaggtgaagatggatatcttgagagaagctcataaaacgccttacaccgttcaccctggcgaaaccaaaatataccgagatctgaagcaaaacttctggtggaagcggatgaaggttgacgtttctaagtatgtggccgcctgtgaagtatgtcagcgcgtgaaggtcgagcataagaggtctgttggtttgttgaagccattggaaattccggagtggaagtgggagcatatcaccatggattttgtggtgggcttacctcgttctcctcggggcagggatgccatttgggtggtagtggatcgcttgactaagtatgcacacttt

SEQ ID NO: 108237 - DNA, 353 bp, Zea Mays
tcgtctgtggtctgcatgagtgttctccttgttctcggccgatcctctcctttttataggctaaggtgggtgtcggttaccggtagcttctcaggaaaggagctactgcgtcgtggcaaaacgagtcgttctaccttggtaaagtcgtacttgtcggcattcgtctcggtcgtcttctctggccttgctctttaagactagctgcgcgtgaatggcgaagagctccagcaccatcattactatctctgcgacacgccgaccctagcctttgttgcatgggtctcaacgtagctcattttgttgcgggtcctgtagatgactagtgcattcaggcctaggcttgataggcaatt

SEQ ID NO: 108238 - DNA, 1050 bp, Zea Mays
ctgcagtccatgacggtgaacggcggagaactgagctccggcaagctcataccgaccggatcactcgataactggtgctctccttcggctggaacctaattcaagccttaacaagagtttcccctcaactaatttcactagcggagctctaactcgctctgtccacggtggcagcgggtaccacggacaatcgaacgtgttcctggcgatctaaggggtcctagtccaattggcggggtcggggagcatcagggacacaccagaacactgaaacgaaagagcagagggtacgagcggacctaagacgagctagccacggtgaggtctctttcaaggtggcgcaaagcagatttgggggaaatttggaattggcgagctctggtgaacaattggcatggcttggtgcttgactaccctacggacccgtcggtgtgcttaatttatagtgtgcttgagcggtggcctccaattttggatttgtgcactagcggtcggagaggaagaggggtactggcacacacgattggtggccgcaaccgtggcaacctcaccggcgatctctagataggtcagtacgagtcacggcggcgtggttaaagtgctgaggcacgtggcacaagaccgtgaggtgtctaactccggcgagggttgattcaaggcgatcggggtagagcggacacagtggccggacaaacagtgccttaagctcatccgggggagaagatcttttcaccgtggaacgttatccgggcgccggtgtgcacgaatcacctcactagcgtgaatccacgcgcggggtcacagcggccggttcactgaaccaatagatttttctggtcactgtaccatcagaatcttcttcagtcagtttgacagaccatgtttggggcgaatttccttccgattttgtattgtaactagatcaatgctctgcagcaaagttgtagcctaatagaccagctctaactttgctacattgtgcaccctcaaaaagtcacaggatcttgcttaaaattgagccctaagttcatccaatctcactgtcagtct

SEQ ID NO: 108239 - DNA, 583 bp, Zea Mays
ctactcttagtccagaaggataggagcatgttgaagccgctcagcggctcgaaatcatgggccaaagacaggagaaaagaaaggctccacgacaacgacctcaagaggatgatgtcgatgaagagattgagagtcaaaataatctagagagtaatggaaatacaaaggcaacatatgcttcgtgtcacccaccttaggtgacagattgatgaggcctcacaagagttgcatcgcatgagaagagaagaataacaaacagaacatcaaggatgtcacgatgcaagaaaactttaccccgaacaacaaaactatgatttcttcatctacgacaacacattcccactatcagatgatctgcaagcaactccatggttagatatgtataagtcacgtagcttcctacacaagatggtcaatttgaccccaaacaattttttattagtaatgaagcatctaaaatatcactattcactattctttttgaactctatttttataatttggtaaatataagaattatgttatttactatttgttcactaaattggcaaaagacaaattactgaattacatattatttttt

SEQ ID NO: 108240 - DNA, 299 bp, Zea Mays
tttccagaagcacagcaatatattttcaggatatatacctttctcctccatctagtgggaatcacaacttctagtggttaataattacagcttacagttcatttttgtatgtcagctagattcctcaaccatttagcaatttactattactagaatttattcaggagatttggtcccatcttgtcagtgaagatgtgtacataaatcaaatatttagtttgaggttcacaccatatgaataatgcactaattatatatacagaaaaaatagcttgtatttaacagttatggccctgttt

SEQ ID NO: 108241 - DNA, 324 bp, Zea Mays
ggaaatggctgggcaagggcatggagaaatatcccaggttgccatatgtgagaagtgtacgtgggaagataatcaccagttaagctgatgtggagataagcttgaggaaaaagatcagaaagcctacgtcaactggacgtcgtgcatgaatatctcaaggatgagatcgtttcctggataagagctggacaaaaaaatcagctaaggatattctagagaagatttttgtttttatttcactaaacagaattacaaatataatcttagattctggacttaaggtttgcgcgacaaataatggattggacctaaaatttatcggct

SEQ ID NO: 108242 - DNA, 422 bp, Zea Mays
gtaggtcatacctgtagacataaggctaggtccccgcttgaaggcagatgtaataactttgcttttgtaaggtacttttgagcactacttatcgagcagtattagtacttatctgcctactatttgcccctgttgtgtgtggcgttgccgactcctccctagtacctagcccccctaggatgtaggctcgacgtgtcgagactagataccagcatacctaaaagagttggcaacggcccccaggaggcagcctcgactgggacctggacctgaacacagcttcggctagggagcattagtagtacacccataggacccatcgtctgacagtagccatcctttgatacatgcacaggacctgcaggttttagtctgggaagccaagttgtgagtccggacccccctggaccgcggttccaaat

SEQ ID NO: 108243 - DNA, 641 bp, Zea Mays
gagaaggtggatcccttgctggtggagtagacaacgggtctctaagaggatgaggaggagaaggtggtggagtcctaaatgttgatgtttgtggcagagacggtgggttagaaagaggatgaggagcagcatgtgaagattcaggaggtgatgatggatgtacaataggtactaaagtttgaggaggcggagatggttggggatgcgacggagatggcattggtggatcaaccaattcgacatcccttcgtggccaaaggatgaaatttttgatggcttgtccaagtgtctcgatacctttgggcctagggatgtctagcatatcatcctcggatcattggacggtcgtcgtcacttctaccctgcaataatcatctggaatgtcgcttccatgaaactagcgtcctgtgatcacaacgccttgtcctactttcttcgtatgatgattgttaataccatatcttataactagtgtgcacgccacaggccttgtgatgtcatcaactagataacggaccttatttcccattgacgtgatagagcttgggacgatcgtacaatcggtggaagccggcggttgagctgctagaattatttgcatctatgcatggagtggtcattgaacagacatcgcactcacc

SEQ ID NO: 108244 - DNA, 399 bp, Zea Mays
gacaagattagggaaggagaaggtggccgacaaacataacgagaaggagaagatccccatcgacgacgaccttaaaggcgagaactccgtcgacttaggaacgaagaaggaggacaagaagaagaagagtgttggggcagaggccgaaccagacctcgatcatcactgcataggttttcccccttatcttgactaaccatacttgagcacagggccaaggacaaccggagccttcgttaggcgcaacttagatggagtcttcgatcaagcaactaatgccgaccgtggcaaagactggtgcctaggagagagcccaagtatgggccaaatgtcgaggtcaaggactttgccatccacaactcttcgaggggccctcggcataggttacacccctgcaag

SEQ ID NO: 108245 - DNA, 355 bp, Zea Mays
agtcggaaggcccagtgcaactgtgttagtatggattccaagattgccaccctgtgtgacgagttgtgcaagctaaacatagaagttgtttcctcaggtgccttgagttatatttcagtggagcccactttacatgagcaaatagtcatggcacagatcggtgacaagggtgttcaagtcattaaggaaatgatcggacagaaggtggacaaatacaaatgcttccgtcaggacaacaaaggaattctatggtttggagaccaattggttgttcctaagaaccccgagctcagaaagaaaatattggatgaagctcgcctttccaaattctccatgcaccctggcagtaacaaga

SEQ ID NO: 108246 - DNA, 544 bp, Zea Mays
tcgcatcaccgctataccaccatgcaatcacatgcccaccaaaagcatctttcccataaaacttgcaatatcaacctaaccttcatatcacgcaatacatatattttccccgtcgcgaatacaaccataacccagcagaccatcaaaacacttcatcaaacatctaacgcaaccactaatataatgtacttcggcacacatgtacaaaaatacatcacatgttcctttgacctaagtggcatagcactaccacattttatataatttcctaaggctactaaggcaggaatcgactttaccgtataaataaaaccatcacaagcatactaacgaagcctatcagttaagcgtcttaaacacttacctagctctcgtatcacccatacgccattttttaatcgcggatacaaccacaacacacttgtgctacaaagaatagaatcattgagactaatatacctattcaatccatgcatcaaaccaacaagcaggagtagcgaataaaggttggatatggattgaatactgaggaatcggacgcgaa

SEQ ID NO: 108247 - DNA, 511 bp, Zea Mays
gacaaatgggacccgccaagttgcaatggactaggcatataaatagaagcccataacgacggcatttgctacgccatttctgttgcttgcgttattttctcaaatttttaactctttctatcagctctcgcttgattttcgagcttcgtgatatacacaagtgcttgttgcatgtctgaagagaagatgtctgaggagaagaaagttgtggacccttttcttgctgggttttataaatctatggcaaaaacaaatacagagaagatcacaaaggaaataatggcggatttgtctgaagattctaacgatagcgatgactatgatgtggaaagtggggatgaagattctgaagatcggccctggcggccaagccatatcatcttcggaaaagtcaaccattaaataaggtcaatttgacgccatgaagggaagatactttcgtgacatgtctattgtgagggttggaggggacatcaccacccctactcctgaagaaaatgaggttgttgtc

SEQ ID NO: 108248 - DNA, 402 bp, Zea Mays
caccaaccggttcttttttctcttttgttagtgggaaattttataccaatctcacaagtacgcgaggacgtggcatctgcctacagaaaagaagaagaatggcgagcgagtaatatgctagttcctttccagaagatgtgtgctcagagaaaggttaggattagcctgcataattgtctaatcgttccacctgcagttagtcttttgttttcagaaccatttgaacttagtatggctgacgaaccatagcgtctttaccctacatcttattaacaggtagaggccgaagctgttttacttgaatcagatgatgttgcttctgctataagcgaagagatagggaaattcaatatttgcaagttagttttaggttcttcatcaaagagcatatttcgaaggtaa

SEQ ID NO: 108249 - DNA, 828 bp, Zea Mays
aaagaagagttatggcaggagaaaagcagcaatgttacaaatataaaaatagaataaacatgaaatttgccttgtcatctaaaatctagaatgtttgagtccttatacaaaataaaaaccaaagagtacagtcatatattttcattatctagcactccatcaaaatgtaattgcctaatagctgatgcaacatctttatcaactccgaataagagactggtgtatcctccttgtataccacgagcatccatcatagaagtcatgtgcatattaaaacccagcattgtggcattagcataagaaccttgcattgatggaattgtcgtagttgaaggtccctttcatgagttgtgtgatccccttcatgagttgcatgaatccctgcttacctgagttgtgtgatccccttcatgagttgcatgaatccctgcatctacacattccatggtacgggactgtgtgttgaaatcaacatcctcatatccgacgacatcacgatcttcaaccggagcagcgtcctcaccgagagataaattaacctccatgatgacaaccagggctaagaagattagtaggtgattaaacaggaacatgcctttttactgtggactgcaggcctcaccacgatgacgaagacaatcgaaggagtcgcttgaattggaatcgcacgagtggcgacgcaagatcgaagagtctccaatctgatagacgatggtggcagagtcatttctaaaccagagaaatatggagctgtgaacggagccgagccaagttgcgcttgcgccaactaaccgagtgccaagcagtgttgtgtgtgggcctgcatgc

SEQ ID NO: 108250 - DNA, 444 bp, Zea Mays
gaaaaggggtagtaaatgtattttaattgtttggatgttggatacctcaatcaaacatgatcctacatatttagagaggggaaggtgttatcctaatagaaaacaactccaaaatgcataagtttccaattctaaaaatgatgtggaagcgaatcttttcaggaaagcaacaaaagttggtcttgtcgaccaccaaattgactacactagattttagcggactagccattatagctggcctgacagagaaagtcaacctagtcgtcctcttgtggcggtctaaccagctttgagaaccagtgctagctggatttggtggctagcctagcctgctttgccatggtggcactcggcttagctgatttctatgctatgacacttatgagtattgacatatgtcccctattttttgttgaatacataagaatataaaaatactaaaaa

SEQ ID NO: 108251 - DNA, 329 bp, Zea Mays
aagcaactcatcgctggttgcttcgatggcatccagccagtcatcgttcggctcatcgaattggctcttgtacttgaatgtgtacttcggatagaccaaaccaccttcgctggacccagtaagagttcccttcagcatctcccacccactagagagcggccacactctataagcaatatgcttttggactaagtccctggtgcctatgtaggtgcatactgtgttataagcagcttggcacgcttgaatgtcgtttccaagggcaagagatggtcttctaatgccgaagtgagaccatatgggacgttggataatccccttgatatctt

SEQ ID NO: 108252 - DNA, 366 bp, Zea Mays
ggagctcttccattggtaactgttcctcaggaacacagagacacctcttaagttgagacacatggaatgcattatgcacatcagatagattatcaggtagctcgagttgataggccatctctccaacttgcctaaaaactctgaatggtccaataaagtgaggaggcaatttgcccttaactttgaatctcctcattccacgaagtggtgacaccttgaggtacacatgatttctttcctcaaattccagtggtcttcttctattatcagcatagctcctttgcctggtctgagctaccctcgaattctcgcgaattatatggacttgttcttctgcctcttgaatcaattcaggcccaaagaatt

SEQ ID NO: 108253 - DNA, 652 bp, Zea Mays
gctgaatgatctcgcattgcacagtccaagaatccccaaaaaaaccttctgcttcagaaaagacaatgaactgagggacttcttcaagcgacgtgacaccaccctaagcagagtcctagtcacattgtgcctgtcctcctcccacacaatcaatctgtcgaatgaaccaatgacagcttgcaagtactctaaggagcgatagtccaagggaaaacccaacaacatcaaccaacattcacggttaaaaaagagggccatgtgattccaggcatcattatgccttagcgtagtaaaagtagcatccaggtattgctgaggcccaagaagaaccaggttatctctttccagcacactataaaactgcaccaaaacctgacccaaatgagagcgctggatgtctctcaccccaagccttcgatgctcaactagatattctctaaccacatctctaactgcaggaaaaagaaccgcatgatccggtaaaggttgaatatttaagattgcccagtcttcatgcattggtgggagtctcctagagactgacctggacatgatttcacggtgttgcaccaccatggcgctgaagccagatggcaggaagggctccggatcgacccgccggtacaacattgtgggagggaccgatgctcgc

SEQ ID NO: 108254 - DNA, 915 bp, Zea Mays
ctcagccaagtagcttagcagcacattaccatcacagctaaaatcagtggtgaagaccgagaaatgcagacccgaactgcattcaggcaactttcgtcccaatgttaccaaacaaaatcggtatcaggggtggctgcagtatgcaactttcctactcaaattgccaagaaacatcaacaccaaaaccgcagggactagaaatccggaaaaactacaaactagattcttccagaaatgcgagaaggagcctaccagcaccaactgactaggatgcgcagaaaacaccaaaaagaaccaaactttgcgcatgaacgagaaaggttcgcgtaccatcacagctaaaatcagtcgtgaagaccgagaaatgcagacccgaacttaattcaggcaactttcgtcccaacgttgcaaaccaaatcggtatcagcgtggctgcaatatgcaactttcctactcaaattgccaaggaacgtcaacaccagaaccgccgggactagaaatccggaaaatttactaagtagattcttccagaaatgcgaggagcctgccggcaccaactgactagtaggatgcgcagaaaaacagcgaaaagaaccaaactttgcgcaggaacaagaaagattcgcgtaccacaagctcctggtggagaccaagcgtcagctctccacgcgccgaaggcaggaagagctctcctgcccctgacggcttccgcactccctacaagatgggatccacccggcctccggccggagcgccgccggccggagcgccgccggaaactgggaggccgccggctggcgtgcaccgaggatggatggaatcaatgggcttgccagctcggctcttccctctctcgctttctcaccttctgtgctgttgatcacggcggatgggctccccctgtttgttctttcc

SEQ ID NO: 108255 - DNA, 282 bp, Zea Mays
gggttatggacacttaggcttcgagtaccctgattatgaaaacattaaagaagaagctaggggaatgaagaggaaaagggttgtgagcatcatgaagaggcaggctatgaggtccattgaagataagaaaaggacactttcaaagaaacgaaaggtctctagcgaagctgaaacttctaagtcagggccaaaatctttgaaagtgagccgtgtagagaagaagatacttgttcccttaggacaggtccttgaaaccccttcggcttcttctatcggcgtgat

SEQ ID NO: 108256 - DNA, 458 bp, Zea Mays
gtgggtcacacagttgctttggaatcatatagtgtaccatttgtaccaatcttggcttccctctgcaggacttgggcttccatttgtactcaagcaacaaggtcatatggacatttcaggggagtttctggctcatgcccatgacaaaagttaccagggctctagggaccaccggtgttttcctatcagcaacctcaagccaggtgggtcaagacccacatgtgttctggtcctaccttgtgctgcaagaggctgcacagcttgttgccagcaaggataacactggtggcagcatcatcggtgatccaacgcaggttgccgagtgcttcttgtacttactggatctatgtctcatgggtcatcacttcagaaggactggttgttgttgctcagtgcagcggcccacgcaatgaggaggtggagggaggaatggcgagcagcaaggtcaccgatttggg

SEQ ID NO: 108257 - DNA, 693 bp, Zea Mays
ctccttctgtgcttcctctgctcccgccaggttgctgacatctcctcctcctttacaattggcttgtccccaagccggtgccgatggaaactgcattcgtatctccagttcatcttcccacgtcgccagcgatgcgggccagccggaccagcgcacgagaagctgtgggatcaccttgttgccgcgccgagtgagacgggagtcgagcacttcttctgggatctgcactgcctgtgacaggtcaggaataacagaactgacaggagtgtttgcacctatcgccggcttaagttgtgaaacatgaaagacaggatgaatagcactgttagcaggcagggcgagctgataggcgactggattgattttcttgacaatctggaacgggccgaagaagcgaaatgccagcttgtggctcttgcgttctgctactgaggtctggcaatacggttgcaacttcagatacacttgagcacccacctcaaatgtctgctctgatcttcctttgtctgcttgccgcttcatcctctgttgtgcacgtagcaagtgcattttgacttgttgcaacatctcctgcctggtgtgcatcaaactcttcagatccaaaacagtgcactggtcggcggtgtccaagccaaagtgagatggagcatgaccgtatagaacttcaaatggagatttacccagtgctgagtg

SEQ ID NO: 108258 - DNA, 421 bp, Zea Mays
agtgcttccgggatgaatagaatagcggctaagatgtgcttcatcaagaatctgctggcggagctcttcattctttggcactactatgcagttattaaaccatacaacaccttgattatcttctttgaaacatttggcttttccagcccttatcttttcacgaatgtgtttcatgccttcattatccttttgggcatcaattatcctttgcaagaggactgactcaagctttagctgattcaaagttccttgttggaccattcccaggtttagcttctccatctcttgacataaagtgttgtcagaggtcttcattgtaagacaatgacaaaaaaccttacggcttaatgcatctgccacaacattggctttgcctgggtgataatggatttccagttcatagtccttaataagctcaagc

SEQ ID NO: 108259 - DNA, 356 bp, Zea Mays
tgaggacctcaggatgatttatgtccgagcaataagtacagtgcctctaatggtcatttcattagatttattatatgcaaaaataatagagaaaaatttaactgcaaggttcgattagtaaacataatagagaagaatttttgctgattactttgccgttgattttgtataaactgaaccaatgaaaataagttgtgtacaagtgcattccactatcaccattttgtatctaattttataacaactgtgatctatttccaacggtgataattaataagtcgtttttctcactacgtttctaaatagtagttctgattacaagtgaggaactcaggatgatttatgtcccagcaata

SEQ ID NO: 108260 - DNA, 491 bp, Zea Mays
gccaacactctccctcactgtcccccttccgaccacccgtgcggccaggaacagggctccaaggcggcaccccccggtgagcaatcgaaagcgcccatgtgacccaatttgacctaggcacggtgtgtatgatgacgaaggggggcgaacacgaatcaagagcattacctgcaccaggggctatagagatgcccgaccatggtgccacgtcggctcactgcacctgccacaatccggcaagctgcaccctagctgctaattccctagagcaaggactcagacacctttggcacgctccagtgaacaccgaaacgcatgggacaaggtccagtcgatagcgtggccccaggtctgtggcaagcacaggcacgacaatgttccgccctcaattactctcaacacgcacagtgcttgcgttgatctggatagatgggcgaaacgatcatgaatcccaaattatatagcgtggagcccgatacgcccagccagag

SEQ ID NO: 108261 - DNA, 811 bp, Zea Mays
ccacactccaaggtcgatgaagctcgagacgctgctcgggataactctaaccccacatccggaatgccggtgcaaacgtccatcataccaccatatgttggctcggacagcagatcttcaggaaccatatcctcgagagcctgatcaaaatttgctatggacaactcttgcagaccaacgagtgcagacaaggctggaaaaggaatatcactactccccccactgactaggtagcgccgactgtttttccgaattaaggggatttcctcctcttcttcctcatcctcgtcaacaatacgaacaacacacccattggggtcagttctggccggattgcacccattgggatcagcatcgtcaaggtcacacccattggggtcagcgtcagtagggtcacacccattgggatcagctccagtaaaaagttccactggcacttcctcagcagcaggagcagaagggccggcatccttattcaaataggacactcgccgaagcctcctctttttcttattcttcccctcggcaggagcagttggatgactggtcgggcgaaggcgctttgggcgagcatcatcagttttttgagcagtcaatgtcttttcaggctcggggacagttgcaatagctatagtttcagcagggacggagtcagatgaatcctcaaccaacatgtccagcatggcacttatctccgcatcactcgggtttataggcatttcaaagtgaacttgcctttcatcgttggggagatcaccaagtgaagcaaccagagcctcgacttcttcgggagagggtcgtactctaagac

SEQ ID NO: 108262 - DNA, 416 bp, Zea Mays
gtgaacaggtgtacaggcaagcctttggtcatgatgttcgtggtgtgaaaggatcttgatgttgcctaaaggggagttgaataggtgtttctaaaatttcatacagaacaaactttgcagcggattagatagtgtcagaatttccgactatgggttggaacttccgatggatatcgaaggttcaagtcggaattttcgaccttgatagaacaaagcgaagtgaagttacgcctaagtagttttagctcagaccaaacttgtagatatgtgtttggagatgtccgatagctagtccacaaagcacctgcactcacaaacacgcacaaccaagtaaatcgagataaacaaaaatattgcaatgtaaaagtaaatctctactcctataatacatgagtttattcatgcgtcactccttc

SEQ ID NO: 108263 - DNA, 724 bp, Zea Mays
tttgtaccagacaatttcattttgagctcagggaaatgaattagttcatcaagcttttcaggagaagggaactgcataatataaccctcttggcatttcttaggtttccacattttccccaaggaaaatgatagctaaaatccttttcaagatcaacaacagagacttttccttctaggaccctaatcaaaccaacacattcatgcttaggttttttgacatgggtcttagcacactgcgaggaaaagaatcctagctcatctgtagctatccccaccaccagcatcaacagcttgctttgcctaggccagacgcatctggtagtcacatgggtatccttgcgacatatctcacaccatagagacttagagcagtctctagcgtgatgcccttcttccccacacttctgacaaaaaaccttctccccatgtcatgatctaccactggaggggagatctgagagttagggttaccttgcatcaacatctctccggatgaagacgatccaacgaagtcgcccttgactggcatccttcctataggtggcttcaatctccagctcaagttcctgttccttccccattgttgctgctcttgaggactctccttattgttgccccgctcccacttctgagtccagtctttcgcctccctcctctcggccttcagcaacgaccgagaaatcctgaatctgagacgaggccactcctcacggcctgaggga

SEQ ID NO: 108264 - DNA, 429 bp, Zea Mays
gaaggtgccaatatatttcatctcaaaaatattgggtccatccattacacagaaatagagaaggtgttatatccagtacccatggcttccgaaaagattcggcattacttccagtcatacaatataattataccttcatctcaaccattgaaagacatcataaggaataaataatcaatgtgaataatttgaaaatggacagcagaactcaacgagtttgtcattgatttcatgcatcgatcatcagtttagtctcaggcgttggtagacttcatcgtcgattggacatcaggggcttaggactaagcacttatacgagacaaaggaatatggacagtcttctacgatggatcttggggtaccttcggcataggggccgctgcaattctcatatcaccttcaaagatgaagacttcttacgcacctagg

SEQ ID NO: 108265 - DNA, 1551 bp, Zea Mays
gtcggcgccagctcggccactagcagggggcaacgtggtggtggttcccgtccttctccttcccttccctcccccaccgggccccagtccccttcgcgctgcctgcccccttcgatctcctgctctctttccccttctctctctatctactgttcttgcttgagctgcgatcctcttcctgaggcgcgggcgttggatgtgatacgtggttggctccgcgccatctcctccggtggcgatgagctccaagtccacctgctgctgcttatgaggtatggtgcttgcgagacttgtccatggttgcttgcttcgttttgcttagagatgctctcgccggggcagccagttgggctggtatccaagcaacctaggattggtagaattcgagcagtttctaccagtttccaagctatgtgattaaatcattaaagtgccttttcaaaattatcttctccatgtagagatagagatgtattttcagttcatgagttgtacagttcctactgaagggagacctacaacgtgctgaaattctgtgttcaagaccatgttttttttattttattatatcaactataataaatttgaaattactttcatggaagtgatttagtggagtaatctagcatgagggttagttccagtggaaattcatcaggagtgtatcttgttgggatcaagtctgtatttcctttcggtgagcgtttttttccggtccatcatctataacaacctacgatcttgtttcagatcttgctgaatgaattttgtggtttttgagccatcctggtaaaccttggcatggccagtggagagacaaacgcagggaacacccagaggtgtgcttatctcatctttaccttgaaacacactgtttgttttttctagttctagttactactggaaggctcttcagtgtttttttaaaaaactacccactgatgtgctaactgcgagacttcaagatttttgtttacagaaatcttttgctatttaagtagctgtcagaaatcttgggagcactactatatagacattttaatataaattgtgagtgctggtagccttatcttgtctttctgtttagggggaatacccttccaaatggtgacatctatgttggcaactttgctggtttagttcctcatggatttggaaagtatatgtggacagatggaactctttattatggcgagtgggatacaagcaagatgagtggtagaggagcaattcagtggccttcaggtgcttcatatgatggagatctttgtggaggtttcattgacggaacaggcagtttcaaaggagttgatggatctgtatataaaggttcttggaggatgaatagaaagcatggaatgggcacaatggtttacgccaacgatgatacttacgaaggtttatggaatgagggcttgccagatggatttggtaaatatacatgggttgatggcaacatctacattggactttggaaatctggtaaaatgaatggcagaggagtgatgcaatggacaaatggcgatactcttgactgtaattggcttaatg

SEQ ID NO: 108266 - DNA, 342 bp, Zea Mays
attaaagagcatcggatttttgaagctagaaaaagacattagctgctacagaagacaacatgttatatgcagcttgttctactcaaattttaaggtataactcctctactatttttccttcgtgaggctgatttaagcatttcattaatgaagatctaagtcaatttgtccttcaatgcttactgctgagcaaggctctgaagatgcagcaagatgacgaaaacagaaagaatgagtttgttatcaacggcttggaaaaaaggattgaagaacttgaaaatttgttgaaggaaaaggacaacttgctcaactcaaccgaaggctctcttgatgaagctcgag

SEQ ID NO: 108267 - DNA, 459 bp, Zea Mays
tccggtcttggcatgaagtataagaagtttgatgtgtgtgaagataattgcatgttgttctagaaggaatatgaagcggccacccattgtcagaaatgcggtaaatcaagatatgcggaggtactaaaagaggatggagctatttttgctacaaaagtggcagttaaacaacttcgatatatgcccatcactccaaggcttaaacgtctatttttaaccccagaaactacgaagctaatgttgtggcataaggaaggagactgtgatagccaagacccagacattatgatgcatccatcagatggcgatgcttggaaggctctggatcattttgacccagaatttgcaagagacgctaggagtgttcgtctaggcttgtttactgatggtttcactccttacggcaacagttccacttcatactcttgttggccggttttcatcatgccctacaacccc

SEQ ID NO: 108268 - DNA, 341 bp, Zea Mays
gaattcttcaactagatattcttcatgcacacatatagggggagctagagctattcctacactttgagtttcctgtgctgacttatcaacactttagatgaacttttaaaatcatgataactcactcaaaactcatctcgaatctttcttatacccaatatgtaaggaatgtttgaaaaacaaaatctacatttctatgaaatatacaatgttgtcatcaattaccaaaaaggaggagattgtgaatcatctagagcccttagtggtgttttggtaattaatggcaactgcttgtggactaacagttcttggagaagtaataatgcaggattggaccacag

SEQ ID NO: 108269 - DNA, 633 bp, Zea Mays
gaggatagttactatagtcaatttgtagctggttggttgagcttcaactttgttagagacggattagtaagtattcacatgaaaatttgagatctaggctctgcaaagtggtctgtcaggatgactaaatgagaaactgatggtacagtatcgaaatatctgaggttcagttcatctcgccgctggcgaccacacgctcggattcgcaccagacgctacgattcgtgctcaacggagtactgatagttgcttggggtagtaaatatcgccgtgtggatgaacttgagccactgtttcactccagccgccgtgtccgcctgacttatggccaattcgaatgaactcaccagagttagccacctatcgaccatgcgccacgtgccttggtgtcttaccacgtcgcagtagctcgtattacacacgtccagtgatcgccggtgagctcaccacggtgaaagccaccaatctcttatgacagtgctctcctctctctccgaccgccaccacgccatctcaaattcacggtccaccgctcggggatcctataaatagagcatgtcgttggttctgcaaggtagtcaagcaaccaatacacaaactcgtgcctcaaatcgtccaacagagctcgccaat

SEQ ID NO: 108270 - DNA, 727 bp, Zea Mays
gggcccaccaaattgtggggctctgagcatataaataggagtctgtattgtgagcatttttcatgctatttcgtttgcttacattgcgctcataattttaacctttcttggctcatcgtgttcaattagattttaagcttcggcattctagcaaccattgaccaaatggctgatgaagtgaaggttgttgatcctgcgctggccggattatacgaagctatggaaaaaaccaacgcagagaagattgtgaatgagacattggctggaatatctgaaaactccagtgatagtgaaagcttcaatgtagaaaggagaaatgaagatgccaaagatcggccctggagaccaagccatgttgtcttcgggaaatcaactattaaacaagggcagatcgatgcaatgagggggaggtattttcgtgacatttcaatcatgagggctaaaggggagaataatgttcctcttcccgaaggtgacgaagtggtggtttacagaagcttcataaaagcggggcttcggttccctctggataaattgctggtcgaggttctgaaaaccttcgaaatttaccttcatcaacttactcccgaagctatcatcaaggtggggatctttttatgggccatgaggagccaaggattggaaccagatgcaagatgcttctgcaacattttcatgagttgtcgtatgagacgaaggctaccagaaacgagcagtatcacaacaa

SEQ ID NO: 108271 - DNA, 754 bp, Zea Mays
cttatgggttttgctgactggatcaagagatatggaggggtgaagttgggtttgtctcactcctgaacttcaagagaagatcctgggtttgacgtgtctagggcacgcatcctgatgccatcttcacacacattgcagaggggttagtttagaacaaagttgtcaatgggggcttaaggatttgagctagggatcaaggtgaacgcgctcaagttctaggtgaaggctgaaattcagaaatctgaatttcagattcccgctagggagctttcacttggagggcctttttggggtttttaataaactatttgggccaaaattttataacaattgttgtagtttagttagtgtatttcaactttaatatttggcctaagccatgattccatgttttcatggtctttttacccatttctttctttccacttaagtggctcaattagggttgatctagggcttcaacattttccccctttttaaaaacaccatatgatttaggcatgatccttaagataaaatacttagtggagcttttattctcaagttgattggtgtcttttgcccaatttggttcacataaaataatggttcttgagttagcactgagaagtaaccctaagtgacactggggtgtcacatattacatgaaattaaaattcaatccttctaggcttgtttttcatacaaaaaataaaatggcaggaaagataaagatacaccaagagtaggatattttcttaatagatgtgcttgg

SEQ ID NO: 108272 - DNA, 602 bp, Zea Mays
gtcctccattaacggccccgaatggactgagggattaattgaccagagtgaaggatcaagctctcctcgtacctagaagaagaaattcttaccctaaggacctaaaaggttcaaagtattgaggaaaataggcaaaactattagaacgaaccaaaggaaaaatgcatgtattgtcgcccatgaggacgatttctagaaggttccccaactaagagaagctcgtcccccgataatctaccttgatctatggctgagaatagaagataagggagagcagaagtcacaagtgcaacaccctaagtgttactcagggtttctactcagcactcacaccattgacctatcatcacatatggtttagtttgagaaaaagacaccaaacttgagaaccaaggttctaagtgagtgttaatcatattagaatacataccttagccatttcatgcacataaaaaggggagaagtgcttgaaccctatgtccacccactttaaataaatagagcaccaaaagaggataagtaagaaggcaatgtaaatagcattatcatgacttgggctatttataaaagttgtagctcaccaaaatacctagaataaatag

SEQ ID NO: 108273 - DNA, 515 bp, Zea Mays
gaaaatctttcgcctacataattattcagaggagaagaaacttgcaatggcatctcttgagtttgaagtatatgccctgatttggtgggagcaacttcttcgtgatcgtgaagaagatggagaggaccctattattacttggcaagagatgaagcgagaaatgagaattcattttgtgctgaagcattattggcgtgatctttttgataaattgcagaatttgaggcaagggagtttctctgttgaggagtattataaggagatggagaaggccatgattagagccaatgtgtatgaagacgaagagcaaagcattgcatgtttcatggttgggttacaccgcaacattcagcgtattgttgagtttcagccgtaccaaagtcttattgatttggtacatcaagccaccaaagctgaacgccagctgcaacaagatgctaagagcaccaagtccttgtcatatggtgcacgaaccatgactggaggaagcaaatcaatctcaaggtttactgctg

SEQ ID NO: 108274 - DNA, 317 bp, Zea Mays
gataagcccttaagcttctattccttcgcagaccgaggtccacgacggcgctccgcacggcagagctccggcgagcccgtagaccggccggaggaggtcaagactggtgctccgcttcgacctaaaccaaattcattacctaacaaacgtttcccctaatttaatttgaagaatggtgccctattctatcctacccacgagaaccgcgaaggccatgagcatttgatcgcgttcccgacgattaacgaggttctagcctaattggacgggtcagcgatcatccagagcaagtgagaatgctgaaacaagaacgcaga

SEQ ID NO: 108275 - DNA, 401 bp, Zea Mays
atcagtaacaggcttgaagccatggtgtcctgaggcgatttttctgaatgccgagggcctgacctttgaaccactgaacaatattcccccttgcttttttccttcccgaggtgagttgcctgaggtagaagacgccttcttctggttaactactgcagaaataaaggaaggagggacagagggaagagggcataccttttgaggtggaatgcgaaacgacgctcaacacatttttcttggagggggcacgaccattcaatgcgatgggatgtcctgtcgatcagccgatcatttgcagcgcgtgtgcacgagggattcgaaatgtccatcgtatggccgttacgattcacaccttggtggcttcacccatccctataaattcgcccaagacggacgcttca

SEQ ID NO: 108276 - DNA, 294 bp, Zea Mays
tccagtattcaaagttccttttacaaaccggagtatgcgcttgacagcctcccagtgtaggattgtgggtttggagaggaactgacatactttgttaactgagaatgacaagtcaggtcgtgtgagagtaaggtattgaagagcccccactgtactccgatagacaaaagcatccttgtctgtaagaggtttcccaattgctctggataatttttcagtggcacaaagaggagtggcaactgacttacagttttccatatgaactcgactaagaatatctctagcatatttctg

SEQ ID NO: 108277 - DNA, 795 bp, Zea Mays
cccattcatcagattccaagggttcctccgccttgacgaaaagcggtgggcgggtttcggagaactccagataggtagtgtctggtggtccctgagggggaactctccctccatgttgttgaaattggttgcccgccatttcgcgcagaaagcgtgtgttgtcggcggtggcgttgaccaaggcagcgatagcctcggccatgttaggaggtacgggtggtggattgggggtgtcctccccgccgcgggatgtacctgtcccatcatgagcacgggtccaggatggcatgtgaggcaaagaaacatttggaaatataacatgccaaacatacaccatctttatttcattgcggaacagtagtaattatacatactccattatacaactcgactttcttccttattttacataagtacattacttaaactatactactctaatcctctccgtccttagttgttctgctgcctacttcaggagaccgttcatctgcaagattcatggaagaaggggctccaaaaaggtcaatccccccattagatcctccatttgttgttatagatggtccaactcccattgctaccacatcgggtggcacatttgggtgcagccgatcatacaataaatgcacttcttcatgcaaggtgttgcagtacgcttgcaggtttttgagggatgcactaagttctgctactcgagctagagctttggcttcacagtcccaagcgaaagagtgtgagtttacggcccagtcaatggccgtatcgcgttccgaaatttcgtactgcaggcga

SEQ ID NO: 108278 - DNA, 505 bp, Zea Mays
ttatgatcggtgtaaatgtcacaagcctcgccataaaggtaatgcctccacgactttagagcaaaaaccaccgcggccaattcaagatcatgagttgggtaattcccctcatgcttcctcaactgccttgagccataagcaatcactctgccttcctgcatcaacacacagccaagaccaatacgcgaagcatccgtataaactgtgaaacgcttaccgctctcaggcaaagctaggataggggcgtccaccaacttgctcttcaatgtttgataactgacctcacaatcgccagaccagacgaagggaacacccttctccaagagtctagtcaaaggcttagcaatgctggaaaaatttggtacgaagcgcggataatatccagtgagccccaagaaactttggatttcagagacactagagggtctcttccactccaccacagccgcaacattcttgggatcaaccgcaatgccctgttgattaatcacgtgccccaggaaag

SEQ ID NO: 108279 - DNA, 800 bp, Zea Mays
aaagagaattaatagaagtgatatattaaggctctaagggtagcctgccgttttgccactgcctccctcctgcgcagcaaaaatatgtggcgatcaggaattgaactgtgaccaattcgctagaggagcccatgcttaaccaacccaactacagttgttttgtgttacatgtggtcgtttatttgttttacagccgaacgttgtttttctcccaagtctccttttgactctcacgcgcacaacaacgactccaaagaaaccgcacaacgacgacgaagtctctactacttgtttattacttgtctcactaccatctcagtataaaatcagtgggctgtggcatccactgaaacttggttaccttccaatggaggtaaccttagtggctataactgttacccttgctcttttctagcaaagctccacactataacttatccatgtctaacctttgatagcagaacctatgtttctaatgcgtgcttaaaaatctgagtttacttaggcctacaaaatagtgaagggacataggtaaagagattaaaccagagtcagataagagctcttttagaggagacatgctagcgcccacatgattgggagtgtgacattattcaggtgatatgtttcagttctatttgggttctcctttcctttgtgacttcattatgcttatgcaaatgacaaccttttttgtgcccacaaatggtgaatcataactcttaccatgaagatccatattctaaagagtttggcattaatatcagtgagcgtttggcttcaatctaggcaagaatttt

SEQ ID NO: 108280 - DNA, 397 bp, Zea Mays
attggcaagcttcacacctctagactaactcggttgcattactctttgccgtcggccagtagaaaccagacctgaagaccttcccaaccagagtcctggatgctgcgtgtatcccacactgtccgacatggatctcatctaacagttgcttcccagtagccgaaagaatgcacctcatgaggactcctgttgcgccccttctgtacagtgtatccccaatgagggtgtagtgggctgactgtcttgcgatgcgttctgctgcagctttatcatccggctcctcttcgttttttatatacttaataataggctccctccagtcattagagtctgactctggctggctcaaaacattgcactcttctgcccgatctaaggaaatactcgggcgtggtac

SEQ ID NO: 108281 - DNA, 271 bp, Zea Mays
atgtcgaaggttctattgggtgcacgagcttcattatcagacgaaggcaagagccgatggtttgcacaagaactttgggtgctacaactttgcataccgaaaggacactaaggcccccatgattggctactgcaccaaatggtcgaccgggtggacaaacgagtggttttacgtgaaggccgatgagaagaaaagggagaagctcatgagcatggtaatgagtcccttgagactgaacttcgttatgactcgacccttgtgcaatatgcag

SEQ ID NO: 108282 - DNA, 352 bp, Zea Mays
ggagtcccgagagaactggccgagcacaaactgaaggtttagccccaggcgaggccgatccgacaaaaattacatcgtttcacgcccgacaaaagagaagccatccgtgcagagctggctcgcttggtcgcagcaggattcattagagaagtgatacatcttgagtggttagcaaatcatgttcttgtactcaaaaagaataaagtggattggcgcatgtgcgtcgactatacggatctcaacaaacactgttcgaaggatcccttcggacttcccagaatagaccaggtggtagactcgaccgccgggtgttctatgttgtctttcttagattgctattctgggtatcatc

SEQ ID NO: 108283 - DNA, 453 bp, Zea Mays
ggaagtgttgtgtcgatggtcacgacgcgaccccgagcactcccgctcgcggccctttgatttagatgatgtactgcaactcagttttattcccttttgcaatttgctacgctgagttgctggttgtgggttttgatttggttgagattttgtactgcatcttagttttagcttcaattatgaacatatccgtataggttgcgatgctgctagtttccagccttgttgcagtctactattccaaggcaatgatggcccttattaatttaacaactgtttcttgtgtgctgctatcagtctggggttcatccatgaattatgttagattttatcaccctctcttggaatgttagggggctaaattagtaggcacaccacgatgcggtgcgtgaattgatctcagccaccacctgccaccttgtctatttgcaagagactaaattatcaacaatc

SEQ ID NO: 108284 - DNA, 515 bp, Zea Mays
cccggatgaccatgactcgattatagcccacatgccgttgaagaggcattgatgggttggtcgtcaaggctccacaagccagtcagctgagcgcgaccagaagcaagctagaacgacggttgcgtggatgccaaggcgtgtggactagatcctacgcttgcagagggtgtgacatgctcctgaggactcgctgacttccatataggtcggagccagtttcagatcggcaacgaacatgggcttggtgcatgtaactctgttctttcgttggcataaggcgaaaggacaacccgtatgaaaacgacggacacatctgagtagatatagtcatcttctagctctagaactctctgtaaccaagaactctaggcaatacaactccataaacacacatgacgtagagtgtcacgcgcttgagtggctcgaacctgtataattctctgcataccatcgtgcccacacgaaccatcgagctgcaattgactcgccgccctcccaaaaccactatgtggtac

SEQ ID NO: 108285 - DNA, 301 bp, Zea Mays
gtactgttgcattccaaccagagtaagaggtaacttgatatctctgatccactgaccattaataagggcttgggccaccgttctagaggaggtcaacttcttgtacacctttcagaaaactattagagctaaatccttgatggaattcccgctcaaccacctatctatccaaaagagagtatcattaccgtttcccacatgggaggtcactgaaatggcaaccaacgccttgacttgaggctgtacagggatatcaagaccaatccaggacctgttagggtcggttttctgtagccacaac

SEQ ID NO: 108286 - DNA, 413 bp, Zea Mays
attcaaacacacaaacattgcatacttaacctttttcatcgctttgctccttttggcctgtttgaggttggggttggactccaaaactccaagtctgcatgacttgatcattatagtcatctatgagcttcaacaccctgtaatggtcaacaagaacatctccaaacaaagaaatgacccaaaactactagttaaagtttacttagctctttggtcccttctagtttctgcctttgatacttagctcgttcgtgtgtcaatgtctctacttcagctggatctcgagccttatgacttacaccatttagccatatgcatttccttaatggttgtaagtcacgtcagcatatctcggtcttcaatgcagcgagactctttttagcttgaccaaccttgacttcttgtaagccatc

SEQ ID NO: 108287 - DNA, 979 bp, Zea Mays
gtcaggagacgtctccgattgagagcttgggctcgctggttcgccaagctcgtcgaccacccggaatgcgtcgcatcgtcatgacgagcaagatctagcctattgggcgggtgtcgcgacgacgatgacgagatgatggggggcagaggtgccaagaaggggcggggtcaggcgacatcgcatcgagaaggggctgcggtgggagcgtggtatatcggggcaggctggtttgggtggcatcagggatagtatggccgaacggatagttgtgacgactgggccgatccaacgaggaggtccatgacagggttgttttagtcttttaaaaactttaattttttctacacttaacagtaaatgattattagatataagagattatacaagattgagtcggtaggagagtgagtggcatggaaaggtgttgaatagttggcaatatcttccacttcgagctgacatatgggcccaagctaagggaagagtgcaactcacttaacagattattagctagtattctctttctctgtcaatggggatgtgggtgatggagatggaatgaagctagatgccaagaaatagaactacatagatatatagggactatgtagtacgtacgtagtatagtgtgggtggtgagctagcttagagcgatcgagatagtagtaggcgatgcatcccaagcgatgatcgatcgagttccagacaaaagaaagcatccaatcaaacttcttctcatgcatggatcggaagaaagaacaagcaaagaaagatgccttgtttcttgagctgcccctgcctgcatctgcatccgactccgacgaccataatgcaagcccgtaattaattaagctgcgctgggaagagctttggaggaaggcggagatgacaaactgacagggacacggattgactcactgatggatggatggatggatgggattggacggcagctggctgccttggcccacttccactg

SEQ ID NO: 108288 - DNA, 418 bp, Zea Mays
cagagacaaaacagcttccttacggaggccagtagctagcatacaaaaaagaatccatcaaagataaacaaggaaacaccctagaaatcagttaatggggcagccagagagcataggccttttgccccagctgtttcccaacgacttctcatcagcagatgccaagattgacgatagacttggcgtccttccgtcgaagacacatttatttcgatgattccatattgtccaagcgcccagaatgataagggagtcaagaccttttttggtaaggccagaaaccacatctgaaacctcttcccaccaactccagaaggaggtgacagtcgactgagaggcaagggcgtgcagcccaagttttctcagaagctgataaccgaaaattcttgaaaaagaacaagtcacaagaagatggtcc

SEQ ID NO: 108289 - DNA, 393 bp, Zea Mays
tgatcaagcaaaaggcagagaaatacaagtgcttccgtcaggacagcaagggaattttatggtttggagaccgattggttgttcccaaggaccctgagctccgaaagaggatattggatgaagctcacctttccaaattctccatgcaccctggtagcaacaagatgtaccatgatctcagaactttatattggtggaccagaatgaagagggaaattgccaagtacatatccgagtgtgacacttgccagaggataaaagctagtcacttgaaggcggcaggccctttgcaaccccttcccataccatcttggaaatgggaggacatttgcatggatttcatcgtaggattgcccaatacctcaaggcaccatgattccgtttgggttattg

SEQ ID NO: 108290 - DNA, 459 bp, Zea Mays
gcctccttccacaacccaggcgcattgcagtaggtccgccgattatgtgcgcgggtgtaccacttgccaaaagaacaagatggatcatctacatcctagcggtctcccgcagcccctaaccatccttttggaggtttggagcgacatttccatggattttgtggaaggatttccacgtgctggtggcaagacagtggtccttactgtggtggacaaattctcgaggtatgcacacttcatcgctattcggcacccctacacggcagcgtccgtggccaaggccttctttgatgacatcatctgcttacataggctccactactcaatcgtcagcgaccgcgacacaatctttaccagccttttctggaccgagttgttcaagttggctggtgtcaaactaaacatgagctcaacattccacccacagcccgacggtcaatccgaagtggtaaatcgggt

SEQ ID NO: 108291 - DNA, 525 bp, Zea Mays
aaactccatatacacaggagtacacactgaacgataggttcagtttggcttttgtgcatttaatagaatattgaggcattatactatatgggcattccttcccctaatgccgagatgttctaaaagcatacagataaaatccccaaccgcaatcatccagttgtggccagtgtatgctattgcttgtggtgatttatttgggaaatcttacgcacattacagataggggttttatgcagtgaggtttggacttagattaatgcagtggcatgaatacttcatcattttccttcaatgtgaaggattagtctcaacttctagcaagacacgcaacaacaagttgctttgtggttacaattctgcaaacttactgttattgttaccaaatacacagtcaatcgttaatatttagactgatatgcacaacactatgttatccataagggtccttcaggggctcatgcataccattcatcatttggagctagtagttgactttagatcaacaagtaaaatgaccatcag

SEQ ID NO: 108292 - DNA, 341 bp, Zea Mays
tttgtttagagtgtagcctgggtggtgttagcaaaatgtttgaactggtcagtctttagtagtggtggtcagaagttatgaactgatgtggtgcagatgttccatggttgatacctgcttgaaaactagcattttacctgcctaggtgcttaacttggaatgagattgtgatggagccatgaaattttgcctagacgtcatcttcctttccatgaatatatctttggtaattatttttggtgcctggacatatttttatggtgcctggacatatatctctgtccctcttgtggtaaaatcaagggatggtaaaatcaccacttgaacatttcactttcttt

SEQ ID NO: 108293 - DNA, 355 bp, Zea Mays
ctaagaattatactaataaagttttcccccttagaaagatgccgccacgcacaaggctaacggcgcgcaagtcaactggaccaatcggtgtgccccggcatcaactggcccctcgacatgaaaacagtagcagtgggagtaatgaccccataggagatcttgaagcccgagtaagtcgacttcaagcggcgctgcaacacaggaccgatgcttgggtcgcggacggagatagaataaatgaactaagaagggacatccgtcacctgcaggatcagcttgctgatcgggacttagcactcgactgggcagtacagtcccgtttgttggcatgtgctaaggaagcaagggctcaggc

SEQ ID NO: 108294 - DNA, 462 bp, Zea Mays
atctctgctacatatagcaattcttggctttccagatcatctggaaatgtctcggccgttcttgatacacctcagtgcaggccaaagtgacagccccgcaggccacagccaacagaaaacaagagagcttcctgaatgagagctaactatataatgaccagatggatgttgtgagctctgatcatcgccatcctagtcaatgaaaccactggtttcctgagagttcttcacccgatgcagaaacactttgtcaattctcacatttgcagacactgcgaacagcatccactatcttcttccgcgatattggctttgcgaggtgaagatccattccggcatcgatggccttctgcagatcctcctccatgtcgtgcgcggtcaaagcgatgattggagtatgaattccgtagcgttgttcttcctcgcggatgagtttcgtcgcttcatagccatccataccgg

SEQ ID NO: 108295 - DNA, 631 bp, Zea Mays
attgggtttcttctgtgacattgctcttgtccttattgatgaagttcaccttctaaatgatccacgtggagctgcgttagaagcagttgtcagtaggataaaaatgctatcgcgacatgataacatgaaatcttttcctctggctaatgttcgattaatcgctgtttctgctactatccctaatattgaggacataggtttgtaactctttgctgtaaatttttagcataccatttgcattgccatatcacactccaataaagaaagtgatatttccctactaaatttcagcacagtggctcttagcaccccgagaaggaatcaaaaggttactaacacattttattttgaagattttctggagtactcccaataaatttaccttatctatggtatcctccttttgcagatttggagaagaaatgaggccagtgaagttgacaaccaaggtctttggtatgattgagacttcatatatagtagaatcaaactcaccacatgtcaagggctcatgtctgtaacaaatactttacaaccgatgcgatgtaaattcaaaccttcaaacaacttgtaatctctgaacttgagccaaaagttttgccggaataaataaaatcaatcaggtggggac

SEQ ID NO: 108296 - DNA, 344 bp, Zea Mays
gtgctgcagaaatgtggaaagcgcttgaagaaatgtattcgggagctggaaatgttatgttgatggtggagactgaagatcgcctccataatatcaaacagggggagcgaactgtggcggagtatgttcaggaattgcagtgtttgtgggctgatgttgaccattatgatcctattgagctaccacactcagagtgtgttgtttgggcaaagaaatgggtggaaaaaagacgtgtgcttcaatttttaaggggtctaaacccagagtttgagggaagacgagcctccatgtttcatcaatccactcttcctagcctacaagaggcaatagctgctatatcccag

SEQ ID NO: 108297 - DNA, 411 bp, Zea Mays
ctaatacatgcagggcaatgcttatttttgggtgttttgtgcattcgttgtgtaatgtgaacttttaccatttctgaggtcatttttttgtgtatgaatttttgaactatttactgaactagagttgtggctttgtagttctgccactgctgcatacctcttactgtggaaaaggaatgtttagctgtttgatataccaaattcccagtcactgaccagcggggccagctgagtcactgacagggattcggtctgccattctttccataaggatggcaaaatattatttttttcctttgatataatgatagtaccagttgtctccttgtcaatgtaaaccctgtttttgtcatttgattttatactggacttagcattagtgttagtttgtttagttgatttgtgtgagct

SEQ ID NO: 108298 - DNA, 620 bp, Zea Mays
ggggattttgctttttctgccttactttgccatgaagtttgctgatctgccttgtcctcaggcgcgacaaccttcgtctcagtgggcgctgagggcccagcttcggcttggaatttggcaacttcaacaattttcctagtaggagcggggctcaaggccttagtggtttccagcacagcatccagcacgctggccattctcctcctcttgggagttgcggcaggagccttttgcaccttaggcagttttgcctctactggagggctcagaatttctgacattttcattatttcttccacctttggctcttcggccttatcatccttagctttgactgcccgactgtaagcatcttcggcactacagttggctcttcaacgctctgcacaaccagagcaacttgtcttgcttcgatagtcgaagaggcctctttgccaaattcaagcactatggccggttcaatataccgtggccagtgggtcagaaccttcgctttttccccttcggcacaaatgtggttgccgaagcggcagtctttctctttttcctttccctcgtagcgagtagcaataattagggtatacgaagccaatcgcatcaaataccctgttcaatctttt

SEQ ID NO: 108299 - DNA, 865 bp, Zea Mays
ggggattaccgtacccacataggacacccatgagtctatcgtctttgttctcttattgattcgaggtttgggtttacccatttccccctttttctatggccttctcgatttttattctcttaatctgactcacttgaatcccaattacattcttcaatttgccaacttcgtgaacctctatgaagccttgggattagcccacacttcagattgtggaaatatctctaccattggaagatggggatggtgggtggacaacattaggtagttggtggggccaacctagaacatcgtcggtaggaaggttgaatatctagatatccctctgaaggatagcatcaagggatggtgctttaaatggttcactatggagaaccacaacaattccttgcctacccgcattgaaaggcaaccggatatgcatgtacccaagccccaactgactttgaagttgccgaggcgagggttctgttagctgatattgctaacttaaaagaaagaggtctgactgctgaagccatggtgatcgactatgtgttcaagagcatttagcctttgaaagacatttcaccctgaccggagtcagagatccttcctaactaacaaacatgcagatttctagggaggatgtcttgaaccaagtcgagatgatgttgaggggtgccattgacaatgacggtgctcctcgatcttattctgcctagaatcttcctcctcctataagttttgatcacttgatttctcaaggacactcaatgagttattgtatgattcatgatgaccgtactacttcattgttgcagagttgctttactaaatttgtgtccaaccctcccattcgtgattaaagtagtggttctagcca

SEQ ID NO: 108300 - DNA, 371 bp, Zea Mays
ctagagcatactggagaggtccattgagtccttcaataaagtgctcctgcttcctctcatcttcggcaacttcatccggtgcatatctggagagctgaatgaacttatcacggtactcgctgactgacatgctcccctgcttcaacgatagaaattctttcttcttaatcttcatcagtccagctggtatatgatagttcctaaactgagtagcaaactccgcccatgtgatagtatcagcagcatcgtgggaagcagtgtatgaatccctccaatcagcagcaggacctgtcagacgaccataagcatatagaaccttctcccggtcagagcattgggcaataatcaacttcttctctgtagacgtcagc

SEQ ID NO: 108301 - DNA, 432 bp, Zea Mays
gaagaaggattacagtgggagccggcagaactctagcctgaactgaagtaggacaatagtcaacctccatgccaaattcaatggcacgctcagctctactgtaggcattacgctcaacaaactaagaaaaaggatttaatttgtttaaccacagtatagatcaggtaaaacagaagaaggagaaaaagcagaaacagcgagaacctgacgaattttcttctcacgtgtatctgggctctggcaggttaagttcgctagattagagacctgtttggcatccaacttcttgcggtttttctgtccagctactatcctgcaaacctgaaatgcaaatggaaattaagaaacaagagcagacaacatacctccatgcatagggccacagttcaattaagttcatagttggcaacctccatagggaggtagtttggc

SEQ ID NO: 108302 - DNA, 600 bp, Zea Mays
gttcacatgctcaatagcatactgagaaagatagttaaatttgcgaatatactgcatcatagtatcagccccttgcctaagtctcagaaactcctcaagcttcatttgcaaaaccccatcaggaacatgatgagcacggaaagcttctttaaattcaacccaagtaatttggcgatctggaagttgtatggcaacaaagttggaccaccaagtgctggcagctccgcgaagtggttgtgcagcaaatagagacttttatacctcagtgcactgaataaggccaaacttctgctcaatcacctgcaaccactcaattgcgtcaagaggctcttcttctttagcatacactggcggccgagtctccataaattacatgtatgttgcacttctttgctgattttggggaatacgaggcccaccctgattgttttgatgatgagcaatctcatgcaaaaccctagcattatcagcagtggcattcactagggcagcaatggcatctgccagtgtaggtggaactggtggtggtggtgggttgatatcagcttctgcaacaccacgggatgtgccagccccatccgacccacgagtatgcatagg

SEQ ID NO: 108303 - DNA, 541 bp, Zea Mays
gattttataggcctttggatgatttcttttatgtcttctctctcctccaagtcattatttagtaaaactatttcttcatccaagaagctggtcatttgcttcagtatgccagggcaaggtaccgagcatctttccaatatgtgaagttgtagcagtcgaagttattatgaagatgctcctttttagtcgtctttgtattgtaatgaagctcatgaatattgcaaaagcaatcaacatttggctccacaccttggctcctcactgtccaaataaagattaatagcctcaccaagtcattaggagtcaggtgatgaaggtaaatatcaaacttcttcagagcctccactagcatttatgaagtgggaattgaagtccagctttcaaaaagctttggaataccaccacctcatattttttcaggacatgggatagtatcctctccaccaagcctgacaatagacatgtcatgaaaataattgttcttcatcacctcgatatgccccttttcatggtcgatttgcaaaggacaacatgactcggc

SEQ ID NO: 108304 - DNA, 888 bp, Zea Mays
ccgtctagtgacccatcgcggatcgtccggtgtccagcgtgtagaatggcaccatgtggacaacacgcagccacactgcaccacaacaacactaccctccacctttggcctaacaaagccaaagcattccagcgcctaggacggagtaccactcgacgtacaccacacaccatagaataccctcatacatgtaaccgacataaccgcataacaacgcccaaccatccgagcttcacgttttggggtccgttcctacaccaccggctactatgaataaaattcgagaagaaatagcgaattattttgagatagactagggattaacatgtccggctcaggatcgtcatataggaaaccctatgatcgccgatttgacaccatcccatacccacgagggaccaagataccagatttctcacaaattttttgttgaatacggtaagagaacgcacgaggacataggctagttattaacacaactaggggaattggcagacagggagatatttcatgttcgactattttctttgtccctcactggtacgacttttgcatggtatactaccttaccaactaactttattagctcctggggcgatttagaacataaattctatgagcattttttatctgggagtatgagttagagttagttgaaaaacaaccccaacataaattcaaaaatgagtaaccaacattgcgccacctccggtgaactcacgaccctaacagaaaagcatgataagcttcagcaatttgtcagcaagctcgagaaagtttattctccccatcacaggaggatcaagcttcgaaccaaccaacaagaggcagaagaatgaagcccaaagaagagtgcaaaatgtatgggttcagggaacctacaacaag

SEQ ID NO: 108305 - DNA, 611 bp, Zea Mays
caatgtcaatctgtcaactttgtttgaggtatgatacatgaatatgtgtcttgtatattgtgcttattcaagaaatgtggttattgtttgtgtgcttgcagatgtgtgaacctgatgcacacacatctgatgatgagagggaaggacaattgcttgttgccctatatgatgtagacatttgggggagctcgtccagtggggtttctagaagaacaatggttgaaacaggtattcaatgggttgagcgaactttggagaatagtaacgactgctttgacatgtttcgcatgcggcgtactgtttttagacgtttgcatgatacgttggtggaaagttatggtctgcttccaagccgtggtgtcagtacaacggaagctctaggtattttcttgtgggcatgtgggggtccacaatcatttaggcagataaggaataagtttggtcactccttggaaactattagtcgcaagtatagtgaagtccttaatgcactatataagatgtcttcagacgtaatcaagccaaaggacccaaatttcatagagattcaccctcgattgcgagagactagattttggccccatttcaaggattgcataggagcaattgat

SEQ ID NO: 108306 - DNA, 597 bp, Zea Mays
caacctattttatatatagagctcgtggcaatggaagtcccacaataggacgatggaacttgtggcaccaagtgttgttacgctcgggctcgtgctcatcagcaacaatgcactatttcccgtgagggtcactaacaccattgtgctcatgtcgtgttccgtggcaacgcacatgcacatacctagttattattattatatgataaatcggtttgtgagttctctcaatatatacccagtgctgctctatcttcatttcagtttagatgggttttacatctacgacgacggctgacggccgtattaaactattaatcgggccccacagatccagcaagcaagctggactccctggagtcctccccgttgtcctccggtccagtctaccgaaatggtgcaaagggtagagtttacgacccaaacacgtgatccagacaagtaccggtggcccttggcccaagtagagttttacgatttagttttcatttttcttttttgtttgcaagttgcaacggttaccgtccgtcccgaattttttgtattttaaccctacttttgaaaaatatttacgtttggacccctagaaattttatttgc

SEQ ID NO: 108307 - DNA, 481 bp, Zea Mays
tcagggtttgctggtatctagctgactgaattactgtattcaatcgttcttcttctaatatgtcaatatcctctagtctcgtagcttctgcctcagctatgttttcgaagaccagccttggtgccccaaatctgaggtcggcaggtagcacggcctccgatccatagaccatgaagaagggagtgtttccatgcaaagctcgactaggttgagttcttaggctccaaatcacatacggcaactctctgatccactttctcgcgaacttttcattcttgtcgaagaccttcttcctgagtgcttccaatatcattccattagccctttctacctgaccgttggctcttgggtgtgctactgacgcatatttgatctggatgcttctttgttcgcagaagtcaaagaattcagagctagtgaaattggatcccaagtcagttataatgctattcggtattccaaacctgaatattatatcttg

SEQ ID NO: 108308 - DNA, 322 bp, Zea Mays
cgcttcttgcagccttcctgctgctccaaatacacggtctttcccttgacctgcctgaaggggcgaggaggatcctcgtcatctcctccccctggcgccgacacattcttcgtgcgcggcatcctgacctgacgactgcaaatgagagagagaaactaagcacaagttgataactgccgatagaatatcagaagagtgaatgtctacctggaaagctcacacgagaggtgaaaatccaggcaggacaggagacgactcacgggcaggcaaggtcactaaaatgatagaagatgtgagcacgtattagtcacatagtcataag

SEQ ID NO: 108309 - DNA, 574 bp, Zea Mays
gtggtgttgggcggctgcggatgatcagtgctcaacgaattgctcgccggagattaactccgccgctgatttgatgctatcctgtggccagcgatctccgtcgcaccttttctattgagctttctcccatcctgtccgtgttggccttagagtcgtttagcgtgtttcaatttatcaagtagtgcaccagagccgtggatcaccgcacgacggcgggagctccgccgtcgttcactgctgcgccgccgtgttcaggctgggggtagaagatcatacgcagaaccatggatccatagatgggcggcccagattaggtttagcatacctcctagggcattggatctgtgccgttggatcggtatcctatggctcgaaacagatcatgttccattaagttgtagccgttgatctccgatcttgcggctgatagctataccggttcagtaaacgtttggatctaatcctcgccacgaatcgctgatccaacgaccattgctcaccgataccccttcgccgcggctattttgttaaaaagccctcagcgatttaagaaattaacccgccatcctctggc

SEQ ID NO: 108310 - DNA, 290 bp, Zea Mays
gtgatgaatgctatcttcggtatatccgaaggtcggattctaagctgatggtaacctgacctcagatctatctttgagaacacactggctcctctcaactgatcaaaataggtcctcgattcaaggcagtgggtacttgttcttgatagtgacttcattcaaagctctataattaatgcacaacatcttcgtaccatccttcttctccacaaatagcactggggttgcccaaggtgaggtacttggtctgatgtagcctttctccaacaactcatcaatttgcttcttga

SEQ ID NO: 108311 - DNA, 478 bp, Zea Mays
acggtccgcatatccgaccggacggtctgcgtatctgaccggacggtccggcacagggttgattgaggaggattgttacttaaatcctcgcccgtcccagcaacacttcccatcacactatacaatgcatcggcccattaatacagaatcccaagcccatggggggtgagtactttctagccccacttagaaagccggaaaggactggtcaatcctatgaaccatatagggcaaatagtaatgcaccacagaactcaaaccaatgggggggaagacaacaaactaatgtccaaacaacctcatctatgatgggacaaagagccggtggtctcccgtcggctgctattgaaatagtaagggaagaaatagtcggggcgttccaagataagctcggagtaagcatggtccctggggggcagtcatatcggaggccttatgacagccgatttgaccaccacccatacccacagggaaccag

SEQ ID NO: 108312 - DNA, 791 bp, Zea Mays
ccataccgattcactagctgttgattaacagctcctactcgtagaacacacgtcgagtcgtcgatcgccttccgagatttggtttggggtgggggggggggggggtgctttactcaacttgattgaatacttggtcatagcagcagcagtggcctacctaactgagccatacgacactgggttaccccgaacatcaatatgctgctctgagtctggcctacctccagcatcgcatctcctatttcaaacttctctatgcaaacagtgtcatccgcgtcccctattttacacactccactggagacggtctgctcaggatccaaagccttggtctcacgctttccaccaaaaccccaccaagttgtcgaatctgcatccgagattgacagatccttctagacatgcttctcctgcttctgagtatttggtgtgtgctcttagtgttgtgtgaggtacccagtgcagctgcattcaggagctttctagattggccactgtgcgcttgctccattggattggttgaggcaggtcgtgctgctatgttgttttttgtgatttttttttttctggttagcccttcgctgttactttgttgtggtcattttgtacacccataggtttagcatatagccttattgttgtggataaaattgggtgtcggtttagcatatagccttattgtactagctcttttctttgctaaataaatgcatgcaactgtgccctttttcatttgtgatttgttggcacctgatatagctgtgtggagatgtctatgggggtgtttggtt

SEQ ID NO: 108313 - DNA, 449 bp, Zea Mays
ctgacatctgatcgatacacaaaggtgtagcaaccaaagttattatgatactgctcttttctagtagccttggtctgatacgagagctcgtgaatattgcaaaaaacagtcatcatctagttccaagccctggcccctcactgcccaaatgaagatcccaaccttaactagggctttgggagtaagctgaagaaggtatatctcgaacctctttagaacctcgaccgacatcttaaaaaggagaaaacgtagcacaactttgaaaaagcttcggtagataaccactttgtcttttttggggagacgaatagtgttttctccgccaggcctcgctacagatacatcatgaaaatacatacctttcatagtctcaatatgccccattttcacagttgacttcccaaaattaacatggctcggtctccatggctgatcttcgacatcatcag

SEQ ID NO: 108314 - DNA, 359 bp, Zea Mays
ccgatgtggaggttgttcttacctgcgggaatgtgaaagttccttttgcctgggaacatgatctgggtgtcgcctagaggggggatgaataggcgaataaaaattatcactttgaaacttaaattcttattctactcgaagactagaacgcagtggagtgaagacccttcgagtaggttgcagcggaatagaagatcttgtctcaaaatgtcctgcacttcaaatataacttgtaccacagataagtgttgaagtgtagatataaaagtgagtaagacagaaagtcagaacacaatacagaacaaagcacacagacgcaaggatttatcccgaggttcggccaagcctgaaacgcttgc

SEQ ID NO: 108315 - DNA, 367 bp, Zea Mays
atcactactcctttaaccagtacaagtgtactttaatttgatggtaacatcatttttgtccatacttcatcattagagtgtattttaaatgtaactgaatctcacattcaatgaatcatattacgttcgtactgcactaatgacgaagcatttttctttctgtccaccgtatggttgttttatgcagcacatggtgtgcacttgcatttgacggcaacataatttttcccaatatttcttccattattagggtgtatctttggaaagtaactgaatcgccacctaagacttaagattgtatgaaagtgtccaacaactcaacgtgatgaaatttattcttcttatccacagtatatacctaataaat

SEQ ID NO: 108316 - DNA, 424 bp, Zea Mays
ctagaactatggtgacacgcgcatggtgaggtgttcccccatgtaaggtggaggtgacacatgcatggtgcggtgtccccaattaaggtggaggtgacacatgcatggtgaggtgccccccattaaggtagaggtgacacatgcatggtgaggtgtccccccatgtaaggtggaggtggcacatgcatggtgaggtgtccccctattaaggtggaggtgacacatgcatggtgaggtgtccccccatgtaaggtggaggtgacacatgcatggtgaggtgtcactcatccatagctcctaggtgcctatataaggatgtgccccctcttgccatgacataccatcccactcccatccacacacattcaagggcaaggtagaagaaaagtagtgttgaagtataggagcccttgcttaatcatac

SEQ ID NO: 108317 - DNA, 473 bp, Zea Mays
ccaattcttcaagttcttctttaccattgttcgcagtagaattgacaatgtacgattcaccacttcagtttgtccatcagtttgagggtggcatgtggtggagaacaaaagtttagtcccaagctttgcccacaatgttttccaaaaatggctcatgaacttcacatcacggtcagatacgatggtcttgggcactccatgtagcctcaagatttctctgaaaaacaaattggcaacatgtgaagcatcgtcgctcttgttgcatggaataaaatgagccatttttgaaaatctatcaaccacaacaaaaatagaatctctctttttttgagtcctcggcagccctaaaataaaatccatgcttatgtcttctcaagaaattttaggagcgggtaaaggagtatataaaccatgagggttcagttttgacttagctttgtgataggtgacacaatgcttcacaaatctgatga

SEQ ID NO: 108318 - DNA, 515 bp, Zea Mays
gtaggagctgctgagacacaattgggttcctattaagcggaagagctcttgccacaacttactagtgaaaatggggtctcgatcagatatgatagcagcaggtagcccatgcaatctgtacacctctgacaaatacaccttagccactgttaaagctgtgaaaggatgtaatagaggtaggaaatgggcatacttcgagaacttgtctaccaccaccaaaatgcaattgcccttgctggaaggaggcagtccagaaatgaagtccatgctcacagtttgccaggcttgttctgggactggcaggggcagcagtaacccggggtatttgactctttctggtttagcttgttgacagatctggcacgaactcacaaattcatgtatatgtttcttcatgcccggccaagcgaaattagctttaactcttctatatgtgactggaaaaccggagtgtcctcctacgacactgtcgtgtagtgctgtcatcaccatttgttgaaccacttgattgttgc

SEQ ID NO: 108319 - DNA, 636 bp, Zea Mays
ctggactgggcgcactatttttagagagtgcagggggctcggggtaataatccgcagactcaggacatagtgccagaggatggcggtttgatattctgaaacttcaggggctctttaatacaacaccagggctgaaggggtacggggccacacggccgcacgatttaatatctaccgtccagattagattcggcgcatgacgaaccgatatcgcgagtctacaaccgtccgattagaaacgaacgacccagatttgctctgttattaattgaaccggtgcgcatccaggaccaaccaatcccgacccgacgactcacgatgatttccctcaaatctaatcggggacgttgattacgaatccaacgacgcatacttgactaccctgagatctaatcgtgactgttgaatacgatccaacggcccaagcgacttcttcttcctctctctgactacgacgcccgcactacgtctcgacacctaggtgcagccgaccgcgcgccatggccgacgctctatcgctcgcagagaaagggaataaaagaaagaaagaaaaatagagctcaccggaggctagtgcgtttaggaggaattgcccgccaccgttggccagcggcccggcaccaggatgcacctgcg

SEQ ID NO: 108320 - DNA, 321 bp, Zea Mays
cgagcctgttgagctcaagggaccatttggcgatgcatctagacgcatccggattgtggacgatctcgcctaggggtgtcgtggacaccactgacatagggtgtcagtcgaaataatggattaacttttgcttggcgatgaggaccacatagagtagttttaggatctaagggtaccgaaccttggactcggctagcacctcactgatgaagtaaacaggcttttggactttgagtatgtgcccctcatttttcctttccactaccagtgcagcgctgaccacctgagtggtggctacaatgtagaggaagagcgtctctc

SEQ ID NO: 108321 - DNA, 409 bp, Zea Mays
cgacgtaggcttccacccgcttgccccagtgatcgactaagcatgtttggatggctctctagtaagttgctctcgcgttcttaaggccgaacgacatggaggtatagcagaaagctccaaatggggtgatgaaagcaatcttctcctcatcttcttttgccaggctgatctgatagtatctagaatatcaatctacgaaggacagcatagaacaaccagcagatgagtcgactatctgatctattctagggagcccaaagggatccttcggacaatgtttgttgagatcggtatagtcgacgcacatgcgtcaatccactattttatttagtacaagaacaggattcgctagccactcgggatgcagcacctccctaatgaaccctgcagacactaagcgggctaactc

SEQ ID NO: 108322 - DNA, 463 bp, Zea Mays
ggactgcaatggcttcaataggcatagcaggaacagactctctggctagggggttgtttccaccctttcaattcacttcgatacatcagttgtcttgatgcgcctgggtctacatgtcaaaaccttgattttctttgacttcgacacaccagtagatgccaaggcagcggctttccttttcctcccttgcttttgggcaggatagcagtagtcccaataacatcaaatactctattcaacctctttttgtcgcgagcgccgaaggcagccgtcatagcttcgtcttctgccctcgagtacgctccaagaagttcgtcacttgttacctcaatagcgtccaaccaatcatcatttggttcatcaaattggtttctgaactgaaaagtgtactctagacaaaccaggccaccctggctagagccagcggacgtttccttcggcatctcccacttgcttgcaagag

SEQ ID NO: 108323 - DNA, 351 bp, Zea Mays
acccaagatgtagaaacaaaagaatgtgtggcaccagtgtcaaataatactttagctggataggattcgattggaaacataccaactgccacgtcctgagcatcctggattgcttcggcctccaggttgttcacctttccacggttgtaggtctgaccacggcctcctggtgcttgatgtggcactccttgtcttgctggggtattgactgctggcgactgctgagctgctttctttggaaagttcttcgcccaatggttttgttctccacagtagaaacatgcactacctcctacttgcgctagagctgcttggttattctggttggttgctggggtaggaaggcggggt

SEQ ID NO: 108324 - DNA, 475 bp, Zea Mays
caggattcccacagacaggattgcgggtttatttggaataagtcgaggagctcttctatgaaactggcttcggcaaagaggtactaagcatccagagccgttcagatcgaatccaatggtcacaatacaacgcacgaagggggtatgtaaggatcaaatctcatccactggtggttgatctgacgactcaagcatcatcactcccacggccgaaccagtatgccaggagcgatcccagccgtctgctatggatccagcggccgcgacatcatcttccccattcaggcacgtggctacgacagcgccgccccaaaaccacaaccgagccagtgccaggataccccgccctgttctagcctctagcacctaaatcgaccggctcaacataaatcggaggtaaaagcgaaccatcagagagagtccttatattggtcaatggcgcagacatttctgcccgcgatgaggggcagcaccg

SEQ ID NO: 108325 - DNA, 528 bp, Zea Mays
ctagagtaaaatgctcccaaagtcatattggcagacatgttgaagaaggcattcagacacgaacagttcactaaagaaaatcaggttcactgaacccgccaccagtgatctcgcgtcgcgattcaaactcgtcatcgagattcgtggaaggtttggaatagaaattaccggagagtgaaaagatcggcgggggaaggaacttgggcactgcgctaactggtctgcagtgcccacttgctcggcgtcatgacagagttaccaccatcgtgatccaccagtcatccttgcaatgccacacgtagcctcgcttcacccccatcatagtgagcgtggcatacggtgatacaagtttccgagtcactgagccacatgtgtgccatggagattcaacctctgtgaaaaaacccgactgtcgtggagctcgatctcatcccaaatttgtgaagcgtgcgattgatccctttaaatttagcccccctgctctgcctatctgttacacatctagcccaccctcagccagcccctctc

SEQ ID NO: 108326 - DNA, 593 bp, Zea Mays
tgacgaaccaaaagcatatgaactaagcctaatgcaagtcaccgactttttcaatccaatatggtgatcattcaatagagcccaatgcataaaggtcgtttaggattgcatctttctcggccatgaccatttgatcaatggatcaaaaggaatagaatggaggtgcccccaacctgaatagacaaagggagtacacacataccataggttcatcgtcgtaccatttcatatttgaacaggacaatatatcaacaatgagtaggcaggtggaaaacatcctcgcatcacaggatgaataggcaatgcttgttgcgtagccttttggaccgttttattttagcaggtgaccggggtttctttgttggtcgattacatagaacgaccttgctagcatatttggagagcaacggatcaaaagtagggccagctttgaccaaccgaccatgtgtgcttttcccttgtgtttctttcctttctttgtgtggatgctgacgcctctgaccatgggcggactgtctggctaagtcagcggaaccgtgtatcagagcaccggaccgtccgcgatgctcgggtctagttgtcatgctcggctc

SEQ ID NO: 108327 - DNA, 283 bp, Zea Mays
taatgctacacttgttcaattgcttcttgaaaatcctaggtacaaagtgatgacttctaaggaggtccttagaaagtttgtgagctttgaaattatggtcaaacactcaaaacatgtgaagaacattactcatggcaacacctcaacacccgagccacaagtcgtggccttcaaggtgacgaaagagaaggaggaaacaactccaagcaaagagctcccaattggcctcaccaagctaaatgatgaggagatggaccttttcattacaagcttctagcaaata

SEQ ID NO: 108328 - DNA, 655 bp, Zea Mays
aagaatgaagttatgtcaaggcttacacgcggtaaagaagaggatattgccaagggtaagataagtaaaacaccgctctcagattgggataggagattggagattttcaataacagacataatgtaatcaccaaggtaagatcgagggatgagaaaggtaatgataataacaaacaaaagtaggcaaaggacggagttaaaaactcgcaagtgacaaagaagatgatacatcctagagaaaaataggtaaaacatacaactctcagattgagatgggagagaggagactttaaaggacaagtataagataaacctcaatgtaagatatagagatgtcaaaggtgatagtgataataacgaaaagcgtaacaaaggatagagttgagacatgactcacgaagtggcgaagtggggaaaacaatcaagggtaagataggtagggttccaacagaagagttggagtaaaaattcattaccaaaggaagtgacaaggaattaacgagatctccaaggatatgcaaaataaaatgaccgctcatgggtcattaagaaacaagggtggtcaagatcatgtagaatgaaatatcttaaacataccttgggatataaaggtaagcataaaaaagatgagagtatgagagatttcaaggagatg

SEQ ID NO: 108329 - DNA, 840 bp, Zea Mays
tgaggcagttcctttttgggcaggccccatgcctgaacccagcacgtgattccttcaatcgtttgcttcttctgagccctgactccacaatgattggagacggcccaccacaaccatcggaatccttggagatcccagaagtgacatcccccagggaggaatcaactggacattccttaggaaccacaaaagggatggaattcattccctgctcctacaaatttggggggatatctgacagcagaaaagtctttgaccaattgaaagcatccggctgaagaagattcgaaagaaaaaaaggtgcccacttcttagggatgtccaccgagtggtcagtcgacccagacggagcaaagtatttggcccagagccaagtgaactggacagctcttctcctctcttcaaacatctggaagacggggtcaggctgccattcctgatggagcatgaagttcatctccaaattctgagggttattattgttaggctcatcaacatgggcctgagggggcacgacctccaaatcatggacatgatccacctgaggcaccagtccatcgacctcctgaggcccaataaatggggcaacattgatgtcaattccatccccaagcagcgcatgaccattcaccgcaagatgaccattcggaaggggtgcaagctgaccagcaccaatggagctatctgacgacaagccagagtgttggttactgagttgtagttcttcctgctgaatgtgctgctcctctggcaaaaagggctgcggggcctgctgaatgggctgttcattcacaatccactggtcccactctccctggccaaagtcatcctgctgagccg

SEQ ID NO: 108330 - DNA, 736 bp, Zea Mays
aaaaccttgaatactcaaaaatctgatagtactcgcccaaagcgccttcgcctggccagtcatccaactgctcttgccaaggggaagaagaagaaaaggagacgacttcggcgagtgtcgtgtttggactaggatgctggcccttctgctcctgctgctgaagaagtgccagtggaactttttactagagctgatcccaatgggtgtgaccctgctgacgctgaccccaatgggtgtgaccttgatgatgctgaacccaatgggtgtgatcctgctcgagctgatcccaatgggtgtgatcctgccagagctgaccccaattggggtattgttcgtgttgttgacgaggatgaagaagaagaggaggaggtccccttaattcggaagaatagtcggcgttacatagtcagtggggagagtagcgatattccttctccagctttgtctgctctcgttggtctgcaggaattgtccatatcgaactttgatcaggctctcgaggatgtggttcttgaagatttgctgtccgagccaacagatggtggtatgatggacgtttgctctgacattccagatgtgggattagagttatcccgagcaacgtctcgtgcatcgtcgaccttggagtgcggtctttggagtcaagagcctggtcaaggttgttccattcccatggaggtgactgagaatccttcagccttagaggtggctgctgcagagaacccggtccccaagg

SEQ ID NO: 108331 - DNA, 507 bp, Zea Mays
tagccactagtttcgtggaaaagcatggcattccctctacccctctaccttggtcacccgaaccccagggtcagaccttctatgccagcacaaatgctcccaagtcagaatccttttaagtggggtagtattcttggcacacttaaccgtcttgccatcccaagggattgatgtgatcttaggaatggattggttgaccaagcacaaaggtatcatgagttgcgcaaacaggacagtccttctcacagaccaccaaggaaagtcagtctcttgccaagctcagccgcccgccaatgatccaatgatctttaatttagcaacagaaagtatatcagtggtagaagaattcatggatgtcttcccggaagaattgccaggaatgccaccagaaagagaagtggaattctacatagatctgattcctggaacaacgcccatcgcaaagagaccataccgcatggctcctaccgagttagcagaattgaagctccaaatcgcagatcttca

SEQ ID NO: 108332 - DNA, 759 bp, Zea Mays
gggtactatggccgttggatctccatccagcgcttagaattaggtcgggcgtagcgcttccacgggtgtgcaattggccgttggatcgtgatcccgtggcccaggattggatcgtgggtgaaagctccgtgtaccatccgattgtggatgggcgtcggggatcaaacgctgcataccaatttggttggaccaattgagaccgtggatcgtaggatggaggggcgagattagatcgggagggacccttcagtcacatgatctgagtcgttgaagtttggtctgagggtccaaaatgaataccggttcaaaggggacgcagatggaatctggaccgtccgtggatgatcggatgaatagaaacaaccgataccccctttcggccagggactttttcttatgagcccctgaactccatataaattaacccgctatcctaagtgactatgcctgggtcttgcagattcttgcgccagagcccctgcgctttctaggatttgaggcccagtcccgagatcagataaaacagggaaactaatttaaaaatagatttttagtacaaatttaattgcagaaacttgtttaaattgtacaaaattcatatgaactccaaattggtccattctagttcctaaatttttataatactattgtataaccattagtgtctctgttttaacatgaaagtggatttaaaatttatctagcacttaatcttgtattaagcacataaaatcttcagaaattcatatcttaaaatct

SEQ ID NO: 108333 - DNA, 458 bp, Zea Mays
ggtggttttgtgggatatggtgagcagcatatgtggacacataagtcgggcttgactcggctcccctattatgacgacctgctccttccacacaacattgacgtgatgcacactaaaaagaatgttgccgaggcactttgggcaacaattatggacattcctgataagtcagaggataacataaaggcaagagtggatctggcagcgttatgtgatagaccaaaccaagagatgaagccgccaagtggtggaaagacatggagaaggcctaaggtcgatttcttcctaagcagggcctagaggaaggaagtacttcagtggatcaagatgttgatgttccctgatgggtatgcagctaacctgagtagggggtgaacttatctactatgtgagtcttagggatgaagagtcatgacttccacatatggattgaacagattcttcctacgatggttcga

SEQ ID NO: 108334 - DNA, 807 bp, Zea Mays
gtctaaagatcgaatcctgagttggtgataacctgacctcagatctatctttgaaaacatgctggctcctctcaattgttcgaacagatcttctattctgggcaaggggtacttgttcttgatcgtgacctcattcagagcttgatagtcgatacacatccttctagtgccatctttcttctccacgaataggacaagggcggcccaaggtgaggtgcttggcctgatataacctttctctgacagctcatcgatctgcttcttgagttcaaccaactctgctccagatactctgtaagctcttttagaaatgggggcggtgccaggaagaagctctatagcaaactcaactttccgctcaagtggcatacctggtaaatattctgggaacacatctggaaattctgacacaaccttgatagtctcgagtggatctgcctccttgctatcaatagccatctgataacaactccctttccttggctcaggtgagactaactcagctaccacttcttctcctagtggagacaccaacttaattatccttttgtcacaactgataattgcttggtacttatctaggcaattcatccctaggatgacatctattccctgagtacccattactatgagattagcgggaaacgctatcccccttatttccacacttacattgaagcaaatgctatcggctcgaattctaccaccagctgagtcaatttgaatgggtgttgacatggtagttattggaagattatgtgcttctacccatgatgcagtaataaatgaatgtgttgctccagtatc

SEQ ID NO: 108335 - DNA, 573 bp, Zea Mays
gctcacacggttgcaccacatggggtcatcccttctctcagcggggaagagtcccagtgggtgcattaccatctccaagggatggtagccacagaaagtcatcagagtcttcatagctgctgcctcggtggtgtcgtccgacctaaatctgatagtctcggagtcaagggaacgccaacccgactgaaggggtgagcatcctgagtcagtcagactcggcaacatggtacccgatgctcctcgtacagctgcactgtgtacaaagggggcgtagggtaaccggcagagttgagcacctcccacaagatggaagggaaaccctcgtgggaaaggaaatcggaactgaaacaagtgtctcctccattggcgggggtgggtgaagtcatctatggaagaggatcaaatgtaaaggttacgatagtggaaaggaaaaacatgtgcccgggtgggttttgattttactccttatgttacttattattatccctatttgctatattcgtacttagatgcatctttcctttaatttctaatccttcatgttttataatgcatgcatgctgaaaagaacgt

SEQ ID NO: 108336 - DNA, 501 bp, Zea Mays
cgctggggagtttggaaacaaagaacacgaactcttcggtggaaaggtcgccgagaggagagaccccaacacaagtcctcccggcaaatactggcacattccatccaagcaggtggtataccatttcgagcactcactcagtctgggtgtgctcggggtgaggtcacaaggccatggcaaactacgacaacgcgaagcagaaaccttgaaggcaaaggggtacagagagctcgaaggcgaaaaggcaccgcgagagggagagaagctagacatggctgctacttgaggggtgaacccctttttaaaggcagatttccccgctcgcgccccgaagcgtcacgggcaaggtatcccccgatgcgcaccagggttcccatcctatgacatggggccaggcctcacatgtcatacaagctggcccgaagcgcgaagaaggcgaatcgtcgcacaaggaacgtgcaaccgccctgcgtttatacgcccttccatcttcgtcgcaac

SEQ ID NO: 108337 - DNA, 569 bp, Zea Mays
caaggggagctcatgaaacgggagggacaaaaagagaaggcgacgtgtgttgtccccgttcatacgtggattgtgtaaaatgggggcgcaacatattagatgatactatttgatattgttttagagtaaagtttgaaatagaggatgagatagaagatctggtaaagatggtctaagagcatccctggaggttaatctttatcaatggtgatcgaaggagtgaagtttctatttgagcaaaggaagagacaatttcacttctattttaatggatcacatggtgtcgtttctattttagaaaagctcacgcgactgttttttataatagaaaaaaaacttaaagatagagaggattcctgcagcatgtcatggtcggtaggggatccgctacgacgataagggatactgtagccgctaaatgaagggaaggggacactcgcaggaagcgatatagacagcctaagagaatatgcatagaattcctcgttcttctgccagaccatatcattagaccgctcctagcagagcatgcatatagtcaactggtctgttttgcccataaattacat

SEQ ID NO: 108338 - DNA, 362 bp, Zea Mays
cgtgtcgtcgctactcatttcgaacacgccgagggagatcgtgtgcagggggctggggaattagctcgccggtgttgggccagggggaaactctaggggtttattcgcggaagaccaacacggctcgacgcgactgtggtaggtcaggggaggggttcctcgaagtcgcttcaatttctcatcggagaagccttccgccgccgaaccttggggcaccgtggccatcacatctacccacttatctactggtaaggaatccaccgacgtgttcgcctcctcctccctttttatttgaatgaagtcgcgttcgcaacggtgtagtagaatgcggggtcgacgttcgccgacaatggcgccaccgc

SEQ ID NO: 108339 - DNA, 297 bp, Zea Mays
cttttccttggtttgtgccgatcaatatactcttgttccatatccaactttggcatgtcgtgttcttcacaaaagaacattacattatcgagtaaagaatcccaaccatcatatctgatttgttgaaatttctgttttgttaacttcacctctatcatggcctccaagatgtcttttatctttcctttgtaaagatagtgacagtgaatttgcatgccccaaaataagcagcattaactctaaatggaacacaaagtcaaaatccttgagatagtccataagaccacgagcttgacg

SEQ ID NO: 108340 - DNA, 427 bp, Zea Mays
gaaagaagtagctttttatgcatacaacctttgttggattcccagtcccctataatatgattaatattaacgggtgggtctatttttaaagtaaaataaataattctccaaacagttttagctatgtagcaatcaaagaaaagatgttgtatgttctcgttttgattacaaaaactgtacttcggacttcctcgccatctacgtttggctaagttgtctttggttaggattagccccctacctagataccaaaggaaaatcttaatcttaaggggtaatttcaacttccaaagcaaacatccacgattataattggggatactaattaaattataatacatggatctggttgagaaagtcccattcctatgagctgtccacacgaaagtgtccctcaccggagtcagattaaccgtagccagtaagt

SEQ ID NO: 108341 - DNA, 647 bp, Zea Mays
gtcacatcgacttaaggcgtctgtgacttaagctgattgctccattagtagggcatagtgatcacccttagtcaagtcatgccgatttcaagtcaagcccaatcgaagttagttgttaattgagagtctgaatgcctatggaaaatgaaaggattattgatgatgaaatcttcaggttacagagtacaacttttcttcaagggtttttgaggcattgttaaggttagaactttctaaggtgttctatgttccacgtgttccccacttttgtgccgtccatctgagtaagtcgatatgatcctagccatgtgacctctgatacgatgaacggtccttcccatggtggtgatagcttctgtcgtccctcccccgttagaattcggcgaaggaccaagtctcccactgtaaaggatcggtgccgcatagctttgtcatggtagcgcctcaaggtctgctggtacctggccgactgaattattgtgttcaatcgttcttcctccagcacatcaatgtcttctagcctagtttcttctgcctcatctatgtttttgaaagtcaacctcggcgccccgaagatcagattagtaggcagcactgcttctgacccataaaccatgaagaatggggtatttccatgcagagcttga

SEQ ID NO: 108342 - DNA, 618 bp, Zea Mays
ggacttttgcttcagtaaccacaattgggcttcctcccgtttcagccgatctcctccttttgtcacgatacattcattgcgtatattttgtggatatcgtttctttagaaaatcttgaaaattctgggcgatacacctaatgggtgtgcccaaggggcgtcttggtgcgcagagtgtttatcgtgttgtcctgaagtagtaacttgatgtgacggagaggtgtaatcatttgcctgagcagttgacttgggtccaactagtgttgtgttacgcgaaacggtgctagttgtctgactcattttcaggcggcttgaattgcttattgaattcttgtgaccgttcggcgggcagggtaggaagtggacgatcaccccttggcccctttaaatagcccgcttgccctagttgttttcttcactcgttcttgatcacttgctctcctcttctccttcctcgcttcttcgctttccgcacgaccatgagtaggggcaagaggggtaagggctagcctcgtcgagccgacggcaagcgcaagcgccccccaagtcctccctcggaggattttggtgactcggagtactaggaggaagcctcctctgagtatgatcgatcgcccgc

SEQ ID NO: 108343 - DNA, 537 bp, Zea Mays
gctgtgtattatactagaagtaccgtgcaacagtgtcagagttatacacaccctaattagtagagctaaaattaagcatcattaatggtaatggcaaaacaattattaatatcatggtgaaattagacctcgaaaaacaaaagctattgtagtactacaacaacaggcaatatatttatgacaatgatactgcatgagagtacgtttgaaaccctaaacagttagaccctgctagctactttcgtgctccaaaaagatccacgtcttcgtgcatagtatgtttcgtatcaaaaacaggccttaaatgaagccccccaggaatcgtgctgtcgtcgtgaatactccttttcttcgtgccgtgtggtgtagggtccttccttcattaactgagacacgatctcgtgccatcaaattttggtcgcgctattcatttatatatacgtacgtagtacatgtgtagtatcgcatgcaaatccggttcggctgcgcgcaggacgcggcgcacgtcaagagccaaatgaatgcagcagaggcaga

SEQ ID NO: 108344 - DNA, 544 bp, Zea Mays
aaacggttcatgaaacctctgtataattacaaacggatacaatgctcttgatagaaaatatgtttctcgaacaaaggagcattactttagaggtcagagggaatgttagaggagtggactggatcagtactggagtgtgaagcaaactgggggaggacaagtggtggagaaataaggcttagtactgataattaagtaacaatttgaaaaatacaagcgaagcatcttcaaaaaataaattaaaaatagagctcaaatggctacaaattatcacttagttaaccacttacaatatgcatgccctacggatttcatggattaaagagtttggaagcaaaaacagaggtgaactggatcatcttaagggaggtaatgatctagctgagataaatttgagtgatgaggattagcatggctgtggagatagacttcggatcaaaggcgtcaagggtgccctcattctccatgctctcaatagttcctacatgttttgggacccggtgcaagaaatggtgctccatccgtacatgatgtgaccattgac

SEQ ID NO: 108345 - DNA, 675 bp, Zea Mays
ggttatagttggcgcttaggaggttgactttcttgttctgctatagtcttgggtgaatgttcaattagatgttttgattgacaagactcaaccatgactttatagtatccttcatctttcccttgatgtctagtaggtggctaatcatgctatcaaagacattctttcctaggttcatgaaatctatggcatgtggtactcaacatgaacctaatgttcctcagctcattgcgaaactctaggaacatgatatcgaaattcttccattgttgggtatcgataaggtgttgcaacttgctagtgtcctccatgcaatcactagatgcatgctaggacattagctatacatccttagggttcttgaatacacaacacaatcgatcaactatgggcagataccacatcaataggtcaggaattcacctatgtgtgtaacattcttcctcctcgtgagacgaaacctactttgcactataattcttgtatgccttctcttctttgtaccactcgaggttccctcatcattcgcatcaatgcaacactcaacattccttttgtgttaactcatgtcgcagtgtgacaactctccaagctcacatactgggtgccctaatacaatatatagtggttagggcaagcatagatctttgtagagccaacactattagtcggacc

SEQ ID NO: 108346 - DNA, 420 bp, Zea Mays
cgacggagctaagcacctcccacaagatggagggaaaaccctcgtgggaaaggtagtcggaactaaaacgagtgtctcctccattgatgggggtggtgaagtcatctgtgaaagaaggttagacgtaaacgttatggtagtggaaaggaaaaacatgtgcccaggttgttaaaaggaggtgggttaaatccgatccatctacccatttcgcaattccttattaaccctatttgttacattcctacttagatgcattttcctttaatttctaatcttttcatgttttataatgcatgcatgctggaaagaacgtctcctcaccaatcagaagggtgcttttaaggcatccttacaattctaaggctagcctatatggcctacttaattagccacctatttttccccactactcctaaggcc

SEQ ID NO: 108347 - DNA, 304 bp, Zea Mays
ctagagggtgaaagcagaacatcaaagacctgctggtttactgctcccacttaagatacctgagtggaaatgggaagagattggcatggacttcattgtgggattaccccgcacatctgctgggtatgactctatatgggtgatcatggacaggctaactaaagtagcccactttattctagtgaagaccacgtattcaggagccaagctagcagagttgtacgtggcacgaattgtatgcttacatggtgtgccaaagaagattgtttcagaccggggatcacagtttacttctcggtattgg

SEQ ID NO: 108348 - DNA, 818 bp, Zea Mays
atgcaaaggtagagtgctcaaagagttacattgagcagcatgttcatctgagatgaacataatagactaggagcatgaggccatcagggccattgagcaattggaggtggtagggatatttgcatagcactatgacaccacagataattctaatgaggactgttgtcttgtaacacagatggcaccacctagggcacatgactcagaggttgatggttctagctcaacggtaccaccataaccgacaacagtcgatcttgctctgcttcaaatactcatagcactctagactaagcagtaaaggaagacaagggtccgagagcaacaaagtgagcgcatgtttgcaatgttggagcaaattcaataatgtcaggatcaattccaatagtagcatcttgacacctagcagtacttgctagcattcatggagcacatgttgcatgttataggtcacccccatttggttcctctatccagcagtttgcaccagcactgatgacaacctttgtgactccagctttatagtctagtgaactttagagtcaaggttcatctactttttagttggctttgtctctacagtctaataaactcttcacaactccgggatcgggtcaaccatcaagtactacataagcgcgcgagacaaccaccatatagaccatgcctagttagaccatcccattggtcgtagtcactaggaacatatctgctacctttagtgagataattgtatatcctacaccattgttacctatgctagtagattcgaagtacccactaaaagaatccccttatcaattgccttgtcatagtag

SEQ ID NO: 108349 - DNA, 475 bp, Zea Mays
gggttattcagcgcctatatggtctcgcttaagcattaggaggtcggtcattggacttggaaacgacgtgcaagcgtgctaggcagctttcaataaagtgtgtacttatatcggcacaagagacttggtccaagagcatattgcttacagagtgtggccacttgcaaactgatgggaaatgccaaaggaggctgccgcttgctccagccaaaatggttcggtgtatctgaagtatatctttcgatacaagagccagtttgatgaaccaaatgatgactggctagatgctatagaggcaactagcgatgagctgcttggagcatactcgaaggccgaagatgaagctatgacaactaccttcggtgctcagggcaaaaagagattgaatagagtgtttgatgttatcgggtttgtgtacccagactactgctatcctacacgaaagcaagggaagaagaggaaagctgctacctcg

SEQ ID NO: 108350 - DNA, 837 bp, Zea Mays
ggcaaccaattccaacagcggaggtagagttccccctcaaggaccgtatgatactacctatttggaattctttgagactcgaccaccgctcttcgttaaagcagaggaacccttagaagccgacgagtgggtgagagtgatggaacagaagtttgggttaattagatgcacagagacgcaaaagcccctgttcgccgcacaatagctaagagggtctgccagtacttggtgggcaaatttctcggcaatccagcctgttggacatcagattacctgggatgagttcaagttggcctttcaggagcattatgttctagagggagtactccagatgaagctagatgagtttatccggttgaggcaaggaggagatacggtgatgcagtatctgaacaaattcaaccacctctctcagtatgccattgacgaggtggatactaacttgaagaaaaagaattgttttatgagggggctcaatgacaggcttcagcggaaaatggcaacatgcttggacctcaactacagtaaggctgtcagtacaacactagcagtggaagccaaaatgcggggtatggaaaatcaaagggacttggaggtgaaaggtcaaatcaaggacctgagaagataaccagctagtgatctgaccttttaatcaaaatcgttcttcgcctcgcccaccttcatatccattcaagcaacccgtctttattcatcccactactgcccccgctcctaccaatcagccgagtgcccctggtactcatttccctgcccttcccagttcctccagtggttgcttcaactgtgggaagtccggacatttcatcaaggactgtc

SEQ ID NO: 108351 - DNA, 787 bp, Zea Mays
cgggtgtgacacaaagttggcccaagtcactcttgagaaggatgaagtcatctaggttagggatttggctgtgttggacaatgtgttgtggattggcgaatgtcaggactaccataccttgctggtagaggtcatcagagaaaggaatacagctttgtctgaagtagcgcagcttagggcaacacaggtcaacctgatgcagcagctgaacaatgttgaagcttggaatactaatctacacgaagaggttcactagttgcatgcccagctcaatcctgtcaacccgccagaactgggggaagcagatgtcgtcgcagccgacaatggaggtgcagtctctggggccagcagtgtgcaggagtggttgttagttgtcgctataggataggctaacccttttggatagtgttcctaggagtaggaacaagacttatggtgcaaggccgatgtaatgatggcttctgacgcgtgtgtgcgtgtgggggaaaacactctttgcttgtatgtgcatttatatattatgaagtatgtgatgatgatgttgcgcatgttgggatgtgattcttgccttacgatttttcacatgaagtttccttctatgagattgtatggcatgatttccttatttcacatgtgttacgacataactcaccgcctacccataatgaaaatgtgtagatggtgactactcgccacattacccggggccactggagcttctggcagtggtaaccaggagggtgaccaagaagcaccacttcctccacctccgccatacacacccgag

SEQ ID NO: 108352 - DNA, 427 bp, Zea Mays
tgcgcttgtttgggcagtcccgaatcacatggccaaattctctacagcgatgacactgaatatctcatgtacgagtgctggctggtttggtcgtcttctcgcgtggagtagtggtggacatggatggcgcagggggaactggtgttgaggtggatgtcgagcttcgtcctacaaaatgattagaatatagcttcgagcggcgtccctgcacttcacgttcagctttgcaagcatattcaaataaagtagtcatatcataatattccttataatcaagtatatcttggatttcgcagtttaaaccaccacgaaaacgtgccatagcagcgttgttgtcctccaatatcccacaacgaatcatacctttttgtaactcctggaaatagtcctcaacagattgagaaccttgctgaaaatgctgcatttt

SEQ ID NO: 108353 - DNA, 1020 bp, Zea Mays
aacaaataccaagctcaaacaaaagcatggcgtgaccacacagtcgtcccgagagaattcaacgaaggggacctcgtactcgtccggacaactcggatagagtcacgggcaagctggagccaaagtgggagggtcccttcatcgtcaagacaaaggcgtcccccagcgcgtacaggctaacaacgtcatccggcgaagacttagagcattcctagaatattgacaatctccgtaaattttttgtttgaatactcagggccaacacgcccttgtaattcaccaaacatttttatcccggcccgcactcttttcctcccggggggtgaggtttttaatgaggcggagctatgtaatatacacgcaaaaaatcccccgcaagaaactaagccaatgtcgaatcttcgccaaaagactctccgtgcaaaagtcgcctaagggtgcagccggattctccgtgcaaaagtcgcctatgggtgcagccggactagcacaataagtgcgcaaaatcaaaaactttgtcaaaagactctccgtgtaaaagtcgcataagggtgcagccgccccccgccggactagctcaataagtacgcacaatcgaatactttcccaaaaagaccccgcgcacaagtcgcctacgggcacggccggatcaacgaaggcacgcagcctcatacaaattacagttacatacatacagcgagggcatcacacattacattggctcaaccttcgggatgatacccatctccctgtagttgaacagcattatcctcaattcctcaccctcaaaaagacttcgcagctccccctcacctacactcgccccaatcggcgaggacaacaattcccgtttgccagtcccggccacacgaagacgaccaccctccatctcaccacgatgacgcctatcacttcgtgacaactcactcactctccgtttcgccaccgccattcgccgcctacgcctagcactcgcacccggaagaccttcagcacccatcacgcgcggagaagtctccg

SEQ ID NO: 108354 - DNA, 491 bp, Zea Mays
aactagcttgctcacactcataggctgcttagaaggaagtggatgttgcaatgactccatgggggtcaggcatttttagcttgaggtatgcgtggttgggaacgaccatgaacttgacgtagcccggcctccccaatatggcattgtaggcccctggaaagtccatcacttcgaactatagctgctcggtgcggaaattagaggggtctccgaacctaatcggtagaacaattcgcccgagtgggcaggcgtcgtggtagggcgtgatgctatggattggcacggtgctggggtgcagcgcggagtgcgcgatctcgaaggcatcaaaagtctctacgtacatgatgttgagactgctcccttcatccatgaggactttggagagatgcttcgagccgacaattgcttcgacggtaagggggtaggttccaggatgtggtaccctgctcgggtgatcgcgtcgatcgaacgtgattggggcctctagccac

SEQ ID NO: 108355 - DNA, 316 bp, Zea Mays
gtatttctgcatggtctttgctattattgtggagactactctgccctcgatccatttggtaaaatattcgacgacgacgaaggtgaattttaggttcccttgtgccgtaggcagtggtccgaaaatgtctagcccccttcgctgaagcgatcaggtgtgggcaatgagcttagtgaattgcgaaggggcgcctgagcgaggagagaatttctggcatgctttgcatgatctagtgactcggttggccgtgcatattaatgtgggccaatagaatccctgacgaattaccttggctacgagggcccttggtcctgag

SEQ ID NO: 108356 - DNA, 578 bp, Zea Mays
ctggtggactagaatgaagagggaaattgctaagtatatatctgaatgcgacacctgccagagagtcaaggccagccacttgaaggtagcaggcaccttgcagccccttcccataccctcttggaaatgggaggatatttgtatggattttatcgtgggattgcccaatacctcccggcaccatgattccatctgggtcattgtgaataggttgaccaagacagctcatttcttgctagtgcataccacccacaagacagagaaatatgcagaaatctatgttgatcaaatagtgcatttgcatggaattccgaagactattgtatctgatagaggagcactgtttgtggcacgcttttgggagcagctccaagaatcactagggacccgtgcaataagaagctcagcataccatccgcagacagatggtcagacagaaagagtgaaccaaatcctcgaagacatgttgcgagcctgtgtgctacactatggtaaaaattgggacaagtgcctttccttggcagaattttcttataataatagctaccagtctagtttgaagatggcacctttcgagt

SEQ ID NO: 108357 - DNA, 483 bp, Zea Mays
caatttgtcaatttcggcttgagcttcagccagtgaaccttccgcacagtggatgacgaagtctttcttttccaaggcagcttcgtaatctttaactttgttttcaaggtcttgaatgacgaagtcctttttcttcaaagcagcttcgtaactttcgactttgttttctagatctttgatggtagcttcgtttttctcgtcctcaagatcttgttgcatcctcagcactttacttttcaaggtcttgcatcctcaaccttcgtcagaaaacatcttaattcaaaaaaaacaataaaaagttgagagtttttaccttgaaattagcatagagcaggctaccggcgatatgctgtcgctggtacctgcagaggtccgcttcaatcttcggcggaccaacgctctttgagaaggtcctaacaaccttggcctcggttcgattccgaaggcatcttagtttcccttcgttgactccgccaaacaaca

SEQ ID NO: 108358 - DNA, 450 bp, Zea Mays
tccgggtgttacaatgatgttcaagagcttctggaactttttcctatggaggattctgcaagtgaagcttcttcagaacaagtacctggagattaattattcttaacactatccatggcagctatctcgggtacatcttctccaagatctatgtcgctctggaggtcactgtatgatcagtccatccatatcatcattgattctggcagttcccatacatttgtcagtgacaaattggcagcacaactgtcctcactcatagtgactacttcaccactaatggtccaggtggccaatggtcagatactggtatgttcttctcacattcctcaagctcagtggcaagtctagcactgtcagtttgtgtctgatttgagagttttggcactatctagttatgacatgattgtgggtctagattggttagaacaatatagtcccatggaagtt

SEQ ID NO: 108359 - DNA, 318 bp, Zea Mays
atgaaattagcgctctctggtggggggtttgggatgcaggtgggtgcagtaactgctggaatacatggcgaagccgaggggggctcaatttatagatcccatcgatggtggtgtccaatttcgcaaggtcatgctggcggccggagggaacagggatactggagcaggggatgggtggctttcaccgtggcgcttcctccggtgatcatcggttgaggagctacggcggttaccgatgagctagtgtggctagggacgacgtggtggaaggcttggagcgtggcacagtcacagtaaagcacgacaactccggtgacg

SEQ ID NO: 108360 - DNA, 656 bp, Zea Mays
cagagatcgttggtggtagtggtgaggaagttgagggtgccgaacatgatgtggttccccggtgcaaaagttctaccgcaagggaatgtcgatgagtgggccattggcgtgatgagtgtctactggcacgctaagagttcccctacctggcatgccaaatgtcgtggtttcggaaatcagatgcattaagattgtgttcggtggggaaattagcgcggactcattccgaatggttagcctccatgtctcgagcaatggatttgagacgttgggtttatactagttcaggcttacgccctagtccagtgtagtgttgatcgtagtattgctctagagcatgttacagctggtgtgctcgtgtgttcagaaaagaggggtccttcccttttctagttcaaggattgaactttacaatgggggattgtattttgcaagagggggcttggccagtggccctttggtagtgtggttcttctgatgctattcatatggagcaatcgtgcgtcatgcggtgttgcctatcgtcataagcctgtgtcactcgttggcgtgcgtaggcgtacacctggtatggtgtatctactaagcactgcccggtatccgggccactgtagaagctctgatgctgaggtactttatgaatagggtcgtccggc

SEQ ID NO: 108361 - DNA, 387 bp, Zea Mays
ctgttgtgactcatgttagcctatctggtgatcgccggtgagcttgccacggtaattgccaccaatcgcgtgcgccagtgcccctcctcttctccggccgccgcgcgtctccttcaaattcactggccactgctctagggacctataaattgagcacgccatgagctccgtagggtaattacccatccaaagcactagcacttgcctccaattgttcaccagagaccacgaattgctcatctcccccaaatcgggtttccgccaccgtgaaaaggtcctcgccgtggctagctcgattcaggtccaatcttgtcctctgctctcttgtttcagcactcttgcatgccactgctgctcctcgacccattcgattaagctagactgccc

SEQ ID NO: 108362 - DNA, 592 bp, Zea Mays
aggaaacatccggcgggacagatgttgagtgggctcgccgtaggttgggctccctgaacacgggcgctactctttgcctgcctgcctgcctaatgttgcatcgccgtccattgctgtaatccatggaccatcgtcgttagctagtagtactacgcctacatctacatgacaggatgatggttgctatagtgcatagaaatcattgtccgggacttcttttgaatcagaatctcttgccaaatcttggtgatggcccgacacggttacacggaggtctctatccgcaggccggagagactggtttcactgggactggattaattcaccggccatgactgaaccttttgatctcaccccagaaaagaaaaggtgaagtgtcggacgatttaacagcacaacgcaacagagagagagagggcagacgtgaaatgtcgaagtttgaatcgtgcgaagacaacaatgggagtacagtatacacagaaaattgaatgaaactgtaccagttgccctgggtcatccaggccttgtcacagacaacccccgtagcagtacagcaatgggcaggttgccacatgccaaccatgcatctgcg

SEQ ID NO: 108363 - DNA, 406 bp, Zea Mays
caagggcgtgtgggccctgagggtttaaagaaaaaatttgcggacattgttaatattccaggaatgatctaggtcttagccggatggcgttgtcagcctgtacgcgctgggggatgccttcgatttgacgatgaatggaccctcccacttcagctccagtttgccccgtgactctgtccgggtggtctggacgagtacgaggtctccttcgttgaactctcttgggacgaccgcatggtcgtgccaggccttggtttgagcttggtatttgttgagggcctgcagggcgaagacgcggtctccgtcgatgaggtctttggacgttggtttgtctacgtcggggactgctgatgtgcttgttcggggcgacccatgctttatctcctgcggggtcatggcctccgat

SEQ ID NO: 108364 - DNA, 375 bp, Zea Mays
cttcataatttgtattccaccaccaccaccaccctgagagatagttgtagggttcacattgtttgttgcctttttgtctctgttttctgctaacaatgacaggaccaaagaatcaaatggacaaggacaaggggcttaagcttaacaacgatgagtgtgtctctcagctggaattgaaggagatgatgtgcgcgatgactgaagcttttaaaaaataccagcactctgcggcgacatcctatgagcagcttgatcgacgagttgctgaacttgttacacgcatggacgtactggaggtttgtcccccaccaccaactccagccccagctcactctcctatggacgacgacgacgatgacgacgatgtttatgcac

SEQ ID NO: 108365 - DNA, 335 bp, Zea Mays
ggggaatggcaagggagaacgaccttggtttctagagtgtggaagatagctgggaattggataagggacgggacaacgctagtaacctagacaaggaaaaagcacggcaaggagataaggcagtggccttaagcggtgataggataaggagaattcagatttttgtttctccaatttgtaacaaatgaaaacacctatgaaatctaggatttgaatccgaacgagattcaaatagaccaatcaaaacaatatcaattttaatatttttggactacgctaacaatggtaggtatttttgggatcagataaatttccatagttgtagacagtggaac

SEQ ID NO: 108366 - DNA, 471 bp, Zea Mays
ggaaaagatggggaaattctattcgaagctcttcttctctctcccaagtagctttatcttctccatggtgactccattgcactttgcacatctttatcactttatttcttgtaactcgagtcaaagtgtcaagaatcttaataggatattctgtataagtcaaatcaccttgaacctcaagctcctccattgccaaatgttcctcgggtacacggagacacttcttaagttgagacacgtggaatacattgtgtacatcagatagattattaggtagctcgagttgataggccatctccccaactcgcctaaagattatgaatggtccaataaagcgagcagacaatttgcctttaactttgaatctcctcattctacgaagtggtgacaccttgaggtacacatgatcaccttcctcaaattccagtggtcttcttctattatccgcatagctcttttgcctggtctgag

SEQ ID NO: 108367 - DNA, 461 bp, Zea Mays
ccgacgacaacatattgtcggtagcctgttttattccaagttgagcgaggaactatacgaagctcgaaaaattttaaacgaaaagtcacaccgcttcgaccacgagacaaaagagctcaaagcaaaggtcaaagctgaagctgaaagaaatacgaagctacacgaagctattgagaaccttcggaacaagtgctctgactttgccactaggtgcattaaccggctgaagggaatatttaactcggttggagctacttctgaagaaattaacccttcagccgaagatatccccgggaccttcgaacatattgaaaatgaagttgaagcccttgatgaagtataaccgggcacggagatttatgtgcactggtggcttcacgcggcacagctgcagcatttatgaaggtcgggtgcaatcatgccaaaactgttaataagccaattttcaacctttcaacatc

SEQ ID NO: 108368 - DNA, 318 bp, Zea Mays
cttacttttcttcagcgatgagatagtttattaaacaatcccgcatggattcatatatatcccggatatatctgtcatccgtatttggggtttttaaaagatttgtatgtatcccacaatcaatatccaacaaaaagtaactcattatctgataagcacttgctgaggcatcttgggatactggtgtgtatcgcagcacagacaagtctcctgtatccgcgtacgtcttcaaacttatacatgatgatatataccgaaatgggtgcctgcagcacagtgtttccataaagatatctttttcaaagaatgtaggtttgt

SEQ ID NO: 108369 - DNA, 1000 bp, Zea Mays
ttttagactcatagtggacattatgaatttgtggtcatgccatttgggctgtctggtgctccagggacgttccaaggagctatgaagaccacactggctacattgttgaggaaatgtgtgttggtattttttgatgacatattggtttacagtagaacatttgaggagcatcttaatcatttgagagatgtgttgttgctattgcagcaggatcattgacacattaaattatcgaaatgtcattttgcccaacgaattgtctcatatttggggcatatcattagtgagcaaggtgttgcaactgattcagccaaagtggctgctgttcgggattggccatctcctctcaatgtgaaagagttaaggagctttttggggcttgcagggtattataggaagttcattcgtcactttgctgtcttgaccaagcctttaaccgagttacttcgcaatggtgtcttgtatgtttggacttctgatcatgaaatttccttcactgctgtcaaacaaaccctatgtactgcacctgtgttggcacttccggatttcaacaaaaccttctgtattgaaactgatgcttgcaagtctggtgtgggagcagttttattacaagaggggcatcctttggcatttattagcaaggcactcagaattaaaactcaagggctttcaacttatgaaaaagaatatttggctattttaatagctgtggagcagtggcgaccttacttgcttcacgcagagtttattatctttactgatcaaaagagtttggtccatcttaatgatcagagattacatacaccctggcaacaacgagtttttactaaactactgggcctacattacaaagtagtttacaaacaaggcatccagaatagagtggctgtcgctctttctcggaggacacatgaagaggtaatctgtcattccatttctgtggttcagcccaaatggtgtcaatctatctgtgatggctatttgtcggatgaagatgcta

SEQ ID NO: 108370 - DNA, 654 bp, Zea Mays
gtcattcgtcctgaataaaccatcttggagtcaagagaatgccaacccggctgaaggggatgagcctccaaagtcagccagactcggcaacgaggtacccgatgctcctcatacaactgcgccgtgtacaaagggggcgtagggtagccagtggagttaagcacttcccacaagatggaaggaaagccatcgtgagaaaggaagtcagagctgaaacgagtgtctcctccgctggcgggggtgggtgaattcatctgcggaagggtatcaaaggtaaagattatggtggaaggaagaaaaataaaagagcctggatgggttaaaaggaagcgggttagctcaaattttaattccttttagcttttataatgcatgcatgctggaagtaacgtttcctctccgaatataagggtgcttcaaagcatcctctaaaaatctaagtactggcccacagggcctacttaattagccacctatttctcccactatccctaaggcctttcgtcctaggtctagcggtctagtcctgacgattcgtagcagtttctaagcaagttttagattttgaaaattggtattcatggtttattgttctcctctgtggtggaatttgctctgataccagctgtggcggaaccggccgaattattccag

SEQ ID NO: 108371 - DNA, 855 bp, Zea Mays
gttcaccttgttcacttgtgactggcacttagttgatttcctgcttactatatgcttattgttgtctttgtggtgaacatctctttgaaatgcttaaaactgattcaaaatacttacacttcacatatcttgtgcatatgcccagtttgagcatctactagcacgtgcatttattgctgcacacttagcacagcaccgcttagagcatttttacactctgactggtatactcctgaagctcatgcattttctctatttcatactctttgttgcatttctgttttttctcaggggaggttctcttgtcaagggggagtttttctttctacccctgtctgtgcttgatgagttcacttgtcaacaagggggagagattttgagatttcccatttcctctatctagggggagaattttgtctttcgggcttccgctcattcaatagggcgagatatgttatttggagctattgctagttgtgttgagtcgtttgcctccttcaggaggaactagctttgattttagcttttgtgctccgatgagattttggcttttggctagtggtgttgaaccctgcttttgcctcttattgagggctagtcttttcttgcttggtcgtgttgagtcgttgcccatttctttgtggaccaagttttgcttactctaaatgacttgtctagcttttatctggcttatggtcatttgagtgagtttctcttcttactctttctgtttacatatgctcaaatggtggtgttgacaatgcactcatcaagggggagattgcaaacacaaggttgacatgtcccttgtggttcgggttgatgatgagtgattgtcaaggggtagcattctgg

SEQ ID NO: 108372 - DNA, 761 bp, Zea Mays
cgaaagtacagccgtctggggcagacggtgggcccgcgaagaccatccaggtcggcgcagacccctcccagaccacccgcatcgcggggaatctgggggaaaaataggaactcgcgctcgttgccttcctccaagtaaatgccgacatgttcgcttgggagccgtcgcagatgcctgggatccccagggaggtgattgagcaccatctaaagatctacccggacgccaagccggtgagccagaagccacagagacagtctgtggagcgacatgacttcatccgtgaggaggtccggaagttgttgcatgctggcttcatcgaagaggttcatcaccccgtgtggctggccaacccagtcatcgtgccaaaggcaaacgggaagcttcggatgtgcatcgactacaccagcctgaataaggcatgtcccaaggactcgtatccattgtcgcgtatagatcagatcatggactctacctcggggtgcgaccttttgtccttcttggacgcctactctggtttccatcagatccggatgtctaaggaggataggaggcataccgcttttgtgatagtggatgggctatactattatgttgtaatgccctacggtctgagaaacaccttgccaacatttgttcgggcgatgagtaagaccttcgaggacctgatccgggacaaggtggagatctacgtcgatgacatcgtggtcaagactagggaggggtcgactatagtggaagacctgaccctggttttcggc

SEQ ID NO: 108373 - DNA, 572 bp, Zea Mays
ccaatcgctcgcagagttgttgcaggatcttggattgtgcggcgatattcttcgattgggagtcgatttgtttggattgcgccgccaaagccgctgcgatgcccggatctgctacgcccgccatttttgcccgccgtgtgaagtacccggactccgccagacccaagatcggtagtctgataccaattgtcagcaccacatctatgctgattggaagagttggtagagaagaagggatatgcgaaggagatatggaggaaagctgtgtgttcttagttgctgcaatgtttttccccctgtcttagatacatcgaccagccatatggcgacacagcgtcacagcttacaccggcccactgccgtcacacaacccactttgagcccgtgtacaaggagttaggcctccgaactctacgacttgtcttcggttccgcgcccttgcgtacttggtccgacccatgagcatctgtagacactgccctgattctagagcttctgatcactgaggctctgatccgcataatagacatcgccatcattactaggacaatggttgttgtagaacgtggtgg

SEQ ID NO: 108374 - DNA, 722 bp, Zea Mays
gaacaacttgaaacgcttgaagtgtgccttcttaggggcgaatttctcatttaggccgtgtagaacattgatgatgagggtgcaattgcggataatcttgtcgaggtcgccgagagtgccaactatctctttcatcttgcggcggtagtcgttgattgagacaccgccttgcatgaagatacgaaattcagcgtcaaggtgaagagcatgagcttcatggttgctagatggtgatccagaagcggcgtgctatgttgtggcggatgtgggtagactccactagcttggaagagagtgtgcctagcacccacaataggaacatgacatccatacgccaccaggatggcatgacgaagaaggtgacattagagaggatgtggtcgtttgaatgcgaggatgtggtcacgccaacgttgtagtgggagatggggtccaaaactgttggcatgaggacacagatgttcatgacacccgatgcctacacatggggactggcgatggtggtgcctcgtagtcatggatatcaaggtcgtcgacagcttggcgtcatcgtgggcaccgttgtcgcccaatgtcctttgtgagaacgtcctgtgcggcatgtagatgatcttgagcggcgaccatggccttggcagcctcaatggcggcaccaaccaggccctggtggtcctccttttatgcggccgcatccttggcgcgttgttgggcatcaacggtgg

SEQ ID NO: 108375 - DNA, 628 bp, Zea Mays
gataaatggacttaaagtcaggatgtcagtcaaccttgaagctgaatttcgactgacagtgaactgggacaaacttcgagagcaatttttagtaagatccattggatgtttgattaaggttgctataacaaaatcaaagctggtttataggagagcaactttgctacaaacagattaatgggtcgttgtataaaaattggagaacaaagccctctaacatgctctgtgagacgcactgatgggtgttcgcgatggtacagtagctgaacaagatcagattcaatgaccttcgccgccggcgatctccacaccgcgatccgtgctgtccgccatgattcgtgctcagctcgggcaggatattaccgcgaatgcgaaaagatcggagggggaatggattgagccggcttcaccgtacccacttgcaccggcgacatggtcgcgcgaccgccatcgtcgtgccaccatttacctcactcacgacatgccttaggctattctaccacgtcgtcgtgggttatggaggataaccaagtgacggccgcaaccttttgccccgtgaacgccatggtagttcgcgccggtgactcaccccctctctttggccgccagcttccctcttccaaattcg

SEQ ID NO: 108376 - DNA, 647 bp, Zea Mays
cgctctttcgcttgggactgtgaagccaaagctcttgctcgtgtagcagaacttagcgcatccctcgagaatctgcaagtgtactgcaacaccttgcatgaaaaagtgcatgtattgtatgattggctgcacccgaacgtgccacctgatgtggcagcaatgggagttggaccatctggaatagcaaatggaggatctgatgggggaattgacctttttggagcccctccttccatgaatctggcagatggacagtctcctaaagcaggcagcggaacaactaaggatgaagaagaatatagtagtatagtttatgtattgtacctatgtaaaataagtaagaaaagttgagttgtataatggagtctgtataattattactgttccgcaatgaaataaagatggtgtatgatggcatgttatatttttctgaatgtttctttgcctcagatgccatctcggacccatgcacatgatggggcaggtacatcccgcggtggggaggacactcccaatccgccaccggtacctcctaccttggccgaggctatcgctgccttggtcaacaccactgctgacaatacacgctttctgcgcgaaatagcgggcaaccaatttcaacaacacggaggaagagttccccctca

SEQ ID NO: 108377 - DNA, 582 bp, Zea Mays
acgctctagattttaaaatgacctaggctagtctctcccgtctaataaggatctaaccgcccagatcaatccgctgcccatacaatccagaccgcttatctacaccaccccctaactcgacgaccgaacccggcggcagcgccgccctgcccagacggtggagcatgccgacgagacaccgatcggccaccctagaacaccaaagccaaattggacggagctatcacgacgagaacggatggagaagataataggcagatccttacctcagttcgagcagtagagctcacaaaccatggtgaagggcagcttggcggcagcgacgaacgatgatgagcaattaaggcgctgttgaggccttccacgctcaatcacacccttgagcacaacccccggggtacggcaaacaccctagtcaagcttggaggtcccggcggtgatcgaacctaagctaccaccatggcggacctcaccctctcctctctcatgttggctctgataaggcgccctcggttctcaacacgacttcaggaagggacacttatatacacaagggttgggtctaaggggcagagaacccgg

SEQ ID NO: 108378 - DNA, 639 bp, Zea Mays
tgtgtctccaaggaagtatgtgttcttggcttagtgtatggtggtctgttattgacagtagtgggtgtttgtgtcataggtgtttctggctttggatatggatttatttcctaggtgttcccgcgctccgacctgcgagcgatcgcctctctcatctcatatcattcaccactgctccttcaaggggacgtcaattttgattcctatcggggttttaggtttgaagcttttttggacaataatgttagggtattttggttacaccagttgaggctgagcttggtgtcctccaacatatcctgcaaactttgagtcgctgctcggggcttaagtttaaccttaataagacataaattttccgattcgttgtcatgcaggtgtgactgagtctttgcccatgtggttcctggcgaagttggcatcattcctgggtagatatcttgggctcccctgcatttgagaaaccttggaaaaattgatgtgcaatcattgttagacaaggtgcgggccaggctttcgggatggaaagggaagctgttatataaggctggacaattgactttggttaaaacagtgctaccagctcggccgatttaccaattggttgtgttcctagaacagaggtcgatttttaagaaa

SEQ ID NO: 108379 - DNA, 585 bp, Zea Mays
attgcaattcggcctctcaggcactctgaatcagggcttcgatggtatagtgtaaagatcatatcgccagttcagataactcaccaccagcgaccgtgcacccggattcatgcccgtcacggtgattcgtgctcggcgcagttggataacgcagaggggtaagaaatatcgcgtcgtggatgaactacggccactattctactccggttgcagtacccgcctgagtcacagccgctttggataggctcgccggagttagccacctcacaaccttgcaccacatgcctcagtgctttaaccacgccgccgtgagtcatcttagcccatccggtgatcgccgatgagcttgccacggtaaatgccaccaatcgcttgcgccagtgcacccccttctctccgaccgccactgcgcgagctcaaattcacgggccaccgctcaagggccctataaattgagcacagcctcggctctgctaagtattcaagcatccaatccacccgctcgtgcctccaattactcaccagagagccccaatttgggatttccccccaaatcggtccgaaacaccgcgcatagtgacctcg

SEQ ID NO: 108380 - DNA, 327 bp, Zea Mays
gccgaaggtgcctacagtcgagccagccgaagctagggatgttaaggctgaagagccacaagcggaaaaagtgataaaaacgccagaaatcctgagcccaccagaagttgccaaagatgcaaaagattcctgttgcaactcccaagaggaggaggatggccaacgtattagacgttgttatagagaccacgaaggccttaattcctgcttctaccaagaaaactaccaaagctgccaaaaatcaagtcgaagctgaagctgggccttcagcgcctattaagccgaagaccgccgtgcctgaagataaggtgggtcagcaaagttcat

SEQ ID NO: 108381 - DNA, 373 bp, Zea Mays
cacaagtttaaagtattggggagtaaattattagcgaactgctgtgcgaagataagattttggggaaaaagttttttagcggaacccctaataaatagtttttgggaacaattgtctaggggactcttggagttgctctaatacctacctctccccgcgcgtaaacagaaaaataattgacacgatctacaacaaccccgcctgaatcgatctccttcatgattttctctcgttccttgtcaatagatcaatctgcgcagccggggtagctacaacgtcttcctcctccctctgtaattcctagccagccaccacgtcttcctcctcccctctataatacctaggtcaaagggagaaggggtggccatccccc

SEQ ID NO: 108382 - DNA, 422 bp, Zea Mays
gcaaattctaggacccaacggtaacaatcctagcactggtcgagattgcggtttaattatcataaaactaagggtatctttatgaattcttacccagctaaactccacaggtggtcgcaagccattgatcgctagatctgcggatcggatccaatacgcgaaggggtatgcgacgatataatcttggccatccactgaggatcggacggtactaagcgtatgagatctgaaacctgcccaactccacacgattaacgtccaatggcccagatcccctaccccgaaccgttgcacatgatctaatccaaggcgttggctcgaggatcaacggttccagcccgacctcccctccttcttccctaacactggagggcggcacaagcacaagtacggcggcgcctcaccggcgtacgcaggtcccc

SEQ ID NO: 108383 - DNA, 1454 bp, Zea Mays
gaaatgtcgacatccctttttgttcgttggacataagttatgtttgacgacagccgtcgaacattagattatttctgacctattaagtccgagggacggttgtcatcgaaaataagccgaaagccatcggagatagcttatttttggtggtataggccttatttttgtcaattttggccctcataaattttcttttttactgttgtggtggactaactagagcgtgagattgttggtgtaacatgtcgcttatcttgtggtgcacaggtgtgaagtccggtgatggtggtcgacggcaaatgtgaaggtcatgcatgtttttactattcaaggtgtcgcctaggtatcgcggctggccaatctatataaggtgctccatgcaccgatagttggtcatggacgtggttatgggttttagtcaagtaggcatatgggtcgatccacctctagcctcaagccctcattcttctctcttcttccttcagttttttgccttacctgtagtagttagtgtggttgtcgtaacgtacagaaaaaatttaaattcggaaccactaaccttgtcttgagagggtggaatcattggttgcttttccccttgcatgcatgtgtcttgttgctactttacccctttgttcgtaggtccttatggtgttgtccagcagtagctcaaccaccaccgaggcgtatacaatggtcgccaccgtcattctagggggaggactcttacttcaaggaatgagatggtgctgacccatgtcacttatgaatggtgttgtctttcactagttcaagatatataggttgatactcacatggtgactctttgccgctccacctagtctaaagttcatgtcagccctacacctagcgctagacttcattctatctttttcttaattttgtgggtctagagaccaagtgggtaagttagttgtcagatgacatgtccacattaagcaaggccatcaaatattgctagacagccatcggtctcagggaagcattcgccatcccatggtgttgcctcttccaatggtgtttcgctagtggggtgctacgatgggttgtggtgcgagtaaacgctagaggggctcattcttggtacttatgcccaatgggacgaccatatgttgtgggcaacatgcattcatgagtttgtttgaactgaccaagcttagccatgatgttcgcgctagtcgtgcgggccacacattggtcacggaggtcatggagcctgggttggctggttggtgatagcaaacatccttttgtcatcttgttgggataggtcattatgttggtgccgcttctccccatgctctcgctagggtcgcaccattcatcctcccatcgaggtgaccttttgctcaattattgaagaaggtgcctaccgccgcctctctagacacctagtcactagcaatcgtcattagctcattgatggttttggg

SEQ ID NO: 108384 - DNA, 658 bp, Zea Mays
caaatctgcatgtacattaagtgttttgtagcctgagtaatgctcttgattaggctagattagaggactattatttccttccatgtttgtacattcactgttgtataagaatagcatacagcaatagagaaatcattccgcctatttgctttcttggtatcagcctaattgccgatccttcctctctacctgttgcttctccctccttggttgaccagcaacttgctgatcctgctgctgctctagcctctgtcaatgtccgttctcatatccctttcactctagaactccatcctctcaactacaatagatggcgtgagctattccacactctagtgggaaaattcagtgccattcatcatgttgatggcacagcagtgcctgatcctggcacctctgtctggatagcgactgactatgctgtgcactccctcatctactcatcagttttggatgaaatcctcggcagcgttctcacgcgaggtgccactgcacgcaccatatggactgcaattgatggaatcttctacgcccttgctctcgaagctgagttccacaccactgaacaaggcggttagatggtgcttcagtactcaacggctgaaagcgttggctgactcccttgctgatgtcggtcagcctgtctccgccgacactc

SEQ ID NO: 108385 - DNA, 423 bp, Zea Mays
gcgatatgctgccgtcgctatctgctgagatcgacttcgagcttcgggaagccaacacttttcgataaagtgctgacaactttcgccctagtccggtctcgaaggcaacctaagctctctttgtctataccaccgaagagcagcgccctggctggtactcgcaagatatagcaaagtccctcatctcttctttttcagccttagacaactcttgcccaattatgttttgaaagttgaaatttctttcttccgaagcatcttcggcaagctccttctctttttcaggcactgtagccggggtttcctcagtagctgcagcagtttcttcctcagccatattcaaaatcattttatcaatgtcagtaagcgtgttttccaaatttgtggcttcggctgctgcagcttcgaaagtagaagcttcgg

SEQ ID NO: 108386 - DNA, 449 bp, Zea Mays
gaagaaaactggagccaagcaaacagatgagtgaatatacgcacaaacaacatagtgaaatcacacatttaattccttatggttaagaggaagtaccttgtggtaagcattgatgcatcacgagatgaggaggcagacattgctcgatcaatctcctccgttgtgaaatccatctcctcctcttcctcttccccctttcttgctcgcgcgactcagaagaaatcaaaatcttcctttctgcacccacaggaacaagagtcagatcaatcgtcgtctcatcctaggcctcccaagcaacaaactccggcgaaataataaatatggaattttttcaggcgcacgtacctcgttcaccttgtaccggtcgagggtcacctgcaccagcgaactccccgagcaaagcgtctgcgccacaagagaacgaagcgcacaatcagcaaccaacaaac

SEQ ID NO: 108387 - DNA, 608 bp, Zea Mays
gaagcaactgctagatgagatccacgttgggcaatgcgggatacacgcagcatccaggactctagttgggaaggtcttcaggtctggtttctactggccaacggcaaagagtgacgcagccgagttagtccaaaggtgtgaagcttgccaatatttatcaaaacaacagcatttaccagcacaacaactgcaaaccatacccgtaacatggccatttgcgtgctggggactggacatgattggaccctttaagaaagctcaaggaggatacactcatgtactggttgctattgacaaattcactaaatggatagagtacaaacccattgcttctctgacttcagctaaggcagtggaattcatacaagacataatattcaggtttggaataccgaatagcatcataactgacctgggatccaatttcactagttcagagttctttgatttctatgaacaaagaagcatccagatcaaatatgcatcagtagcacacccaagagccaacggtcaggtagaaagagctaatggaatgatattggaagcactcagaaagaaagtcttcgacaagaatgaaaagttcgcaggaaagtggatcagagagttgc

SEQ ID NO: 108388 - DNA, 337 bp, Zea Mays
aagaaaaacaatgaatagactcgggccgaaatcagcccaagtcggcccaactacagcagaaacacgtccacgcgcgcgcgcccgcggcaactttgcacagaggccctcggtttattaactaaatcgaagtaggtttgtttactgttcctctgtgccactaacaaattgcagaaatgccctccatcttctttctcttccccgcgaatgcccctgaccacggcgcgcacgcagatcatcccggacgtggtccataccggccatggccggcgatgactgctcggaataactaacggggaggcttcactgacctaaggcgacctaggaacaaccattaaac

SEQ ID NO: 108389 - DNA, 489 bp, Zea Mays
ctaaacccgagaccttcagtaaaatcaggatcacaactgttggtagtggtacggaccactttttatctaccatttgtctactaactcctcattttgtggtcaccggttactatttggaggttatttctattcaccgagaggttaagcattgcaatgcattttgagtagatacacatctaagtaaaaccaaacagatgtcgctaggacacttttatttatttatttacatagatcgcgcagcatccacccttcaatgttctacactgcctgctggccacaaatctgcattccgtgatccagcaagaacccatgtgcgcacaatcgtctggaaattccagcttgctcaaggcactacggtgcccctcaagtacgattggttgaataataactagagaggaacactcaaacatccagacgataaagacatggaggcagaggaaaacaaacctgcgcccacgaggccagcacaagatctatgtcacgaacggc

SEQ ID NO: 108390 - DNA, 433 bp, Zea Mays
agaaaatcatagtaaaatgacccataagtgttagtggctaaaatttggtacaaagtcatattactacacctaaatgccagcaaaaataagctttaaggaaaaatccactgttaaaggagagttgtagttcaaagcaccccctctgccgtacaaattgataattttgtacagagagaacccttgacattttgagcctaaatttttaagactaagagttatacaccagtgagaagctactgtaatttttacagaagttttcgaaatttatagaactaggttgtagttcaagcccccccttaaaagcatataagaaaaggagaagaagagataaattgggaagaataatgaatctcaccccaatggattcagctaggaatcataataaactttcactaagacattagaggtaaatcagtggaacactaaaataatc

SEQ ID NO: 108391 - DNA, 427 bp, Zea Mays
cacaaagtggatgtggatccttgtaagaaaatgagcccagatacaggttgccagcaaatcagccctactcatcagagatcactgttggcccatgaatttattcagtaatagcagcgtaccagcagggggttccgagtcagtagcatattcagcattcaggaggaggcaatgaaaactacacattgaactaggcctaagtgggtctttctgatccattacttctgagagtgtctaccagccgtttcacccaattactacacattacagtctgtgttttgcatacccggttgttgatttactgtccataagcattgttttactgttactagtattgttgatttactgtccattaggatggcagaacaaagcccctagctcagcaggttttactgctaccataccactctccacttcaagttaactgtgg

SEQ ID NO: 108392 - DNA, 709 bp, Zea Mays
tttgagaatttattatttgaaggtgatctgatctcgcattggtgcacacgagctatccaatcttgcacagagcagccttactgtggtcttgtatcttatgacctgtcaaaagacatggatacaaattttgataggtcataagttacaaggaccacaataaggctgctctgtgtaagattggatagctcgtgtgcaccaatgcgagctcagattatgaatgcttctagtactggctaggacctactgccatatgaacattgcagtcatccaactgtcagaaggatgattagtgcgctatcatacatattttctttacatttgggaaagacaatgttgagaaatcagacatcacattggacatttgttcaattgttctcaagttaaaactggaccagagggaaaatatgccccatttggtggcagaaacatggattgtctgcacttaatgaattgatagatacagatacaaagaacccaaaagcatggatcagatgttggtagctttgcactcaactgaagtaggcgcgccgctggtttccaacatcagtcgtcgtgactgggtctggcggctgtctaactgtaggagctcaaaatcttgctacttcccccgggctctgtatcgtcggtgttggtgttggaaatactcgcactgctacagatagagtagctgattatgatccacatctacccacaaactgcaaaaaagaag

SEQ ID NO: 108393 - DNA, 1318 bp, Zea Mays
ccccaatagcttttgaaatatagctaaggataaaacttcctgagatgttctatgttccatgagttcccgacttctgtgccatccatctgtgtgagtcgatatgatccaggccgagtgacttcagctactatgaatggtccttcccatagaggtgacaatttgtgccgcccctcccccgttagaattcggcggaggacgagatctcccactgcgaaggatcgatgtcgtatggccttatcgtgatagcgcttcagagtttgctgataccgtgctgattgaatcaccgtgtttagtcgttcttcttcgagtacatcgacatcctccagcctagtagcctcagcttctgctatgttttcaaagatcaaccttggtgccccaaacttgagatcagcaggtagcactgcctctgaaccatagaccataaagaaaggagtgtttccatgcagggctctactaggttgagttctcaggctccaaacaacgtacgacaattccctgatccactttcctgcgatttttcatttttgtcgaaaactttctttctgagcgcctctaatatcatcctgttggctctttctacctgcctgttggctcttgggtgtgccacagaggcatatttgatctgaatgcccttttgctcgcagaagtcgaagaactctgaacttgtgaagttggatcccaggtcggtgatgatgttgtttggtattccaaacctgaatattatgtcttgtatgaattccactgccttagctgaagttaaggaagcaatgggtttgaattctatcaacttagtgaacttgtcaatagcaaccagtacatgagtgtatcctccttgagcttttttgaaaggtccaatcatatccaatccccagcatgcaaatggccaagttacgggtatggtttgtagttgttgtgccggtagatgctgctgtttcgacaagtattggcaggcttcgcacttctgaactaacttggctgcatcactttttgttgttagccagtagaaacccgacctgaagaccttcccaaccatggtcatggatgctgcatgcactccacattgcccagcatggacctcatctagaagttgctttccagtatctaaaagaatacacttcatgaggactcctgacgtgccccttctgtatagcgtgtccccaatgagcgtatagtgagcagactgccttgcgatacgctcggctgtatttttgtcatctgattcctcttcattccttatatatctgatgatcggctctctccagtcatcaggatttgattccggttggctcagagtattgcattcttctacccgatccac

SEQ ID NO: 108394 - DNA, 317 bp, Zea Mays
ttgagatagctccagtgcttggatgtagctcaatcatgaacttgatatccctatcgtgcgacattcctaacaaatcttctaagaagacattgggatactcgtgtaccacatgaatctcttctaattgggattccactattgataaggcacattatttggtgcatttctagctaggcaggtacaaggtaagcaccccatatacatgtgaattaatgtcaagcacacgggctactatgtctagcactacttgatgtttagtcaccagtctacaccttccaaacccaagacaatgaggtctatgtttcagataaagaaaa

SEQ ID NO: 108395 - DNA, 291 bp, Zea Mays
tttttcttcccctcggcaggagcagctggatgactgacttggcgaagacgtttcgagcgagtaccctcaggccttcgagtatccacggttctctcaggctctgggatagttgcaacagccattgtttcagcagggaccgagtcagaagaatccctagccaacatgtccagcatagcgcttatctctgcatcacccggactcataggcatctcaaagtgaacttgcctctcatcattgggaagatctccaagtgaagcaaccagaacctcaacttcttcaagagagggtcgc

SEQ ID NO: 108396 - DNA, 618 bp, Zea Mays
ggccctgagcgttgggtgtgacctgtcgagccggcgccgggggagagggttgggcggttacctaccgagctggcggcgggggttgaagctacgaggggtggggcgtgcgcgcgacggcgcgcccaggcgagagaggaagtggacctccgcgcgggggtggggctcctagaagcttcgcggcacgacgcgagaaggctgcgaggtcttgtgtggaaccgtagatgcgcgatcggacgactgaatgttttcgggccgacatggataggctgaaaggctgagttttggaccggctttaatataaaggaaataagacttaagaaataagtagatcataattctatcttttagcctattttttatctaattaaagtatgacttgttttcactaattttggcgaaagttgttgtacattttattttggccaacgcatattttattaaattagtttaacaaagcttgttattagaaactcgtatgcctcattttttatcattctggctaataccgattgatgaatatttgactataacctcaagacaaaagtacaatctagctaaggataggaatttggattctaagtaaatgagttatctacattacaccgtaataagtacagg

SEQ ID NO: 108397 - DNA, 534 bp, Zea Mays
tctgtcagctgtctgaaccaagctcaccatggtacagtataccccaaactgaatccgatcacgggattcatttcccctcgtcgccggtgatccttcgtcgtgtgtgttgattgatcgtcgcgattcgtgcaccacggtcgggggataactacggtgaggtaaaaatcttggcataggatcgactcgagctcggttgcggctaagcccgccgtacccccttgctcatcggtcgatcggataagagctcaccgccattggttgatcactgccgtgcgccgcgtgtgtaggctctgtaccatgtcgcaattagttatgttaagggatccagtgatcgccggaggaagcgccacggtgaaagtcacccatcccgagcaccagtatccctgtttccctccggccgccagcacaacctcgaaaaattggacaccaccgacgatgggaactataaattgccacctccgcccgctccgctaggtaactgcgcagccggtgaagcaatctgcaccttgaatcctcccctagaattcaccaatt

SEQ ID NO: 108398 - DNA, 450 bp, Zea Mays
tctacataaagaataaagatactaaacaagaaggctacttttcagtttgtataattgttctctgaaagaattagagacaaacctactaaccatcccggagttgtcactttggatgttacgtgagtagctaaagttgttacaaaaagtgtacagggacatgggcatctggattaagatttaagaagaataagaaagtttagtgttgatgatgtaaacaaggtactttgaggcattggatcaaaccagtttctggaaggctaaagaggaccgtgcacagaatcccatagcaaaacacatttcgttacagtgaatggatttcaaattaggggtcttggtatttacagctgaggactcttacactttctgtgtatctttacagccttgcctttggtatggaacagcataacatacaaccaccccccccccccccccccccacaactaccaccac

SEQ ID NO: 108399 - DNA, 464 bp, Zea Mays
cggaggcgaaggcaagcttggtgccgatggagaagcagaaatctttgaagtcttggttgtcgaactgcttgccgttgtcgaccgtgagttcagacgggactccgaagcggcaaacaatattttgccaaaagaatttctgtgttgtctttgatgttatagtggatactgccctcgcttcaatccatttggtgaagtattcgacggcgacgaaggtgaacttgaggttcccctgagccgtgggcaggggcccgacaatgtctaggccccagcgctgaaggggccacgtgtgggcgattagcttcacgaactgcgaagggcgtcccgagtgtggggaaaatttctgacaggcttcgcaggatctcacgacccgatttgtggcgcaaatcatggcgggccagtagaaaccttggcgaatcacctttgccgctagggccctaggccctgcgtgggagccgcaagtcccg

SEQ ID NO: 108400 - DNA, 414 bp, Zea Mays
taatgaagggtcatgaagaatcttcaaaaatagctccctatgtgcattaaataattcaagaaaatccaagaactccttcgaaggatgtgttgcagcatcacgagttttttgtgtagcgagagcctcactctcatcagtgagattcccaggtgctgtctcactgggtgcctccatatctatgctacctttgccatccatgctgccacaagccctgcaaggctcttggacagtgggatgttgtggacactcatgtggcaatggtgtcggttcactgtgacaagaacccatttcaatggagcccgagttgttcattgcatgataatgtgcagctaactcatcaggaacctcataatcaaagcatttcgagtgatggattgatctggagcgcagcagacgtgatgaggatggggagct

SEQ ID NO: 108401 - DNA, 391 bp, Zea Mays
gagcattcaagaaaagagcataaaaataaaatacaaccacgtaaatagaggcaacaatcgaggactaatattaagctgaaacttccaggttttaagcaagattgtcatctataacgaaatacttacaacgaatgaatgtaaatgtaagtagggcttgggtgatataacatttgatgatcaggcgcataatgcacgtaaaaaatatatatatgggccgaactaaaaaggtattagcaatgtaaaagatgaaagacagtaacatttacgtaggtagtaacaatgaacacaatatttacatatgtgattttgcggctgacacttcgcagcaagaggctaagtcggagcattaagaaaagagcataaaaagtaaaatacgaccacataaatagag

SEQ ID NO: 108402 - DNA, 435 bp, Zea Mays
tttagcttcggccagttgttttcgaaggtcttcaacctcggctttttgggtttcagcctgagcattgtacttagcttcgtcttcttttattttactcaccaatgaaattaaatttttgtctttctctagaccttcgtttctcagctcgattacctctgagcgaagtttgctaagagctattgtacagctttcatcttcggcgctcttttgtgccctcaaggcatttcttagaatcaagccctacaaagaaaaagaaagaattaagcatgacaatgaaacacttcatttccaactttaaagtcgacttatatacctttatactgttgtacgcaaggctatcagcaagatcatccttcgacatagccgaaaggccttcctcaagcttcgaaaatcccatacttttagctatctcccggcaaactgatatttctttgt

SEQ ID NO: 108403 - DNA, 600 bp, Zea Mays
ggcttgtatccgcccctagatggaatccatgagaatggcactacgaatggtgtgcccacctcatgtgacgcacaagaagtgatgtatgaactatacaagtacaatgcttgtgtgttgcaacgacacacaacttattcgataagttgttaatgtacaacgattagatgacaatgaaacatgtatatcatcattgcttaataacatttatgcatggccattgaggtcaaatatgtacttgtgtatacgtccattcggttgatggttcatggtaaggaactaccacaactacgaggtcagcatatatttttttgcagaccgtcctccaaatacctggaaccgacttccatttatgcagagtcgaatcacttccatcatgcaacatagcactctctagaaggggtgtgcattttctatgtgcttgatgttatagctgcaaagtggattagtgcaagtttgagaccaaagatcttagatttttagcgagaataagtgataagtccattgggcaacacaataactcataataaactatccaaccttcaaaagggtcaaaataatactcccgcgaggctaaaccaagatctggatggtaggactttg

SEQ ID NO: 108404 - DNA, 631 bp, Zea Mays
acatatctttgtgctgcttcccttcattggcgaaaatcattgcctactctaatatattcatatatgttttgtagcagcttctgcgaggaatgtggaggttttctggcaaagtactaagctgctagacccaaatgaagccccttgatcattatttcgattacaatgtcatttggcacacttggtgcctgagcctagagacgaaggaaccttcagacataagcctaaagatattcatcatgctcttatgtacactggaacccagcctgtgtagttatgggcttcatctgaaaacctaaaaactggtgagaagcatatctttaagattctgccatgatgaaaaagtgctcggtcaaagagaagagtaccaagtttgggccacatttctgattgtcatgacaaatgattttaccatcaccattgatttgtctccatatgaagatatagtatctttgtaactcatcaaaaattgcttcggatctaagaaaccatcatacatttggagcttaggtggcctatacaatggtggccatggtgtagcttgcaactctattgctaaaggagaagtatgatcatatagatatcatcataagtgtgcctttcatgacgaaggttccattggtggtttggctcc

SEQ ID NO: 108405 - DNA, 480 bp, Zea Mays
gcatgcatcacagagtcataggcatatgctccttgataaactagttggcaggctaagttccatagtcaaggccgcaagtttgtgaagagccgagctaattaggcgacccacaacaccattttatcgaggacatgagacgtggtaagccaattggacctgaaaaggagagacaagccaggacccgagtggttaagtagtagctacattggtgctacagccgactgtcgtcgagactcgagaggattcgacaggtgaagagttgcgatgctatacttatgaaaataataagagcatgcgatatatatggaggaacaccgtgtaccatatagatatggaggatggtatagataaatgagaggtagaaaaggagtgtcggcggtatgatcatgattaggaaaaagagagaaagaatagggaagaaaaatattgagtataaaaacagggattacaacttagggaacaagctggccatgatatata

SEQ ID NO: 108406 - DNA, 524 bp, Zea Mays
ctgggccacctgaaataaataaaagaaaccaaagaattgagaattccaatgcctagcttaattgcagcgaattccaagggttggctgcgggtaaccatccggatttacgtacagtgatgtccaacaactctaactacctatgagatgatgaccactggacagagatacagaacgaccatcatggccaacaaccttacaagtgaaaaggaattcgaggaacaccaaaggaattcgagctagccatgagctagctagcatgcagtttagctgctgattagtcttccatcctgcctgcctgcctgcctttgaattagcagctcgatctgatctgatatacacacgcagacaagtgtccattgtgccgctcataatttatgcgccagggggatgcctccaaacaggaagaggctaagctggagaattaatgcatggcaaaaggcgtcactttttacatttgaagataagtaaccacactggcgccattgaccttaattcattagaatttgccggctaaacaaccaacc

SEQ ID NO: 108407 - DNA, 508 bp, Zea Mays
tgagatcactggttagttgatgtgccttttcaaaacagcactagctagcgaagtgctttatcatgatccaacgtggcgttcgatggcaagtgagacgatgttttgcgcacccttgattatgtgactttgttgtttggagctacagtgagaacaaatcttagtgtgtagtcggcttggcagtagctagagacaactacttatttatcaacttgatagcttgcagcagactgcggtggctagccttgcatagctagggttagcctagtgcaatacaacgtcgacatgaagcacaagcggaggtgatagcgtgatggttacatggtagcggttggctcgccattaggggagaacctatatatacatgagtgaggagatagcccccactcatttctctggtgcaagtagtgtaacaccccgagatccacaaacaccccgagatgctactggacttcactaccaacagccgaacactaagcaaaataaaatttggcagcgtctcctttgtaat

SEQ ID NO: 108408 - DNA, 567 bp, Zea Mays
gccatttatacacatgcacattcgatgttggccgacagatcaaaggcaatggttcaaattatttggtccaggtgggagcatgctttcctcgcctaggccaaggttatggcctagggcacaggggcgcacgcggcataggctagtccgactatgttggatcagtttggccgagcatattgtttttgtttctattttttatattttcttaagtttaataattgcataagtgtttatacatttattttagcactgtttaaaattacacttactagaagaacattaaacatggttatcacggtgccacggcgagatgagtcgccagccgtatgcctaaatgcccatttatctagcagtaggtatgcaacatatattatgtgatatatcaaaaactagcaaataaaatatagatctagcaagtagcaagcaaccatggttgggcgtgggcgcacgcgacatgggcggccgagtcactccttcaccgacgctacagtgaccgccggagcttctccgacccaacgaaaactgtacttgcacttatggtgactctcgtttcaatcttgaatgtat

SEQ ID NO: 108409 - DNA, 314 bp, Zea Mays
taataaaatcaggtcgggtacggataagacccgcgggtcaaatttcatgcccgaacccatacccgacgagtcggatatccgacggatatctgaacctctggataaaattgccatccctacccaggttgatacttcaccactagacatctttctccccgcgctaactttcttttaagtttgaggcaaatctacctcggttttggtgcctaacacttctgcgccctttgttctacacttttgactctaatttttgggagacagttgggttgttctgtttcatgtttttggtgtatttaaatgacactggtttgaat

SEQ ID NO: 108410 - DNA, 384 bp, Zea Mays
gttgatgccatccttctttctattctttgaatcatgggaagaaatgcttccactttgggttttgtcagccccatggggagtcctaggcaggtgaaaggcatggctccgacttgtcattgaaatgtcttggctagaatatgcattttctcttccgatacattgatgggatacatattggacttgtgatagtttattttgagctctgtagagtctgcaaaggaatttaggatggctttcaggaaaaagagctgcttggaacatgtttccattaccatgctggtatcatctgcgcattggataattggaaagtcttaacccccaccattcacaattggcagctttagaagacccaaatccttggctttatttattatagactgtaga

SEQ ID NO: 108411 - DNA, 589 bp, Zea Mays
tgagattaagctttggaatgacaaggcccttgtgtcacatacaacttggctccccgtgccagctggccaaagttgaatttagagtggtagctgccgagattagcactagagacctagtgcaggaatatttggcaaatagaacatttccaacctctagcggctgggagatgccaaagaaaaaggaagggagaaaagtatgagcttgttcggctcccctatcgcttcaaatttgagaaacagttcaagaaaccatgcaatgaatggctagaaatgatcgagaccatgtgcaatgagattcttggaaattatacaaagaaggaggaccagctaatgccttcaatactcagccgaaacaaaggctgaaccgggtaatggatgcattgaacttcaaatacccagattatgagaggcttgacgaaggggccgggggtgtgaaaagaaaaaggtttgtcatcatcctaagcaggcaagctgcccggtccgtaaaataagatgaaaaggccttgaagaaagcaaaaatagtgctagagccgaaggcaacaatttctaagaagagaaagcttgaccaaataccctctacagaaccgaa

SEQ ID NO: 108412 - DNA, 324 bp, Zea Mays
ccggatcctgaggccgaacggcaagctcatcgtgcgggacgacaaggagacggtggacgagatccagggcgtggtgaggtctttgcagtgggaggtcaggatgaccgtgtccaagaacaagcaggcaatgctgtgtgcgaggaagacgacgtggcggcccacggaaatcgagaccagatgacctaaccgtgtagttgtttcaaaacacgtaagtacagaacagatcgatctacacacttggtgctgcagtattgcaataactaagtgagctagtccttatatgacaaaaaaaagacaaaggaaaacctgagcgatatgtagatg

SEQ ID NO: 108413 - DNA, 682 bp, Zea Mays
gccaccactgcgtttgggggccagtcaagcctggtcgtcggatgacctcaataccggactcccagcagtgacctgaatacccagaaggactggacagtacgccataccgggtgtatctctacaacatgctgaaggatcaaggatgacgtagtgctcatgatgacggggaggagtcgcgttttgtacgaccgtgccgtgagactgatccgtgggaccccacacgcactatcatgaagacatcagcaacagactcgctacagggacccgtgtggcggatgaacaggacggagcgtcttaccagaggtacggcaacgcacgaccctacggacgacgtcgggaggtccacgccacccaaaggcagcaagccaaggtccctcccagtagaatatgagatcctactgtaaagttctcccttgaattataaaagggcagggcaaccttccttctacacacaatcacacaagttgtaacatgacatactgcaattccatgatcaacactacactggactagggccccgacctgaaccagtataaccccgtgtcccaagttcatcgttcgagtccgagcgactcaccattcgaagcgagtctgcgctagcacttgccgaacaaaaatctcattgtccttcggtttttgaaaccatgacaagtcccatacctcccctgctgttatagtctgc

SEQ ID NO: 108414 - DNA, 419 bp, Zea Mays
agcagtaccaagaccagactcgacgggaggtgaaattccaggttggggattgggtgtggctccggttacagcaaaggtcagccgtgggcgtgacaccagcatctacatccaagttgggaccttgtttctttgggccctacaaggttacacagctagtgggggacatatcttataaattgcggctccctccgaaggcaaaaattcatgatgtttttcatgtgacactattaaaaaaatttattgggcagttgccagacgaggtagtgcctcttccagatctattacatggcagggtggtacctacacctaagaaggtatccaaggcaaggcttaacaaaggcgtgtgggaagtgttagttaactgggtgggtcgtccagcagcagaagcatcctgggttcagctagaggatttccaacta

SEQ ID NO: 108415 - DNA, 644 bp, Zea Mays
ttatattcactgtcaacaagttagggaacaaaccaacacgttccatctcatcccgtatcacataggcctcctcaacccttccagccatgcaaagcataccaatgatgatgttatatgtagaggaatttggctctgcatcctttttcattgcctcaaacaagatcagtgcttgatcaacttcacacttcttcccaaggcaagtgagaatcgaattaaatgacacaacagatggaatacaacccctatcctttaactgatcaagaagcttataggcattctcaaactggcctgctgacccataacccatgatcattgtattatacgcatacgcacaaggcacagctctttctgtctccatctgaccaaacagctcctcagcctcacttagcttccctgccttgcacaacacccaaatcatgctcgtgtacgatacatcatctggcttgaacccttgcgacttcaactcatggaagaacttccaggccatgtccacattcccagccttcccgaaacaatcaatacacacattgtacagcacaatgtcaggctcgaggcagttccccttcacctcgtccactagtgccagggctccctcaacgcgcccctcacgggccaaagcccgcaccagcgtcgtgaacagcggc

SEQ ID NO: 108416 - DNA, 938 bp, Zea Mays
caagaatattcttgttgctcctaacatcaaaatcttctttttatttgccggttcaccaccgacaactcttattctatggaatttaacccctttggtttatatgtgaaggatctggcaactaggacccttctcacccgatatgttagctcagggcccaatgtacactctttggctgccagcttcctccatcgccatgtccaccccacatgcgttgactactactgctttgtccatcacctggcatcattgtcgcggtcgtccaaggtctgatatcatgtctaagttgtctagtactctagtagctctgtcatctccagcagaaggggcaattttgatagtctgtgtcatgcttgtcggttaggtcgggatgttcgccttcccttccatagctcctactctagggcttctcaggcttttggtcttgtatactgtgatctgtggacatcacccattttttattacttgctgattctggatgatttttctcattttctttggactttccctttgcatttcaagttcgataccttcaccatgctctcgcacttctttgcttgggtctccacccaattcggtcacattgtccatgctgtctagggcgacaacaatcatgagttcggccactcctctcgttccttcctcctctctcacaaagttcaactgcgactatcctgtccctacacctccccacagaacggtcgggctgagcacatgatttgtaccaccaccaacatgttatgttcctattccaagcttccttccccgcctgctactgggttgaggtcctacacactatcgcctacctcctcaattgtcttccatccatggcagttcaccaccccacaccctccgcctttttcggcacaagcacaaccccctcctactcgcacctttgcgttttcgggtgtgcctactatcccaacatctccaccaccgct

SEQ ID NO: 108417 - DNA, 373 bp, Zea Mays
tttgagtttcaatatgtttcaatggtcactaaaaacttttccaaactctggaatgacccataatcttttgttctttctaggattctcacttttggtcccttaatcaaagtatgcacaactgaaagtccttctaggttctgactttaatactcaacttgatcttatgaccatgaccattacttgagctaggatatcttgagccttctggcttgagccatctaaatctatatgaattactccaatggcatcaagtcatgtctttaaatgttgtggtcttcaatatcacataacccttcacaacttgatgaacttgactcttgcaagcattctcttattcaccttcacttttggtacttcagtcctcttgaccttc

SEQ ID NO: 108418 - DNA, 447 bp, Zea Mays
cacgtagccccctgacgacggtggacggtggagtggcaagagagacggagagagtacagagagggcgaggcccaggaggacgtcagtgcatcatcggccaagtcaacagaaggaaaggggtgagtacgtggttggatccttgaggatgtcctcaccggagaacaccagaacagattgacgcactacaacggctgggcgaaggagagaactggccacgacaaggtaacggcggcaacaaggtcacccccctggtatttatccccctgattgctcgagcctaacaaaccgcgagccgaggatcccagcccgcctggattttgctgtttagctacaacggactctgcgattcgagcggaggatttttttagctgcgcgcgattccagcgggataatcgtgaggagggagaagacctagcacacgggcccgcttgtcattggtactacccg

SEQ ID NO: 108419 - DNA, 1080 bp, Zea Mays
gttacattacatgccatttatataatgacatgagcatatgagcatataccttaattaatctttctttgacaacaattgtagattctctctctttgatggaatgatcaacacgacggattttagagcgtcttggcggtcggcatccgggtccgggagctccggtcctagctctcgtcggctcactgagcaagagcttgagatcgtgaggctgcgtgaggagaaccgttagcgcgatgagcagttgagggctcaaactgagcagttgagggctcaaagtgagtactatgccttagtccacgcgcagcatcagcagatgcttcaagtaagcccaatgcgttattactgtttattcattgctttacacatccaatgcgtactactaatatgcttggtcaatagttactagctcagcagcagggcattccctacgtggcccctccgcctccgccgcaatggacgttcatccctatgggccctcctccacctccggtaagaaattctatgtccattatctagttacacagtaaaaacaatgacttgtgccgcactgcactcatgaatatgtattattcttgtattcaacagggacttgtgccgcagcagcctcagtttagcacaccgccggcacagctacctgcccctggagcacaggtttgtattctaactctatagctatcgccgatagttcagcagttaatatgtacgatttctgacaaattgcattctcgctccgtaggacaatcaggaaggaagtggaacgatgcatggcttcgtcaactcgctattcgcgtacccaactccggacggagacagcggccaaagctccaacaaccctagccgcggcggttcgtgaatgtgcttcgatctctaccttttctataatgaacacttcttatgtgcatgaatgtgcttagagactatatatatatatatgtcgatggatgtgattgaggccctggatggatatgattgatgtgtgaatgtgcatgatgatattgtgtatattttctgtgccattgatcataaatatgggctgttttgggggggggacagtttaactcccgtcggctttgcaaagcc

SEQ ID NO: 108420 - DNA, 572 bp, Zea Mays
gctccaaagatcagatctgctggtaacactgcctccgacccatataccatgaagaatggggtgtttccgtgtaaagctcggcttggctgggttcgtaggctgcagactacatatggtagttccctgatccattttcctgcgagcttctcgctcttgtcaaacacctttttcctgagtgcatcgagtatcatcccgttggctctttccacctgcccataagctcttgggtgtgccactgatgcatacttgatctggatgctcctctgttcacagaagtcaaagaactctgacctggtgaagttagatcccatgtaatgatgttgttaggtattccaaacctgaacattatttcttgaatgaactccactgcttttgccgaggtcaaagaggcaatgggtttgtattctatccactttgtgaatttatcaacggcgaccagtatgtgtgtgtacacccttgagctttcttgaagggcccaatcatgtccagcccccagcatgcaaacggctaggttgcaggaatagtcagcaactgttacgcgggtaggtgctgctactttgataagaattggc

SEQ ID NO: 108421 - DNA, 279 bp, Zea Mays
gtactatactactctaattatcttcatccttggtcgctccactaccagcttcaggagatcgcttatccgcaaggttcatggaaggaggggctccaaaaagatccaactccccatcaggtcctccattagctgctccacatggtccagctcccattgctgcaatttctggtggcacatttggatgcagccagtcatataacacgtgcacctcttcatgcagggtgttacaatatgcttgcatattttctagggatgcgcttagttccgccacccgggcta

SEQ ID NO: 108422 - DNA, 573 bp, Zea Mays
catttcatatacttatgaatatgtgactaatacgtgctcacctcttctgtcatttcagtaatctcgcctacccgcgtgctcgtctcctacccagcctggatcttctctctctcgtgaggtttccaggtagctatcactctatttgagatcctatcggctgcactctactccttcttatcttttcattctatcgtgcagcagtcaggtcaggatggtgcggacgaagaatgtctcattatcagggggaggcaacgatgaggaccctcctcgccattttaggcaggtcaaagggaagactgtttacattgagcagcaggaggacaagaagaagcgacgtatggacagagccgctcgtgcagcactagcagcggcagcagcggcagagcaggctgagcggggaggccagctctagatttcctcttattagatagcctatcgagttcgttgccttgcatctcagcctcggcccactactccctccacaccttccgctactatctctactccacctcccacttcaccagctcttgtcactccagagccatccactacttccactgtacccagcacctc

SEQ ID NO: 108423 - DNA, 830 bp, Zea Mays
tcctccgcgctccgtggccaaccactcccaggtctgctcctgctcttcttaatagtgttttagcacccatatacgctcatgatactcatcggctcaaccttccatgcttggccacgctcaattatccggaacacatgaatttgtgttcggtaacccctgccaccgtggttgggctaagccaggaccataatcacctaattgaagcttgttctagggttgcctcgggtccgtgatgcttgcccaataattaatttggggagccaccgccgatcttggccgatccgagcaacgggatggtcgatggcgagcacgccgtagtcctggatcgatttggagaagaaacaaaaactgggggacctatgtgcagctgtcagtgagacattaaatagtggctaagggctcttcagttatttgttttaacgggggccttttcgcaagaccgaaaacgcgggcgcgcgcgggtttccccccttctgcaggctggttgggctgaatttagcccaacactgttcatagtttttctttttctttttctgccagggttagggagtttctagaaaattgtagaaaatgctaaaaatgcaagaccaattttgctaggttcctaattttctatagtatttaataaaaattgtagtatgatttttagtccaaatagggaattatggagtatttaaaatagccaaaacttatactcctggaattttagaaattgattaataactccaaaaatcattaaactttttggataaactttaaatattatttagaagccttgggtaaagtttggtatgatttggacaaagtttggtgcataaacccccaaaacc

SEQ ID NO: 108424 - DNA, 445 bp, Zea Mays
caagagtgccctagaactacggtggccggatcagctatgcaaagatgtggcagagatagtgagcatatggcagctgacgccgggcacgaagaccatccaataccgtgtcctcgatctcacaaataaggaagtcaacaacatcaaactctgaatgagagatcagggcaccgaggagccaaagctgaatatgagtggtagcctctctataacccatccgcggcagtagcgtccgtctcatgagctaatataggtacttggccgctgtagtaaaatctgccagagaacgtcgcgacccatctgagaagggcgatcggaacagagccgtaacgtgagctattgctggagcaactccaccgtgagggcgatgaggaggatcagaggtaccgaagcacaagctgtgaagatgagtcgatgactcgttgaatccaaacagctagcgaatctg

SEQ ID NO: 108425 - DNA, 1173 bp, Zea Mays
tagttttatcataagaagagctaaacaagaacccacctgcagtgaaagaaagaatgaaaataggcagttcttgagccagcattacaaaaccctctgaacacaagaaaatgacaaacaaaatagcaaatgttttagatatatctattagcagtgttggatttttacctccaacagctaatcctgttacacaatcacggtgggcaagcagtgttgatgatttaaacactccgacagactgtggaccatcgattcctgacaaatcatttccgctattgtttaagaaaccatcattacttccatgatcctgattcgaactgttgccatcagctcctcgagacagttgtgttttatcatctgactcaacagcaccagaatcaacaaacatggaggataactccccaaggagtaaacatctaaaactcttctgagctgcaacatcatcatcaggagctaaagtaacatcaccaaattttgtcaacaagcctctaatacatttccaaacatcagcaatctctggacgggattttggatcatatctcaagcacgatgctataactgcagccaatggttcaagtatagtaccaagcaatgtggcatcaagccttgtaaccacttccttctcccaatcatcatacagtccttcagagttccaacctgccacaggcacaagctgttcatccctagtaagaagtgccacgaacacacaacccaacgaccagatatccgaggtacagccaaccaaaccatcaaaatcacgaccctccgtccgcaacgtgtcacctagcactgccgccacctctggagcgatgaaagctcgaacactgttcgagctagccccagcttggactccccggcacaaggccaacgcctgattcaaatcaagcatgcagtgcccaaaacgatcgaggcagaagcagtccagcccgaggcaccccagcaccagcccctcgctgtgcaaccccatgatcacttcacatgcctccattacaaggaatccggcccgcaccaccgtctcctctctattgataatctcctcctccaacaattgggaaaccgtacgtgggtgccgttcagagaccatccatagtggcggcgcgtgaggggacatccagacaccgtagagcctgctcaccatccgtgctagcctcgcggaagaggcgatcagaccggcca

SEQ ID NO: 108426 - DNA, 294 bp, Zea Mays
agagcctaacagctggcgatcgccgccgaagaggggaggtgaagccgcttagagcacagatagacagagagcactgggtggaaagtgagagcctaggcgctgctcgagtgacgaaaggttttttaaaaaccaattatgggcacaccagacagcctatagtgcctgtccggtacacactcgacagagaagcacagaactggatctgcgcgctcccagccggtgcaccggactgtccggtgagcccagacaaagggaattttgaaattttctaggaaattttgaaccaaaccaaat

SEQ ID NO: 108427 - DNA, 311 bp, Zea Mays
gatacacatctcaaaggagcaatcaagtgaagagttctcttcgtctccatctctactcataccaacttggttttagcgttcactaacatttattttaaaaccaaatttgtggtgtttagaattgattttagcagggtcacctattcacccctcctttaggtgctctcagtcgcggagttgtggattactcaaagtgtgcttgtgtaatagctccatgcacctaggggatccttttgttccccaaagggcccaaggagtcgtttcatcttcatttggaaggccccgattgccttttgtccgtaggtgcatcg

SEQ ID NO: 108428 - DNA, 312 bp, Zea Mays
tctcttctgttgcgagctctgatgaggactgtgatgaaaaacacaatcaaaacacaccatctttcgggactgattggctcgatacgagccatgctgccaactctgcaattctgacgtccccattccagcccgcagattttcttttgcatttccacgcttttattcatgcgtctgtatgctgcatcgtaaaaaaattgatctgaaatactttgacagtggcctgtgacgaaactcagcaatcaaaaacaccatctttcggggctgattggcgcgagccatgctgtcacactgcaaagaattctgaggccaaac

SEQ ID NO: 108429 - DNA, 281 bp, Zea Mays
ccagattagaggaagacagttctttgggcctaaacttatttaagaggcagaagaacaaatccgtataatttgagagaatttgagggtagctcagaccatacaaaagagttatgctgataatagaagaagaccactggaatttgaggaaggagatcatgtgtacctcaaggtatcaccacttcgtggaatgaggagattcaaagttaagggcaaattgtcccctcgctatattggaccattcttgatctttaggagagttggggagatggcataccaactcg

SEQ ID NO: 108430 - DNA, 506 bp, Zea Mays
tgaagaggcaccaatcgagagggcatcactgatgcccccatctttgaaagtgcacctatctaaaagataactaaatcatttgtaagaccaagcaagatagagaaaggaaactctacatcatcaaatgcaacatgttgagaatcaatgatgcgactagtggagagatcaagacaccaacaagcccttgtgatcaaaagagtatcctaaaaagacacatatagtagaccgcatggcaagcttatgtttagcagacacagagaggttcgggtagcgcgcacactcaaaaacctagagatgcagttaggaatgctaggtatggacaggaagcgttgactgtcttggtgggaatattgttcaacaaatacatggcagtgtggagaccctcaatctagtaatgtgtgggcatggatgcctataaaagcaaagatcagatgatgttattagtagaatgaataacacactcaactttaccattttgctgtagggacaagacattcgaagcagtg

SEQ ID NO: 108431 - DNA, 751 bp, Zea Mays
gtgacaaccaacttgtaattctagtactttgtgcatctcattgttgatggtatgcaaagttgaaacaatgattttatgctggttcgggccgaatgtccctacgtctagttgattaacctgtgttaccctacacttagtttgcaatagggggttacaaaacattcaacagagggaggagctcccaagtctctagagtgagcaagtaaggtgttgagtgctctatgtgttgacatgtgctagctacttatgcaagtggttgccctatggtctggatcaagattcttccctcccttttataagacaaggcgagagaaggtcttgttatacaagttctaaagatcgaatgaaatgagctagggtcagttcttagtgtgtggctccttctccaatgaggttttttgtcagtcgaaggacttctcagatgacccgttcttcttttgttaggatactgtagcgatatcatcattatcatgtagcctaacattatgaaccatcttgttccttggtggttcatcttgtgtcctttgttgacttctctgtgacaatggttggaccaatgtcagggccataccatgataggtgatgtctgctccctgacacaccaacccctgtgccatcattgaggccacatgcctgtgttagagtctgacccacacgctctccttttcagggtggcaaaggtggtacgatctaaagaatcctagacctatggggttaagcgaagtgtctgacccctgggtcgggcgagatg

SEQ ID NO: 108432 - DNA, 446 bp, Zea Mays
aggtgtgacttgggcacttaaactggaataattttggcggttccgccacaatgccaagactctgcatgtattgaaacatctccaccatcctctgttgatccaccatcgtcaaggccgggcgtaaagactctagaacacgttgttttccgattgggctgactttggtcatagtttgttgtgcgaaaacggtatccattgacgtcatacccagaatatttcttgaccttataagcaaagttgttggctacttgtctcaactcggcactcatagacggatctctttggccttgcaagtatttgcatgttaaaatacgctaaattgagttcatagacggatctctttgacaaactaagcatgtaccttacgtttgaactaggaaatgaaatcgggcaatccatttctcgcaccctttctaagaagagtgtcatattcctgtggagtgggg

SEQ ID NO: 108433 - DNA, 411 bp, Zea Mays
tgggaagctcagatgagagctagtgacttcctcctcttcttagggcactgtcaacatgatgtcaagcgttgagcagcaattttcagttccactccctctgcaggagttttatgtgcctgagacttctcagttcgtgccgatgcagggttttccgcagtatctagctgcgcctactcctgcaccgactactcctttgtcgtctcagtttggagctccgcgtctgcctcacccgacggctcagtggggttcttctgttaacttcactctaggagcttcctcttctgcgggtatttctggagcttatgtgctacccgctgcggatggcagagagtaaggagacgtggtgacaggtacgatctcagttgtgtcgtttgtggcccatgctctttttgactctggtgctagctattc

SEQ ID NO: 108434 - DNA, 324 bp, Zea Mays
tggtgtggagcaagtgttcttcaacgatctttctcccatctatcatcagcgagaagacgttcttgatcatccatgttctcttattccttagcctctctttcctttttatgtatccttatcctccatatccatatcgaccaagtgttgatgctcatcctcctaccgagcctcaaacgaccgatgctcctcctaattaacactgatgaagcctcttccactgaagctcctccaccacaacctttcacttattcgtatccttttttgtacccactcagatacccatacggccatctttcttatgcattttatggtgttccttgttca

SEQ ID NO: 108435 - DNA, 475 bp, Zea Mays
agaaaagaactcacgaactctattggagacttcgagtgtacatttcagataagtctaacagggcactataaataactttctccttttaaagggcaagaaatcaagttctcttacaagcaaccaaagctacttacaatgtgcgcaaaccaaacaaacatactgaaagtgcatcctacgtataatcaaatgagggttcataaagaaaaacaatatgtataattgtgtgtataactaaatccaaccaaacacgaggcacttaaaataagaaaacatcctattacggaaccaaacttcattattgttcacatgatttacttagaacaatgtctctcctaatacgttggctgctttgaaacctgacatcaagcatggtcaacaaatttggtacaatgcaaatgataaaaggttgctttagagtcattcaggtgctatcagagttaataaatagaaattgcttaatgcaagttaatttaat

SEQ ID NO: 108436 - DNA, 740 bp, Zea Mays
agagctaggcaagtgaaaggtacggtcatgcgcgtgtatatatgtacactccctttgtccagaaaagaaaagaatgtaatgtattaagttcaaataattataaatattattattagacgatgacattaattacgaaatgtacttttataataaagtgattgaaagccataaacgtggacaacaggaaattcggtcaacatgagctactttatgtggcacacgcaattcatacttgaatcctttcgtgtgtgtagtccttaacaaaaagaagcctatgattgcggttgctgagagagcatatgcaggcttgcaaggtaggcctatatatcgagtggcaaaaggaagcaagatctccaagccattatgaaaaggatccattcctcagtgatggagcagcaagaaatacagagatacagccggtgagagagagagagagagagaggagggaggacactcgaaagccctacttgatgcttcctgcatgccatacggcgaggtagctactaggtagcagctagaggtgaggatggtgcatagctttcagtgatgcatggtaggtgaaggaggctctttctagggcaccatccatctcgctcaagactctctcgctcgcaatacgtacttttatgctcacgcaatagatccacacaggcactagctaggcactagctgtgtagtacgtgtatgtactcatgtacactatatatatttttacagatggatgagatgatggagagagc

SEQ ID NO: 108437 - DNA, 591 bp, Zea Mays
cgggcagttccgccacacattccacgacggtggacggcgacacacggatcaccggcatgccagtactagccgatttatgcaatgaccgatgctctccatcgactggcacctaattcacacctcaaccgaagtttcccctaaattaatttcactaatggcgcactaaaatgccctgaccacgttgaccgtatgggcaacggatgaacacgggcgttcacggcaacctagggcggtctagttctattagaggggtcgtgaagcttgaggaggacttagggatgctagaacaaacgatcaaagcgcttgaactaacccggagcaagctggccacggcatgggcaaaccgtgcggagttcttgagtgatttgggggatgtacgaaattggagctctcgggtatacgattggaggcaatacttggtggcttggtgtgtgattatcctacggacccgacggtgcgctcaattcatagaaggcaagagcggtggccggtgaatttggattgagacgcgtggcagccggaggaagaggaagtcactcgcgtacgggattagtggatgtaactgtggcaacctcactggagatcgctgga

SEQ ID NO: 108438 - DNA, 367 bp, Zea Mays
gagttgtcacctcattaatgtgccagtgtcacaaggccgagttccgaggtaaatccctgccaagatcatgtcaaacggccgagtcttgctcccaaatttttccagggtgtgttcaaggtagtttggcgccatttttatatttggaccaaatggatttgtgtttttgaattaagagaacacaattgttctttatgaagaggtcagatttcaaaaatctgaatttctaaatttctcaaggagactttacttcaagggctgttttgggaattttgcacaactcttttgattagaatttcttactaggctttgtagcttatttggtgtattacatctttgataattggtccatattaagattttgcatttt

SEQ ID NO: 108439 - DNA, 395 bp, Zea Mays
aaatctccaaatgtaaaagttgcttggttttttctaccctaccactttgatatatgcactttggtccaaaagtgcatagaaattggagtcacctcatagaacactaatttgggtttctagggtccttatgagggttttgattgttctagggtttatgtgccactcaaaaacactaagtttactctcttttgaacatctccactaacttttgagatcatactcaattttttatctcacacacccacatacttctaatccttgggtaagtaccctatcctagggttaaagatcaagtaaagtcatcacaccacaaacttgttttgagattttagcctagtggatgcactctaggtgtaacatacataatgaaatgtcaatgcatatgatgccatgcc

SEQ ID NO: 108440 - DNA, 903 bp, Zea Mays
cccgggcaccaaaggcagtatccatagctttgtcttcagccttggtataagcccccaacatctggtcattagttacttcgatggcctcaagccattcatcatctcgctcaccaaactgattcctataatgatagctatacttcagataaaccaaaccaccttcgcttgagctagcatcagtctcctttggcatctcccactcgttaacaaagggccataccttaaaggctatatgctcttgaaccaagtccctagtactgatgtagctgcatacggcattgaaagccgccaggcaagcttgggctttttcaatgtttacaatagcgggcctcttaatgccaaagcgtgaccgaataggccactgaaacacaactttgacatcctccctctcaactaggtcattcttaacgtagaaccattgcttcatccatgaccctggccatttttcccaaaaggttgggacgggacgccttgcgctagatcgatatacgaaggaataacaaccaaaattattgtgatattgttcttttctggtagccttcgtttggtaagagagctcatgaatattacaaaaacaattgacatctggctccatcccttggtcattactacctagatgaagactccaactcttattaaagctccaggagtgagctgatggagaaatatctcaaaccttatcaggacctcaaccaacatcttgtgaaggggaaaacgcaatccaaccttcataaagctttggcaaacaaccacttcgtctttcttaggaagaggaataatgttttctcctccagctctcactgtagatatatcgtgaaaatacttacccttcatggcctcaatatgccccttcttcacagtagacttcccgaagttaacattgattggcctccatggccaatc

SEQ ID NO: 108441 - DNA, 511 bp, Zea Mays
tcctaagttttgggcaaaatagctttaaatgaatatctacatcacatttttcaatactggggttcctactatttttaaacagtgtctaaatgaggtttaaatacacacaaattttcttaagtttagtacagaagaaaaactaattttccttaattaaacaagatttggctagtttctgtttttaattctaaactaaaaattcagaacagaaagcatagggtttaccatttttaaatgatagttcataaaatttaggatctagcaaaattggtttgacatcttttgactacgaattcatcaagttatggattttacaagttctctggttatttaaaaaggtttacagaattgattaaatggaaaaccactttgcactgggggtccctggcggatattctaagttttcttcgcagattagtccttagtttactattcacatgagtcactgacgttacagaaaaccccccgggttcttcacctcccaacccgaggtccttctcctaagttaaac

SEQ ID NO: 108442 - DNA, 515 bp, Zea Mays
ctccaattgaacccaaacttttcaggcaccttcacaacacttccagcaacatccttgccaaatttcacgccaatccgagtttccaggcttcaatttcactcaattccccatttcgagcgatcgtttctgagccgagtgccctaatccctttttcttcgcctaaatttaaaccaagcacacacttcactcatattcacctatataaacctaatcgtgaagtatcggctcaattccatatcgtttcgtgcctcaattcgaattccaaacctcctatggcactatttatccttcaaacgtcgttttcacggcgtttgacttctcgatcgtctcatcttgtgtttcctgtgccatatttctcttgtgtatgtatttattcacatttcatatacttatgactatgtgactaatacgtgctcacctcttctgtcatttcagtgaccttggttgcccgtgtgccgtctcccgtcctgcctggatcgtcacctctcgtgtgagctttccaggtagtcatctca

SEQ ID NO: 108443 - DNA, 500 bp, Zea Mays
gacctagaactagctgcagtcgttcatgccctcaagatttggcgtcattatctgctgggaaatatctgccatttgtatacggatcacaaaagtctgaaatatatctttacccgctcagaactgaacttgaggtagagaagatggcttgagctaatcaaggattatgatttgaaaatttattatcacctaggaaaagccaatgtggtggcagatgctttaagtcacaagactttttgtcattgtcttacagtaagagcacctgacaccacgatatgtcaagaaatggagaagttgaatctggggatagtgcagcaaggaattttggcaaatttaaagctcgagtcagttcttctgcaaagaattattgacgcatagagaacagataagggtatgaagtacattcatgagaaatggaagccggtaaggaaaatttcttcaggaaagatgaccaaggagtaatatggtttaaagatcacatagttgtgccaaagaatgctgaa

SEQ ID NO: 108444 - DNA, 304 bp, Zea Mays
caggagacttaagggaggctagaacatcaagcagataagcttgaactaacctgcagagagctggccatggcgaggcgttcacggtggcgcgaaaacccgatttgggggaaaagggaaattgggaggctgtggtggacgatcagaggcgagagctggtgcactgggtgcgtaataacctagcagacctggttgatcactcaatttatagaagccaacagcggtggcatccaatttggagaaggtgcgctggcggccgtagagaggggaagttcactggcgcaagctgtcgtggctttcactaaag

SEQ ID NO: 108445 - DNA, 280 bp, Zea Mays
taaaagatgtttttagcaaaccatgggggccttgacgcatgggataggattacacaagtacctcaccttaaggaccgattcactgagtgaccacccaagacaaacattacaaccataaggactattatggctctagccttgaccaagtaattagagggaaactgtgtggacattagctatggcagatggggacagaggaaggcactttggccctagttatgcttgactaggccttggattggatgccctggagggcttacatgtgatgtttgtgatggaa

SEQ ID NO: 108446 - DNA, 387 bp, Zea Mays
cagcagagtgggcaaaaacagggggatggcccctcatgaactctgcccgcttgtctctaggcacttgtggcatctaaacttgcactggaggctggtgtgggggtggctgctgctgcacctgctgcatcgttgctaaagtttgaccaattgcctgaactgcatgagtttgcatcatgaacatctgctcaatggtcatcggggtggcggtggcaaatgctgctacggggctgcctcctcatggggtgcctgctgttctggctgagcacgcctcgcacctctgcgtctgttcttagacatctgtagaaaccacacacatatcatatctgactctgcagtctttcagcataagaaaagatatacggaaatcttcacagcattgaacaattg

SEQ ID NO: 108447 - DNA, 354 bp, Zea Mays
gcctgcctgctctctctctctctcaatcagaatgaatgacgcccaaatggaagaacgctagtgcagttgcagcagcaccgccgtcgctagctagagcctgcctgacgtccaacagctggcgcctgcctgtcgtacgtacgtcttccgcatgtcgctagctacaactgatcatttacgagccgaaatacgtgacggcgccatcatatcagcccctgtaatcaaggagcgagatgatgtagacccgtacgattaatttcgcgctgcaaacggcggtagcttttcgttcatgctcagacatgattatgctttacgatagctctgaaacccgtcagctcctaatgtcctacaggcatg

SEQ ID NO: 108448 - DNA, 390 bp, Zea Mays
gcgtccaccaacttgttcttcaatgtctgataactgacctcacaatcgttggaccagacgaagagaacacccttctccaagagtctagtcaaaggcttagaaatgctggaaaaatttggtacgaagcgccgataatatccagcgagccccaagaaacttcggatttcagagacactagagggtctcttccactccaccacagccgcaacatttttgggatcaaccgcaatgccctgctgattaatcacatgccccaggaaagccacttcggacagccaaaaggcacacttctttaacttgccatataactgattcttcctaagggcacccagaacgagacggagatgctgctcatgctcagcccggtctttgaataaatcataatatcat

SEQ ID NO: 108449 - DNA, 399 bp, Zea Mays
cttcggctggcggctcggacacccgcatgtcacgctggggaagaagcactgtgggggcattgattcatgaggggacggtccagattgttccaaagactaatctctcgcaggggcggtttggtccgtagaaatgtaatcggagggctgggaaactaacggttgcgatggcgcccagcgtaccgtttgggttgggtgatccgcgaccgtcggatcgtcaacgcaggggcatgatcggatcgagcccatttaaaatcttcaccgttggtagttgatctgatggattagattgcataccggttcgatgtaatatggaattaatctcagcccttcgaatctaatcggacgatcacgataggtccataccccttcaaccacaccatttttcttatgagtccctcg

SEQ ID NO: 108450 - DNA, 640 bp, Zea Mays
atcggcttgatgttcctgctgtcgaccggtgccttcccctttttctggcccaactcaatgtgttatggcttgagctagagattgctagctagtcaccgctcggaagagggggaacaggtccatcggtcagtcggaggcgatcgcgtctcgaaactcacgatgttcgttcgaggcaaaacagaggtcattatgcctattgcctctaacctcgtgtatcctggctaattgtactgtatcgccgatagggccgatggtgaccagggactggtcgcactacctgagggtcggcgagcggctggtcctagcaaggcaaaaggtcccgctccctatggccttttgttctccttaggtttgagccccctcccggatggtgtcgttatgcgtaagaattctctgagtaacttgtagtcctcatagccatgtcagactgaatgctgatggttcggacattcggcttcaaggagcttttcgaagtgatcaggggttttctcagctggaggccttcctcacgtccagcttatcgtagccgccgatacattggctcattttcatcaccctattctcctcttcatgttgaggtgattgtcgacatcttcatctggacccctatcacgcccagtcttccgtttgcgactaccag

SEQ ID NO: 108451 - DNA, 676 bp, Zea Mays
aggaaattttagtccgaggtgtggatgaagggcggctgtgatatagctgatgaagctattaagaagattgaaaaagaatctcatgacgctcaagaagaaaccaaacgagctgaagaagctgccgagcgtgcaaggcttataggtacctttactgagattagctttggaattcgttttcaacttcggaattaaccaacatttttatgatgtagctgaactttcaccccctctagagccatacaaccccgaggctgacccgaccttgaaggaagcattagatataattaaaattgctaatgaagctattgacgaagctatcaacagactgctgaatgaagccactgagaaagtgctaaaagaagattaaaactttgtatatttgagagtttaatgtttgtacatggccttcgtttcttgtaagaaccagacatcaagtatttgtatatgtgttgatgtaatatatttctttgtgatgcataaaaccttcgtacgtaccgttctttgagccattggcgaaaaaacacattcccttcttttcatgcttcacgaagaaaaagattccccttttgtctattcaatattgggtattgtgatacggttgtcgtgtagtaatactgctgacgaagattctcctcatgtgtgaaaatatatctgctgaaggcataccttgtgctat

SEQ ID NO: 108452 - DNA, 383 bp, Zea Mays
ttgagctacctgataatttatctgatgtgcataatgtattccatgtgtctcaacttaagaagtgtcttcgtgttcctgaggaacagttaccaatggaagagctcagtgttcagggtgatttgacttacacggagtatcctatctagattcttgatacattgactcgagttacaagaaatatggtgataaatatgtgcaaggtgcaatggagtcaccatggagaagatgaagctacctgggagagagaagaagagcttcgcatagattttccccatcttttctctcgttcctcctaaatctcgaggacaagattcttgttaaggggggtaggatttgtaatacccaaaagtataaaagtgaaaatagagttgtgctcaatattt

SEQ ID NO: 108453 - DNA, 322 bp, Zea Mays
ctccatcgaggatggaactccgaccgtaacttggaacagtcgagctgctgcctacagattgacagcaggtccccttgccggatgcactccgtcgaggatggatctccggccgcaacttggaatagtggtgacgcctccaggacgaaaatggcgcgtgaaggtggaaatcgacacgggaagcggatggattgtgggattctaggttcacgcaaatatgcggtagagaggctgttatgggggaggggcaaaaaattggggaaagattggggttctgttggagacgatatatcagtctttttttccttaataacgttttggtgtt

SEQ ID NO: 108454 - DNA, 338 bp, Zea Mays
cgaaggcttctgtcgccacccacgcgttgtcgaaacggcgggcccatttataaccgccctgggccgcctggtcccacttgtaagccgctatgtgggtagagttattggtatgaccgtccgtgttgtccctaatcacactataatgacctgtaataacccttgagaggggaatattccagggataacatagttcaccggggcataattgtatttgccaaggtgagatcgtcccctggttacctataaataccctcgcactgtatcctgttgcaagaggctgaaaaacattgtcgctctaatacacttttttgacaagcatcaaatcatcctcgtttccc

SEQ ID NO: 108455 - DNA, 315 bp, Zea Mays
ccacaccgtctagtatcgctcccaatcttgcaaccgtgagctccaatttcaagtttcccccaattctgttcttaaacaccgctgggtcgagctcaccgtggccagttctccacaggtttaatcataccatccttgttcttgttttagcatctctgtgtgctggtgatgctcaccaactcgcccaattaagctaagatcccatgaatcaccgggaacgtgtagattgttagttcatccgcgcgctcaccgtggccagaaacatttggttagccgttcctgaaattaacttaggggaaacatttactaggtcccgaa

SEQ ID NO: 108456 - DNA, 397 bp, Zea Mays
ccggtgaagatttgcctgagatgatgggatacctcatgattttcagtgggactaaagcctacagcgacaagcgccgccttaagatggcccactgcgaggtgcatgaggtggaactcaccgcctcatgatatctctggtggttggagttcccgatagtcttcgaccaatgcgaccacatagacaagatccacatcctaggacctaccttctcatagttgagccaatagtaagctcgaagcacctatccaatgtgctaatggatggggagtagcctcaacatcatgtaggttgatattctcgatggcttagggattgcacgctctgcgctatgtcccatctcagtgccattccacgacatcctactaggccaccaggcctacccacttaggtggatcac

SEQ ID NO: 108457 - DNA, 411 bp, Zea Mays
ctagaactgagggttccagatgtcggcaatggtgccgccgtgcccctatgcgacgccaccgtcggaacagcctggatttgggaattgatcgcggaccgtcgattgattgatctgtggctcagatgagaggtagaaaatgttttcgggtgagccattctgagccgtagatctaagattcaaggggtgcgcgtcacgctcgattatgtggagcacggttcgttgatcgcggatcgtgaggctagcatcgcgtaccggttcaaagatttcagaaatctaatccgggtcgtgtagctgtgatcggacggctcggatttgcccatacctctttaaccgagaccctttttcacatgaacccttatgttattacagaataaaacccgtagtccacgtggactgtgcgctgggtcttgg

SEQ ID NO: 108458 - DNA, 319 bp, Zea Mays
tgggagcagaacaatccagaccagcctcctggcccttaagaccgcgctccaaggtcgatgaggcgcgggacgccgcccgggataactccagcccagcatcaggcacatcagtgcaaacatccatcatgccaccgtatgctggctccgacaacagatcttctgggaccatgtcttcaagagtttgatcaaagttcgctagagataattcttgcagaccaatgagggcagataaagctggagaaggaacaccactgctttccccgctggctaggtaacgccggttgttgttccgaattagagggatttcatcctcctcttc

SEQ ID NO: 108459 - DNA, 598 bp, Zea Mays
tcaagagggagattgcgaacacaaggttgagatctgcccttgtggtttgggttgtgatgagtgattatcaacaaatgtagcatcttgagttaagtcatgtggactaactaggggtgtgagtgtatttgtgcaacatgtctcttggtctatggtacataggtgtggagttcaaagatggcgatcgatagtgaaagtgaaggtcatgcgggttcgtgctgatgaatcggacgtggcaaaggacaagcattgagtcttgaccaagggactagagaagccaagtgactagatgtggtggttaacatcattggacactggcatacgctaggacatgatggagtagatcatgtcaccaccatggttgcatacaagtgggacacgtgtttaggtcatgagggacacatatgaagtatgctacccatgagggtttcgatggttgagcctcaaaaccacccaacacgatagttcaagggtttcactagattaggacctcaaaacccggtggaacgtagtgtcatcacaaaggatgtgtcaaggtgaagtaactttgtgaagagtgtgtatccatcaaatcaaaattccaaaagttggtccattttcc

SEQ ID NO: 108460 - DNA, 552 bp, Zea Mays
gtgtataggtgctaacgggtaggaggttagtcaagggaatcaaggtcttgggtgggcgccgccgctctgatggccggggtggaagacggtctctcagccatccatccggatgtgagcggtggagattagatatctggataccacttcacacagttagatctagggcgtcgatcggacgatgtgcgggtgagattagagcgaccacataaccccttcgcccgtgaaatctagaccatggatcccaaatcctacggctcagattgaatatcggttcacatatgatggtgatataatctgagccctcaaatgccgatcaaatggctgaattctacctgtaccccttcgtcttggacgatttgctaaagagaccctgcctttttcacaaatcaaactgccgtccactcaggtgcaccactgtgtctgggatggttttacgctttagccactggccttttatgtaaacatgcgcgcaatccatgaaaatgagaaaacagagaaataattatagaaattgatttttaatacaaaaataaatcgagaaacttatataac

SEQ ID NO: 108461 - DNA, 553 bp, Zea Mays
gtggaatgaactaccctattataagcaaattcaacatgcggaaggcagtcttcccagagcttcaaatcctttttcaacacaacacgcaccatggttgacaaggtacggttgacaacttcagtttgcccatccgtttgtggatgacaagtggttgaaaataacaactttgtgccaagcttagcccacaatgtcttccaaaagtagttgagaaattttgtatcccggtctgaaacaatagtctttggaactccatgtaaacgaacaatctccctaaaaaacaaatcagcaacgtgtgaagcatcatcgctcttatgacaggggataaaatgtgccattttagaaaagcgatctacaacaacaaaaatagaatccctccccctctaagaccgaggtaaccccagaacaaagtccatagatatatcttcccaaggtacatgtggaataggtaatggagtatataaaccatggggattcaggcgggacttagctttcaagcaaacgatgcagcacccaacgtgccgctggacatcacgtcgcatgtgtggccaaaaga

SEQ ID NO: 108462 - DNA, 372 bp, Zea Mays
tagtaaaagagtacgtacggccaatgaaagcgttgttcaagctagacaaaggattgggtggatgactggaggtggagggaggagtgggcattataaagcaagctagctaagcgatgcaatgagagcataacgttaacgcaagtgtcgatacgcttcgttcggctacgacgaccgatgtgcgtcgtcccgtgttcttccagttccagcaccatcctgctgctgctcctcatatgctcccttgtactgctctgttgctctggcagtggctccggtgacctgcacaactacttcgagccctacaccctgggctctctgttcaatgagacggatggccacctcttccacgtcaatccaaacactaccataggtaac

SEQ ID NO: 108463 - DNA, 439 bp, Zea Mays
catatctgcatgtaataccgatgaaagattgtaaatgatatactttctagtataatgtttcgtaaaaagtattaggttatgtttctggtatactttctattattgaaagcaaacataacagttgtgaaaggtatacaaatcagcataatttgtaattggtattgcataaattgtgctatgaaaattcatataagcataaaaggtatgggggggaatatcccgaccggttatggtttgagatgtgggcaatccctaaaaataaggcgtttggcgcggaagtattggcttattgggcagttgttaatcagttgaaagtcaacatacaaagcgaaaaaacccatcttggttctccacatactcccaggcttgagcggttatgtcatcaccatttcatagatcgccgactgcgcggttctccctgatgcgtcctccaggcgcc

SEQ ID NO: 108464 - DNA, 820 bp, Zea Mays
ttgcaacttgggaaaacaaaaaaaccttttcagctcaggatcagaggcgatcttctgcctaagtgcaacagccttggccaggggtatctcaggtcgattacgagggatcttgaacggggatatgtactccctaagcttcttcagcactctatcacctaggcgcttgaatatcatcctttgaaactcactgaaatcagcctggcctactgagacttcgtcttgagaaagtcagattggttgggtcaaattgttgatatcatcatcagactccgcagggaactggatatcatcaaatgatgagctgggttctgcctggccatcaatgctcttctccaaactaacaatctcagctttggcctcctgacgaagcatgttcaacctatcctcgtactgttggcgctgctgagcatattcttttgacatttgtaactggaacatcttctttcacttggcagcgggcaccggctttttcaaagctttgatgttgtccttcagctgtttctggattgcagcctgtatccttttctcctccgcttcaaccttcttctcggcatcagccttcttcttcacagcttcttcagctgcagcctttctcttaatctcagcttcttcggcctcagcctttctcttattctcagcttcttctgccttcttcttctcggcatcagccttattcttctcagcttcttcagctgcagcctttctcttaatctcagctttttcggcctcagcctttctcttatcgtcagcttcttcttccttcttcttctcagcatcagccttcttcttctcagcttctttagctgcagcctttctcttg

SEQ ID NO: 108465 - DNA, 545 bp, Zea Mays
tgacgttgtgggaagtggcgtgtgtatgccctccatcttggtgacgctcgagctccacgctctcatactcgatttggtgacacatgtcctcaagatcttcttactgctccctcagctggtctagtagttgctaaggtccggtcgtagcagtggaactatcgtcgcagacgatctcgacatggcccttgagtgttccagccatgaagcacttgtgtgaggggtgatggctccactcccacttgaggccgcatcaaaggattccaacaattcctctacgaggaggttctagattgataccgacatgtagtacaccatttccccaaagtcgatgtacatgggaggctaatggatgcacttctctagagtcctactgaagagccccatggcatcacatgtgccatatgggaacgtcatatggacgtttcccgcgaggaccttcgaggagaacgttgctccactcgaagagttgttcccacacattggtgagcaagaagacaaggcacatgtattcttgggacagttgggaccccaggaagatgtggaat

SEQ ID NO: 108466 - DNA, 444 bp, Zea Mays
ttcgtcagaagaagagcttcggaaaaaaggttactaatttgcaaggaatttttaagaaattcaaaatcaaatggccagagtgcactctactgctagagttgagcgtgatggagatgaggccgaagctgttgaaattgttctgatttctgaagcgatgaagcgctccgggctagttacagcagaggacacacctactgccgaagcaacacaagctgacgttgaagaagttggttctgaggatgagttcagctacggggtaccaactaaacctagtcatttggactttggaaagtccaccatctctgaagctgaccttccaaaaatggtgaagctgggctactttagcgaagcaaaaaaggagctggttcattttggcggagaggaaactactctgaagccagaaaagaatgaggtagtagtgttcaaaagcttctttaaagcagg

SEQ ID NO: 108467 - DNA, 1332 bp, Zea Mays
gaacgacagagatatatggtatatagcctgagacaccatacatacatgtatataatgaataaatacatatatattacgccgtaccattattgttattctttagtttgatttgattgagtgaagctcttcagtagattcagatgcaatgaactgcggtgtggtgtactggtatgacctcgtgacattgaaaaggcggcgggcacgaggacgaccatgaccaacacaacatcgtggtgcacatgctagacaacaagcgtggcatgagtcggacgtaggtggctagaccgaggtcgtcacgggagcctctgggcacttgacctggttcgctttgacgacagacgacgctggcaataagttgtcatgtcaaggccatcggagtagctccaatatgacatggtgttcggtttgggcaactttaggtgcactctaccctatgactccgcaatttctagccacctcgccgtggtcgtaactcggatgtggctagacctttaagtttaattccgcaattatttcggtcagccaacgttaagttttagaaaagactattcgccccctctagtccaccatataggccctacggcagcaaccgatgacacccataagtaatggttataactagtgcttcatatatattgtatgcatcttgttcattttttattaatcatatcctagaaatgatgttcgtacctaggacgatcggatcaaaagttgctgcggcattaatccatgatcagaatgctcgacaccaatattgggaaccatccacaagtgtgtcaagtattgctcaccaatttctaaaatataattgcgcctaaaaataaaggactaataaatacttcaccgaacatacatcactcgtcaacacaagacatctcattgtttattattcaatatattgagtaggacactatatatagattcaacacatacacttaaatgtatgaaatcaaccatgaaagcaagatcagacatcacactcgcattattcaattgatgcttgcttttcatatatcaaggcataaaaaggtataaaggtagcctttgctagtaggcaatctagcctattagcaaagggtctttatacctttttatgccttgatatatggagtttcttcaacgatttcctcattagtgtttgggtccacgctgaagtagatgacaacacgtatagttccgggtgcgagttggtctgaaggcctcggggtctcgttcaaatccacatctagtgactcaaagaatgttacatctggccgctcttgttctattacttcaattgcatcattaatctccttgccaatcaactcgggccaactggtcttgtcctgcgtt

SEQ ID NO: 108468 - DNA, 425 bp, Zea Mays
gcctttgagaatgaagtctttttattgatggtgtattttccaattacagaatacaatgctgccccaatagcttttgaaatctagctaggggtaaaacttcctgagatgttctatattccatgagttccctatttctgtgccatccatttgagtaagtcgatatgatccaggccaagtgacttctgctactatgaatggtccttcccatagtggcgacaatttgtgtcgtccttcccctgttagaattcgacggaggaccaaatctcccactgcgaaagatcgatgttgtatggctttatcatgatagcgcctcagagtttgctggtacctagccgactgaattactgtattcaatcgttcttcttccaatatatcaatatcctccagtctagtggcttctgcttcggctatgttttcaaaaatca

SEQ ID NO: 108469 - DNA, 696 bp, Zea Mays
aacaagttggtccttcccagctccggcgcagtgttccggagaggtgcaaggtttgtatggccttctagttttgttttctttgtagtgagcccacccgtggtttgcaggattcgtttgcccctggagagcttgcaagatcgttcagttcttagctcaatccgtgtcgttggggaaccgttctgagtgagatctttagtggtgtctgggcctatgtgggaggtgaggagcctaatttgagctagagcttctgtctgattttggggtttcatgtatgcactgaggggattttcaattcgttatcttagtgaaatcacgcatattccctcttacctttggctatagtctgcctctgaactgtgaattcccatccactatttatttgctgtgtggagaaggcgtagaagcgctgtttgataaaaaaaaatctaaacctaaatgaccagaaagttgcattcatgaatattatatcttaatcttgataactgaatgttacttttatcaataatatagtatctctggaacacgaatgtatggttggtttcaatttagctccgtagttggatcacctgtagtctaggtatagagtattgttcgtacgtttatctaggaccgaaagaaagctgcaggattgtaattagcttttcacgtatggatcacgactgggacccgtctggcgaattgaaaccaagttccatt

SEQ ID NO: 108470 - DNA, 601 bp, Zea Mays
gctatgtataaattattgatccactcttgtacctacggtgaaaggtctatattggctaaatcaatgtttaaacacttttagtaaggctattgtattcaaaggtgcttcgagctatgacaaagccaaagaagattgaatagacatcaagggatgtactgaaatacggttagcgccattaaatttggggagctccaatttgggaaaaggtgcagagtggtgtgaaggatcttcaagggattgaaactacaaatggagcttagactgcgtatgtactattggctagacgcgatggatgagccctgagaagtccattgccaacgtcctacgtcaagtgttcattgttgtgccacatggggtttttctcgtgcgacgcagatacctaaagctatgttgagattgagccatgctgttgttggccacaacatggaggtggaccaactcatcttccgttgagttgcatgctttaagtcgacttagcttgtctagcataatctttattatctcctggaatccaacgatatgattcgccaaggactccatcgaatctatttacacgaccaaatctacctgatgtttgtggtggctttcacttcagcactag

SEQ ID NO: 108471 - DNA, 434 bp, Zea Mays
tatgaaagggaatatgaaaatgagtactctgaaaatgagtactctgaagatgaaaatatagtgaataatatgacagcaggggagaagaacttatcttttcaaaaaaaagattcctgaataaggagagacatccaaagaagtcaaaatgtgaggacctgataacttagtacatgaccaataaattgatatttcattttttctaagtcattgacaattattccacatgccctgcagccatgtaccaggatgctccaacaagcagaagggattattttgaagataggagggactgtgccagagcatctaatgctgaagacttaatgaatgctacaaaaaatggtgtgcttaattcacacaccagaaggggtgattatgaagaagggagggacagtgccagggcacccaattctgaaaactatgtgaattccacaaag

SEQ ID NO: 108472 - DNA, 468 bp, Zea Mays
taaaatcactcagttttccaaccgattggccacttagtgcggtagctaaccaccggtgtcttcatgtctttgcggtaggcaaaagtgtagcagccgaggttctcatgcagtccatcttctctagccttcgtctgatagtgaagttcgtgcaccctgcagaaggcttcggcaagtggctctactccttggcttcgaagagcccagatgaagacactgagcctaacgatagcgttaggagttagctgatgaagataaatcctgaaattctccaagacatccgcaaccattccatgcagaggaaacctcaatcctactttgaaaaaacttctgtaaactatcacctcatcatcttctgggcttcagaatagtttcttccccgctgaaacgaattggcttcttctcagcttccccgaagtagcctagctttgtcatcatgggcatatcagcctcgaagactgtagattttcc

SEQ ID NO: 108473 - DNA, 317 bp, Zea Mays
cagagtatggtcgcttgtagagaactgggaaatgccgaaggagaccatcaccaagtctagcaaaggtgaactggtccggctgaagtatacattcagatatggggataaattcgatgaaccaaacgatgactggctaaaatgcatcgaagttacaagtgatgagctgcttgcggcttattccaaggcagaagataaagcactatctgcagccttcggaggtcgggggaaaaagagaataaacacagtttttgatgccatcggcttcgtctaccccgactaccactacccgctatggggacaagggaagaagagaaaag

SEQ ID NO: 108474 - DNA, 331 bp, Zea Mays
agagttctcttacaacaacagtttccaggtcagtctcaagatgtcaccatttgaagctttatatggaagaaagtgcataactcctctgtattgggatcagactggtgagagacaattctttgggcatgaaattattcaagaggcagaagaacaagttcgtatgatccgggagaactagaggatagcacagactcggcagaagacctatgctgatagctagagaagaccattggaattcgaagggggtgaccatgtgtacctaaaggtgtcaccaattcgtggaatgagaagattcaaagttaaaggcaagctatcccctcgctttattgga

SEQ ID NO: 108475 - DNA, 580 bp, Zea Mays
gcaagagtgtcataacaggagttgtgatgcatatgactatctctaaacacacatcatttttacttcatagcaaagtaatcattacaaactgatgggacaaaagatgatggccagaagaccatcatatcacattgaataataagccaacaattttattggatacaataataagagggtacaagccacaacagtggccaaaacaaaaacaataatcaaaagagaaatacagaaccaaaagaaccacaaacagaatgactagaaattttggattttctccccctttttggcagcaagtaccaaaaaacgaagagagtgggagaagaagacacatgaatcaatatcctctaggagaaggataggacggatgatatgatgtgtagtcgggaaagaaagtcctcatcatgtcttcctcgagtgaggagtccctaggaggctcatcacccgcagaaaaaccggatgcagaagatgaacgataatgagggggaggtggaggaggagggtggtgatgataaccagagccggagggccgcgggtcaccaggaatgggtcccggacctgggtaaggaggaggagtatagtg

SEQ ID NO: 108476 - DNA, 874 bp, Zea Mays
atttgatttaccctttcgatttgcccactggtttggggacgaaaggctgaactatgaattaacttagtatcaagagatttgtggaagtgttcccaaaatctagagacgaattgaggtcctcgatcagacactatggtcttaggcacaccatgcagactcataatccgagcaatatatagttcagcataagtcttcgttggatacaaagtttttacaggtacaaagtgtgcgactttagtagaatggtccacaatcacccaaatagagtcataacccttggatgtcttgggtaaacctacgataaaatacatactgatatcctcccatttcccttctgaaataggcaacgattccaatggtccagcagacttcagatgtaccacctttactcattgacatacatcacatttagcaacataacgagcaatttctattttcatctttgtccaccagaatcgcgatttcaagtcttgatacattttattactcccaggatgaatagaataccgggaggtatgagattcatcaagtatctgttgcctcaatgtcaggacctttgggactactaaccgattcttaaaccaaagaatacctttgtcatcaagttgaaaacacgtagtgggatccactgccatacattccttaatatgagttagtccggcatctgtcttctgagcttccataatttggttaattagagtattccaactacagattgacttgtagtgtgggttgaaacatactcaaattcaaccgttccatttcttgacagattgtggtttcgaacgaactagccgacagataacacaaatgttccttgcgactaagcacatccgcgaccacatttgcctttcccggatgataatgtacttct

SEQ ID NO: 108477 - DNA, 467 bp, Zea Mays
cgaactcgacttcgtgaccacgcagttccgttcgtgaccgaagacaaagcggggtcaaatccgcttcgcacgatgtaccccgcgaccgattcgttgccttccgtatccgaccttggacggctccatcagatccacacggagacgcttcgattcggcgtgttgcggccgagatctccccttcttaaggtaataccttgttcaacctcgtcaaatcaatacttatttgacgattgatttcgaacagcactcgtttttttcttcgattcgccgtctaccgggcgagatcctcccatgttgaggtataccatcttgtaccccgtcatatgaatacttcattcaacaatgatttagaacaccaatggttttgttcaaaaatcctagtttattttccccagcccttacgactttaccagatccacacttgtagtttaagctgtcaacttgttacattgttcatcctccgattt

SEQ ID NO: 108478 - DNA, 296 bp, Zea Mays
agtgaacccaatctactgaatgtcgttttcggtgaactgaaaacaagaagctgacaggaagcactttggaacagatttactcccaactttgtgtagcaccgagctaagcacccctaagtaaagttgttcactaatacttggtctccaacttttctatataatccatagtctaaacctgatggaatggtcacaaatgtgctccagcagagcaccaaacactgcaatttcaattttcaatggactgaataaaattcagtttctgcaaactgacagtccaacattggataacgcttact

SEQ ID NO: 108479 - DNA, 311 bp, Zea Mays
cacaatataccctttccatcttggtggaaacatttatacttctcgatcttctgatggaggttctccttaataatttgcactcccttgtcactgagctaggccatgatgatctggtcttgcaaagttggctcagcataaatgtgagacaaagcaccagaaggaatcacttcaatcttcattttgctcaactcatcacacagggtatcaatacgagaatccatcataacatagttgcattgcaatttctgactcaaggcatctgccaccacattggcctttcctggtgtcacacccggttttggaaggcaaac

SEQ ID NO: 108480 - DNA, 445 bp, Zea Mays
ttattgctatgaaattgattgacaacaaacttaaggagcatgaaggtgttgctactgctggttcgcaggaacgtactactaccactacgtctatacacccttctttcgctacgttattcctctgatggtaatgattcatgattatcttgttcctctgatggtaaggatttatgattatctgctagtatgttataactaaaatgaaaatcttccctaccacatccgaccattttatttacttttattttcttgttcctaaatgcatgtttgaaagagagtaggcatgcttggaaaggaataaaactaatattcgctgaaaacctttcccctcacaccttgtctcgtttcctatcaacttacactagattatatcatcttgaagagtctttcttaaattcacttctaaatcattatttaaagagccatttaaataaaaatagctccg

SEQ ID NO: 108481 - DNA, 319 bp, Zea Mays
tgtgcacgaacggtcgattcgcatcgtcatcgatagtggcagctgtaacaacttggcaagtatagctttggtagagaaattatccttgcccactcgcgctcacccacatttgtatcacattcaatggcttaatgatggtggtaaaataaaggtaacacgttcggtacgtgtcccctttttgctgggttcttattctaattatgctgattgcgatgttattcgtatggaagcatgccctttgttattgggtcgaccttggcaatatgatattgatagtttacatcatggtcgttcaaatcattattctttcatgtttaaa

SEQ ID NO: 108482 - DNA, 576 bp, Zea Mays
gagcttggtcacagacaaacaagttataagtgcccactaaacggtaccaaaaaaaagaaataggaaacagaggagtcgcaaatatgcgggtgcaaattaaccttcacagaccgacatttagtctccgaagtctacaaatgataggtacatttcacttataagtcttttgcttcaaatgtcgtcatataatgactaattaaaattttattttgtagtagccttgtacttgtgtcagttagtggcatccaaacttcaagtgcgccaagtggagaaggtggaccatccactgttttagaaacacaaggtgcatcaccaagtggagaaggtggaccatccactattttagaaacacaaggtgcagcaccaagtagagaaggtggaccaggaaaagatggaagacctcttttattattaggaccatccagtgtagcgccaagtcttccaactactccatcatgccatggcactggtcctagaatgcttaaaaagaagctcacaccaaaaaaggaaggcatgggtacctgatatgtaaaatttcacatatgttgtgtgaactatgtgttatttgagaccaac

SEQ ID NO: 108483 - DNA, 891 bp, Zea Mays
aatgaagaggattcctgcgcctgctccttgcagttttggcgagccatcgaaatacattcgccatactttaatagcctccgggttgttaggaacttgttgctcggtccactctgatacaaaattaaccaattcttgagtctttattgttgtgtgaggtcgaaactctatgttgtgagctcctagctcgcaggcccacttgactattcttccgatggcttctttgctgtgaagaatatcccctattggaaacttggtgactattatgactttatggtcatcaaagtagtgacggagtttgtgagcagttagaagtactgcgtacaatagtttttgaacatggggatacttctttttggagggtcccagaacttcactaatgaagtagaccggatgttgtactggatatgtgtgtccttcttctgcctgctcgactaccgacacagtgctcaccacgtgactcgtgcaggagatgtataacaacagatcttctgctggctgatctggtgtggctcggtgtggtggctttagtactggtggcgtggtcaagaacttcttcaatgcatcgagagcttcctgtgcttctgcggtccactagatcttgtccaccttcttgagcaatttgtagaatggtaagcctttttcgcctagtcttgatatgaacctgctcaaggctgccatgcatccagtaagcctttgcacttctttctgtgatcgtggtgcttccattctcatgatagccttgattttttctaggttagcttcaattcctcggtggctgacaatgaatccgagcaacttccctgctggtactctaaagacacattttcctggattgagcttccaccggtattgtctcaggctgttgaagaccatatgcaaatcttcaatgaa

SEQ ID NO: 108484 - DNA, 707 bp, Zea Mays
acaaaatcgaagtcttgtccaaaagattatccgtgcaaaagtcgcccacgggtgcagccggaatagctcaagtgcgcaaaatcgaggtcttctccaaaagactccgcgcaaattacgcctacgggtgcagccggtctaactcaacaaacgcgcaaaatcgaagatttccccaaaagcacccagacacaagccgcctacgggcgcggccggatcaacgaaggcacgcagcctcatcatacaaatcatagttacacacacagcgagggcatcacacattacaacggctcaaccttcgggatgatacccatctccctatagttaaacaacattatcctcaatttctcaccctcaaaaagattccgcagctcaccctcacctacagtcggcgaagacaacaattcccgttttgcagtcccgtccactcgaagacggctaccctccacctcaccatgacgcctatcacttcgtgacaactcactcactctccgcttcgccaccgcccttcgacgcctacgcccagcactcgcacaaggaatatcctcacccgtcaaacgcagagaagtctccgcagcagccacgtccaatgctgcaaaatagtctaagtcctcatccgaagacccctctgtccacacaatcgaactcccagaatcctcagattcaaaaaacttagacacagaatcatcagaattgtcttcagcaaccacggt

SEQ ID NO: 108485 - DNA, 468 bp, Zea Mays
aagcacacacatactacagactccagtaacagctgattcagcaaatgaaagagcaagcacagaatttatcaccgataactgcatccactgtacaagcactgcaggatcaaagagaacacttgtgttgcaggtagcgatataaaaaaaagcgaacatattgagcagtaaaatactgcattcaatcaaccatgcccggcgatccttatgctaggtccccactccccagtaccctttgtactaaatcctcagttcctcttcatcagccggaggctgaattttttgtaataatgaatggttgagtgcaaaactctcgaagctgaaaatttacaagcaccctagttcaagaaagtaacaatttaccagaaaaacaactgcatcacccattttccggaacacaaatccattaatctcaaaggaaagaagcctatgacgagcaagaagcactaactggaagcggcacggaggcag

SEQ ID NO: 108486 - DNA, 626 bp, Zea Mays
cgatggcgccacggcgagcaggcgtggttttctccaaccgcatcgctgactccctccttgactccctcgctgggcaacggtatgtttccatagccaccgccgctacgaatgtcacctacaagttcatgtgtagccacgccagcagcaccacatttaaaccatggatgcgacatatgtggactagtggaggagaaatcaatcttcggcatgcaaatgttctattctgtgcaggatagtgaaattggtatacaaatgagttttcagtggagaatgtactgtgcttagcttgttcttagatcatttaaatcattgttgtccactttattcggttgttacatgttaccaaaaccaaatatcagtaacattttcttttcagtcattagcaaagccaaagggcaggttctaatacagtcatatagagatgcttcacatgtcaacatgttcaaatgagtggtacacttagttcttacaagtttatactttatagttcgttttctttgactgtgtatgcaacaacataatatcatttaattccagaaagacttcctattgttgataaaagcaacccaaataattaatgaattgatcattgagacgaacatatatcattttcttaattaggtaac

SEQ ID NO: 108487 - DNA, 362 bp, Zea Mays
aagctcctcttgtaaccagccaaggaagcaggtgcctagctcttcctagacctatcgaagggcgtcgttacacccagttcacgataggcctcaacaaacaatgaatgggcttgatccatgctagcccgcgtcttagtttctagcttttcgcgataagtcttcgcaactgataattccaactctagcacggcaacacggtcctgcacgccttgcgcatccaaacacatttgaaccactgtttcctttatctcgcccagctaacggttgaggtcatccttctctttttcaagcttcttgtccttctccgccaagaaaatcaaaacaagcacatgtgcataaaggtacgaataacgacacttacc

SEQ ID NO: 108488 - DNA, 580 bp, Zea Mays
cataaagtgtgaccttcttccgacgagatagaggccacaattgctgtgtaccgagattttcctgaagaggataagcagactcacatcatgatacgaccgcctactagtgactctgagatcgaggctgttctcggtatgctggcaggggaatcctttgagtcggcgtgacttgagtcggggtgtggagcccccgagcaatcgagcgatggagggaagaaggcggataatctcatgagtccacggcttaagcggtcatgtcagttagatgcccaggctgagtctacagaggtcaagaagaagaggaagctcatgcgttcatcagatctgtagccagtgactgcccaggccgagctgaaatacggtgatgatgtggtggatgctggtttggaggatgttgtggaaggtgggagtggggtgaaaacgactaggtatgtaatggaggtggtggaggaagatgatgatgaagaggtggtggtgcttcctttggttcgacgcgaatgacgctccaaggctcggagtaatacttcgattcctcctgccttagcaaggatggttgaaatataggatttgtctatgtcgg

SEQ ID NO: 108489 - DNA, 604 bp, Zea Mays
ctctatctttcaagggctaaatattcttgaaaacaaagtcgacaacaacagcttcagtagtcaagcctctgtccctcaacgcacatatctctgcaagtagcaccctggacttagcaagctctgaatctgtggggatctctgtccagctaggcgttcagacgtcgggttgctccgtgatcgagcagaaagtgacttgttatgatttttcatagtaaaccactcgaagcgccatcccttaatgatgtctttcaaaggaatgtcgagatactcagctttcctgcctcggcgaagttccaagctagcacctccaacaagctgatgctgccctccagccatcccaggccgacaatggtaaaggtatttccaaagcccaaagtgtggaagaattacaaggaaatctttgcaaagatgaacaaacatagcaatttgaagcacaaaattgggattcagatgagtgagatttagagagtaaaaatcgagaagactgcgaaagatgggagaaactggtagggctagtccccggatgagaaaaggcacaaagataaccgccttgtgagtatcctctttcaagacagtaaccccatgctagatccgctaggaacat

SEQ ID NO: 108490 - DNA, 392 bp, Zea Mays
gcggatgctggcaccgagatgctcgaagtgttgattgagccctcacaatatgttgaggacgaggatccggtcgtcgattgggatcccagatcaaccagggcatcagccatgcccttaaacttgcggcagtactcgttcacgaagaggtcgccctgaacaaagttgcggaaggcgacatccaagtgaagagtacaggtctcgcaattacctagaaattggttctcaagattgagccacaggtgtcgggcagtgcggccacgttctcgaacgacctcctgaagatcaagagagatcgtgttggtgaaccagaagaggatgatggcgtctagttgggtccaggcaagttcgtagggaaggcatcgtcgaactcgaagtggttggcgagggcgtac

SEQ ID NO: 108491 - DNA, 565 bp, Zea Mays
gtggtatcgtccttccctctgggggaaatcatccagagtagggaagcctcgggcagggtagccaagtgggcgatcgaactcatgggagaagctctctcattcgcccctagaaagggccatcaagtcccataccctggctaactttctggccaaatggacagatacccaattaccaacggctccgatctaggccgagctatgaactatgtacttctacaggtcattgatgaagaccggagcaagcacaagactacttttcatctcacccctcggtgtacaactgcagtacattgtatggctccacttcgctgcgtccaacaacatgcctgagtatgaggctttggttaacgttctgcgcatcgccatcgaactgggtgtgagacgtcttgacgtccgaggtgactcctagcttgtcatcgactaggtcatgaaaaattcgagctaccacgacgcgagaatggaagcctactgtgaaaaagtttagcgcctcgaggacaagtgctttagcctagagctcaatcacatcgcacgacgatacaacgaggtagcagatgaactagcgaag

SEQ ID NO: 108492 - DNA, 480 bp, Zea Mays
tatatatgtatgtccactttattatgtaggatagaagatgtctttagagcatagataggtttggttaagaaagggtagggctaggaaagactctatccaagattgtgaatcctgattcctttgaagatctatcttgaatcttaaccttccttgatttgatgaggtcgatcatcttcgatatttgttcttgaagtctttatccgaattaggggcatgtacttaggataacttgtaggtaaggacagatggttaacaggttggtggcataagataagtgtattatggcaacatctaggatgggatggatggtcaccatgaatatgctggtatttatttgttcatgggtggtttggtttgatgtactaatttaagttaaaacatggccagcagggtataatctatttcactagtattaactggtccgttaagtatttcactttagattagaccatattagattagatgggatctagattagat

SEQ ID NO: 108493 - DNA, 6166 bp, Zea Mays
tgccaattgccaagtgccctggtcttgatcggtctcttcgccaggtcttcgcctccaggccttagtcgggcccttcgccggcgacgagcaccgccaggcatgcacaccacatgctctcccattcctgctgcgcggaattgagttcgctaaccctaacctacactatttggctgtattcgtatctgatttataattacaagtgtatacatgtattattcctactaacctacagtctctcttgcaaacattattgaatgtatatgtgtacacccatgccctttaccaggtccgcctctggctgtaagtgtaagtgtgtgatgttttgcttgcctgaacatgttctgatttggtttctagggtcatctgctcgttgcatgataatcctgtattttggtcacataaacgagtttgctatctatttctagcttatctataactccatagtcaggctgatcaagctttacaatcactgagttgcgtgaccgagtggatcttgctgtgtgcttttagaagcttggaagtaacaatgagtattcttattcagactttatgccttgcatagtttttgtttagctgcaatggatcctgaaaatctggcattgatgtcatagtataataatcttgctgaaatcataggatcatcgcttccacaggcattgttttacgaagtaatttgcccaaactcagaacattgtttgaactgtggctctgcccttgtttgcaacatgagtaccatccttatccagccattatgacttgtagaaatgtttttccaacataagtaccattatgtacacttccgacggtgcattggctggacaataaatttatgatcattatgaattttactttctctggtcatacctgtcatactctctatgaatctcacattttcttactgaaacaacaacagcaataacatgatacactgctatgaaaattgtatagctgtaatatctatagccttacggtggaacgggtggatgcataatttacggttcaatttgtcaaagtcggtagtggccagtgggcacaaaaagaagcacacatgattattgcatgattcaatacttgcctgtttcttgatgcatgcacatggatgggtataatcatgcaatctttcatgtgcaattgtgcaggtgacaccgcataacatcaatttattttgggaaaaaagttgcagtgatgaatcataaatggttcacagggatgatccgctgttgctatgtgtgttcataggtacacccggtaagtctaaattgatttctttcctcttgacgtgctcactgaagaaaaaaagatctattatacataattattagtcttgatccgtttaattatctgtttgtagttgggccattttatctggacttacagttatttcctacttctcacctaagctagcttttaatggaagtgctaagtttacttcattgggaagatgaagaggtgattctatccaataaaaggggttgcagagatctgtaaatcaaaaatatttttataatatggttcccacacagacactgtaagggcttgtttggtaaggggattggagtggattaagtgggaaatgaactaattttccccgtaatcccttccattccaaacaagccctaactgtttggaggagggggaatatacataaaatattgggaggactagttaaattgattaggcacctcattctgttactttgcttccaactattgtgaatccatgttatttttcagaccttttataatcctgtacagttagtctttatatcatatatcagttaagagacacctcttcaaagtgagtgtatcgtgatcattcatgtcaattagatactttcctcaacctcctgtttacttctcttacttgggccccatcaatctcccttctgagttctgaccctttgaacacactacaactgcaattggtaggtggtgctaacctttctgtggtgacttcttcattgtgtgtgctctctaaaattggcaggaatgcctctttcttaactctatttcacctcactgtttttttaaaatttgacaactaaatctggataagaagtgatactcaagtatttattgtcactttgcttctatttgagctccttcaattatttgctgcaagtcttttgctcactaaatcatgcataatgcaaacgatgttaacaagtctgacccattgacacctgctaccttgcacaactcttaacattctattcttgttgacactttgcttctactttgactttgagtgccttgaatcatctgctgcaagtcttcttttggtcaataaatcatgcatgatgcgaacggtgttaagaggtcttacccattgacacgtgccaccttgctttgatgacagccaactgctaaagcaacatatactacactgcaaaagttgatacctgcagaggataaataatactgctccactcaaacatatctctatgtgatgccatactaatatgaaatttctttttatgttgattttgatcttgtgcttgctttatatatgtgtctttattcatttgttccttgtaattctattttacctcctctgtaacaaagtgccattggatgtgttgaaagtcatgttattgacaataatatggtgcatatcatctcaataggtttatatgttcacttctgtttgttcactcagtgctacataagatgctgcactaaatcacatacatactcgtggatttgcttttagctggaaaggagacttttcattttccccatttagaatgatgttagggtcattcgtcatcctttactcatctgatgattgtgcagctaaatagcttatacttgaagaagggctagattgaagtactactcaaatgttcaatcacgattatgtatttatgtgcaagatcatataagttcaatatatgaatttcctttgcatatgtaagaaaaacactgtttgaatcatgatgcactatagatagaatcactgagtattgtactaatttttcacggttgatttcattttactttcattcctttccaactcaactattaacataacagaattagcaattcagtggagtgaattatgctggaaagaagagggccttttttcatgtctttttgaagtagtttaacactattccgttattagttccacactgatatttttcatggtctaattcactaaaggttttggcataatattgtttaagaaagcgatccaaaggtgttcatccacttttggatagttttgtccttaaagtataacatttttccatagtataccatattcatctgatgcaaacttatttaatgccaggttgcgctctacttttcatagaatatgatcagttgcaacagggaacaggcgttgagggccagggaaattgctctaaagaagatagaaagcaaagatttttttggtgcccagaagactgtgcttaaagctcaaaagctttttccagagctggagaatgtgtctcagctgttaaccatctgcagtgtgcactgtgcagcagagttaagggtgaatggagagatggacttctatggagtccttcaagtggaggaaggtgctgatgaagccttgataaaaaagcagtaccgcaagctcgcagtttcacttcaccctgataaaaattgttttgtgggtgctgaggcagctttcaagttgattgctgaagcttattctgtactatgtgatcctgcaaagcgaaatgattatgacctgaaaaggagcaatgtatttagaaatgtgccaaagctagccaaacagcaaccatcaaagtggactaattcacatagacagagcatgcctggatttagagaaacattttggactgtatgcccaaattgtcggatccaataccagtactacagcagtatcctgaacatcatggtccactgtctgaactgtaaaaggagttttattgcatacaggctgaatcaacagcccatggccacttcatcaagtgtacccaacaactcccaagttcctgcaaacatgtttgtgaataaacagcgcgacactcccaatcaacaaggtcactctgtgaagccttcatgtgtcggtagaggcaccaatgtcaagccaaatggttaccaagaccttgttcacatgtttcgaaatcaacaacatcgcgttcacagtcaaaatggtcatcctgtgaagccttctgcaggaagagacacagatgcaaagctgagaatgaatgtggcccaccgtgatgaatacatgaaagggaaaggtaatgacccggagatgtcgagggggaaatttcaattttcaacgctgaatgaagataaattttctgtcccaatgggaaatggggacatgcaaggaaggtcatcaatttcagctcttgctgatccaaacattattgacacacagaaatcagttcaggaagatgcgtctgcagtgccagatgctatggatctgcttggctctgcaaggccttctgcaggttggaaaacatatggagattcaaggataaatgttgcaggtaaaaaattgatgctagatcatgttgatctaagtattattggcagaagaaacttgcaaagacaagatgcatctacagtgccttctagtgccggatcctctggtacccaacagtcagttaagaggaaaacatatgctgatggcaatatttgcctaaacacggataccaacaagagaccaatgaagaataaatgtccatctgatgttaacatgagttgtaaacaagtatgtgatgatggtgtcaccaatgctggcatacaattagatccacttcatttgtccagcaatgtagacacccaccacaagccaaaagttactgatcatcatgcaaatatcaaggaaaaagctactgaaactgatagtgataaggacaatatcatggaagaagctcctcaaactgttagtgaaaagaagccttcctactctgagtgtgtcaccttacctgatctagatttcttcaattttgagaaggttaaggatatcaatgtgtttgaagttggtcagatatgggccctctatgataaccttgatggcatgccaagatattatgctcgtataaagcattttgatgcctcgaacttcgaaatacattcaacttggctggagtatgttgcaatggatgaagatgagaagtggactgatgaagaactgcctactgcttgtggaaactttcgccttggaaaaggaaccgatatattagaaaaggaaatgttttctcacattgctacttggacgaaaggtaaaaagaggaagtcgtatgtcatatatcctaacaagggtgaggtatgggctctttacaaggggtggagcatggaatggtgctcagatgcagataatcatagatcatatgagtatgaggttgtggaagtcgtgtcaagtatgtcagccaatggtggcgcgaccgttgtcccactggtcaggattaacggatttgttagtttatttgcaacagctaaggacaaaccttcatttgtgataccatcaagtgagctgctccggttttctcacagcattcctttttataggactaaaggaaatgaaaaggttggtgttccaagaggatttctggaactggacaatgcatgtctccctgctgacctggatgcagcattcccttctcttactcttgattcttacatgtctctcggcaagaacgaaagcagcacatttgttgatgtgaccactgacaatacaagttgtaggatggatctgggagatgatcaaattgctcaaaaagagaatgaccacccaatatctacagacaatcccaaagatatgtgcccggaacaaaatacacccttaaaggaaaccactaattatgccaaagagtctggtgattgctctcttcaaagcagcctctcccccatcatatacacatatcctgattctgatttccacagatttgaagaaaatcgctcctgcgagaagtttgaacgtggacaagtatgggccctgtacaacaacattgataaactccccaagttctatgcctgggtaagaaaagtcagggaagagccgtttagagtcgaggtgatctggctcgaggcctgccccgaacaggaccaggagaaacagtggctggagcaggacatacccatcagctgcgggacattcaagatccgaaaatggagagccgagtacggcacaaacgacaccttctctcatcaagtaaatgccagagaaaccggcg

SEQ ID NO: 108494 - DNA, 933 bp, Zea Mays
tgataaacgcactttggttcctagaaatcagcttgtccatataaccactaagtctgtttgccatgatcttcgtgattaactttgcgaagctgtggatcaagctaataggccgaaagtccttggcaaggatggcatcctctttcttaggtaaaagagtgatgaaggctgtgttgaggtatctgaaattctaaaagtccttgttctagatagccaggataacagccataatgtcttttttgatgattgaccagtaggccttatagaaatgacctgtgaacccatcaggccccggggctttgtctggaggaagctgtttgatggtattccacacctcttcctctgaggttggctgctcgagcccctgaaggtcaatgtgttgtagtcttaaggtgtcaaggttgacagttctggacctttgctgccctgtaccaactagatctgaataaaaggaccgaagcacctctgccttatcactatgactagtcaatagctgctccctgtcttgaattttggctatgaaattttttcttttccgataacgagaccaagagtggaagaactttttattagcatcaccatctttgagccaggcaattcttgatctagtcctagccatcgagcggattaaggaggcaagagccagagagcatttcttcaagcgcccaagcagccatgtctccaaaacattaagaattctgctctcttttgccacttcaagctacagcaatatttctctggcaagctcaagttgcagtttgaagtttccaaactttttgtcactccaactttgcagcccttttgttgtcgccttgaattttagggaaagggtcttgaggggacaagaagactgctgaacagaaccccaggcattagttaccgcttccacaaatccatcaaatctgggccaaaaggattcaaaatgaaatatccatt

SEQ ID NO: 108495 - DNA, 423 bp, Zea Mays
gagggaccaaaatagccctaagggaacaccgaggagagagcaagaacttcgacagacaatagttgtcaggtaaacactgagcaagaacttcaagagacaatagttgtcaggtaaacattgaggaagtaagactgaataaagttggaaactagaaactggagcgaagaaggaacaacattcagacttaacaatcgatgataaaggttatatgaacaactatacgagggggtggattgtacagtttagggctacaagttcgtcgagccgtcacgtgcatatggatcaattgttcagtgtcttcaagagagtcaattttcggtgttgtcgtcaatcgttgatattgtcgattcattaacaaaagatggtttcgagaggcagggttgatttcggtcatcaaattttactcagtggtgtgtgtgtgtg

SEQ ID NO: 108496 - DNA, 385 bp, Zea Mays
aatgtcacaggaattgtgctgggaaatggaacaactcaaccttggtatgctcaataatatggaagcaacagttatggaagttgaatctactttggaacaagagattcgtaaaggacaggaatctgatgagaaaattaaggaaattaaaactttgattggtttgggtaaagccccagatttcacggaagatgaacaaggcacactatggtttaaaaagagaatctgtgtaccgaaaatctaacacctacgccaacttattttgagagatgctcatgattcggcttactctattcaccctggaggcacaaagatgtaccaggatctaaaggaaaagtattggtggtacggtttgaaaagagatgtggctactcatgttgcactgtgc

SEQ ID NO: 108497 - DNA, 500 bp, Zea Mays
aatggccccaggcaactaagtgtttctaccattatgagtgacctgggtttggaggctaaggcacttaaatccttcgtcataggcacctcgaagcacgggggcacaagagacttagatcattctagttggacgatgtcctagataacaggggtgaatcttagaccaatcttgcggactggttcccctaagtgcggaggtgtcccaaactttggagtacttcagggccatgagggacctaggacctttgtagttattagcaagatatggtagtgtagatgtcattcctttggagtaccttaatattaagctgcctagatagttaggccaatgtcttagctagatctagagtatgtccccgaggtatagggccttaggagcgatggtccagtagttggatcctgtggtagcttcatatactaggatacatgaatgcgtcttggtcaacactatgatacgatatagtggttggtgcaaacagactgccagtataggcactacaa

SEQ ID NO: 108498 - DNA, 552 bp, Zea Mays
tgcatccactaggtaaaaatttcaaacaagtgtattgtttttagtattttgcaaataggaccctggatagggaacctgactctaaataaggctcaaaggggcaaaacttaacccaaatgaagaaaacctaaaggctttaggggaatagtcataaaatgatcccaagacttaagtggaattacacttggacccctgggataccagaaatcttaattggaaccctggaaaaccctaaaaccaaaccctagggacctatgtgcaaaattagtccacttttgaactaaagtgcaaaaaccaagttaaataagtatcttaagtcatttgggtcacaaatatgtgaatttgcaagttaaaccctaagttttgggcttatttgcaaaactcacctcttaagtccttaatagtctaagtctgattttcagtgtgattggctcaacttgaagcccttgtaactttcaaattatggggtttttgccctaggtcaccacatcaaaattgtagcctaattatagaagaacaactttgcttaagagtgcaagccatgttcttgtg

SEQ ID NO: 108499 - DNA, 534 bp, Zea Mays
ttgaggagtgtaataccctacttcctagggtggctttctgaataaggatggggttacaggttgtgaccgctaaactgatgggaggctgatgagatgaaaatggagggggtcccccttggccttatatacacgaccatggggggctttcccgcacaagtgtttattgcgatctccctacttatctcctttgaggtagcaaacagccttcactaactcgaggaaaatccggcactcccatgctgagctatcgctggcggtttaggtgtcgggtgcgtggaaacaaactggccagacatacttgcacctatgccgcggctagctcgaacgtgggcgtttttcgcctctggatcgtcctgcctccactgtctctgtctgcccggcccatagcgggacacttcaaaggggcaactgttgtgtttccctgggcaaaattccacccttgcgtgcatctctatagagtatagggagatcctcgggtcgaactgtctgtaaagcttttcagacaagggattcctatgcttccttcttcttgaa

SEQ ID NO: 108500 - DNA, 558 bp, Zea Mays
ggcagagctctaacggaagacgtgcgtcgccagatgagcgcgtcggtcgggtgagatgggcttaacaaaaactaaatcctaaagtagaggttagaccaatataagcaatatggagagaataaatgagagggaagttctcttggacttgttgctcttatgaatataaaattttactttgagagcaactctgtgatataaatcaaagtccaaccagaagaacttatagagggagaaagacaagaacaaatcataataaaaagcaggggcggagctagggagttttgttggggtaagctgaccctataaaattaagaaaatactatacaaatatagtgttagctagtgtatttagatgacgattagtgaaactgaccccaataactttattgtctggcttcgtccctgataaaaagtaaagaacacaagagacacacgatttgtttaccaagattcagttatgaagaacatacgtcctcattgagatgtactaactcctaaaggatgaggtctctctcgaccctctcaagtgatccactgatcagcttgaaccctcagatc

SEQ ID NO: 108501 - DNA, 397 bp, Zea Mays
gttggctcggacagcatatcttcaggtaccacatcctcgagagcctgatcaaagttagctatggacaattcctgcagaccaacgagagtagacaaagctggagaaggaatatcgctactctccccactgactatgtaacaccgactattcttccgaattaagggaatctcctcttcttccacttcgtcctcgtcaacaatacgaacaatacccccattggggtcagctctggcaggattacacccattgggttcagctcgagcaagatcacatccagtgggttcagcatcatcgaggtcacacccattggggtcagcgtcagcagggtcacacccattgggatcaactccagtagaaagttccactggcacttcttcagcagcaggagcagaagggc

SEQ ID NO: 108502 - DNA, 637 bp, Zea Mays
caaaaccacaaaattacttgaatgctctgttttgaagttggctcttctttttaggtagaaaaatacggacattaactatagaaaatatctctgaacttacaaaaactccaaaaaaaaacaaatcatagagaagtttgtgaaacgatgtttctaaataaaatatttggatgcataaaagatatatgtagaagtttctactaattatatttatcgctattaagattaatttccttatattaatagccgagagagatgagatgaacttttctttatattaatagtcgagagagatgaaatgaacttttttgcagcagctagcaacaccaactaggccttgtaaccactgtacgtagtgaatctaggctagcaacataaattaagccaactaggctagcaacataaatcaagtagccttgtaaccaactaggctagcaacataaatcaagtaaaataaatgcaaccgtatgaacaatcacgaactatataatgatagtgtacagttaataagagatgaaaaattaagccaacggaatgaaaccttaactaaacaattgtgtattaattaattggtagtacaagcaacatcaacagatgacagatttaagtgtctatattaattggtctaacttctatatat

SEQ ID NO: 108503 - DNA, 633 bp, Zea Mays
attcaccacacattatttcaatagtgcccataaatgtccgaacttcaagctcgtgactttcattttgtgattattggttcagcctcgattgcatttatcaatgacccgataagagagcttaaagcactcatgcctaggactttgttttggatccatttgcaatctagagcggcaatataggtgtcgacatatttgtctcccacatttaataatctccgtcatttcccaaaacgaaagattcattgttccgtattcctagcacaatgatattgcgcgcattgctaggaatttcatcatcaagatgaacctctttgtgaggcaaatcaccatcagggtgaattaatcggaggagagttatcacagaccatgtgaatctgcaatcagaacatatgctttgactaaggccaatggatcatattcgcaggcgtccccgagaatagatcaaatgccaataagtcaaatgtggatatgatattaatctcgggtatatccacatctacattaggtagaagcattcagaccaatatggttactcctcaacgatttctggcaaactccatatacataggagtacacaccgaacgacatattcagtttggcttttatgcgtttaatagaatattgaggcattac

SEQ ID NO: 108504 - DNA, 614 bp, Zea Mays
gaaaattgcttccatggttgaccttctaggcatgaatccaaattggttaatggtgatatgcgtcatccctctcaggcgatgctcaataactctctcccatagcttcatagtgtggctcatgagcttaatccctcgatagttggtacaactttgaatatctcccttgttcttgaagaccggtactaatgtactcctccactcctcgggcatcctgtttgatcgaaaaaaatggttgaacaacttggttagccaaacgatagcaatatcccaaggcatttccacacctctattgggataccattcgggcccatcgccttgccccctttcatcctctttaaagcttctttcacatctgattcttgaatcctgtgtacaaagcatctatttagatcatcaaaggagtcatccaattggatgtccatggtctcattctcaccattgaaaagattgtcaaaatacctctgccacctctgtttgatgtcttgtcctttcaccaagagttgatccatctcatccttaatgcatttaacttggttgaggtccctcgttttcctttctcgaatcctagatatcttataaacatctttctcctcttcctttgtacttagtcttcg

SEQ ID NO: 108505 - DNA, 769 bp, Zea Mays
gaggagtctaggctaagtttcattattaaactactgcatataaaagtgtacaaccggataccaaattctgggttcgatgcaatccttgagttgctttcgtcatctttgaagaatgtgaccggcctccctaagtcctataatgaactgaaatctctacttcggaagcttggttttggttatgaatctattcatgtgtgcaagtatgactgtgctctattttggaaagatcatgaagaggatgaccattgcccaatttgtgggtacacaagatggaaagtgaacaaggagagcagaaagaaagtgcctcacaaggtcctccgttactttccaataattccacgcctccaaaggctctttatctcaaagcagcgggcacagtatgcaagatggcacaaggaaaagagggtatcagttgagaatgaaatgagacatcctgctgatggagaagcttggaaagaatttgatgatagtttcaagtcttttgcagatgatccccgcagtttgaggttagccattgctactgatggatttaacccatttggttagatgaccaattcatatagcatatggacagtgatagtggttccatacaattttccaccttggatgtgtatagaccaacccaattacatgcttgctttactaattctaggcaaaaaatcaccgggcaaagatttccatgtgttcatgcaacctttgatagcagacatgatgactctttggaatggtgtctctacttatgatgcatatgaaggcaaagacttcagcc

SEQ ID NO: 108506 - DNA, 1750 bp, Zea Mays
tgcacctcatgagtaccgcctggcccgcaaatgtaccagtagtattcgtgatatgcgtagtacacgcttagcctggatccaacgtgctagctagctgtgttttggcatgattcgactagaacatgaacatgggcttcctgcagacatgttattagtggatggtcttaagttcttaacatatgcatgcgcttttagtttgtgagttctaattcggcaagtacttctttctgtaattctatgtacggttaactttgttgtttggatataacatcatatctagatagtgggcaaacatatatatagaacgtacatgaatttggtcttaacatgtccatgcacttttcccaatacattgcttattgtaaacatctttttttatataatcaacaatggataatattaattcttttatgagctcagagttgtgatatatacattttgtgatttctagtactactctcttctaacattatatgtgttactataaatctcattgttccaaagaaagaccctattattacaacaatgatgtacgttgagaaatgtatgcattctgccagttttttactctgtgcaaaaacaaagagatctactcttaaaacgcatcgcctaattacatgtagcagcttcatattatggggaagttgctctaaaaccatatgagctagccgtgcatgtctttaaccggtcaagattaataagggtgtatctggatgatagaatcagttttgtttcttaattgctagaatcggcagaatctgtgcgaaaaaacgatgtagctaaaaaacatttctatgtgaattagggagaaacgtttaagccttctgaactagagatgaagagataaacgaagctgttttgcctgattttagtttcctaatcctaatgtagctaactagccaaacggttcaatgaggtgattctgattcactaaagaaacatttcagaatctgaatccggaacatttttataagaatctagaacctaacaaacacaccctaatccggaacatttcacaatattttattaaattaccttttgagactaatcttagtatttggtcgtattgttttcaaactaaatattaaagactttcctgatagtcaaacttgtaaaagtttgatctaaaccttgtccaaaacaaaaaaaaagtattgtgaactaaagagagagtacttagtgaaccatgaaatgtgacaagtagccctctaaaactacgtcactagatttgacactagtaggtgctatagtcaacttgtgatgtgttctttcgtgaatcaataactttgggtgcttttcattgactctcaagtttcactaatatacaatatactgatccataccatgataagtacttttgttgcatttttttgacttatgccatatgttgggaaaacagtgatcaaatatatgtatggtagactacgccaatgtcatacatgaacaacaaaaccatacttggtcccaatggctctgtggtcattttagtgctcacatttttacctatatttttattgaaactaacactttctttataaaaaattaaaataatctccatatatagtggtctaatccatgcatagtgcaagctccaaaccatataacttcacttgccttctctagtcttatataaacaactgagataagcttgtaaattcggcataggaatttattagtatgatgagtgtcgccgatgcttacagattccattgaatcaattttcttagaggcacgtaacctccaatcaagc

SEQ ID NO: 108507 - DNA, 835 bp, Zea Mays
ttcgttttgctacttgcgaacatgcatcctagttaagcaaaaatgttgtagaacagcaaagcatatgaaagaaataccggctgctgactggtttcttgaaatttcggttcagatacaggtgttgagtccacaactctatgatttttttcttttcttgttgagccagttaagttgaccagtggaatgtcatcccttcgttttgctacttgcgaacatgcatcctagttgttataagaaaaaatgttgtagaacagcaaagcatatgccagaaataccatgtttacctgaaacatcaatcaccagttattatttactgattcgtcgcaagccttgttcttacatatgcagtgaatgccctcaatgtgttctacacaaccatgaattcgccgccgcagctgacgaactgggtgtcccaaaatggggatccctgtgggcagtcgtggctgggggtcacctgctcgggttccagagtgacagcaatgtgagctagctgaaaccttcagacgggttggttgttttcgcgtaacggcgaccgatccttctcggctgattttccttttttcttgtcctgaataacgctcgacagaaagttatctgggatgaggcttaacggcaccttgggctacaacatgaaccagctcactgcactagttcagctgtaagtgagacctcacatgctcttaaatctcgatgctcggatgtttgcagacaacatgccattgttcggttttaatttaagtttggtgttctgcagggatatgagcaataataatcttggaggcagtgacattccttataatcttcctccgaatctccagagcttgtgagtcatgta

SEQ ID NO: 108508 - DNA, 577 bp, Zea Mays
gaacggacctgagatcggctggccacaatgaggtgtctcacggcggcgcgactaaccgaattggggaaaataggaattcaggggcggtggtggctaattggcggtgaggagcggtgcactggcttcataacaagatagcggagtaggccgaacactcaatttatagagaccactcgagggtttcgagaatttgggatggatgagcttgcggccggagcgaaggtgagtcaccggagttcgctcaacgtggcactcactagggtagagtcctggggtggtaactaaccatttcacacgacacattgcgacgtggtaacatggtcagtagcgtggcgtatctagggtaacggtgacggccgcgcggccacgccgcggggcaagtgggtacggcaaagctgactctatccactctccttcagatctttttacccccccgcgactatccactcgccacagagcacgaatgtagcaccggcgcggatcacggcgtgaagatcaccgacggcaaaattcactgaatcgggcgatcttgttcagtccactgttcaccactgaacgccatcccgagctgcctgac

SEQ ID NO: 108509 - DNA, 486 bp, Zea Mays
cagcactctagttcattacaagcataacaaccaccacagattacactacgcacgagcgttttctactaaagtgtccccaaactctctgagaagatcatcaaggctagccagggacacttcctcgatgtcggaaaagttctctatccctagggagggtagtgttggcggggcttcttccttcgggttagtctagcatccttggctcttgaagcgctttcggatcttcttgacgaggtgagctttttcatcctcctagcatagtccatcttcagggtctggtatgccccacaagtgttggcttcctcgccttctgcgatctcgagactgtcttgaagagccgccttttcttcattcaattccttgatttgctgctctaggttttccacccgggagtttaggtgggtgcagtgggagagaagattgtcaaagtggttgtcaagggtgtagagacatccgaccatgtagattatggtagggtcatcttca

SEQ ID NO: 108510 - DNA, 569 bp, Zea Mays
attttagctcggcattcccataggaatgactttggagcatcgtgacttttctgttacactcaatggtgtaaccccagatttattacaacaggccgaaggttgtaccttcttatatctccgactcgtcgcgtgcatcacattgttgttgtagctggcggtgcccttctggttgttggttgtgaaacgcggttggagccatgaggggtggtggtagcggggcccatgcagcttgtgagtggcttccaaagcaactaatgtcatgggttgtgggttgcccacatactcagggatgtatggggaatagcatgaagcagtatgcaggacctgcttcggctgattctgcgatgctttggctttagctatttcattatgcttttgtatcgtgacttggcaagtccttgttgtatgccccttatcttccccacagaataggcaaaacaaccttcttggttgggagccaaatcttcaaccgaagcttctacctcctctgcctcttggagctgttggcctgaaggagctttgttgtatccctgatgattaggagttgtgctgatgcccttgagtatgac

SEQ ID NO: 108511 - DNA, 487 bp, Zea Mays
tggcgccgtcgtgatggctcgggcgcctccgtgttcggccgccttaggagcacgctgagttattcaccgtcggatccctaaggaacgactggattagattatagcgtagcgtttcgaataagggtaccagtaaccgtccgatcggaatcggatgatggtcatcgctctgggcttcattaaatcatggacgtcggatctggacccaagggcttacttcgcgtactggttcgtgaaagactaagtctaatcctggcggtcgatagaagatcgggcggtcaggaacgagcaataccctttcgtccaggcatttttgttaaagagccctaaggaatcagggaaaataacccacgatccatttacagttgttcactgagtctagtacattttacctcaagacccctgccttttctgttttattgcgcctagtccggagacttagaaaattagagaaataaatacagaaattgatttttaatatataaataag

SEQ ID NO: 108512 - DNA, 664 bp, Zea Mays
gaaaaaacttgccaaagtgaatgaaaaattttgaagttgcgaaggaaaagcaagagataagtgaatggacaagctcaaggctagaaaagaatgttgaagagcttcgtgattctagggaaaggtgttatgaaaaatccttgaactgcgcgaagaagctaaaagatagctttgcgaaggtgggggcgtattcctcagaatagagatttattcgcggcgaccacgaaggggttatcaaatggataggtgaagaagccaaagctttcgatgagatccttagcgaccatggagatttttgtgctttttccggtgcccaagggattgcgacaatcttagaaaaggctcggtgtgaacatgtcaaggccgcggcccagccagaatctattctctctactgacaatactaaggacccttcgattgaggcttctaccctgggcggcaaattctactccgatgtgtggacgaagggtggtcgtgagatggctgacgaagccattaaaaagaatgagaaagaatctcacgacgcccgtgaggaagctagctagctgaagaagctgccgaacgcgccataattatagtacttttatttgaaactttttgccttgttgttcatttttatctttgtaactcaccatcatgtatttattacagctgacctctctccccc

SEQ ID NO: 108513 - DNA, 384 bp, Zea Mays
gaaacggtcagtaccgaccaatcatagttggtaccgatcaattcactagtcgtcgacgatgccatcgaatgcaaggcgataccgaccgtggttggaaccgagggaggatgtaccgatcataggcccctaggcgataccgacacccgtcggcacagacctatggttggttacaacccaactggtctatatatatcactacattagcaattgactacacaaccgactgcgctatcgaccataatcagcccgtatctaccacaacgctccagtacacaacctttaccatcagaaaacaaccacatcgaccttttcttttacaggtttgtatctaaaacaaaacatgactcataactcaaacaaagtacgtaaaccactaaaaacata

SEQ ID NO: 108514 - DNA, 530 bp, Zea Mays
ttttatgactaggcccatgaactttagcaaaaagctgcaactttgctcgttttcaatatccttattagcttaagatggtagatgatagaggggctggcttgttgttccttgtcagggaaacatcattagggtttctatccctaccttacatttcaagctccactctgcgaatagtgcagaacattgttttgtctgtctatatagctggtctagtgacctcagccatactctttgtactgggtgtagtcagcactagtactgtgactggagtctcagaccttgattatttaagatgcctccatggttccattcaagtattttatgaaaagttccatgtcatggcatttcagtaacgatgtgatagtattgaattccttgggtagatgagaaatggagtctgtttttttaagtagtcggactaagtttgtccttgtatgatgcagtattagaaacaagttacaattaatgatagacatatatgaaataaccattgtcaatgacttctatgtcctgttagtgagaagttcatt

SEQ ID NO: 108515 - DNA, 824 bp, Zea Mays
gaaggagcaatcatgtgtacatgtgcagcacattattgaaaaatgaagcttatactaaaatatgcattccagcacattactggaaactggagtatattatactaaaatctgtattccaaatatctatttaggcatttgatcgaacatcttgcgcgcatggtgcaccagcaacaactcacttccaatagcagtaggagccatgtgagctttccgcccttcgccttgccgcaactccatcattcatatccgacatggactgacttcctctcatcggggttagggagaagagcgagggcgaaggcgacattcatggcggcaaatattcgagagattggaaaaccctagataccggtatatgctactgaggaagaagaaaaggtcataataaggtgttggacgaaccagcttccgacacaggctaactccctatcgtctgggtcagggagaggagcgagggcgacattgacggtcgtgaagatcgagagactgaaaaatcctagataccggtttgctctactaaggaagaagaaaaggccataaggtgttggacgaacctgcagatgttgtggaggcgaacacagtgcacgaagagtgaggacgaacggccgctggtctccggcatcgtcgtcgccctcgctggagagtgaagacgcaaggctgtttgagaggaggccttttgggggacggaggtgtttctatatattaaaccagggaccgttgctccccatctatctatgtcacgccatccattttttcatagccgtctgattatacgtccgtgagatatcttgccgtacacgtgctacttgctaatcggtctgcct

SEQ ID NO: 108516 - DNA, 378 bp, Zea Mays
tagtataattatagataaatttagtatatatagcttggtggagctggtggtggtggtggaggtagtgggtgattaggagagtataggtatggagttactgtttatgtaggatataagctggacaggttgaggtaagaaagattatgagaaaaatacttcatacaaaaggtttaagtcttgatttatctcgagattcgctttgactgttatatccttccttgttggtgttgatcttttcttctccggtcttggtctcattaattcgaggttaatgtatatcagcagagttggggcacatggttgaaatagttatgggtgagatagactacatgatgtaggtcaaaatctggtttgatgataggtgtggatagacaaatt

SEQ ID NO: 108517 - DNA, 569 bp, Zea Mays
ctaacccttgtgtgttttacccttgaataacacccacacaacttatagacacccataacatgacccctaaatcgactaaagcttccttgtgcacttgttgtgtcaaaaaaaaattgttggtgtctagttgcgcaaaccctatcaaggccatgtttctttccataaatccttgcccctacaacttcatagcatttatgttgatcatgctagcagaccctgtttacctacctctcctatcgcctggatctagtaatcagtttccttgcgaatcatgttgtgaccttatcatccaaatctctgggtcctttaatgattctgccctattatctggttatctgctataacccattctcaagtatcggatgtcgatcaatctaatctctcatttctagtctttccgatgctctttctctaggcatcatgacgtcgtttttgtcaaccttatctttaaatggtgtatccattgggttcaatggattttctgttgtctttggttctctcatgtccctaaaagctcatcaatcttgatctcatggttgcctccttctcatatcaaatctcgtgtaaat

SEQ ID NO: 108518 - DNA, 1139 bp, Zea Mays
ttaatgttgttcgcaggaacacatgatgtattttaggaaacgaatagcaaaagagatcatggcattaagagccgactgaagaacaccattctgacattgtctcaagtcaggtatttgctttcaaatagcagagatgtgattcttctaaggctgttggtgtgaattcaagtccatgtcgccacaccttttgtaggcttgtatttttttaggacctgattttggtagggaaaagaggggtaaggtaaaacaatgaaaaacgtaggagttcggaaatagttcggcaaaatggccacacctatgtaattgcattgaaactgactaaagctagtgcaaggaactgacacttagttttgttttgtgtttatttcaactcatatgttgtcgtggaaactaaagctagtgattgcacgactccccagtattaacatttcgtgagcgttttatgtatttgggaagtttttggttgcagatggataaacaactgtgaacctaggagcaacttcaaacttttcaggttcaaatcataaagctgtaccgagctggacacatgtctgcacttgaacaacaaaccaccaaccactacagtttctctatttctctagttagctaggagcacaaggcagaacattgaatgctgatagagggtagatcaccccatttcacaaaaacttgtggcaaaccaatagcaatcttaacaaatcgaatcatcttcccaccagtagaaatgtgactgactggctacttagatgcctaaaaatgctctgcacagtgactcccaatgctccttagccaggcgaacacgttcaactcgctccaaccgcgttctcttctaagggcttgtgcttacctgtgtctcagcagcatgttgagtgcatccaggtgcatagcgtcagaaaagaccccttgctgaacatcaactggtgtgacggatgcagcagaacagcagcataggtagcagaatatgtggccacatgaaagagagaccggatcaaacattgtgtcctgtaaataaataaaacatggaaggatgaagagtttggttatggattttaaatagagaggacagagaaggatgcattgtgctcttaatccaagtctgtctacagagcactgtactcgtcagaagtgcaaactcacca

SEQ ID NO: 108519 - DNA, 941 bp, Zea Mays
atgatattggccgtgaacaagctgccaataaaccacttctaaagactgtatttcaggtaccgaggttaaatctgtctttcagggataccttatgcacatatgatatacatatagtcctgatcatctgatgtatagtaacacttggacatctgagtatgtaggtcatgatgcgtttgtttagtcctcggaagacaacactactatttgttatacgtgataaaaccagggtttgcctctcctttattatattgcattcttgaatatttgttccattcacttaagcaaatcttagacacgtcattgttttcatgtagactccacttgaacatctagaaccagttctaagggaggatattcaaaaggtgctggcattctttctttttctttcatattttcttactagctttagcttgctggcttcctccagttctaatattttcatagatttgatcagatatggaattctgttgccaagccagaggcacacaaagacacccctatcagtgaatttttcaatgtaagctatatatttttgttgtacaaacttttaaaagaatatcatgattttactagaacatcatttgtcaatatgaaggtacaagttactgcattgtccagttttgaagaaaaagaggagcagtttagagaacaggtacttcaaagatcacttggaagttaaaactcagtgctgtgtagaattttcagtagggaaagtattgtacactgtttctatttttaagcaattattttcaagatccttacttttaccttgaccaggttcaacaacttaggcagagattttcaaattcaattgcaccaggaggtcttgcaggtgatagaagaggagtagttcctgcttcaggttttctgtttagttcacaacagatttggaaagttatccgagagaacaaggatcttgatcttcctgctcacaaggtact

SEQ ID NO: 108520 - DNA, 963 bp, Zea Mays
tggaggggggcgttcataagaccctgctaattgagagaaccctggaactgcagtgacagccaaaacaaagcaattgttaatcgatgtaaccaaaaccgataacagtgcaacaggcaaaaataatgaaaatgcattggcggtaacaatcgtctccacttgggaacacgatcgccgatggcctgagccagctgcgctgagctgacctaacacgcgactagatcgagacctgctgctgctgctggagataaggcgaagagcttgaagcgaatgtgcacaagggcaaggagaatcgagcgcctccggatattgagctgcagccacgggcagtgcaccgccatcactgtggaagacgattgaagatggcggccaagtaggactaggagaggaaaaaggaaaagactaggagagaacaaaaaggctagaagaaaaaaaaagtatatgtggctgctgggattcgagcccaggtctccacggccacaacgtggaattctcaccactaaactacagccacattgttgtgaaagagccagatattaactatagaagtcttgtacagcctgagtacccaaaagataatataagaaaacaaatcagcgttcaacttcacagcagaaaggaactctaatgtttcctggatttcactgaatctgtcgtcatcgaattgtgagttcgcgtgctgttcttatgttagatgaaccctgatcctatctattagctagttagttagttgttgcatgcatcagttagttacttagtcagcagcatcgcacgagctacctgttatggtgggcgtcgtgcgcataggggaggcagtgaggcgtggggatggacgcgctcactcgcctgggtgccggacgaatcgcgtgtacgtgcggcgtggggatggacgcgctcaaacgcacgatcgagaattgctcggagccttttacgatttcctgcatgtactctgtacctaaaataaaa

SEQ ID NO: 108521 - DNA, 475 bp, Zea Mays
atcaccttgacttgtgtggttggtaatgaggaaaggggttgagaaagacccgacctttgtgggcaccttggtggtgtgaccgaacctcagtaaaaatcgtgtgtcttgtgtgcttttgtgtgtgtgattttgtctctcatcatttcagatctttgatctatctagttggttttaattcaactcttccgttgtgtttattattggtagatttgatcagtttcatataagttcgttgttgaacaggtgaattgcggttgaaccagcctcccctgttgaattgtcgtttttcacaaaagtttgaagtttgtgttgagaattacaggtatcctattcaccccctcctctaggctactttcaatatttcaccctacactaatgacctcattaaggggaatattccgggaatgtagtatgtaactgggggtaatatagtacttggggacacacctacccgcccggttacctataaataccc

SEQ ID NO: 108522 - DNA, 621 bp, Zea Mays
cagacgtggtcgacgcagagaagcacatccccatgagacatattgggccgcatgaataggacacacctcatattcttcaaagccatgtaagttctcccaaatatgatactcttattttcttacatacttctttgtaatgttgtacctatattacgttagatttagtcactattgaatcgtaaatgttaaatttctgtgcgcagccggacaatattgatataagattgatacctaaagttggtatgacatttagtaacgtggacgaggcgtataatttttatagtcaatatgcatacgaggttggattttcattgaagaaatatagggagcggaagaattgtaaatggttgaattgttcaatggaaggaaagaatgctgaaagggtagctagaaatccaaggatacgtaacacatgttcgaaacgaacacagtgcaaggctgggatgaaactttaaaaaatctacgatgatgctaaagagaatgttatttccgtccggattgatctggtaaactatgagcataatcatgaattcttgaagaaagatacagaaaagggcaattgcaatgcaacaaaactcatgatcgtgaatatatggagttccttagtgcgatgcaagaaag

SEQ ID NO: 108523 - DNA, 3687 bp, Zea Mays
aattctaggccatcagattccattccaactatatttgggatgaccgcttctttaattgcaagaagtaaggatacaacaattctctttgtatatttatatgtgcatatgcattttattctctcactaattaactcttttgtggaattttcttgacagatttggcgcttgacaaatattcagaagaaatatctgagtttgagaatctcatgaatgcgaaggtcaggctatataagaacacccacacaactgtatttgtatttattatcccaactttggttacatgcggcaataacttatgcatttccctttataggtgtacactgttgccagtgaatcagcactattgcaatacattccaattgcgactacaaagatagttgagtacgatgattatatcgtaacgtctgagttatatagtcatactatccgttgcttgaacaaattggaaacaaaggtactattatatgctctaggcatgaccttctgctggatgcagattgactatgttactttgcgtcacccagtatgtaatccagggatcttttgcagtgcattctgcattatattatcgaagcataacacttgatttgttatttatccatactctagaattcgaatcttatgatttaagatactaccgttcacagcaaaattgtttggtcttttttttttctaaaagcattttctgtttgatgctgaaattgtaaatggcgctacaacactctgacaactacattagtttgttctggctcctaaacttctagatggtatgcatgatcacaccttatatacctggtttgtagtagatatgatatcatgaataatgcacataaaaataactaagacttggacttcaaatggtttaacaggaaagacaacgacacattactagtaatatgattaaatatcataggcataatgctgttggtaagtaatattataaagttagggatattcgtgggtgtttagtccaagcaaattcaaattaatattcaaccttgaagggatgatgaacaaatctgtattattcattatttgctttgttatacatgtgcaacaatgttctcatggctttatacttggcaaaaaaatgcaatagctttactgacatatccatatttctttttatctcgttttatgctcatgatggggttatggacctttttagtatattttcttatataacttccaataacttctctcaccatgttctgagttgatatacacatgaattaacagtggttacattatcttagcatttagaaatcctgaaggggaaactgcatggttcacctttggaaaattcagagaaaagaataaaaaaattaaatgcaatgttcttatattgcatatctgatcttggagtatggctggcagcaaaggtatggggatatgtaatgtgcacatttttatcattctgatgcactcctaaaaatggctttaaacctttttttcaggctgctgagattctacaatcaaataaggaaagctgtgtgtccttttggggcgaagaattggatgaaaaacttgaaggatttgttagaaactatgtcagagatgtatatagtgatctttcagaaattatattgaagatgacaaagaggggcgtacaacgtaattgcattcttgtttcttgtttctttaatgtacctttttctgaaagttcagccttaacatgaattactctgtgcaactgttttgccactgtttatcaatatttttaactcagcctttatggtttataaatcattttgttgataagaagtgtatctataattactactgtgttatttatgaggtgtatgccaatatttatcactttatcagttcactaaataaaatactaaactcaactccgggaagaagatgacacctgcacaacctttatgtagacacacgacctttgaccacctgggtttgaactggggtcagcggcctctcgattgaaggctaatgattgagccattgcacgatttggcaatttacattattaggtagagacacacttgttcttagtgtgttcttgagctatctatgatactgtccaaaaatgtatatgatgtgttttatttttacattgttaaaattaaaactagttgaatattgttttctcaaacaagaatgttgtttgtactttgtagctacaaaaccaactaatatagtgcaaagtcatttattaaatgtacttatatgatatttataccagacgtttcttgactaattattggtcaaaacatacaaagattaaatcttctgaaagcatgcacactgtacctgactgtatggagtatcaatttctgaagtgtattaaatatgatttgttgatcttcctgtcatattttatatttatatccgtctatacaggacatattggtgaggacttcgctgaggatctgcaagatgggttattaacatccaaagtttattttcttatcaaatctcttatggggtataggtgagaaaatagtttactcccattgcctttgaagtagcgattcgccatacatgcaaatctaattccactaaagttgtctatccaaataaatgtacacaagcttgtcctatagatcttatagtgttatgaacccgaatgtccagctggatggcaatggcggagcgtgacataaaatcaagaggggaccaattctataaactcatgctacacctagctagctgttactgcctttcaggttgtgctttgttcacgcacaagagaagtcagcaagtaagatgaagtgcttgtggcttgtttgatgacattgtgtatgagctcctaagttagtcaatacaatgctttaataacagcaaaaagtttaacagctgcattgagcagcaaatgcaggagagcagtaggtgtcggacatattgtctttcttagtaattgttgtacgcaaatcaagcaactgacatggggatccaaataatatataacacctaaaactgatatggggagctgaaaattgttctctcattgttaccataggtgattaatctctcgttccctcttgcaggcatatgcaagatttgagatgcattgtttttgtcgaaagagttattacaagcattgtgttggaggcccttctgtcaactattaatcaaatgtctggatggagtgttagatacatggcatcagggcgtaattgtggtttgcaacatcagagtaggaataagcatgtggaaatcgttgattcatttcggagtggaaaggtctgctgcttatgttgccctgctgttgttgtgtccgataaatatttgtactgatgataaaatgatacattgtaggtgcatctgattattgccacacaaattttggaggagggactagatgtgccaagttgtaacttgataatccgttttgatcaggcagcaactgtacgcagctttatacagtcacgtggtcgagctaggatgcaacattctgactatgttttactagttagaaggcatgttttccagttttgtaggtgttgtttcctcagcaaatttttatttatcctttcatcttcattttttggtccaaagtaaactttgtggaattgctcctttggttgctcaccctggacatttggtcatcttgctgggtagtgttcttgttgtggtcgtctttttgttggtttgtgactttgtgtgacacgccctgcatatttggagtaggcatttgcatctccttgtcctttttctcctgaa

SEQ ID NO: 108524 - DNA, 521 bp, Zea Mays
tacaagttgtcgggaccccaaagtaaggctttgactatggccaggatggtaggttaataagtcaaaagggcgagggttcttctacaaaaccatcaagtcgaaagggtatgagcacatctcaaccgtcggatctgtgtctgatggtccagattacttcggggcgcttatgatcatgtaagcgcgctgaactgcatgatcatgatccaatgccccggatccgaagtggtgaaggggtatgtcacatctaatcttagccgtccattccaatccaacggatcacgacgttctttcaggcattcctctctcccctgacgcagacacggctacacgccccagcagggcggcaacaatggctcgcgagagctccacgccacaaagctccgacgaccacgtcgaattaccctgtgcaaaatgtaattggaatatgggctttccagaggaggtacttcataccagctatgatgaatccgcggaggccgaccatggtgggggatggtttaacggtagggctccaactccgg

SEQ ID NO: 108525 - DNA, 383 bp, Zea Mays
cggctgatatcaacaaatagcataatcatcatggattgagcctcttcagtaagacatctgcaagatagagataaaaatatattaacacctgaaacgagcattcaaatatacaacctaataggtgatgactttgtgaacatatctaaaataaaactgaatgaacttctgaaacatgctgcgactgcataacgtatctgaaaaacataaaggaagaatctaaatttgtcaatttatcatagaacttgcataatatattaaagcgaatatttgttattaaataactttctcatgcttctaactgatgtatcatgagtcaactgataagcaatgaattataccaccctattcacctctatttcctagtcaaggatcattgtacaaca

SEQ ID NO: 108526 - DNA, 409 bp, Zea Mays
gacatgtctgtgctaacttggactcttttgccttgcgaacttgtcaacgtaattgttccgttggcacacggtatcactccgtcacaacttttcaaccagttgcatccaagaatcacatcaataccattggatcctaggaccactaggttgactgaaaaatctattccttgaatcttgagattaacatggaggcatgagtgtgtggccttcatgtcacctcgtggtgaactaatatgtaacatcttcttaagagggtactttggtagattatgtttttccacaaatgactcggttataaatgaatgcgatgctccagagtcaaataaaattgatgcgggtatggagttaacaaggaacataccatacaccacgtcggcatcctcaggcactgattctgttgtgacatgat

SEQ ID NO: 108527 - DNA, 345 bp, Zea Mays
gagggtaacagagccatctgactatgggcttcaattcactgtcaacaggtcctaatacttgttgattccggtagctcagccagcttcatgggaagtcatctaatgggggtcatgtctgattcacagaaattgaaacagcccctgcaagtaaaagtagctgatggcggttgcatgtggagcaattatctggtgtctaattgccaatggctgtgtgtgggggtatcaacttttgtactgatttcaaggtgttacctctgagtgggtatgacttcatacttggtatggattggcaggagaagtactgtcctatgtctgttcattgggcagaaaagtggatgaaatttg

SEQ ID NO: 108528 - DNA, 431 bp, Zea Mays
aaaccagctaacttatctgctgactaacaactcagataactaattttatgactaccaattagctctattaatagtacgtgtccaggctaaattttaagtacgtacttttcgccaaggctttaacttatcttaatcgtgcatacaaaatataaaataaataaattccttcgaatatctttattgagagttggcttagttacgcagctaataaataaaataattgccgtctatagaaaaaaatatccatgttcagctgtggtgtaggccccgtttcccagagggtagcagggccttccaaaaattggcgcgcgagcccaccctaaagtaggggcaggacatcgctcgcacctttggcaacgtgttcagtcgggtgtcggcacggcacgtcagtctctatacgatcatcaacgggccgcctttcacccctgaca

SEQ ID NO: 108529 - DNA, 1643 bp, Zea Mays
ttccgttggcctaaaaccctatatcaggcatgctctaggcgcgtttccgctggtgaaatttcgtactacggtggagcaggcattgggcgtggagatgcagcatcagtacacaatggaatcccagaagtcttcagttgttgatcagcctcatggacatgacacgaggaggggcaacactgggggtccagcccacaagaggggaaagtctcaacactagcgccaccacccctatcgtggcaagtcctctgaattgggtacttcaggagggagtactcagaggtatcaggctgttcctaagcctgggttggggttggtgtgtttccgctgtggtgaagcgcatcgccgtgcagagtgtcagtggagtggcaggatcacaaggatgtggtgtgtaggaggaattccaatgggaaacttaaatgagagccagtgacttcctcctcttcgcagggcactatcaacatgatgacaatcactgagcaacaatcttctgtatcgccgcctcagcagcagttttatatgctcgagactcctcagttcttgcctatgccaggtttccctcaattcctggtcgcgcctactcctgcaccgaccgctcctgtaccatcttagtttggagctcctcgtcttcctcatcctgcgattccttggggttcttctattaatttcactccgggagcttcctcttctacgggtgtttttggagcatatgtgctaccctctgtggatggcagagatcagggagacatggtgacaggtacggcctcagttgattcgtttgatgcccatgctcgttttgactctggcgctagtttttcatttgtttcgaagaattttgtgtcgtgtgctagtctttcggtgcagaggatgggtcacccaattgtggttagttccgctaagagctccattagtagctgttcagtctgcccgggttgttccatcgttctcactgatgaggtcttttcagctaatctcgtggtgatttccgtggagtcatttgatgttattttgggtatggattggttaactcaatagcgcgcagttatatcctctttttggaagatagtgttattgcaagcgccgtcgggtagggaggtgttattcttgggaagctctccaaatacaatctttccttgttgtcccaattacttccagatcgtcggtcaaggaagtcgggaatcctttctccatgatggtgaagagtgaggctgccttgcgggtgcaggacatccgtgtggtttgtgattatgtcgacgtgtttctagcggagctaccaggcattccaccagagcgcaatgcggtcaccatgggctttcccgatattatttgttgagaagaagcataaaagcaagaggttatgtgtggattatcatgctttaaatcaagtgacaatcaagaataaatatccactacctcgtattgacgttctctttgaacagttgagaggtgcctatgtattctctaaaattgatttgaactctaggtatcattagttgaggattcgcgaggaggatattgagaagacaacttttagcactaggtatgggcacttcgagtttatcatcatgtccttcggcttaactaatgcccctgctgcttttatggaaggaatgaataggatgttgcatgagttcttggatgacttt

SEQ ID NO: 108530 - DNA, 767 bp, Zea Mays
tgccgccacatgtcctagggtgaaaatgtttagggaatactaccatgggtctggaccccataggtgggacctagacccccacgtatgtcattcagacccccatgggtgggtcctggacctccacatgtactgtttggatcccctcacagggccccgaacctccccatttgacattcagacccccaatagttagggcccaagtctaggccagcatgtgcccttggtccccactctccgcttggacaggggcccggtgccaccatgtggctcatgggcacgtggcagaagcctttagctagaaacaagctcgtcgtccacattcatgcgagtggctaaggcgtgtcctaatatgcacagggcatggataggactttataaggccacacatgcatgaatgatcactccgtgcattaccgatgcagacaattgtgtgtcatatctgcgtgcagggcttgtatagtgcaccgcatgatactgaggtaggcggttgtgtcttagcgtcgcgcgcatgggcgacatcatcatgagtagtcgttggctcacgtagagcatgcacgtccatcgcattaactataccacacatgaacagggctggccccctacatacgtcagcataccaggcacaccgtgcgactcgcatgagctatcaaatagggcagaagacatgcctagtcagaagattcacacgacggtcgaggagaagatctctacccagtgtagtctttactactctatgttgtatttaatactagttcgctagggcgcac

SEQ ID NO: 108531 - DNA, 357 bp, Zea Mays
cacgccttcgatcccaattccactggcatcacattcaatttcaaatgtcttaccgaagtctgggagtgcaagaactggggttgttgttaacttcgtcttcaattcctcaaatgccttctattgtgcttctccccatttgaaaggtacttatttttggtcaattcgttgatgggagcagcaacagtactaaagtcttttacaaaccaccggtagaacccagcgagcccaaggaagcttctcacttggctcacattctgtggaggcatccagtcacgtacaactttgaccttttgttcatctacctccacaccttgtcctgatataacaaatccaagaaatactaccttatcagtgcaa

SEQ ID NO: 108532 - DNA, 406 bp, Zea Mays
tgagtagaattgaattgtgttgtgctaatatgtttgagttcatgttagttatctttgtgactatgattgatttgattctttgtaatgattgttgttgtattgtgtgacttttgtccacaatgacaacagttacctaggttaaaccttagatagttgggttctctctactctttatagtctgtcttagctcaatctcttcgtcccttccttccttgctatatccatacagatgtcagaacttggaatgtcaactgcaagtgatatcactaagtgcaaagaatacattgtgttggcaactcctccagctaaggatcagatggaacagttcaagaaggcgcatgctcagtttctacaagcaacaactcaagtgatagctggactccaacaagttgatttagtagaattt

SEQ ID NO: 108533 - DNA, 479 bp, Zea Mays
ggcagcatgatagatgaacaataaattaattaaacgatcgaacgaacggtgaatagttggatggatggacgatcataatcgaatgaatgatcggacgaaggaacagacatacgataaataggcggatgaataaacggacagacggacgatcgatcgaatgaacaaaagaactatgaatagttcgacgaacgaacggatgaacgatcgaacaaccgataaatagttggatgaacggtcgatgcatatgcttgtgtgggagcaggagggagggagtgggtaaccatggattggctttgggttacctcttgcctctggtaaggtggatgattagtgggagataaacatatgattagtaagggttaactataattagattgtggagcttattgtatgacaactggagggggcgtatgggcataagtggtgcaagaaaaatatttgggagatgtctagaggcaaatgattagtcttaactcaac

SEQ ID NO: 108534 - DNA, 717 bp, Zea Mays
cttgccgcttagacgccacgtactgagaagcgttaccacgtcgcagtaaatcgccataggtagcttgtccatcgcctgagacattgccccggtgaaagccacgacagctcgtgccagtgaactccctctctctccgatcgtccgtgtgtcttccccaaattggacgccaccgctgatggactctataaattgatgccccagcaagctccattaggttgttacgcacgcagtgcaccagccctcgcttccgattagccaccatagctcgtgaatttcaaacttcccccaaatcggtcagaacgctgtcgtgagacttctcgccgtggccagccccctacaggttagttcaaggtactctccttaatgttctagcccccctaagtctcctgttgctcgtagacccgtttgattgagatagacttccctgaatcaccaagaacacctcggtttatctccggttctcaccgccatcgcgagcagacgaattcggggctggatttgtgcaattaacagagggctcagggtcaccaggggtagggacaagtgtcaaccaaattagggcctcagtcattacgctctcggccggtacaagctcgccgaagggcgcgctcaccgtcattcacgtcgtggacttgacgctgtgaagaaatagaattaggaggggttttacgcaaatgtcagtgaaacataggaatagtgctgcgaccccttttcgtg

SEQ ID NO: 108535 - DNA, 333 bp, Zea Mays
aaagttccttagtacagaatgcttgatcaatgctctgcaaaattttgatggtatactgatcggacaccgggcaaaggaaaactcactgtaacaataaactttcatccgcaggggtctcaaacgccaggcacgcagatagcaggttcagctgaaccaaagacagttttgggaaaacaaactcaaatcagtactcccccataaggcaaactagttcctcctaggttgatgtaggttttcaaaaggcaaactagacaaatcggagcactaatcccaggaaggaatgtttggatttcaggggcagcgaaggaacaaccaaaaagagcaaaacatcca

SEQ ID NO: 108536 - DNA, 853 bp, Zea Mays
cagataccagcagaccctaaggcgctatcacgacaaagcagtgcggcatcgatccttcgcagtgggagatttggtcctccgccgagtgttggcgggagaaggatgacacaaattatcaccaccatgggaaggaccattcatcgttgaagaggctacctggccaggatcctaccggctcactaaaatggatggcaccgaagtgggaaattcatggaatattgagcacctcagaaaattctatccatagcgatgcctcaaagctctcgggaatgagttgtactttgtaagcagaaggtttcattatcaataaatcttccatgttccaaggcatacaagttcttgatcaacaactgacctaggtcgggctcaacttgaaattggcgcggcactcttacacaacttagggtgatcactataccctactaacagagcaatcggctaagtcagaaacgccttaagttagtgcaacatgctcacgcttacacgccatagggtgatcactatgccctactaacagagcaatcggcttaagtcgaaaacgccttaagtcggtgtgacatgctcacgcttacacgacttgaggtgatcactataccctactaaaggagcaatcggctaagtcagaaatgccttaagtcggtgcaacatgctcacgcttacacaacttagggtgatcactataccctactaacggagcaatcggctaagtcggaaacgccttaagtcggtgcaacatgctcatgcttacatgacttagggtgatcactataccctactaacggagcaatcggcttaagtcagaaacaccttaagtcaatgcgacatgctcacgcttacacaacttagggtgatc

SEQ ID NO: 108537 - DNA, 555 bp, Zea Mays
aatttatctggctctggatctgagtgttttgagtctgatggtgagtctgggagttcgttttcctagacagaggagtcctcggatgaaggcttggattatttttttgcgttagatgtggccgtagcggagtcttcgccgcgtgtggaggtaggcgaggcggctgatcttcctagtgcgagtactgagtacaggcggcgaagggtggtgtcgaaacacagtgtgggtgaggtttcgcgaagtggtaggcgccgtcatatggggatggagtgtggccgtcttcgagtagactggattggtaaacgagaattgttgtcctcgccgattggggcgagcataggtgagggggatctgcggaatctttttgagggtgaggagttgaagataatgttgttcaattatagggaaatgggtataatcccgaaggttgagctgatgtagtatatggtgccctcgctgtgtgtatgtaactgtaacttgtattgtaatgtggcctgatggtcgttttcgcacgcctgtactaatccggctgcacccgtaggtgacttttgcgcggag

SEQ ID NO: 108538 - DNA, 668 bp, Zea Mays
gaaattgggagatgggatcggggctataggaccgtaagagactgtgctttcaccgtgcgcaatcaatttgggcgaaggtggagagggcagtgcgaatttgacttcgatttggttcactggtgtgcgtgatgaccgagccttgccgtgatccagggggctatttatagccgcggatgtccggcgatcacctcgtggcccgaataccatcacaaacgcatgccaagcacgtagagaagtgatacagtgagaaagaatcacggtgcagaggacaccgcggcgaaaagggctgacgcgatggccgccggtgaatcactccggccgagctcgggagatggcgccacgtatgagtcaccctttccccggcgttatccatcctataccgtgcacgaatccggacggcgatcaacgacggcgagctgagctggcgttctgatccatccgaacactgtaccatggcacatcttcgtcagtcgcctgaaccgacccccttccatcgactagctctcatgattcttgtgaataaccgggcaaaattccttaataaggtttgttcttgattcaacagtcttcaatccttacacaggacatttgggtcaaaaccgaggggattcgaagatatggcgcatcaaacttgacctcacctcactggaaccttgttttaaccttag

SEQ ID NO: 108539 - DNA, 391 bp, Zea Mays
agttgattctttttttttctcgaacacgcaagagaattgcacatcattaaattaagtagaaggaaagagtttcggcccaacaagaatatttcaatacggagcacaccttacggtggctagaagcaagcatacataaaagaatccatagctaaaacaacagaacaactgccaactaaatactctgcagccctggtatagcgtcggtgaggagagacagactcctagcaccagccatcctccaaagctctagttcatgtccagccttttgaatagccacatcaacattgggctgtacctataaaaacacagcagttcctatgcttcctgcttccgcagagtccaaacatcgaggaagattcccttccgctccaaatcagaaacctgcttattg

SEQ ID NO: 108540 - DNA, 542 bp, Zea Mays
ccgatacaacggcgcacacgaaacattttcatgttttgttgagctatgctttggccagatgtgtcatgtgtgatgttaacgtgcaaaaggactgcctggacttttgtgatttttaattagtccttaatgcgtaatgcttgagctggcgaagacaacgaaagatttaaactttgacgcagggcatacatgtgtcatctcctcgtagaatacctgcctgacctcccaccatctgtcttagaataccaatttgattcgtcttctcttcctctttcttcacatggattgccactggatattgccggtatagtcttttacccagtactagtttaatcggagcttagtatttgctttcctgatggagtaacctgtacgtagggaagggagggactccacattagtctcttccttatccttaggcttccacatatggacgatcttatctgcttcgtgtgctccttgagttgaacagttgacccctgccattcccatttgcttatgttcttctcattaagttagtttggtactatctgtccacataaggc

SEQ ID NO: 108541 - DNA, 403 bp, Zea Mays
gaagcctttaccgtctccagcacatctagtacactggccatcctttttctcttgggggtcgctgtaagacctttttgtgccttcggcattgtcacttctgtcgaagggcttaaaaaacttctaatgtttttgttcctttgattcttggttccgcagttttatcagtcattggctcaattaacttggctgagggtaccttcggcaaggtggctagttcttgagctttttgcgtagaagaaattggctcctttggagcagcagctgaagaagtttcttcgccaaactcgggcaccacggacgactcaatgtaacggggctagtgggtgaggacttttaactttttactattcggcgcaggctcgcttggagcaaccgaagtagcaacctttacagaggttacacc

SEQ ID NO: 108542 - DNA, 309 bp, Zea Mays
cgataacatttatatatcaaacaaaagttgaaaggcctatattttaaatcttgtcctgtgcttatggcgagagccctacatcggtcacctcctaattcccaagtgtcaggtgtaggtgcataaatcctcaaattccaggttatgtctcaattaggtaaggtgtggttgttctcccgtagaagtcaaagacgatcgtgtaggtactagaccacgaacacgaagggttggcaggggcaaaaccatggtaatacactactcacgccagcattattcatactaacactaggaacttaggaattgaatactgct

SEQ ID NO: 108543 - DNA, 293 bp, Zea Mays
ggaacttgctattgataaaaaatttgcatgacatgcttttcctgcaaaccatcaagttatagttgttactagtgagtttacccattttgcttctatttggtggcgcgaacactgcaacaaacatcccaccgaaattactaccacttgggatgatttaaaagtccttatgcaccacaaatttgttccctcatactatgctcgcgatttgcttaataaactacaacatttaaaacaaggcacacactctgttgaagagtactattaggagttgcaaactggtatggttcgttgtg

SEQ ID NO: 108544 - DNA, 433 bp, Zea Mays
caagactcgaataggatactcagaatatgtcaagtctggttctagggcaacatccgttacgtcaatggttcgatcgggaacccgaagacacttcttcaattgagacacgtggaacacattatgtattgcagacaaggtttcgagtaactgaagtcagtatgccactggtccatattgttcaagaacaggaaaatgaccaatataccggggtgcaagcttccctttaatcctgaaacgtgatacccccttcatcggtgaaactttcagatagacataatctccaactagaaagtacaagggttgtcgtcgcttgtctgcataactcttctgatgagcttgagctttcttcaaattatgaattatttgctgaactttttcttcgatctcctttaccatattaggtctgaagaaatatctttcaccaggttcagac

SEQ ID NO: 108545 - DNA, 1459 bp, Zea Mays
gagggagaacccactcggacaccctcgggggctgggtcacagcttgcgctacccatccgagccggatcatctccggcagcaccctcgggggctgggtaagcgccagcaccatccttgagggtcgagttctctgcagcagccacctctaaggctgaaggtccctcagtcacttccatgggagcaggacaatccaaaccagcttcctgaccctcaagaccgcgctctaaagtcgacgaggcgcgggacgctgctcgggatgaccccaacccggcatcaggcacatcagcacaaacatccatcgcgccaccatctgccggttctgataacagatcctctagaaccatgtcttcaagagtttgatcaaagttcgctagagataattcttgtagaccaatgagggcagacaaagcaggagaaggaacaccgctactttccccactggctatgtagcgccgactgttcttccgaatcagagggatttcatcctcttcctcctcctcatcttcatcagcaacacagacagtacacccattgggggtcaacaacggttagatcacacccattggggtcagcatcagcaaaggcaggcattggcacctcatcagtagcaggaacagaaggaccagcagcctgatccaagctagacactcggcgaagacgtctctccttctttttctgcccctcagcaggagaagcgatcggattggctcggcaagggcgcttcaggcgaacactgtcaggcctctgaatatccgaggctttgctagcttctgggagaggtgctgccaccggtatttcagtaggggccgcatcagaagaatcctcagccaacatatccagcatggcacttatctctgcatcactgggatccaaaggcacctcaaagtgaacctgccgttcatcatcaggaatttcttcaagcgaagcaaccaaagcactaacttcctcggcagagggtcgcactctaaggcccaaaccaccatcaccagcaggaggattcgacacaaaatgggtaaaggccttggaaggaggcaagttccaggccgagtacacaacaggggcaccaacatttgataccttgcctctgagtatcatttcgagccggctcaccaagtccacagcagggattcttctgttggtaacccgggttgaatcagctaggcctcggtacagataggccgggtatgccctgtccttcagtggctgaatattcttgaagacaaagtcagcaaccatagcctccgcagtcagacccctctctttcaacaatccaacttcagctagcagagcccctgcctcagccacctcctagtctgtgggggattcggtccagctcggagtgcgaacatccggctgtctccctgaccgtgggggagagaatttccgtgattctcaacgataaaccactccaagcgccatcctttgatactgtccttgagtgggatgtcaaggtagtcag

SEQ ID NO: 108546 - DNA, 558 bp, Zea Mays
gccatttccggatgtcagaactttagtatagatggaaacaagctacttagcttctctaattcttttttccagattaatttgaatagcacacaaaaactaaactaaacatcacacttcctccaatttaacaagtagagcacaataaaacatcctatagttcgatgggactgtaaacttagaaactagagacttacacgctcatatgtatctattgcagttttctgaattcatcgtggcttgtcgacgctactcgtttttaattaatttttggtaaggacaaacctttgtccacggcattcacccgactcataaacatagagaaagcgatgactactataatatttcattacctcatctcatacgaagaaaatcaatttcatccatactgatcaaaccggacgattaacctttaaattattaaacctatccttcgtatgactaacacacacacatcacttacttgtctagcaaaaccactcttgcctaaccattccaccacacttcgtatgcatagaactcatctacacatacccgacaaatacattcaccgaaatattc

SEQ ID NO: 108547 - DNA, 616 bp, Zea Mays
caccgcgtaccaggctaacggcacgcaagtcaactggaccaatcggtgtgccccagcatcaactagcccctcgacatgagaacagtagcagagggagtaatgacccaataggagatcttgaagcccgtgtaagttgacttcaagcggagttgcaacacaggaccaacgcttgggttgcggacggggatagaataaatgaactaagaagggacatccgccacctgcgggatcagcttgctgatcgggacttagcactcgactgggcagtacagtcccatttgttggcatgtgctaaggaagcaagggctcaggcccgaattaaggaacttagctcaactgtcgacgacctgtaggtctattgcaatacgttacatgaggaagtccatgtactgtattcgcaattacaccctagtgcacctgcgaaccctgctgaggcggaagccggaccctcccgtgttgcaggacacgcgctcggtggggagttagacctttttgagccccctccttccatgaggctggttgacgtatggactcccacaccagacgatgaggccgccaagagtaatggaaagcaggactagtggtataatagaagtagtgtagtgtattgtaggtt

SEQ ID NO: 108548 - DNA, 424 bp, Zea Mays
gtttttaacgaggcggagtcatgtaatatacaagagaaaaatcccccgcaaaatccacgtcgaaacaagaccgcacagacggtcttcgacattcgactaatacaaagtcaccgcgaggtctagcggcagccgccctcgcgtgcgacaactccgcgcagaagtcgcctaagggtgcagccggagtagcacaacaagtgcgaaaaatcgaagtcttccacgaagactatccgcgcagaagtcgcctaagggtgcagccggactagcacaacaagtgcgaaaaatcgaagtcttccacgaagactatccacacagaagtcgcctaagggtgcagccggattagcataacaagtgcgagacatcgaaatcttccgcgagggctatccgcgcagaagccgctcaagggtgccgccggattagcactaca

SEQ ID NO: 108549 - DNA, 552 bp, Zea Mays
aaaaagagacggctccggcggttgtcatgtttggaccaggatgctggaccttctgctcctgcttgtgaagaagtaccagcagaggtctttactggagttgatcccactggtggtgtacctactgaagttgacccccatgggtgtgaccgtgcaccgactgaccccaatgggtgtgaccctgctgaaactgaccccaatgggtgtaatcctattgcagctgagcccaatgggtgtgatcctgcaccatcctttgtccgcatttttgatgaggacgaagaagaagaagttccactaattcgcaagaatagccggcgttatagaggtagcagaggggatagtgatattccttctccagctctgtctgctcttgtaagcctgcaagaattatccataacagattttgatcaggcccttgaggatgtcgttcctaaggatatgctgtcagagccgactgatggtgatatgatggatgtttgctccgacattccagatgtgagtttagaggtatcccgggtagcatctcgcgcatcgtcgaccttggaaggcggtctt

SEQ ID NO: 108550 - DNA, 443 bp, Zea Mays
ccttcggctccttaacacaaggtggcacgaaggttcttcgaagactaagcgatacgaagctatggccttcaaaaggttaatttatgcatgtcactgttcatctatttatagggaagataaacatcttcgtggaaaattacaaacatgctcataaagtctacacacatattttacaaatgatgcagggacattgatgagttttctcctttcttactgcacaagtcttgaacttggtatctttgcatctgaagtctcacccgtgccgaagctagcggctttggctcgcaccttcgccattcgcacacttggtcgaagcttctcttcacgccgcttcgatttttcttggtagtgtcctggataaaggttagcttcgttcactgttagttgtgtacctaaaacacatttgtttatgttgaagtgatggttttatgagacctttggca

SEQ ID NO: 108551 - DNA, 341 bp, Zea Mays
gatgtgctaaagtttgatagtgcttagtagtgggaaatctgatgttgacccgtggtcatcggaaagtgaggagttgctaagcccgtttgctaggatggcgcaggttccggcgcctgggcctgcgtaggcagattttggtgacaatggaaatggcatatcgttgatgtgcaaaagtttgatagtgcttagtagtggggattttgatgttgacctatggtcatcggaaagtgaggagtttctgagcccgtttgctaggatggacgatgagttttcgaaagatgacttagattattttatggcgttagatttgtcagtgaaggagtcttcgcctagggttgccc

SEQ ID NO: 108552 - DNA, 346 bp, Zea Mays
cctggtcttcttgtgtcgtcctttcgacgaccagcaccatgctcaccgcttctgcagccgccgcgatgtataaatacaacggctccccaggttctagagctaccagtattggtagggacaccaggtgctgcttcaactcttgaaaggcttgttccacctcttcggtccaagagaatgggatggacttccgcaacagcttgaagaagggcagtgccctctcagccaaccttgaaatgaagcggctaagggcggctaatgaccccgtaagcttctggacgtccttgatacgggccggaggcctcatcgcctcaatcgctttgatcttctctaggtttgcttcaatgcc

SEQ ID NO: 108553 - DNA, 521 bp, Zea Mays
ggacctcgataatcgaagcaaaggaatcacgacatcacccggcacagggacgctgacgcaccctgtaagctggcttttacccataccgaagccctgttacaacaactatggtataggcacctttcccctggaggctcgggcgtacggccaacccctcgacctcggctctcagcaggaaatcagcagacacaagtcaacaatgcagtgcatcgtcatgccactcacaggacgccaagacatctccccttggaatacgacgacctccgtattgacaacatacatctcctaggtgtataaatagggtggtgtagtccctccaagaggcaggcgaacactcagtagttttccacccagtctttcgcctcaatcagttccagggacttggggacttcccctctcccgctgtgcttgtaatccctactgcgggcatcctggtgcgagtaatataagcctcatccccctctgctgggagtagggctttgcattgccaaaaccaggataaactgcttgtgataactcgc

SEQ ID NO: 108554 - DNA, 759 bp, Zea Mays
cttgaagaggttagtttagcttcaccttacctttctttttattcaagtttttagtgagacaagatgtcaagacacatcttgggttgctcattctaccttgcatcatcttttgaacatgtttctataataacattactggggaaatgatccccggtccttcagatccgccagtcagagagtgtgttgatgaaaggagtcttagttcgctgggcccattagtcaattgggagaggcagacacgccaaccctaaaaggaaccgcccccggtcgaaccctgcggcactgagccaaggtcgagcgtggcggaacctgacaagggaggtcgggcgtgtcggaagggaaccactcgagtggatcccgcgcccgatcccatactgacctaccataaatagtcagccacatttaaccacgtctggcaccgagccacagcacggcgtcggtccgtctcccactcatgacctacgaacatctcagtctgcatagcactcatgacctacgagcccccaactgcaacgcattaatgactcacacgctccttggcatgcacgttcacttatggcctatcggactaggcctcaatgcgcagacctcttgcgaggcactacacgatgggctacgccgagccctaggcaacggaggccaggggtcggcgaagccaaaatgatgacgcctgggaccatcgccgccctcacagtaaatacgagacaaccaggcagcaccgggccccacgagtacacatgactccacccgtggtaaaac

SEQ ID NO: 108555 - DNA, 463 bp, Zea Mays
aacctagccgagctctgcatggaaacactcctttcttcatggtctatgggtcagaggcagtactgcctgctgatctcaagtttggggcgccaaggttgaactttgaaaacatagcagaggccgaagcgaccaggctagaagatgtcgatgtactcgaagaagagcggctgaacgcagtaattcaatcggcacggtaccagcagactctgagacgctatcacgacaaggccgtgcgacaatgatccttttcagtaggagatctcgtcctccgccgaattctaacgggggagggacgacacaagttatcgcccttatgggaaggaccattcatagtagcagaagtcactcggccgggatcatatcgtctcactcaaaaaatggacggcacagaaattgggaactcctggaatatagaacacctcaggaaattttatccctagctgtatttcaaaagctatcggga

SEQ ID NO: 108556 - DNA, 825 bp, Zea Mays
ctcagttgttgggcagcaaataacggtttctgcgtttctgtgcaacggattaatccgaacttctgctccatgactcttacccactcatccgcttctaaaggttcttcagctttaataaagagcgggggtcgggtctcagagaagtcctagtatgtagtttcatgaggtccttgcggaggagctatggctccatgttgctggaactgattactcgccatctcacgcaaaaagtgggtattatttgtagtagcattgaccaaggcagcgatagcctcggccagcgtcggtggtaccggcggtggattaggagtatcttcccaaccacgggaagtccccgcattgtcatgcacacgagtccgtgatgacatctgaggcaaagaaacatttgaaaaatataacataccaaaacataccatcatattacattaccaaaatgtaattatgcagactctggcgtacaacctgacttcattacttattttacataggtatagtatctaaactatactattctagtcttcatcatcctttgtcgctcctttcctgccacaggggaccgttcgtcagcaaagttcatggaaggaggaggcttaaaaaggtccaactcctcatcaggtccttcgtttgctattcccgacggtccggctcccattgcagcagtgtcggaaggtacgtccgggtgcagttgagcatacaatacatgtacttcttcatgtaaagtattgcagtatacttgcagattatcgagggccgcactaagctcagtcacacgagcttgagcttttgcttcgcggtcccaagcaaccgaacgtgagttgatggccc

SEQ ID NO: 108557 - DNA, 443 bp, Zea Mays
tcagggaatggggcaaggatccacctaggcaatgaaggagaggacatgaaagaaggaagccaaccctaccttcccccacctcccgagatgccattagatctagcccaagtcttagccaaccaaacctgtctcattgaagtcctcaccagaagtttggaaaatcagcgtcaaaatggaggaagaccacatgacaggatgtgagagttcctaaggctcaagcctcccacgtttgcaggagcaagcgaccctgtagatgcaaatgattggttgtgcactatcaagaggaagctagaggctatcgggtgcatagaagatcaatgtgttcagctggccgctcatcaactctttgggatggccctatcctggtgggatatttagtgttgtcatagcaaatgtctcgtgtgttgagttcgaagctgccttctatgaataccatgttctag

SEQ ID NO: 108558 - DNA, 417 bp, Zea Mays
ttggaaacggctctgcccttcccgtcacctcagccggtgacgcggtccttcccggtcctttccatttatccaacgttcttgttgctcgccacattattcaaaatcttctttccgtccgttagtttactactgacaactcttgttccatggagtttgacccgtttggtctttctgtgaaggatcttgccaccaggacccttctcgctcggtgtgacagccccgggccactctacacacttcgcatgcctgcttccactacaccgacctctgccccacgtgttcttgcagccgtcgcctcttctgtgacttggcatcgtcgtctcggtcaccccggtcgtgatgtgatgtccaagctctccagcagcacctccgtttccggttgtaggggatcttttgagcacctctgtcatgcttttc

SEQ ID NO: 108559 - DNA, 701 bp, Zea Mays
cccagttccttggtctcactgcatcagcttgaacacgagtttgccttggagggggtgaccatacagggtgactgcccacctccccgtggtcagccttccctagaaggtaatatgttcgagttgttcgcgtttcataacccatgtgggatggtgatgctcacggcattgcccttttgaatgctactgtggtatcccgtccagaacgccatcgattttgtctagattaccgccgcagaccacctttgcgtggactgaccaaaccatgcccttcccgggtaaactcatgtgagcaacgtgcactagatagatcactcgtgctcaccataatcttggattgaatgctaccatgtcctagaactgggttcgggctcgccgaagctcggtatgccgccaccgccagggatagtcaggctatatgtcatcttagtccgattcactgcgggttatgggtgtgtcagcctcgaggatcacgtctgggtgtttatcttcgttggaggaggccgtcaccggtgagtttgcacggcggttggccggcgctcgtcggggttagatcgaggaccggagtttgtgaagaaagaaaaacaaaagggcctcggtgcacatgtcagtgagacacaacaatagggttttaggctcttaatgagttgttgggttccacgagggtcttggtagaaaaggcgcagcacgggcacggcctctag

SEQ ID NO: 108560 - DNA, 500 bp, Zea Mays
atcctaccgagccgggtaccctgaatgtggttttgtgcacgtcttccgaggccatgaaaatttgattatacccagcattcccatccatgaagctcaagatcttgtggcaggcagctgcattgatcaacacttctgtgactggcatgggggattcatccttcggtgtggccctgttgaggtctctgaaatccaagcaaaccctccatcgaccatctttcttttaaacagacactacagtggaaatccattcggcatatcggcatggcctaatgaaccctgcctccaacatcttctttacctctttcttgacttcatgtagcacttcatctttcatcaaccgttctcattgctaaaaaggccgaaacccgttcttcagtgggagccaatgttctacaatgcccctatcaagccatggcttctccatgtaatcccaagcaaagcaacccgaatgttcctttagcagtcttatcatcggctcttgtaactatgggtctaacctc

SEQ ID NO: 108561 - DNA, 392 bp, Zea Mays
atcaactgtccttagatccacataggaggcggcgccagtcacgtggtttaggagaacacgaagatagtagcgctccccctcggccggatgagcagagactatcctaccgacttgtccacctgtatctcgtttcctctgttgccatacttttcccttaccactctgccaagtgtaccactcagggaagtcacgatataggatgccacgagcctcctcgtgtagcctattagcctcaaaatatgctgtgagcatcgacctatcaacacctggacggttgacgactcgctcgaccatttgccgctcgtgaaacgccaccatgtgcatgtttggaagatggagttgcagctgcatcacaggtggagatatctgactaagctcaaagccgtatatcc

SEQ ID NO: 108562 - DNA, 554 bp, Zea Mays
cagcgttgaagtggccatgtgtgggcgatcagctttgtgaattgcgaggggttgcccgaacggggagagaacttctagcaggcttcgcacgacctcgtgactcgatttgcagcgcagattatagcgggccagtagaaaccttgacggatcaccttggcagcaagggccctaggccccgagtgagagccgcaagtgccgatgtggacttcgcgcaggatctggaggccttcagtctctgtgacacatttgagcatgggttgactgatccctttcttgtatagctggccctcaataagtgtgaagtcccgacttcggtgtttgagtggcttggcctcgttgacatcacctggatggtaatatccttgcaagaacagggttattggggcccgctagtcttcggccatgatgaggttgacaatgtgatggccctcggcgttggtggttatttgcagaccctctgggctgcggacggctggtgtgcctatgatgtggtagaacacgtcggagggcagggcttcgcctctggctgctgctttggccaacgcatcggcttc

SEQ ID NO: 108563 - DNA, 330 bp, Zea Mays
agagcatgatatccaaatcatcttcctaatccaacagtattttttagcacaatttgatagaaagacttgagcgggactttagggcaactagagtggagcatcacattgtttgcatatagcagatgacaccatactttattctctttataaagaggcaaaacacaataggtgcgagagattctccaaatttattcatatatcacctagcacaattacaaatcttgaaaggggcaacaccttgtcatttttttcttcgtgagacatactccttctagctaaatgatatattattcttccttgtcagatgcaccaatcagagctggaggtcga

SEQ ID NO: 108564 - DNA, 718 bp, Zea Mays
tgcttttgttcagtaaattatccaatagcaaattactgtatgcaaaacagtttagttgcatatataagaaaaaatcctcgacagtaaaaaaaggactccaaaattttatcctgttaagatgtgtagataattgaaatgacaccaaacaaacagttctaaaacaaagagatgatataatgcaaaataataaccttagtatcagtcttcaaattatcaaagaaccctggttgaagattctgcaggacagtaagacatggcatcacaacaacagaatcacctggagacgaagcatcaacctgaagttctatacagttagttgagtcctgaagataattttaatatacatactaaacagaagatttttctcacctttaaagctttcatcaaaggttcaaacatgttaaaaccaatattcacatgatctggcgttgagaataaaacctataaaaatacacaccggcagtaaatatgcataatggctattctacttgacttgacatataatatcatccgcggacatatatacaaatcatgatgtgtttacctccaaaagcaagcacaaggtatgcatttcatgggtggataggatctgcttgcaattatgtcgattctggtactgatcacgacggtccagaagatcaaaaaacagagacttcacatcttctgcatgaaataagatgcttcctactcctttcaggactgacagaaccatgaactg

SEQ ID NO: 108565 - DNA, 343 bp, Zea Mays
gcaaaatgcagtgacagtgtgatgggtcagggaacagaaatttactgatttatactcatccagctgcttgaaggaaggcagtgtcttcaagaggtaactctccaaaattgaagggtcaaatggacgaggagacttactatgttgctcctgctcctcaaagttcaatatagcctaatatgatagagtagtattatgtattttccatatatgttatgcatttaaaaaagtggtataaatgtagaagtcataccccaacattaacatctagaatgagctggtgagcattcaatggaggaatatgtttagaacagtcatcgcggacacactcaatgaagcattgcat

SEQ ID NO: 108566 - DNA, 588 bp, Zea Mays
ttgctagaatagcaacagtcaatgacaaacagggtccaccaagttgcaaagcactggcgtataaatacgaacccacaccggcagcatttggcacgccatttgtgccatttgtgttattgtctcaaatttttagctcttgctcactagctcttgcctgattctcgagtttttagagcttcggtttaaagacgcgtttgctccaaatttgaaaagaagaagatgagtggagagaataagttgactgaagagaagaaaatgaccggggagacgaagctgtatgaggagaaaaaggttgcagatcctttcatgctggatttagagtccatggcaaaaacaaatacatagacaattactaaggagataatggagggtttatttgaagattctggtgacagtgatagctatgacgtggaaagtggggatgaagactttgaggatcagctgtggcacccaagccatactatcttcggaaagtcgactatcaaacagagtcatattgacgccatgagggggaggtattttcgtgacatgcctattatcagagttggatgagatagtactgcccctgctccggaggaaaacgaagtt

SEQ ID NO: 108567 - DNA, 280 bp, Zea Mays
gtcggaggagtggagacagtgtatatgtctgatacagagagtgattctgatgaggattgcatgatgctgggtccaagtgggaccgaactgaatcctattgctgtggatatgactgaaaatgggagtctggatgatcctgccaatgcaagcgacgtggagtctttgcagacgcataatctgctagggacgacaaatgttggggtggttgagcaatcagtatatccttcaggaagtgcttcaagttttgaagcaagaatctctgcagatatgtatgtctcga

SEQ ID NO: 108568 - DNA, 1643 bp, Zea Mays
aactccgcctcacccaagcctgaccttggctacctgctccccgtgaatcccgcaggaggccactccttcaattgtgtcatgcatgtctaagaatcctagagcgggctcggtcacggcctcgagcagacttctacctcgcccgagcacaacttcggcctcgataatatcaacgaagggcgcccgatatcaccggaaacagcgaagctgacgtattacccaggggctttttgccatattcagcactgcaccaaccactatggcatgggcaacttcctcatcaggtagctcaggtacgtaaccgatcccttagtcctggtctcggctctctacgtagttaaagatgcaaatacacgaactagacgtctccaccgggcacaaatcaataacgggtacaaaggccataccggctacagggctcggctatgcctcaacaccatacgcggccaaccccgtcactcttagcaaccctccttgaggctataaataggggagtccacggctttagggaggcgggcgaacacttcacggttttcacctcgactgtgatattggcacttgcctcaatcaaaccctgggacatgggatcctcccctctcccgacctgcttgtacttcctactgcaagtacttagatgcaagtaatataagtctcaccctcccactgctaaaagtagggctttctctcgctcgaactaggataaacgacttgtatcagcttgcatcacccatctgggccatggcacgcagcatcatttcactggtgtgaaatccttggatcaagacactaatagataaaagctaaatcatttcaagttggacatctagttggaagacagtcttgccattaagaagtatggactagaagtttagcaaatgatcaccaaactgggaagggccttatagagtgacacatttaatctttggtattgcatacgtgttgtagactttgcagggtgatgagttacctaaggcattgaattcgttttctaaagcaatatcatcccagtgtttggcaagatgcttagaaaaccaatgttttcacatcgagttgataacaacgtgtacgaggtttttttgtttcgcttagcttccccgaaaggcagagtcatgtgttgagcatcatatgtggcacctagtggaacctaggaaggtcagacggtctgaccatgtgccctggatggtccataccccggatagtccacgagatagcccgagtggcccatgattagatcaaatcagacgagacatctcccttttccgtgcgtgtttatctaactaaatacacggagtttgttggaaacgcctaggaacatgttcagacctcccctatacatataaaggggtacaatcaattgtgtgcatcactaatcgaaccaatcaaacaaatctactctatttacttcgttcttcatcacattaggagtaggcttaatttagacctagtttagctttccccagcccccaatctttatccctctcgactctacgtcgtctccaacccccaatcttcatccctcttgactctatgtcgtctagggatgtccagaggcacatatagaactcttctctctaataggtccctcctgggaggtaagatttagggttcttagaccctttgcacgcacaaacagtccagccccgaag

SEQ ID NO: 108569 - DNA, 448 bp, Zea Mays
gtttggatggccaggatgcgtgcattggaagggaagcagttgcttgaggatgaccccacagtcgtgtacctcactgcatacctgctcaccctggatgcacaatatgatttcttggctcggcaccaccgtcagatgattgcccgagcagaagatgcagagaagcgcaaccgtcagctccatgtggatctcaccacagctcaagcccgtgcaactgcattggaaagtcctgaagtcattgcggttgaagccctaaagcaagccaaggatgagcacgtccagaagctgatagaggcctacttggtaacccacaaccaacgtagagccctgcggatccaagagtccgctccatccaaccttgttcaacccatgagagctaaagatccccatattcttgaaggtcacccgatctctatcagaggagagaagaaggcttgggaactcccgaaag

SEQ ID NO: 108570 - DNA, 1027 bp, Zea Mays
cacggtcagagctgtaaatggatgggacaatgccagaaaatgagcatactttgaaaacttatccaccactaccatgatacaattatacagatgagatgtaggtagacctgaaatgaaatccatggtcaccacctgccaggcatgctctggtataggcaagggtaacaataaaccaggatagcggcttctatctggttttgcctggagacaaacagaacaagtactcacaaactccttaatttgacttttcattccaggccaactgaacacagacttaatacgtcgataggtaactgggaaacctgagtgacccccgactgcactgtcatgaagggcggtcatcaccttcaactgtaatgcagaatcatgttccagccacactctgcctttatgtcgaataatcccagctgtcaacgtgaaagggtccatggaatgtccagtagccagagattgcaacaactttttagcttgttcatcaaactcataccctttggtaacctcagccaaccaacttggtactacagaggaattggccaaagcatgtagctgcaaggttatatcatcacagtgcagatttggtcgtctggataaagcatcagccaccttgttctctactccttttttataaacaatagtgaaattcaaccccataagcttggttaatgcttttttctgccaaggagtagttaccctctgatcatctagatgaatgaggctctgctggtctgttttgatgacaagggcagcatgttgcagataaggtctccagtgttctattgcaaacaaaatagcaaggcattccttctcataagttgatagtcccaaatttttttgtcccaatgctttactaatgaaagcaatcgggtgcccctcctgttgtaacacagctccaattccaactccgcttgcatcagtttcaataacaaactctttggtaaaattcggtatagccaaaactggagcatgaatgagggcctctttcagtgcatcaaaagcctgttgggtactactagtccacacaaagagt

SEQ ID NO: 108571 - DNA, 497 bp, Zea Mays
aacggttagccattgtcgaccaaattcttgaagtccctgcagttacgtagggtctggcgcatctccttgtgatacaagcactggccgtcgagtatttcgtccagtatctgtgtgttgttgccgcgtggtgcgccatgagcttgggtcactgggggcgctacggtgtgtacttcatctctcgtcatcttgtcccaacgcttgtccgcctggtagttcccttccttctttggtgcctagggtgtaggcttcgagtggttgatgaggtcctgtgtccattcgtcggcggtgatgtagatgttcgcttcccagaagagtcgttctaaggtggccgaagccttgtagaggatggctcggacaaaggccgagttattggatccatagtagaagtcctcgatcactgccacctcgacgagatcggggatgcggttcctcatggtctagaaatgctttaggaatgagcggagggactcgtcgctttggcacttcatggatttgag

SEQ ID NO: 108572 - DNA, 817 bp, Zea Mays
atttgctttgcaaattgatgaagcggtgtgtttgcatccacgtgggcactcttcaccagcttgttcatgctctcgcttcgttgtgtagagaccataagaccacaatagtctcctttgaaaaatgcaggtacccaatctttacgtatttcatacaatctgacaagggtgttgttctcgtgtagctagaaatcattgagcatcatttgccaggcagcctcgaacttcatttcattcaatggatgatgtattatagattggaaccttgttttgcaatccatttcttcaaatcttgcatacaattcattcaagtggggcatatacctgttttgcacatgccacaaacacaatcgatgtattatgtttgggaatactctgcctagtgcgattggcatcgcagggtcttgatctgaaatcgataaatttacataacattgtgcaagtcagtatgatatcatatagtacgtgtttaatcaatacgagccatttattataacatacctgtcaacatcactcgtggtccgtcacatcccatgcatgttttgaacgtattgaagacccactcgaatgtatcaactgtctcgtctcctagtaaagcaaacccaaatattgtgcattgtaggtggtggtttgaaccaacaaacatgcctaatggcttatcatacatattagtcttatgtgtagtatcaaaggtaactgcatcaccaaaatcaatgtactcggcttgctggctagcatgggaccaaaatatgcttaaaatcttcccttctttgtccagttgaaagtcagaaaaaaattgtggattatctttcttgcataa

SEQ ID NO: 108573 - DNA, 308 bp, Zea Mays
cacctatacgagggattgagcaccaaatttatcttattcctggtgcatctttgccaaatcgtgcaccatataggacaaatccggaggaaacaaaagaaattcagcgataagtgcaagaactactcgacaaagattacatgcgtgagtctcttagtctgtgtgctgttctggttattttagtgcctaaaaagatggaacatggcgtatgtgtgttcattgtagggctattaataatatcacgatacggtatcgacaccctattccacgtttagatgatatgcttgatgagttgagtggtgccatcgtct

SEQ ID NO: 108574 - DNA, 453 bp, Zea Mays
gaaagagctcgcaaagaacaactcccagacctcaagacagataaataaggggccctttggttcaggaaccgtctgtgtgtgccaaagggagaggcacgaggaatcctgctcaatgaagctcacaactcagcctactctatccaccaagggaccacaaagatgtacctagacctcaaaaccagatactggtggagagggatgaaaaaggagatagctcagtatgtggcccggtgtgacacttgccagcgaactaaggcagagcatcagaagcctacaggtctactgcaaccccttctagtgcccaaatggaagtgggaagaaataggcatggatttcgtaatcggactgcctcggacccaaaaagggaatgattctatctaggttataatcgatcatgtcaccaaggtagcccacttcattccagtaaaaactaccttcgaaggagccaccctt

SEQ ID NO: 108575 - DNA, 437 bp, Zea Mays
cctcagtgtaccacccacaatccaacggcgtcgtggagcgcgccaatggcaagattttcacgacgatcaagaaaatgctcctcgatgacaagaagggcaaatgggccgacctactacctaaagcagtctgggcactgaacacgaccgagtgtcgggcgaccggtttcaccccctttcgcctgttatacggatcgaaggccatgaccccgcaggaaatcaaacatgggtccccgcggacaagcgcttcagcagtacccgacgtcgacgagccaacttccaaagacctcattgacggagaccgtgtcttcgccctgcaggccctcgacaaatatcaagcccaaacgaaggcctggcgcgaccacgcagtcgtcccaagagaattcaacgaaggggacctcgtacttgtccgcacaaactggacagagtcacggggtaag

SEQ ID NO: 108576 - DNA, 716 bp, Zea Mays
ggaaaagaagcataaagtttgcccttttgatattgcctgaaatcttagcctttagttctttacgtcgcctttaatttagctttgctacttacctttctcatgtttataagctgcaaataggtttctctagcatgcatgcacatatgcacgggcatatctcttctctactgttataaagcacaattttaccgttccacaccatcgtcgcgtgtcacttaagcctgtttaaacgttgggtcggttgggttcgggtcaagtcaagctcaggtctgtgggtcgtttggcataacccacgcctgacccatgcatggtacagtatcgggtcaggtcgggttggctcgtgtctccttgttggacggattgggtcggggttttttcgggttgagtcaagtttttttggctttggatcagattttttcgggttggtcggattttggataaaaaatgatggctcatacccgacttgtggatcgctgcgggtcaaaaactatggctcgtacttgttcattacattggtcgagtcggatggtccatactcatgtctatgtgtcaccatttttctcatatttaaatggtaaaaaagttaaaattatacaaaaatgagggatttcaatcatgattgttggctccaaaacctatattcgcacccacctatatatatgttcttatgttttatattctatacttaagcataaatgaaaattatagcaatacat

SEQ ID NO: 108577 - DNA, 796 bp, Zea Mays
ccctcatcactttgagtcttgacttctgggatatagcagctattgcctcttgcaagctaggaagagtggattgatgaaacatgaaggcacgtcttccctcaaactttgagtttaggcccatcaggaattgaagcacatgtcttttttccacccatttctttgcccagacaacacaatctgagtgtcgtagctgaataggatcataatggtaggcatcagcccacaaacatagcaattcctagacatactccactacagatcgctcacattatttaatattacgaaggcggtcttcattctccaccatcaacataatatttccagctcctgagtacatttcttcaagcactctccatattttagcgacacttataattgtatcaacagtgctagcaattgtcggaatcatataactcaacacccacgctgccaccaaagagtttatagcatctcaatccttccattcagcacttggcttgtctttgggctcaacaacagttcctcaacaacagttccatcaacatagccctcgagcctttttgccttcaacaatcgcatgcctctcctagaccaagccaaataattcttttccccctccaattttatctcatttggcataactctaggttctgaaccgattctatataagcaatattttctttacttgtagaagaagcttcatcctttttgctgacaataattcaaccaacttaccatgaacttgctcaatcccttaattttctctcccattttactagcagcacaaccagattaaactcaactactccacgtactc

SEQ ID NO: 108578 - DNA, 410 bp, Zea Mays
tgaactgcttctcaaacttaaagcgataaggcaatcgcacaagctcaagtgttttcttcgttccctttagcttcggcatgctaaattcacttaacgtcgaagacgtcctgttagccaagtattcttgaactagatctctagtgctgatctgttcggccaccaccctgaattctgctacaaaaagttggcatgctgaccttgtcgtcatgttgcacaaaggtctggtcattccgaagctcaaagtcagtgggcacatgaccattgtcatcagtttcccccttttcttttcattggccttgatataaaaccattcgctcttctagccggttggccacttggtatgatagctgaggaccagagccttcgtttctttgcgatatgcgaagttatagcagccaaaattttcatgc

SEQ ID NO: 108579 - DNA, 1201 bp, Zea Mays
aaagacttcattccagagttcataagcttcaaaattcacaatttctgtaccttcaaactgttgtatgcaatactatctgcgagatcggccttcgtcatggcgcaaaggccagcttcgagcttcggaaaacccatacttctggccatctcccggcagacggatagttctttgttgtccgggaggcagtacatgaaatcatctttgtccgtaccgttaaacactaaagcccccttcggatacttcagttcccgggcatagtgtttggcttcaaaaatttcttcttcagacaatctttttcccgcagcatatagaatgatataatcaaaatcttcggagagtgcttcgggagtaagggattcggcttctttggccgcacttttctcaaaagctatattagtatctggagtcattccttcggccctctactcggttgtggcaagcttcgtctcagcaggcactgtgggccctgcctcagtttcagcctgggttattgtagcttcaacttctatttgcttagtatcagctttaggttgtgttttgttagctttggcaaccttccctgtgggagcgagacttttggagtcggttgtttccaatacatctaatacatttaccatcctccttctcttaggagttgtggcagaactcttttgtgccttcaacgctgttgcttctgttgaaggacttaaaatccctagcatctttgttacttcttcagtttttgacctttcagccttatctttgtcaaccttcgtttcaactagctcaaccgaaggtgccttcgacattatagccggctcttcaagtcctctgcatgggaggaacagtttctcttgattcagcaactgaagaggcctccctgccaaactcaggcaccacaaccggttcaatgtaacacggccggtgggtaagtaccttcatctttttgcccgcagccttcggcacaggctcaactggggcggccaaagcagcagcttttctcttgttcccctgtccccgcagcgggtagcggtagtcggggtagacgaagccgatggcgtcaaaaactctgttcattctcttttttcaccgacctccgaaggctgtagatagcgcattatcttctgccttggaataagctccaagcaactcatcacttgtaacttcgatgcattttagccagtcatcgtttggttcatcgaacttatccccatacctgaat

SEQ ID NO: 108580 - DNA, 337 bp, Zea Mays
ccattctagagagagcccatgcgattcgccaggttacaagtcattccattgcttcctagctacaatttcagtcaatcgtagctgtatcatctatgattaaatgatgattatttcttttaaaacaggctgttgctgatgacgatgacgacgatagctggagtgagtagctggctcttccccaaagcgatttcggctcctgatgtttcagaagtgattgcatcgatcagacctttgtgtccctgttcttgcatggagcaaaagatgaaatagagccaagttaccacaggttttcatgccaagacaattggcatggaccaggtgatgcccatggatgggc

SEQ ID NO: 108581 - DNA, 360 bp, Zea Mays
tatactcacgaaggcgttacgtacctggtctggtgtatttgttatgttggtctggtgcgcatgtagtcggtctttgcgcggacagtttggtgtagtcttttccgcacttgttgtgcttagtccggctgcacccttaggcgactgttgcacggatagtcttcgcggaagacttcgttttttcgcacttgttgtgctagtccggctacacccttaggcgacttctgcacggatagtctccgcggaagacttcgatttttcgcacttgttgtgctagtccggctgcacccttaggcgacttctgcacgaatagtcctcgcggaagacttcgatttttcgcacttgttgtgctagtccggctgc

SEQ ID NO: 108582 - DNA, 312 bp, Zea Mays
gttgtgatacgcctcggatacatctcttagctagcaattgtgacttgtgctttggacacttattgaacttcgctaatctgcactcaatttttgctaatccttgatattagtttttggcctcccaagctccacatactttcttctgatcaatacggctgtgaccttgcaatcgcggtttcactacctcttggtaagtatcatgaaccagcctccgattgtaccatcctttgcttgtatttcgtcagacacttgtaagagcttggtaagatacattagagtgtgttcctgtgttccacctgagaggagcgtgta

SEQ ID NO: 108583 - DNA, 535 bp, Zea Mays
gggcagtgttcgtacaacccgcttgagtgttgggcgggccgcattgccattggtggaagtcaagggatcgagatagccagggttgtcccaaccagcacaggatgatatgtcgagtggagtggttcgccagacccatgggtggcagcgtcgttgatgacgctgcgaccgttagcaccaaggtctgtgttgtggttgtttttggaggatccaagccccatcctaccatggaggtagtcggaactgctcatgaaagtgcccctacctggtacgccctgacgacgtttgtcagtcgagggtacagaggcgtaccacccataagaatcagtagggggctttagtgtgctgaccttctacccaccacacttgtcaagccccgacccgattaccaggaatatgagcatggagaacatgggaaatcttatgatgggagcaaaggacttaggttcggactacgagagtgtaatatcctatgtcctatttggatgagatgaatttcttgaaataaccaattgtttgtattgatgttgtctgtccc

SEQ ID NO: 108584 - DNA, 332 bp, Zea Mays
catcagtctcttgatgctcagtgatatggcaatgttcagtccatgaatcaaagcttcatattctgctgcattgttggacgctgggaataacaattgaagagcatatttgagttgttcacctccaggtgtaatgaagaggatccttgcacctacccccttgcagcttcaacgagccatcgaaatacattcgccatacttctgcagtttccaggttatctggcacttgttgctcggtccattctaatacgaagtcaactagtgcttgagtcttgattgcagtacgaggtcgaaactcaatgtcatgagctcccagctcacaggcccacttggct

SEQ ID NO: 108585 - DNA, 811 bp, Zea Mays
ccagtagcggttgcaaggagatccttttaatcttcctaaagtggaggggaagaccaagatactttccaggtaagatagcatatttacccgggaacacttcggcaagatttgaccaaagcgactgaggatagcgaattggaaagatttctgttttatcaaaatttatcttcagccctgaacaaccttcaaagacttccagaatcgttttgagaactttgaggtccgacttgtctgctctcacaaacaccccagcatcatctgcatatagggaacaacgaagctttgcccctttaggcaggacgcttcccagtagcccagcctgagccgccttatcgatcatacgctggagagggtccattgctaaaatgaaaagaaatggagaaagggggtccccttgtcgtacaccacgcctgtgtttaattctatttgtcggctctccatttattattattttggaggaagatgagcccagaattagagcgatccagtctcgccacctttgggagaaaccaagggcctttaatacatcaaggagataagcccaatttatggagtcgaaggctttcgagatgtcaaacttgatgaaaagcgcaggctgacccctcttgtgcatcttcataatcaccctttgaacatataagaagttatcattggtgtctctcttgtgattaattttatgatgtccattcttgcctgtgatgcctttacgttttacatcatgccaaggtcaatatcatttgaactgttatgcaaatgcgcgttctcctgtgttctacatcattgtgagaaaaatgagccggccagaatattc

SEQ ID NO: 108586 - DNA, 460 bp, Zea Mays
ctgggaaggtgcagtcttgcagacagatggagcgtcagggtgcaaagcgggaggtatggcaatggctgatcccttggatcgccaaggtgaagcgacaggagacacgtgtgcaacggtgatttttgaggtgacatggatgctgcgaatggccgccgagctgcatccgtttaatagctgggaaggtgcagtcttgcagacagatggagcgtcagggtgcaaagcgggaggtatggcagcgtctgatcccttggatcgccaaggtgaagcgacaggagacacgtgtgcaacgatgattttttagtgatgtggatagggatgacaatggatcggattcggatcggatattgcaaatatccgtctgcaaccatatccgcggttgctaccaatatccgcccgcgaccttacccgcgggtagaaatttatatccatgcccgtgcccatcggatttcggacgggtttc

SEQ ID NO: 108587 - DNA, 679 bp, Zea Mays
aagaagaatcggatgataaggctgcagcagaacgcatcgtgagacagtcggcccactacaccctcatagggggcgcactctatagaaggggtgcgacaggagtcctcatgaagtgcattacctcggttactgggagatagctattagatgagatccacgccggacagtgtggaatacacgtagcatccagaactctggccgggaaagttttcaggtctggtttctattggccaacagcaaagagtgacgcagccgagttagtccagagatgtgaagcttgccaattcttatcaaagcaacaacatttaccagcacagcagctgcagaccatacctataacatggccatttgcgtgttggggattggacatgattggacccttcaagaaagctcagggaggctatactcacgtgttggtcgccatcaacaaattcaccaaatggatagagtacaaacccattgcttctctaactttagccaaggcagtggaattcatacaagacataatattcaggtttgggataccgaatagcatcataaccgacctgggatccaacttcactagctctgaattctttgatttctacgaacaacggagtatctagatcaagtatgcatcagtagcacacccaagagccaatggtcaggtggaaagggccaatggaatgatacatgaagc

SEQ ID NO: 108588 - DNA, 378 bp, Zea Mays
gtaacacgagtcaaagtgtccaaaatcttgatgggatactcagcataagtcagatcatcttgcacactgaggtcctccagtggtagctgctcctcaggtaccctgagacatttcttcagctgagatacatgaaatacatcatgaacatccgcaagatgatccggtaactccaattggtatgcaacctctcccactcgctttaagattaagaaaggtccaatgaagcgaggggccaactttcctttaactttaaatctcctcataccccggagtggtgacaccttcaaatagacatgatcaccctccttaaactccaataatcttctcctattatcagcatagctgttttgcctggattgtgcaattctcaaattttct

SEQ ID NO: 108589 - DNA, 379 bp, Zea Mays
ataagtttaatttcacacactttaggaaagaaaagactagttgtaacatatttggtcccagaaaacaacatggttaagtcataaaatattcttagtttctcataaacaatagctgcagttgtggcaacgggagtacgagacttgggcagttgggctggctgtggtctgtgaagtggttccaaactccaatgaccctacatatcaagttactttaacgaatattcgggtattcagatatggatactgatttttcgtacccattttaaaaatatccacggatagcaaatgctaccgtattcgtatccacgggtataggctcgtacccaaaaccgtgtccaacgggttttgtatccgcgggtacgcggataaatcacatcca

SEQ ID NO: 108590 - DNA, 434 bp, Zea Mays
attgcttgttaactgaactatctgtttagttaagtatatgttttgccatgttttacatatgttctacctgcatagtataccttaataacctgaatttttcagtgatgtgcttaactaaactttaacggataaagggtttaaggaggtccatgtcaactctgttgccaaggcactgattgaattcagtggccaagaagtcacaggcacccaggtctacaatcatttgaggaagtggcgtcaaaaatggatcagggtttgtaggctcaaggacctaagcggtgctcattgggatgagaatatattcacaatcatccttgatgatgaacacctgctgggccatacaaaagacaacccaaaagatgctgaattcctcaatgtgccaattgaaaactatgtgcagatgcaaattatatttggagctgggtaggctcctg

SEQ ID NO: 108591 - DNA, 747 bp, Zea Mays
gcgttggtggtaggagctttagtgtgaggaggggtgttggttgtaagattttcatttggaggagcaagaacgtccatggaaggttagtagggatatgtaagaagaggatatgggcatgaaaacatagcttgtggagtgaggaaacaaggacatacaaaacatcctctcgtcgatgatgcactagagaattgtcgtcgaagaagacctcccccacctcggcaatggtgtcgagaagttgtggagtttggtcgttgatcaagtcaatgatagtttgaaagtttagactccacttagaatccatattcaaatagagtgttggatgctacaatatgaataagataaacgaaataggaagtggtgagtgtgaatgaacccaatcaccctctttatttataggttggattcttgttttcttttatttttttgggtttttctaatttttttggacttcaaaaggtcgaaacagtatggacccattagattacgacacgtggctatagaccgccggaaccgattggatcctccaatgcaacgatatgtacggagcagtcggtatagatcggtctggctctaacttgatcggtatcgattggatcgatcggttggtagacccaccgatcaaccaacctaaatcgatcggtgttggagacgagcttatgtctatagaaggcgctagattcaggctaagcaattatgtctacacaagaatcaagatatatagagagatataatagttaaataatggaa

SEQ ID NO: 108592 - DNA, 481 bp, Zea Mays
ggcgtagatacagcagctgcgggcggcggaattcctcgctggtgtctggattccgatgcgatccgtgggcgactcctcgtagtccctaacttccggtaaacatcctccccgtgtgtaccctattgttcctgctactcgccgttgtcttcggttaggagttctagcgtgcagatcacattcatgtcggacgccggcgagagcgccacctcggccgcgtccacgccaccgtgccttaggcgaaaggtagaggaaggattcatggtcgttcatcgtgctttgacggctgtgattagatcttagggtaccccttcgcaatattagatccggcgtgtaggttcagtatcaagtggttgagatctgatcgcccttcatccgtcaaagctagatctaacggtcgtggaggtttataagttacacgtgtgagcgatttaatctgatccgtctgtgttgatcggatggccgagaacctgccatacccttc

SEQ ID NO: 108593 - DNA, 427 bp, Zea Mays
tgcagttcccttttcgtaaacaaagagggaggtgtcggagatggcagtgatgaagccgagtcgtcttatgtacgtggcgaaccattggtaccacgcacgaggtgactgcttcagaccacagagagacttctagagaaggcaaacatggtcaggagcagaggggtcgacgaaaccaggaggctgctggcaatagactgtttcttccagcttcccatgaagaaatgcattcttcacgttcaactgatggatcggctaaccacgagaaaccgcaatgttgaggacgacgcggatcgtggcctgtttgaccacctgtaagatctaggacactggctagaggggggtgaataaacggttttgactaaaaacaaagacactagagaaatttaatcaatatgacaagagatataaattctcttgctacaacaag

SEQ ID NO: 108594 - DNA, 612 bp, Zea Mays
cgaagctacagaagatcatggattatttcttccagtaacactaacccgagtacaacactcacaaaaacatcaaagtcacatgttagaaagtataagtccactgtcgttgatccatcaggcaggccagtggcatcacggacgttaccaccaaagtgtagttgtgtggtggcgagacccactggtgcaccccggtggaccacaaaccccacagccttgcgaacacgatctaggatgtaaatgaggcgcatatcacgattcctctatcgtgcacgaatgaatcttgtgacctggttcgcacacaggtaaagtctcaatgcttcaatctccagctctacaaggagtcttcatacgatcaggaatctaagaaattgagaccccttaaactgaaccacaaaagcctacctgtccctaaaaaactaagagccactagctatgaccgaagatattggacttcggtattagacgactccaaagctgcatgagccatgcccaagtccctctagagcccatacaccgacgactctagagtgatcggtgatgtaggcagttggggcccataggtcagcaaggatgctgagaagaggcctctgccaaccagggctcatcgaccag

SEQ ID NO: 108595 - DNA, 299 bp, Zea Mays
ctgggtcccgatggctttaatacaaattttatcaagaagtgctggcatatcattgccccggatttctatgacctttgtgataaattccatcatggggaggtctgccttagaagtatcaatgggtctttcatcgtcttgattccgaagatggagaatccccagaaggtgggggattacaggccaatttcacttctaaataatagtatgaaaatcttaacgaagctgttggcaaaccgtctgcaaccgttcatgcctcggctaattcacaagaaccagtatggcttcatcaaagggaggtc

SEQ ID NO: 108596 - DNA, 524 bp, Zea Mays
ggtcaagactaagaaagagtcgaccctagtggaagacttaaccctagtctttgacaagctgcgggcaacacgcacgaagctaaacccggaaaagtgcgtctttggtgtctctgcagggaagttgctgggattcctggtttcgcaccggggcattgaagcaaactcagagaagatcaaagcaattgagacaatgaggcctccgtcccgaatcaaggacgtccagaagcttacggggtcactggccgcccttagccgcttcatctcaagactggccgagagggcactacccttcttcaagctattacggaagttcggcccattctcttggactgaggaggcagagcgagcctttcaagagttgaagcagcaccttgtgtccctaccaatactagtagctctagagccaggggagccgttgtacttatacaatgcagcaccttgtgtccctatcaattattagaattacaaaaccagacccaaacttgataataaaaatccagtggacttgtaactaccaaaacccc

SEQ ID NO: 108597 - DNA, 651 bp, Zea Mays
cctcaagcattggagcaaggactcccctaggtatcgaaggcaaggacggaggggaaggaagtgagacccacctccccacaccctcggacatgccactacacctagcccaagttctagccaaccagactcgactcattgaggtcctcactagaagcctcgagaaccagcgcccgaatggaggaaggcctcaggacagaatgggagaattcctcaggctcaagcctcccacatttgctggatctagcaacccgcttgatgctgatgattggctgcgcacagtgaagaggaagttagaagccattggatgccttgaagaccagcgtgttcacttagctgcccaccagctctccaggatggcactatcctagtgggacactttcagtgctgctgtgagagatgctaccagggtagagtttgaggcagatttccgagagcatcatgtgcctttgggaattgtccagctcaaggaagaagaattttgagagttgactcaaggaggtcgatctgttagtgagtacatccataaattcacagaacttgctcgttatgcaccagatcatgttagcacaaaagtcaagaagatgccccgtttcttgaaagggttaagaccaaaactcaagactatccttgccagccaagacttccttagct

SEQ ID NO: 108598 - DNA, 349 bp, Zea Mays
tgtcagtagaattaattaagaagacgtctcttgtaccgtcagacggtccagactccttgctcggatggtctgaacccaccgcgggcggtccagctatgtagtgtggacaatccgtgacatgtggatttggcgcaatatcatttatcaaactttcaacaatgtgaaatctccctcgctttatttgataatctcatgctacttacaccaaattattagctttgcaattctcagctctggatatatgccgaatatcgaattcgtcaaaagaacgcattatgtcccaatatttttcaagataactattcaaagtgccatctaaacattaaattcctctaaaatttgctggaca

SEQ ID NO: 108599 - DNA, 385 bp, Zea Mays
gttaagaacattacagatgttctccatcgtgcaggttctctatcttccatttaccaacttttgacccttctgtacttgagtttgggcctgcttggatccaaggcgctaaattttagcccgtcacatcaatagcggaaaggagggttaaacaaatgatgaattagtgccatatctacagctgctagaggtgggtatatgtggtcttctataagagaggccaatgccacctacacaaatcacgcagctatgtggtgagcacaaagcgaactatccctactactctataagcacgttgtgtaggcatccacactgtgcaccattgtgcttctcgcccccgaccacctccccactcccgcgctgatctcgcaccgtagacactgccccg

SEQ ID NO: 108600 - DNA, 609 bp, Zea Mays
gtagaccagcttaatgcttatcagcatatgtctgaccccttgtactatactcttaaatttgttgatgggcatagagatgacattaaagcagtagtcatgttacaatgcctcaaagatttcgatactgctgctgtgcttactcagttgcaggaggaggtaggtgaaccgaggagaaaacgtgactacaggcgatcatattcgggtggtgcagtgatagtgtcaaccccatcggtgggaacacaacctccatcttctaaagaagccaagtcaacttcaaccactacatctgctgattccaagctatcatctctgtatgcttatcgaaaggcacaaggcctttgttataaatgtgggttgacatattccagaggtcatcgatgtgctgacacggttcagcttcgtatggtggaggagttgtggcagatggtgtccttacctgaagtttcaggatctggttccgacactgatgaacctccagagttgaatacaatggtgctatctcaagctgcagttgcaaagatgtctactcctcgcactatgcgctttgtgggccatgttgatgggatagatgttctggccttactggattctggcatctctcatacattt

SEQ ID NO: 108601 - DNA, 304 bp, Zea Mays
gcatgtagaaactgacataccttattaactgagaaggcaatgtcaggcctagtgagagttaaatattgtagggccccaactatgctcctatactgagtttcatcattgttgcctagtaaagatccatcatgcaaggatagcttctcactggtggatagtggcgagctgactggtttgcaatctgacatccctacctttttcaataaatctgaagcatacttgtcttgggtgagaataactccatcacgtaccttatttacctctattcccaagaaatagtgaaggtcaccaagatctttaagtg

SEQ ID NO: 108602 - DNA, 336 bp, Zea Mays
gctagcggtggaaacaaataacagcgatggagcggttgaactacgattacgacacgacctaaaccagcaacaagactcgaacacggacacaaattcaacaaagcaatatgaaacaaaattgcaaggctaaacagggttataggatagcggaatatatttttttgtatggcaattatctggagttataggatgaaaaacctaaactaaactagggtaagcctgacggtaatacctgagtctttgaataccactttataggaacgggggtgcccgatcttccgtcaggtgaagataactatcgatttggtggagatgtcacacagacgatccggcttc

SEQ ID NO: 108603 - DNA, 453 bp, Zea Mays
ccaactattagctacatttcggtttgatagttatggttcggtaccaaccctttgagggattggaatcagaaagttcctacttacaccttcgagaatttgaacagttatgcacctggttgacgatctcaggaatgcctgtaaatacactttgttggttgtttttccattttcattgatgggagaagcaaaagtatggtacaacctggctatcgataaagtagaagggagttggaaaaaattgaagagcggtctatgtctccatttctttctgcggcccaaagttgtcaatctccaatgtgaggtactgatgttctaacaaaggagaagagaatcattaggagtagcttggttctactttatttgtttattcttgttaaaaccaaacttagctattctagatgttatgttgatgcaacactttgtttgaggtatttctcctggtgctcctctctg

SEQ ID NO: 108604 - DNA, 569 bp, Zea Mays
gtttaatatcaattataactatgataacttatttttagtcgttttgtaccgaaaaatatagattggtcaattcgtttagtaaatcaacatatcacgcatacttgtaaattgttttcacatcttaatgaaatatatatattcatatgcaaattagcaagtcaatttttagaatagttcatacacatcggttcagaactttatgcgaaagaatgttggctctatatctgcttatgcgaaagaatattgtctcttccctttcctataggagcgtgaaataagttttactagcagtgtcgtacttgaggtgccagtagcctcagtgtgccactcgctcctcaagatggtctcactagcagcaaaatgatctctaacgagttgactcgcgtgcttgacttggattgtactttgtctcttttgtcacctaagctctggtgaattcctccggcatcgaagttagaacaatggttcggtcaactgagcatgtctccagtctataaaactatgtagttgagaacctcacaagtagattcatagtagttaacaactcaccatctcctttcgataggctt

SEQ ID NO: 108605 - DNA, 455 bp, Zea Mays
gcgtcgccgaagagcgctcgcatcgctacgcagcacacaacaacaggaagaagaaaggctgggagagagagtttgaatgagtaggctcacctatgcactacggagcttcgacgatggcagagcgttggttagggagtttggcgaagctccgggcgcgtcgatgatggtgaggcgtgactgtgtgcgtggttgctgcgtgcaagtgcccgactgagctatacgtgatctaggatggaagagcggatggctgagcgtgcacgactttctgcgggctgctagagcagtagttgccgagttggcaggagcaagggatgaggacggttttttagtcctacgcggggagacggttgggggagttgaagccgacacgcaagcttggaacgatagcgagaggaacaagtgaggtggaaatggttgcatgcacagcacgtgaggcactacgtgatgaggcgacg

SEQ ID NO: 108606 - DNA, 719 bp, Zea Mays
cgaacttatatgtgcttatttttggtggtactggactggcaaggaggtgcagttgttttttgttttcttttgatgcttaggtcactgagttttggcggtggaggtagactaggtgaaatgctgtggtgttcttggctagctttgcaggatggagccagtgagccaccgaggtgggaaatgtgccttggggggatgaagccatctttgtggaaattctatgaccgccactttcgtgaagtgaaagccatatcaccttagtgccttttgcacttgtgccttatccttcagaccatgcagagcgttagagccacagagcagagtgaaacgatatggatgatgttggtaaagatgtccagtatcttcgagcgttcttgtgcgtgcgagcctgtatgttcgaagcggtggtattcatggatacccttcgtatttcgaattcggtcaggtgtttttttgtaactctaggctgcctaatgatgcccagcagcccaggtacaaggaaccgtacctggtgtgaagttgtggatatgtttttttttggtttatgcagcttagtgttcgaatatgtgtgttacaagtgatagtaaaatttatgtggttctgttggaagcactcgacttagggggggggggggggggggaatcaacactgttgttttttgatccaatgtatccatctgtgctgctccaggtgtggaaatgtaagccagcgtgttctttttt

SEQ ID NO: 108607 - DNA, 734 bp, Zea Mays
taaatatcacatacagcaggcagacagctaatcagtaattgattatttgcaaatgaactacaaatgtcagctgaaaaggattggtctccttatgaaatttactgatccccaatgatggactcaaaaactctatagatgctttcactaggtaaccattagtattaaaaacaatgttagttggtcttaacgtgtacccatggtccaactggaaaagcaacagagtgtactagtcaatgactatatcggacccttgaaaattctccatcgccccttctttttcctttcctgccaagattgtctatatctaaagaagtccaagcatcataaagaatgcataccagtatcaacaagcaccagatcaaccccccccccccccctaaatctaacactatgtaattacttcatctgtttcattcagttactcagcatcttggcctaatctggctaaatcgcacattgctgctgcagataaacagattcaaaacaggaaaaaaaaagtgaaacttacatggaagctaaacctgttatgtgttatgatcagattccatgtgttctgtcattttctcaatgctacgctatcggtccactgaacagcataaagtaaaacataaatgaaccacccctcctctcgttttcggggaaaatagtagtctggtagagatctgtgccattctaattcactgcaaactattacagtgacatggtatactgacagcctatcgataccaacagcg

SEQ ID NO: 108608 - DNA, 530 bp, Zea Mays
aaaaatcattttctaattcctttttctagattttataattctctagactgggcctcatatactaaaaactgcagggactagccaataaattatcccagactcagcgcgctacacagggtggacggcgggttaatttctgttttatccgggggttccttagcaaaacgcgcgccgaagcggtatcgtgcaatcagagccatccgattgtcaactgagggtcccgattagatcgagcccacacccgaatcggtatgtgatgctatgcgttggattgggaatcaacggctcagattagaccagacttatgctgaatcggtacacgatcttgacctactatccactgatcaacggttccgattttaaatgcccgaatccattgacgtgcacccgatccagatcggacgatcccgagctaaagaagcgaaggagtatgtttgatctgatctcggccgcacaacacaagatcagtggccccggcgcatcttcaacctccctcgactccgccgcgacggtgcgcacacaatccacgg

SEQ ID NO: 108609 - DNA, 716 bp, Zea Mays
ctgctgaagctgagcatgttggtgctgaggaaggtgaatctaaagatgattatagcgtcgtgccatctaaacccagccacctggagtttgggaggtccactgttaccgaagatgatatgcctaagttgacgaagttaggctatttcagtgaagccaaagaggaactaattcgctttggcggagaagaaattactccaaagccagaaaaggatgaggtggtagtttttaaaagcttctttaaagcaggattaagatttcctttgaatgagatgattgtggatgttttggggaagtttgggatttatcttcatcagctaactcctaacgccattgttaggcttagagtctacatctgggctctccgaagccaaggggcagaaccgcttgccgaaggcttctgccgggcacatgagcttcattatcagacaaaagctagagaagatgggctgcacgagaacttcggatgctataattttgcttatcgcaaagatgtgaagactccagttatcagctattgtaccaaatggccagctagctggaagactgaatggttttatgtcaaagttgatgagaaaaaggagaagctggttcaaatcccattagaattaatcttcggagagactaggccccaatgcaacatggcaccggagagtccatgccagattgcactaggcgaatttcgagttattgcggagcacattggtactagggatctg

SEQ ID NO: 108610 - DNA, 423 bp, Zea Mays
gttcggtcactgatttggttacggtaagctttcgatgttcgtcttactcttcctctagccgatgtctccgatgaggtcgagacttcttaatacggtgcttgttcttgtgatctgtgcttgtgatctgtgctcgaaccccgaaccctaatctactctactccttcttgctctgtgattgtacccgtgagggactgatctggtgctctttttggtaagtgcttaatctggtgtttgttcttgtgatctgttcttgtgatctatgcttgtgatctatgttcgaaccctaaaccctaatctactctactatcttcttattctctgattatagccacctgtgacggacaaatctgtttgctccggctttggtaagttcttaatccggtgcttgttctcgtgatctattcttgtgatatgtgtaccaac

SEQ ID NO: 108611 - DNA, 370 bp, Zea Mays
ctttgctggtgcacggggggccatgccatcttggagaaagctggttgcgaacatgccaaggctgtagttcagccagaatttgttttctcagccgacgacataaaaaacccttcagccaaagcttctgcattaggcgggaaattttactccaaggtatggatgaagggcggccgtgagatagctgatgaatctattagaaagaatgaaaaagaatctcacgatgctcaagaagaagccaaaagagctgaagaagctgctgagcgtgcgaggcttataggtacctttattgaggtttagcttcgtaatccgtttttagctttagaactaacaaacatattttatgatgcagctgaactttctcccccaccgg

SEQ ID NO: 108612 - DNA, 333 bp, Zea Mays
gaaggattcctgctgtggatctggtaagccggtttgagatgattcttagaggcaaggtgtcgaatatcggtgctcctgttgcgtattctgcctggaatctgcctccttccaagaatttcatcagtttcgtgtcaaatcctcctgctggtgacagtggtttgggttttagagtactaccctcacccgaagaggttgaggctttggttgtttcgcttggtgatatccccaatgatgagaggtaggttcattttgagatgcctataaacccgagcgacgcagaaataagtgctatgctggatatgttggctgaggattcctctgattcggtccctg

SEQ ID NO: 108613 - DNA, 714 bp, Zea Mays
ctggtattggctgctacggctagcgattggaaaggcattaccaactaacagagacctcggaacacacatcaatttgacacaaacgtactgagaacggcctgtccacgtgcacggcggaaaccgtgaccacgggcacgcgttcccgctcaaccggggctggattgagtaatcagatgccacggtgatcttcacaagcgaacggagttgcagaaacaacattcgatttgggcagagccttaccaaggtgatctgaccacggaacgcggagttttgtgcttgccggagccagaaaagggggaaactggggtcgcggcggctcggggcgaaattgggagatgggatcggggctataggaccgtaagagactgtgctttcaccgtgcgcaatcaatttgggcgaaggtggaaagggcagtgcgaatttgacttcgatttggttcactggtgtgcgtaatgaccgagccttgccgtgatccaggggctatttatagccgcggaggtccggcgatcacctcatggcccgaataccatcacaaacgcatgccaagcacgtagataagtgatacactgagaaagaatcacggtgcagaggacaccacggcggaaagggctgacgcgatggccgccggtgaatcactccggccgagctcgggagatggcgccacgtatgagtcaccctttccccggcgttatccatcctataccgtgcatgaat

SEQ ID NO: 108614 - DNA, 718 bp, Zea Mays
cttctgaagttaaacaaaaaagaaagagagggaggaccttttttaccttgatacttgtatgcaaaactatgggaaagtttttgtttttttattttgctgagtcaatctttgatctctaggaacccgatgcttccagtaatattcttcataatctttgactcatcatcattgggcacgcacattaacattttatctcccccaccaaatagcatagccctaggactgtagcccacagctttggcattatcctccaactctaaggctttctcttcacttagctcttctccgccaagatgtcttaagaaaaatccaagctcatccatctcttcactagtagattgggtgggttcgactttatctatccccagggaaaaacttggctcttcccccacttttcatgcctcgaaaatccgcccccttcggcagctttcctttcatctttttcctccaaggatgatgaatctccaaaaacagcgtctccaagactttgaatctacgggttgttcacttcttcagacaaggcatctttgcccttcgaagatgccaaagtctggccaccttcgtcaatgcccttcgtagttatcaataatcaagtcagtgttggtcccaagggacttagagtggaagatggcagtggttgggtcattacctcaaggattcatgtacaacccaatgacgaagtggtagcagtgctcccttttccttgctcttgtgcggc

SEQ ID NO: 108615 - DNA, 471 bp, Zea Mays
caaaattgaaaggtcgtcttccagcttcgggaatcccatgcttctacctatctcccggcaaacggatatttctttgttgtctgggagacagtataagaaatcatcttcattactcccgttaaaaatcaaggcttccttcggatatttcaactttcgcgcatagtgcctggcttccagaatttcttcttcggacggcttcttccccgaagcgtgtcgaatgatgtagtcaatattttcgatcaaagcttcgggagctggaatctcgatcttttcaggagcaatttgctctactgctttttcttcaggcgcgttaggctttgtcttgatgagcactgaaggcccagttttgacttcagcttgagtttgcgttgcttcggcttctgcttgcccggtttcggcttcggcctgtgatttggcttcagtttgagcaattttctttgcaggagcagggctcaacgcctttatagtctc

SEQ ID NO: 108616 - DNA, 529 bp, Zea Mays
gaaacatagtgtgggtgagttttcgtggagtggcaggcgccgtcgtatggggatggagcgtggtcgtctccgtgtaaaccgggttgataaacgagaattgttgtccttgccggatggggcgagcataggcgagggggatcttcggaagctttttgagggtgaggaattgaggataatgttgtttaatcacagggagatgggtatcattccgaaggttgagccgatgtaataggcgatgccctcactgtgtgtatgtaataggcgatgccctcgccgtgtgtatgtaattgtaatttgtatggtgatgtggcttgttggccgtattcgtatgcttgtattggtccagctacgtacgtgggtgactttgtgcggagtgtccttgtaatgagagacttcgattaacgttattccggctgtgcccttaagcaactattgcgctgtcttttgaataaaaagacttcgattaacgctcttgttgtgctgttctggctgcacccttagtcgacttttgcgtggagtgtcttttaaa

SEQ ID NO: 108617 - DNA, 651 bp, Zea Mays
cacgattagaacctgtaacccttcgttgggagagttttggtccgatagatcaagatcggatggttctcgggcgatctcggctcttaaaaaccataaccgtaggatttggatcgtgcggttataattacgtaccggttcacagtatgttatgggccatcgatcgttcatcgggcggttctggagtctcggtaggattaggtctaatctagaccgtaggatgtcgatctaacggtatagattggcccgtaccccttcgccgaggcaaactttctaaagagtcctcggagtcttggtgacttaacccgccgtccacccgtgactatggattgggtctcagatttcttgcgcaaaagtccctgctgattcctgttttagtgcgcccagtccaaggagttaagaaatcagataaaaggatttagaaaatgatttttaatgcaaaaataaaggctagaatttgtttaattcataagaaattcatatgaagtctaaatcaatttattccaattcctataatcctataataatgttgtttatcaccctatatatctttgttttgacatgaaaatggtattaaaatttatctcttaattaatctcatatcaaatacataaaaccataggaaattcgtaacctcttcgttttaattccgat

SEQ ID NO: 108618 - DNA, 1086 bp, Zea Mays
cgatagtgatggttcatgacatgcaatatcatttttgcagttattttggaaaaaatattaatatactgatgcaatgaaaaaaaattgtaagttttacctgatccatagcagaggcaaaacgtatagagaagtcgtcatgatcagctctgatagttcccatgtgattcaaaatcaagtaatgcctctgataagtggtttagttaaggaatttcaagcatactatgacctactattaatctgtatagcctagagatgtgtatgtactttagttgtactccaaattgtatcttgactatatgaaagtcacccctcccttaatggggtgtgagatgttccctaattctctacatggtatcagacgcccaggttgaaagtcacccctccattaacgggtatgagttccctaattctctatgactctcacctaccatatgcaaatttagttcattctggccgcgctgtctgctctaacgaaattgcatttgcctttatgtggagtaaatcatggggatctgtttttggtacataatagggattctgtccaggtaagaaaccaacgtttgtttgaacccatttgtgaaaattatttagaaaactcagcagaaaggatattcttgtagctcacgaccctgaatttcatgaggcgcttgaagagcaaggagacgagtttgactggaaaaattttgaaaatatgatgacaattccttcaaaattgcagcaggagaaagatgcagatctggaaatgccgggatcactggatcattctgtaaaataaataggtaagagcaacaagaagtttaaaaatatgaagtagcataatcaggtaaacatcaactcctccaaaaattctaattataagtaaacttaagtggatatttacaaggagatgaccagaccttaaaaacattgagaagacgatttatcttcacccttttataaagtgactcactctccttctctgatgaggttgctaggacaaccaaaactgggaggacacgaagtagggtatggcgctcaggaaaaagaagagcaaagtccaattccaatgactccacacaaaatactataagaacctgtagaatatcc

SEQ ID NO: 108619 - DNA, 878 bp, Zea Mays
ctcatgtgaacaccacatttaaaaaaataaaggattaataaaagtcataccattaaattgtgcatcatgctggtttttgaatgtgtatctagttttatttaaaatctaatctcagacttgaaattcatatcatatttgaatatagtaatccaaaaattcgaaatagaaaatttaaagaaagaaataaagagtgtaattgtgtatgggccaaaattgctcagcccaacacctcatcccattccgtcggccacccccctccaaaatccttttctttattcatttgccagaacctgtgtcaccatatcatcagcatgacataagcatgcaaattaaccaacgcttgtatcgcagcctcatgtgcttccgcacgcgctagcgtctttgctcaaccgtgctgacacatgggaccccttgccagcttcctctccctcgttcacgagcacaaacagaacgagctgggtcatcttctccaggactcgcgtctgttgcccagagccgtcatgcgcacagatattttctcgtccagaatacgaccccttcctcttcgatcgggacccatggtccagcctctcccatgcgcatagcttatgaatcatctcccacgcgatcgtattccattgcaaccacctccgtaaacattacatgctcaagctcttcgttcctagtccgttgagatcccttccgggattttcgtggtcgctgcaacaaaccccgagtcgggctctgaacaacctctgcgagatctttggggccgacgtggccaactcgccagcgcctctgggctataaaagcgagcccccgtgacctcctcatccctcgaatcgagttctgccttggattagcgtcaccatgtctacaggagaagaagagtgctaccg

SEQ ID NO: 108620 - DNA, 1075 bp, Zea Mays
tctagctgtgcagctatgcgcccagctttaatatagtagaatgtggcttgtagagaaagagagaaagaaagaacaaatagaagcactacacattgtggctagagctgaaaacatacatgcactatatatacaagtgagtcacagtgcacatgtggtttgttctgtaggtcttcatgcctaattgcctatgtgctatgattttgactaaaaatccaatacttggaatgaagtctcatgtaataggtaaagaaagtttgagcatacctctaataccttggggtgatcctgatgccttgctaatcttcatctatcatgaatacaattttagattgtttagtcactcacatatgcaaaaagaagaagcaaagtactagagtagttcattaccctcttataaagccaagcaactgacatttgatgagcatcagccatcgtctctacataaccataagggcaaggcaaaattgcatcccttttcaatacaatgttcacaataacttcacaatattcttttccaagaggcacacctcccagcaaagtgttaggattagttgaaataattgttccctcagccacaggttgctcaggtccaataatggcatataatattacatcctttccaacctaaggcaaaaaataaatttattagaattgaatcaatctatggaaccatattaaatcataattaaaaacatgaaggatgagactaatacaagttcatcatgttgaatgcgagagggagcctcattccttggtgggactgggtgggctaaactcgtagtgatgcaccgtcgaggctgctttggtgggactgcacctataggactattttgatggcgttgaattgttggggctgccctaacatgattgttttgatgtcattgcactgtcggggctgcaccaacaggactgctttgatggtgttgcactgtcggggctgcaccaacaggatcgttttgatggtgttgctcaccatcatcacagtgatgattgatgtgattttctgcacaatcttcatcttctacaaattgagcgtcatgatgcgcttccacatcatgctcttcataccttcggc

SEQ ID NO: 108621 - DNA, 374 bp, Zea Mays
cgagtatctagcttggatcgggatgctggtccttcggttcctgctgttgaggaagtgcatgtgcctgaatttaccgacgctgaccccaatgggtgtgatccatctgtcgctgatcccagtgggtgtgctccatctgtcgctgaacccaatgggggtgttccatctgtcgctgaacccaatgggggtgctgcctgtgctgctgatgaaaacgagggggaggaagaagatgaggtccctttgactcggaagaacagtcggcaatatgtagccagtggggaaagtagtggagttccttctcctgctctgtctgccctcattggtctacaagaattgtctctggcgaactttgatcagactcttgaagatatggttcc

SEQ ID NO: 108622 - DNA, 420 bp, Zea Mays
cctgccgcgtattttagtaacttggttcggaaaacagggtcgaccatcgttgttccggacagtccgcactcaggcgtgtacggtctggccatgcgtagattgatggatttacccccaatctgcgtaggaggctgtggttatccaggatatgtgtccatcggcatcccataaagggattgggattgatcatgccaacttgcagtagatggatcgtgtgtatttttcctagtcttaccctcgtgtgatggaaaattagcaacatcggatttatcaaatgcacgtgctagcctcttataatcctcttgcataccccctagtattcattgcatttgttctcgttgtgcatctacgtaagatctcagggattggattttgtttgtttcacttactttggtggtagttgtagtaggtcggagtgaa

SEQ ID NO: 108623 - DNA, 1220 bp, Zea Mays
attttactggcccacgataatatgcacgaccaaccaagtcactaggtcatgtgaagcatgccaaaaattctctcctcgctcaggcgccccttcgcaattcgccaagctcatcgcccacacctggccacttcagcattgggggatggacatcgtcaggccactgcatacggctgaagggaacctaaagttcaccttcgtctccgtcgaatattttaccaagtggatcgaggccagagcagtctccacgataacagcgaagaccacccaaaaattcttctggcaaaacattgtctgctggttcggagtcccgtccgagctaacagtcgacaacagcaaatagtttgacaaccaggacttccaggaattttgcagttccatcggcaccaagacagtcttcgcctctgtctaccacccacaatccaacggcgtcgtcgaacgtgccaacgacaagattttcagcgccatcaagaaaaggctccttgacgacaaaaagggcaaatgggcagaccaattacccgaagtcatatgggcgttgaatacgatagaatgctgagcaaccgggttcacacctttccgcttgatgtatggatccgaagcaatgacaccgcaagagttaaagcacgcatccccccgaaccaaccaatcagccatccccgacgtcgacgaaccaacctccaaagatctcattgatggagaccgtgtcctcgccctgtaggcccaaaacaaatatcaggtccaaactaaggcatggcgtgacaacaatgtcgtcctaagagaattcaacgaaggggatctagtactcgtgaggaccaccaggacagagtcccggggcaagctagagccaaagtgggaagggtcgtacatagtcaagacgaaggcattcccaagtgcttacaggctaacaacttcatccggcgaagacttagagcactcatggaacatcgataacctccgaaatttttttatttaagatccaaggcccaagcgcctttgtaattcctcaaacaatgtcattcaggcccgcactcttttcctcccgggggtgaggtttttaacgaggtggagccatttaatataccgccaaaaagcccccgcataaaatccagcaagcatcatggtcatgagtgtcgaaaaacaccgcatcgacggtcttcaacattcgacgtataaatagtcaccgcaagaggcaacctagactaccctcgcgtgcgataaatccg

SEQ ID NO: 108624 - DNA, 643 bp, Zea Mays
caccttcctagcccttactttgatgttcgatgactgtgagactatgtccccatgaaatatgacaacataaaacctatacctttagctacaatgctattgtaagtgttgctcatgtagagcaccttgcacacgctagagtgaacgtgactacaaccacaatgcttggttctagcgttgtgggtgtagggcccacttgatatggcataccgacatcttagtagtgatggcctgctatcgaatcaattcatccgagaggctagggagacactcctcctaccaaattataatgtcatcatgcttttacatgatctataattgacaactatttcaaacgaacaactttcaactttcccacaatcatcagctcacatcaactttctcatagcacacggtcgaattagaattttaggaatatatggttgaggctaatagtttcatgccaccaaatcctctaggctaaagggaacatcaagcctcgtggccctgaggaaacaaatagatgaacctaattgatcaaatgttatggaaacttgtggttggttttccccttgaccttcatcattatcatctaggtccatagtgccaaaaaaccatccacatcttgagccatatttcctcctaaatgttgttaggggatcaaatc

SEQ ID NO: 108625 - DNA, 489 bp, Zea Mays
gccatggtgtgttgatcgccatcgcccatggttgacggtgcggacgttgccgtggacgacgaggaaggagatggaggcggcggttggaatggtggtgaggctgcgatgaaagattgggtggaggtggtgggagaggatcgacgagactgagataccaggttgtcaagggcagtgagcccgagggtagggggacctcggctacgtagatcgtaaccgctgtccgtgatggccggccgggttatacccccttgccgtcgttcttcgtcggtgggttattcccctaccgccggcttaggtagatgaagagagaggattagatattaatatctttcttaattcccaagtatttgattacaatatatttatagcctccggctcaaccaaaagaagtaacaaactccactaattaatgaccaaccaaaatagctaaagatctccatatttatagcctttcggctcaaccaaaaggagtaacaaactccactaatt

SEQ ID NO: 108626 - DNA, 441 bp, Zea Mays
cattttttgagataatagttgaaaaggggaaatatgtcataactacatattatctattaagtcctaatgaagctaaaagcgcaacgaaacaagcataaaattgacagttcatgtaaaaatgtcatgacataataagtaaaccaaacaaccaaactgtgctgattgatgggagtgaaagctttgtgttagccaaccaattaacgctggaacaagcacattaaaggccttattatcaactgaaccctgttgttacctgccgatcaatattcttagcaccgtcctgcagatcagccacattactgcagctctccttggcttcaacctctgccttcactggaggcgcagaggggtgtgccccctcgagcaggaggacgaccctcctgatcccattgagccttgcgtccctgggcacttcgttcatcacggcgaagggttctccgc

SEQ ID NO: 108627 - DNA, 652 bp, Zea Mays
ttcaacccgggtgaccaacagaagaattcctactgtggacttggtgaaccggctcgagatgatactcagaggcaaggtgtcaaacatcggcgctcctgttgcatactcggcctggaatttgcctccctcccaggcctttatcagtttcgtgtcaaatcctcctgctgatgatagcggtttgggccttagagtacgaccctctcccgaagaagttagtgctttggttgcctcactcggagagattcctgacgacgagaggcaggttcattttgaggtgcctttgaatccaagtgacgcggagataagtgccatgctggatatgttagctgaagattcttctgatgcagtccctgctgaaacactggcggtagcgcccatcctagaggatagtgaagctttagatattcagaagtctgacaacgttcatccgaagcgttctcgccgagccaatcagcctgcttctcctgttgacgggaagaaacagaagaagagacgtcttcgtcgagtgtctagttttgatcaggatgctggtccttccgttcctgctgctgaagaagtgccagtgcctgcatttgctgaaactaatcccaatgggtgtagcctgcctgctattaaccccaatgggtgtgacctggatgatgttgaccccaat

SEQ ID NO: 108628 - DNA, 798 bp, Zea Mays
ggctaattaagtaggccatatggacagttatagaattgcatggatgtcccaaaagcacccttctaatcagtgaggagacgttctttcagcatgcatgcattagaaaacatgaaaggattagaaattaaaggaaaaatgcatataagtatgaatgtagcaaataaggatgataataaataacctagggagcaaaaatttaatctaacccacctcgttttaacaatccgggctcacatggttttcctttccactaccgtaacgtttacgtctaatcctcttccacagatgacttcacccaccccgccaacggaggagacactcgtttcagttccgatttcctttcccacgagggtttcccttccatcttgtgggaggtgctcagctccgccggttaccctacacctcctttgtacacagtgcagttgtacgaggagcatcgggtaccatgttgccgagtctggctgactctggaggctcaccccctacagcgtggttagcattcccttgactcggagactattggattcaggtcagacgacaccaccgaggtggcagctatgaagactttgacaacgttctgcagctaccatgccttggagatggtaatgcacccactgggactcttcctcgctgaaaagagggatgaccccatgtggtgcaaccgtgtgagccatgtgaaagacgtgtgggccatgcatcccgaacaagttgggaggatcactgttcagtgcatgagtgcactgtaccactttcaggccctgtagagcgacgccatggcacacctcactaaccttgctc

SEQ ID NO: 108629 - DNA, 433 bp, Zea Mays
cgcaaagcctttgataaaatgcggtggtacggtctaaagatgaacccacacaattgtgcttctggagtgtcggttggtaagttcttaggatttatcatccatgcacgtggtatagagatagaccctgaccgaattaaatccattcgaaatgtgggacctccgacctgtaagcttgaaatgtagaagttcctcggcaaggtaaattatttacaaaggtttatttcttacctagctgggaagattgatgccttcactcctatctttcggcttaaaaatgatgtcgaattaacctgggggcaaaacagcaggaagcatttgacctcattagaaaatatttgtctacggctcccgtgttaaaagagccacaggtaggagtactgttcagattgtacattgcagtcgaagataaagttattggagctgttctgacaca

SEQ ID NO: 108630 - DNA, 613 bp, Zea Mays
cctaactggggttaaagtttgtgtttaaaacgttaaattttaggtttcgcctattcacccactctgtgattttcaattggtattggagcttgacacttcattaagagtctaacacctcaaagtgatgtcggaagaaccctccaacaagaacgagaagatgtcgtctggagaaagagtgcccttatgggagaagcacaagggaaagaaggaagaatcatatggctcctccaagtcgcacaagaaggacgacaagaagaagaagcggatgaagaaggtggtataatatgagaccgactcttcaccgctttcgacatccgacgatgaatcgatatcctccaagcgccaagaacgtaaaccggttaaccaaacctcctttcgttatccttgcatttctaaacacagtcaattattttttgtccaattaggcaaatctccacaattgatggtgaagattattcttggtggaggccattctttagggcaccggcgccatacagctctaggtgatcatgccgactatgtaagcacaacctcaggagttcctaaaaacttgtaaaccgtttagctatgagttttgcttgccctcattttttggggagcgccctaggaaacc

SEQ ID NO: 108631 - DNA, 399 bp, Zea Mays
cctaagaagaagaacgacgtctatcccgctcgagtgcatctcaacactgcatacgagattgctgacggagaacttgtgatggctggtacgtttcttgtgaacgatcaccccgcagttgtactatttgattccggatcttctcattctttgatgagtactgcttttgctcaccgctttgaccattcatcagtagaagtgggtcataagtaccggataagcttagctagggctaaggttttcacaaatcgtatagtccaaggggcaaccctcaaaattgagggaagagaatttcgagcccaattgatagttattctaggattatccttagatgtgatcatgggaataaattggatgtgggcttgggatgtcatccttgacacgcaaaccgaaccttgtcgc

SEQ ID NO: 108632 - DNA, 286 bp, Zea Mays
ttgggaaccaagctggtaagaagttcgggccgacagaaagggaaaatcagatccttgaagatatgatgagggcatgtgcaatcgattatggcaagaactgggataagtgcctgtctttggcagagtttgcttataacaacagttatcaatccagtctaaagatggcaccttttgaatatgaaaggaggtgtcggacacccctcaactggtcatagcccgaagagagggaaatctttggacccgacctggtgtcggaagccgaaagaaaagtcaaaatggtcataaa

SEQ ID NO: 108633 - DNA, 1240 bp, Zea Mays
gtgttgcttctttgctaatgcctaaaggacgaaccacacattcacgtttcaagatacctttcgacatgaacgaaacaaccatgtgtactattaggcgagggacaatgcttgctgaactgatacaggtatcctcattgattgtatgggacgaagcgccaatgacgcatcgacattgctttgaggccttagatagaaccatgcacgatatcctctcagaggacgaacctgcgaacgcgattatcccgtttggtggcaaagtcgttgtcttgggcggcgattttcgtcagattctgccagttgttcgtaagggttcacgatctgcgattgttaatgcttgcattaccaactctaggctttggcgccatgtcagcttcttgagcctacatacgaacatgcgtcttgccaacccatgcctaccgtcggaaaagcgtgatgctcttgctgaatttagcaaatgggttctgtccatcggagatggaactgttcctgttgagaagatggacgacgaggccgagccttcatggatcacgatccctcccgatctattgattcatgatgacggtgacaagatcctagcacttataactgaagtgtacccgaattttattgcgaatcatcgaaactatgattacctagctgtgcaggctatcatttgtcctaataattcaactgttgatgacatcaacgagcgtattgtttcaatggtacctggcagtggcgtcgagtgcattagctgtgacacaatttcaaaatcagcagaacacattccagattttgatgtgctttacccaactgaattcctcaattccataaatgcacccaattttccttgccacaaacttgtgcttaaagagggtgcgatggtgatgctgcttcgcaatctaaaccaaactatgggcctttgtaatgggacaaggctgcttatttcccagctaggtcagcgtgttctgcgatgcataatactcacaggatccaggattggcgatgaggtattcattccacggattgcgctgaacacaacgaacgtaaaatggcctttcactttgcagaggacccagttctcattacgcatctgctatgccatgacaataaataaaagccaaggacaaacactttccattattggcctctacctaaagaaaccagtatttacacatggccaactctatgttgctgtttcgcgtgcgacatccagggaggggcttagaattgtgatcggaaacgatgatggttcctgtgg

SEQ ID NO: 108634 - DNA, 567 bp, Zea Mays
gaccgtagatgtgtgatcgggcgaacaacactagagtacggttatgctgaatatggaccgtagatcttcaatccggtggctgtcgtctcgtaccctttcgtattataattataacaggtagatctgatttgaaccatcagatcgggatctaacgaccgatctcgccccatgcttcgtccgtggaattttgctaaagagtccttaacctttatacaaataaacccgcgtaccgaatggaatttttctattgaactattacatggaactgcaccaatttcaaaaagagcttaccgaatggatgtcaaagatttaattgaactgaagaaacaaatagaagaattactagaaaaaggttttattcgccccagttcatcaccatggggagccccagttctatttgtgaacaagaaagatggttcaaggagaatgtgtgtggactatagaagtttgaacgaagtaacgattaagaacaagtacccgttacctcagattgaagatctgtttgatcagatgagaggagctaaagtattctcaaagatagatctaagatcaggctatcatcagttg

SEQ ID NO: 108635 - DNA, 725 bp, Zea Mays
gcggtggtgtgttatgagatcatcatccagtggattttgtgtcgatgatccattcattctatcaacatgtgcttatatgatcgatcgatatgagagatcaactcatcatgtttctgacgcacgaaagaaataaggacgaaaattaggaacgagatgatctgtctcaaccagttcactagtgaaagaaaccaacagcatgaacatatatataccccatgcaccacatctcgaacgaaattccaacttaactcatcactgcatgcatgcgttgctaagctgacaatgatggctgccagtgcccagcagatgacttacagcatccataatatatataccaatgtttcgcactgacagagaagtcaaagaacgatgaaggaggagtgcccggcattctgcgagcaactggagaagatcgtcaggaagaaagcaggggcgtagccagctgcagcctgcaggaggagtgtgctggcgcatgcgttcaccattcctctgcgtgctactccagccataagcacacacagctagctaattaaggtattttagtctgtaaataatggactgtgtagtcgtgtgtgtgtgtgtgtgtcgtaactgtgaaagtcgccgatggatgcataatatatatgtggtttttcccttaaacaaattggatagatcctttggttctatttgtttcttttgccatggatagagaaaacactgtacagtgaactgcgtcagttttg

SEQ ID NO: 108636 - DNA, 508 bp, Zea Mays
acgatgtgcacgcaaccgccttccccctcgctcgttcttctcgcggtcatctgaggcccaagtgtcagctttatcttctctaaaagttgtctatttctcgtggacgcgtctgacttggacaaagcctcaacaacctctcctcgtcctgcctcccatcatgagccgtggcgaaatcgtgcaactaactttcgcgccctcttctttctatatatatacacacaccttatcatcgtgaaccacctctcttttcatcctcgcgcgacaactcctcacgcccggttcagctcggtcgtgtgccatgtcgcgtgcaccaaatcacctaaaaatgtgcctgacttgagtcccgcccgtcagtagcacaagcatacccccttgctcaaccgtttcactgatctatcggccccacatgtcgtaatcatcctttccaaaaccgcctctcctcttgaccccgcacctttgtgtcgtgcgtgcgcataaaatggaactagcatccgtgtgtgcatgtgca

SEQ ID NO: 108637 - DNA, 358 bp, Zea Mays
gtcgtgtttcgctggtaggcatggaatagttcatcggtgcatcgggctgggactcgtcggtgcgttgccgcccagcatcgtttgctgctgctctacttcaagtgcaggtatggccccatgcgatgctccacggcctattaaaccatatagattgaagcttggtcgccgggtcgatgggtggggtagtcctagctatagcgccgccgtggggaggaagtgcgatcgccggggtagttagtgagtgggataagaaagagatagaaatgggtgctgctcgggtgccgtcagtcttgagataaacggtcaggattaggcgagcacatcccacgtgggcgaccgtcgatctgtgaagtaatgg

SEQ ID NO: 108638 - DNA, 431 bp, Zea Mays
cgaaaagtcagccctaccaagccaaaaattggctagacctaacgaggaatctacccccacccctcgagcttcaatgtcatgacatgccaccaacatcacccattcagaatgcctctagaagatgacaatgcagacctcgaggacaacctatacctcaacatcaacaccgcggagcaactcttactcaagagcctccatatgcgcagctccaacctctagaagcaaagagacgccctcgcagctaagcagcagcgtagcgaggtgtaggctagggtctgcctcctcatccagcaagaaaaagagcaccttcagaccctcgagcaagaaattttgaaactataggcccaggaggacccatcacacccttcgtacgaccctgtaagattgagcagtttcgatgaagccagatggcctctgcaaaatgacgcttt

SEQ ID NO: 108639 - DNA, 325 bp, Zea Mays
cggaaatcttcatgggtgatagctgtgtcagattcttccacgcatagggcaagtaatgcaagtgatagctgtgtcagtttacccccattttcttgggcatcacttgtctcaaatgaagtatattggaggttcgcaatttatgttctgtggcatcgcacgggcacctacctagttacaactgaggtgttgtttggttcgcgtattttcatccgtcaacggttcacagcgggacccaatcaccttgcttctcgtttggttcggttcgaacggcatcaattcacgcgctatcagatacagaccttcagaatgatgataccgctctcat

SEQ ID NO: 108640 - DNA, 526 bp, Zea Mays
gcggaggatgatcgagtccatcaaggaatcgaatctaggggttgagtcatcacaagccatgggcttggtagtggaccaaattgaaggattgttattcattgtcttagtcatcactagatccaattaatacccttaagtattgggaggtgtcccaatgtagaattagattatgagcacttggaacgatgcaggcttagagctggggaaggaggcacatcatcattcattcatcgactcagaccaccctcttcctcttcttaggctcaagaagaggactaggctatgcagaaacataaggaggctcaggggtttgctcagtgagctgctcaagaaaatagctcggacaagcttcatcatcattcttaggcttctagttaggaccctatagaggacaataatgttccaacatctaaatcagtatgaagagttccccaagaaagattgataaatttaagaagaatataagtgaaagagtaatagaagatacctctagacgtggttcaagtaatgactaggtacatgcacc

SEQ ID NO: 108641 - DNA, 385 bp, Zea Mays
ccaagctggagaaagtttgagcttggcaaaactcccgtggaactgagccaggtaagcactcttggtagagtattcgccatctgattttgtctacttcctcaatatttatatggacttcatggatggcttcccaaagtctcacaaattcaattatttcagtttccccagaaaccggagaaataagagaaatccatgtattgtcgagtagggccttttgtaccttaatgtttttgcgctttgccttaatgaagagtgggggcaatgagacgcgccgccgtgccattaatccaattggagaaccagaaagaagcaagggtcccattgccaactgtcaccgaagttgaagcatgaaaaaagttctatcttctttggtacatggggtgtc

SEQ ID NO: 108642 - DNA, 634 bp, Zea Mays
tctgaaatttaaagcggtagggaagtcgtacaagttcatatttattcccttcttctttcttcttcggcatcccccatccaccagacgttggaaaagttttgttggctaggtattcttgcaccaaatcccgagtactaatatgctccgccacaactctaaattccacttcggctaactggcagggggacccgagttgcatgttgcacaatggccgtgtcataccgaagctcattctcaggggactcatcaccatagtcataagcttctctctcttcttctcatcaactttcacgtaaaaccattcatttgtccagccagtcagcaacttggtgtgatatccaatcacgggcgccttagtatccttttggtatgcaaaattgtatcatccaaagttcttatacagccatcaactctagccttagtctggtagtggagttcatggacccagcaaaatccttcagcgttggcactcttcccttggcttcggagagcccatatatacacgctgagtctgactataacatttggggtgagttgatgaagatatatttcaaacttcttttaaacttcaccaatcatctcgtatagagggaactgaaggcttgctcggaagaagcttttaaaaactatgact

SEQ ID NO: 108643 - DNA, 348 bp, Zea Mays
ttggcaaggcgtttttcaaaccgtaaggcattacaacataacagtaaagcccatccatggttacaaaagcggtatgcttcctatcttgtctagacatctggatctgatggaaactagagtaagcatctaggaaggacaagaggtcgcacccagaggtagaatccacaatttgatctattcatgggagtggatatgagtccttgggacaggccttattgaggttggtgtagtcgatgcacatccgaagctttccgttagccttgggaacgatggctggaatggccagccatactgggtgatggacctcttcgatgaagccagcgtctagcagcttccagacctccttac

SEQ ID NO: 108644 - DNA, 577 bp, Zea Mays
tgcatgtgggattatgttagggagcatttacttcaataaatactaatataagtataatacaaaacctttgcatatttatgctggagtctatactgtgcatagtaatttgaattgaaaactggaaacctaggtttaatttgtttttgatttaaaccatatttaaacatgagggaaatagaaaactaaaaatgaaactaagaaaaagaaaggggaatggcgaaccggccaaatgggctgaatttcatcagctgacccattgcctagccgttctcctggtccaagcaccatataaccagctccccaatgacagctgggccccacctgttgtcgtggttcttcctctgtattgtggacccggcctgtcatcttcttcttctctccagcgaaacaaacggcaactccgtggcaattccaaacggaaatcgcgagcacctcggccgattcgcggaactcctccctggattcgggtcgatccgatcccgtgtccgcgccgcagcctggtagggtcgcgccgttatcctctttccccaaacaaatcccacatgcggaccgacattgccgtgttcgccgtgattcg

SEQ ID NO: 108645 - DNA, 436 bp, Zea Mays
gttgacagcgcatgtgaggaagcacctcacctgtggggacggcacttggagattgggttcaatttaagatatcagacagttcctcgacagctttatcgtctcttcaattcgcggtacagtacagtctacctgatcaagcctgtccagcggcccagacaagttgctcgacagctttatcggctcttcaattcagtgcctgcagctggatcggtagcacgtcatgtgagctctatttcgcagcatggcattgccatcttcatctgatcgagacactcggccaagacacaacaagcatggcattccaagcaccggaaagcgccccatgaccggcaccagcatgtgcaagacactcggccccatcaaaatctcatccaaatcctgctccctgacgcgtcttggaacatcgcacactcgccgtgcccataagccttgcctc

SEQ ID NO: 108646 - DNA, 744 bp, Zea Mays
gttagagtccctctacttacactttgacctttggacatcccatattccgaacatatctggttaccgatactatctggtcatcctagttgatttctcattttcctagacttttcctctgtggctcaagtccgacacctttcacaccctcatgcacttcttcacctgggtctccactcagttccatcgaccggtgcatggcctccagtgcgacaacgtccacgagtttgacaactctacctctcgctcctttctctcccacgacgttcagttgcgactctcctacccctatacttcccctcagaatggtcgggctgaacgtattattcgcaccaccgctaacatgatctactgcctccttttcaggcgtctcttcccgcccactattgggcagaggccataacactgctagtcatctcctcaaccgccttcccttcaaggtagtcaatcactgcacccccacttcaccatgtatggcacatgctcctcctataccaacgctctgctacttctccacataagctctccccctgccccactcgctgtcatttcctcggtaactcccctgaccacaaggggtactgatgccttgacctcctcactcgttgtatcatcatctctcatcatgttgtctttgataaggaggttttcccccttggtgactcctctccaccccacgacctcgatactcctctttcgctgccctctttcacgccgcccatgaccacgtcgccttctattgtgcca

SEQ ID NO: 108647 - DNA, 361 bp, Zea Mays
gagagtagcacgaagcagtgtggagaacttgcttcggctggctctggcgtgcttcggccttagctatttcgtaacttggcaggttcttattgtatgtcccttgtcctctccgcagaataagcagagcaatcttcttggttgagagttgtatctccctccgaagcttcatcctcctctgcctcttggggctagcgatctgaaggagttctgttgtgtccctattgtctgggagctgtgctgctgcccttgattatgatggtttctatctttgctttgattgggattgtgaattgttctgacatgtcttggatgaagcctgcccctgaagcccctggtcatctaagagtatctataggcttcc

SEQ ID NO: 108648 - DNA, 614 bp, Zea Mays
cgctatgtagttacttcctgtcagtaaagagtgtaatgctaaagcaccactaaatcatgactgttgcttgtttcacttcatccagataaagtgcctatacgattagtttgtcattcagtatgttgaagtaatgatcatcaaaattctacaagctgaaattggtattctgattttgacatgaagctgcgtgttatcgcaaaatctcaattcactttagcgttagtttttgaaataaatcttaggttcagaaccttattaatgcatccttgaaaaactgctacttctcatattatacaattgttctgtaatgcgcccaaattaaaggccctgtttccaaacctcggtaaaatcctgcatgccattcaaaattgtctctgttggttcctgaccatagaaatggtcaagagaaggtgagttctgcactgagcttgacaagcaatgatgtatgcctactatctatgttttctttctgcaatgaggtcctaatttgcataggacaatgccagtgctagtgaaactttctatttgtatttcatcaatgctggcacttatgtgatcgtagatctgatgttagtccatcttaatataaagataagcagctctcccgtgtgttc

SEQ ID NO: 108649 - DNA, 818 bp, Zea Mays
gacaagtaaatttattgtgcgcgttctgggctccagatagtgtgcgcggtgggcgtaagatatataccagttcgagcagaacatccctacatctagtcctcaatggcttgcgttattgacaccattgatgatcaaagctcatagtaggggttacaagcgggcgagagagggaagagaggctcccaagtctcttattatggtggaggtggagctaagggttatatagtgcagtcctagctaagtattggcttggagacatggctctagcctctaggtcctcgtccttgcgttctcctcctattcatcggtccttctcgacatcttcttgtatggggtctgtccttatgtgtgcgtatctctgtgtgtcccgaggtcatttcgtgggctagcctcctccttttatagaccaaagagggggggatcagctagtggtggcttccttaagaaggagccactaggcaatggtaaaaccgagtgttctaccatggggtgaagccacacgtgctcgtgggccctagggtcacctggttgcctcgtattctttatggcagatgacgtgagtagcatggggctagagtgccatcatttgggctatgctgaccccctgcctctgtaacctggggctcggcgtggctcatcgtgttgtgacctgccaactgtctctacacttaggtctagtcccgatatatcatgagtgcaccacaggtcggaggggtgcgtgggccataattgcttcacagtccgaggggttcgtaggtcatgagtgctatgtggtccatggggctcataggttatgagtgggaggctgtaacaccctg

SEQ ID NO: 108650 - DNA, 607 bp, Zea Mays
gccacggtgattcgtgctccgcgcagttggataacatagagaggtcagaaatatcaccccgtggatgtactccggccgctattttactccggccgtcgtacccgctcgtgtcacagtcactctggataggctcgccagagttagccccccacaactttgcgccacgtgcctcggtgctttaaccacgccgccgtgagtcatcttagcccatccggtgatcgccggtgagcttgccacggtaaatgccaccaatcgcttgcgccagtgcacctcttcctctccgaccgccaccgtgcgagctgaaattcacgagccaccgctcaagagccctataaattgagcacatccttggctccgctaggtattcaagcacccagcacatccactcgtgcctccaattgttcacctaagcccccgaattgcacacttcccccaaatcgggtttccgccactgtaaaaaggtcctcaccgtggctagctcgtttcaggtccgatcttgtcctctgctctcttatttaagcacccttacatgcccctgatgctcctcgacttgtttgattaagctagactgtaacaccccaggtgtttatctcctgtaaacatcgat

SEQ ID NO: 108651 - DNA, 346 bp, Zea Mays
ctttatatcttttgttttcgttttgcttacgaacgaaaacccacttgtatcctagtgggaaggtgcctttaggtgttaacatcacttccaagaatacttctcttttataaagcgaggcaatcactttttcaatagcttctttccactgattccagtctgagcgttttctacactctaccatggatttaggatctagatcattaaggatgtcaacaacttttttagagaaataagagtcgactacagtagccttgcggtcaaatgtttcgccagtttcaatataattggtagcaagttcatctacccttaaggacacatcagcatttcctgtatccatggtcctcgg

SEQ ID NO: 108652 - DNA, 422 bp, Zea Mays
gcaagttcaagttactccccgtcatgtggagagccatgatgtgaataacaaggcacttaatgctttgttctattgtctttcgctctttgagtttgatagagtgaaacatcttgatacggttcatgagatctagactaccctagaaaaatttcatgagggtaacgatcatatcaaaaccagactctccgagacctagcggtgagagtatgagaactttgtttagttggctaaagaggttattgattctatgttttcttgcttctagtcgattgtgaacaagatgcacacaaataaggcatagttacactatgatgatcatgagcagttctcaaagttactagatgctctagatcagagggtttggaaggtgaaggtctcaacgatcacagagacactcaaatatgagaccctcaccatgaatg

SEQ ID NO: 108653 - DNA, 351 bp, Zea Mays
ccgagtactaaatacagagaaccgcgggggtcgaacgagaaattttccctagactcagggaacacctgggatggactgcgggttgtttctataatattccaggggctcatatgaaagacggccagtcgaaggggtatccaatgatcctggtcaccccatcaacttcctacagttcagattagatttaggtttaaacgaagcggtatgtaatcctgatccttgtaccagaggtcgacggtctctattctatctaactgagatcatcccgcatcctttggattctcgatctacggtcacggttggatgcggtcgaatcggtatgaagatctaatccaattagtccaaaacgca

SEQ ID NO: 108654 - DNA, 357 bp, Zea Mays
ttcggtgcacagagacccagaagcctctatttgctgcccagcaactgagaggtcccaccagtacctggtgcgcaaactgtacaactgttcaacctaaaggacatattgtcacgtgggcagagttcaagcaagcgttcagggaacactacattccaaatggtgttcttgtcagtgtttagtgtccgactgcacacccaagggtaccctcatggtgcttttgggtaggacggtgtcgtggattgtaactcgatggttcgtgccgggggcacgagaaagggagagtcgagtgagtttcagcaggttcgggctgcctgaggagcataataccctacttcctgggatgactttgtatgtggg

SEQ ID NO: 108655 - DNA, 832 bp, Zea Mays
cgttgatgtattaattgttattaaaatgctccgtcgtaaactagtgtgttagttacggcaaaaaaattaataaagcgtaaagcatgcttggtaatcttcgcagccggctaatgagttagtctatgttaaatatagtttttgtattcatcgtggtgtaagatagagtgggtcgaaaatataaattatgtgacatgtgattcgtgttttaaagacgagatgtgcgaatgatcggttagtgtttcacttgtctagtcgataaacgttgtcataaataattgtgctaaaattggtcatgagaatgcagtggggacacgtatgcgtgtgtgtgccgtggtgtattatagtggtggcggcgtaagatatttgattgaggtgtgcgggtatataccgtaatgtggttatattcgcggcgaggaaagatgtatgcattgggtaacacgacacttaggtcgttgttgtataatcaaataaaggatgtattattgggcttgagtcaaaatgtggggtactagtggtacgctaggcaggcggtgtccaaataaattaaccggttgatgtggtagttgtcgtgcgtgatttattgttagtgagtagtgggattacgagttatgtaaggattatgttagaaactagtatgcggcgtgtaactgtgttcgtgtggtgaatagtaggtcagtaggaattgttggtgtcagtagaaaatgtagtcttatggagttttacgccatgtgtaaatgcctccatgatagacccctaaaaatgtgctatttaggtgacttatgtgttaactaattcaagttgagcaatggttgaaaaacactgatcaatctgc

SEQ ID NO: 108656 - DNA, 712 bp, Zea Mays
gagatttggatttttcaggaacactctctttctccagagttattgatgcagttttcgaaagtttagctttggtaggagcttctgaaggtccagcttcagcaagagtgtgggccatcctggagtcactagttttccttgaatctttagcctgcgtgctaagagcttcgacagaggcaggagctaatgtttttatggactccagaatagcatctagcacgctagccattctccttttccttggggtcgctgcaggaatgcttgatggcttcggcagtcccattgcacacgatagactcagtgccctcaactattctgccgacttctctagtttcggctcttcggtcggatttgtactagcttcaattggcatagcatgacccagttctgtggcaggagcaaccccttcacttagcttcggcacattggccgtctcaatgcgcctgggtcggtgcgtcaaaactttaaccttcttcgacctcgacacactagaagatgccgaggtagcagctttccttttcttcccttgctttcgcatgggaaagcagtagtctgggtacacaaacccgataacatcaaacaccctattcaatctcttcttgccctgagcaccgaaggcagttgtcatagcttcgtcttcggccttcgagtacgctccaagcagctcatcgctacttgcctctatagcatctagccagtcatcattcggttcatc

SEQ ID NO: 108657 - DNA, 678 bp, Zea Mays
gtcgactcccatattgcagaagtgttatttgatactggagcaacacattcattcattactgcatcatggatagaagcacataatcttccaataactaccatgtcaacccccattcaaattgactcggccggtggtagaattcgagccaatagcatttgcttgaatgtaagtgtggaagtaagggggatagtgtttctcgctaacctcatagtaacgggtactcatggaatagatgtcatcctagggatgaattggctagataagtatcaggcagttatcagttgtgacaagaggacaatcaagttgatgtccccactaggagaggaagtggtgaccgagttagtcccgcctgagccaaagaaaggaagttgttatcagatggctgttgatagcaatgaagcagatccactagagatcatcaaggttgtgtccgagttcccagatgtgttcccaaaggacctaccaggtatgccacctgagcgaaaagttgagtttgctatagagcttcttcctagaaccgctcccatctttaagagagcttacagaatatctagacctgagttggttgaactcaagaagcagattgatgagctgtcagagaaaggatacatccggccaagcacctcgccttgggccgcccctgtcttattcgtggagaagaaggatggcaccaaaagg

SEQ ID NO: 108658 - DNA, 619 bp, Zea Mays
cagatcagacggaagaatgcaacaccttgagccaaccagaattggaccctgatgaatggagacagcctatcatcaggtacataaagaatgaagaagaaccggatgataaagctgcagcagaacgcatcgcgagacagttggcctactacaccctcatagggggcacactgtacagaaggggtgcgacaggagtcctcatgaagtgcatttcctcgactaccgggaagcagctattagatgaaatccacgccggacagtgtggaatacacgcagcatctagaactctggttgggaaagttttcaggtctggtttctattggccaacagcaaagagtgatgtagccgagttagtctagagatgtgaagcttgtcagttcttgtcaaaacaacaacatttaccggcacagcagctacaaaccatacatgtaacatggccatttgcatgctggggctggacatgattggaaccttcaagaaagctcagggaggctatactcacgtgttggtcgccattgacaagttcaccaaatggatagagtacaagcctattgcttctttaacctcatccaaggcagtggagttcatacaagacataatattcaggttcgggataccaaat

SEQ ID NO: 108659 - DNA, 762 bp, Zea Mays
gaagaggtcatttctgaagacatactatcggagcctcccgaagcggacatttcaaccatctgtttagaggtcccagatggtggactttcgttgcttgattctgtcgggcaagaggttacccgggtggtgtctcacgcatcgtcgaccttggagggcagtcttccatgcaaagacactgatctgagccatccaactcccatggaggtggctgaggggccttcagccttagaggtggctgttgtagaagacccagcccccgagggtggcactggtactgacccagcccccgagggtgttgtctatagcgacccagccccccgagggtggtgctggcggtaatccagcccccaagggtgttgaggcatgctctctctctactgcttccatggacgtccacattggatcacccccaatccggtctgaggaggtgatggtgacacgtgtttctgcggctttcactggttaagtcactttagaggttagcgaaccagatgccatgagcctgctgcctgctggtggggttgaggtcaccccgagtcgtgcccttgagattgttcctgctgatcctccctcgtcaagccatgcaccagcccttcctgcgttgggtcttccactattcctttccaatcttcaggtgagtcaacattttgctctttattgttcatactggcaaaatatattttttgcttatctgtctatgaccacaggattttgttgacggcatatccacccaattgagatcttgtggcgctgctgttcccg

SEQ ID NO: 108660 - DNA, 459 bp, Zea Mays
aacgaatctcgccaaaaagttgcagccttttgaaaattaatattatcttcttagcaaagctgagaataataggttaacgcagctatcttcatacaaatccgacctatctacaagttcaataccgcatattaataacgcaacaaatgcatagtatcaacagaagggaaaatgcccatgtcagagaattctagactataagcttttatactgcaagagcattaacgaagacaattttcagaacattcaacgttgcattggtaaccttggaaaggaaaataaatacatctactaccagcagttctaaaatcctaagaagacaaatactatcttaaagtagggcacacccgcgctaacctttttattcataatgaacaacccataatcagacattgatgccatgcaaatgtagaaaaaaataaatatagttcagatgtatatatatgcacacaataccatatc

SEQ ID NO: 108661 - DNA, 889 bp, Zea Mays
aggagaaggaactccactactttccccactggcgacatactgtcgactgttcttccgagtcaaagggacctcatcttcttcctccccgtcgttttcatcagcaacacagacagcacccccattggggtcagcagcaggtggagcacccccattgaggtcagcatcagtaaattcaggagcaggcacttcttcagcagtaggaaccgaaggaccaacatcccgatccaaactagatactcgccagagacgtctcttttttcttttctgctcgtcagcaggaggatcaagttgattggctcgggaagggcgtcttgggcgaacaccgacaggcttctgaatatccaaggttgtatcagtttctgggggaggcgccaccaccaacgtcccagcaggagcagcatcagaagagtcctcagccagcaaatcaagcatagcacttatttctgcgtcactaggatccaaaggtacctcaaagtggacttgccgttcatcatcaggaatttccccgagcgaggcaaccaaggcgttaacttcttcagcagagggtcacactctaaggcccaaacttccatcagcaacaggtggattcaaagcaaaatgagtgaaggctttggaaggaggcaggttccaggccgagtatgccactggggcaccaacgtttgataccttgcccctaagaatcatctcaagtcggttcaccaagtctacggagggaattcttctgttggtaacccgagttgagtcagctaggcctcggtacagataagccgggtaagccctgtccttcaacgactgaatgttcttgaaaacaaaatcagcaaccacagcctccgcagttagacccctctccttcagcagtccaacttcagttagcaaagccccagcctca

SEQ ID NO: 108662 - DNA, 459 bp, Zea Mays
gagctccgacccacctagattcctcgccggtgtgggagcttcaccgcatcgccgccgtgtgccgtgggcagcctccctggcatcgttcctgcacccggtatgctctcccaccttgtatgcgttagatcaggaacgcgtaggtctatctggtttcgggtgtagggcgtcggcgtgccgggacggtgttcaccggcgggagctccgccgtgtagacctatgcgtcgccatgactgggtgtgggtctgcgggataaggttggggcgatcctgtccgttggatccgtggtgggcgcactcgattagatctgagtgatctcctggcatcgggcatcgcgagccgttcatttgttgatgagcgccttagattaaatgaggggttagaactgatttgagccatccgatcggatcgaacgggatcggatcacgatcgtgcggttataatttgagtatcggttcacat

SEQ ID NO: 108663 - DNA, 891 bp, Zea Mays
gtcattgatcgacatactctcaagtgtcggcctcaagatattgttttggtagacatcggtgcgatacttggaaccggccatttgcgaccaattttaatagacctgaaacgcactcgtccctaacggagtcgccaaaaagtatattggcacctctttctgccgaatactaactattcctaggacatgtgtgcagcgtacagaactttggggacttcattgtgggctggcggaccgtccatgataggtcaccagatcgtccgtggtagatcaccgggcaatacatgataagtcactgaaccgtccgcaatggcgtagagagcttcaggaagaacccagatcccacctcccgggagggactctgtcggggaggaaagatcttggggttgcccttaggttggtaggcacccaaagcgcctcacgacgatgtagagtcaaaacgaggtgaagattaagattgggaactacaactatggctagaattactcctagatctaatgcgtaaggaaataaggtaaaattggtttgtagatcatatcgattgttgcttaatttaattgatcgtaccccttcatatgtatggagaaggtctgaatccgtttctaaacgaaatacaacagaatcctacaagatattaagataaccccgcaagagatcagaactccggcctgaactaatcaatcctaagaccattcgagcagacacggtggaccgtccaaggtataaatcgttctagccataaaggtcggaccgttcgagcagacaccgcagatcgtccagggtataaatcgttctagccacaaggccggaccatccgaactgtcggctgcatatctggtgctcacaccatgtcatgatatgctatttaattttctggattaaaatatgcctaaa

SEQ ID NO: 108664 - DNA, 447 bp, Zea Mays
tataatgaaataacacatgatactttaagtacacgctagtgaattaaacactgagtagcgagacatcacaaataaccacacacactagcgttagctaactacatatcgtcgaacgcacaacattaacaccactaaaaagacgaaaaacattttggacatttacgcaacacaaatacgaccccataagtacgagcatctacttaacctgctacgacttttcattattcttctatttatcacacaaaagcatcccaagcaccagttcaatagaggaggaattcctatccacaattaactactcaagcaaacacatcaatcatggaacacatgttatcctaagtttagacattacaagtctatgtctgctaagtgctaactaagcatatttagccaacaggtgaacaaaacaatcaaatgcgcagttgcagatttttggacagcaataca

SEQ ID NO: 108665 - DNA, 878 bp, Zea Mays
ttgcttaaagagaattcccaaatttgggctatgaaactatcaaaacacggttgatttattggtggttataacgacacctaaagttcagacacaacggtgcaacaacttcagagcagcctaactccaattatatacaatgaaaattacaaaccaatactctttggaaagatcatgaaattactaaaactttcataatctaacaaagaccaaattataccatcttcaaggtctattcttccgtacaaaattaaggctgctataggtaacccataactctcaaatgtttagaccaaattgggtgattaagcatcatatgcaaacatgaagaaacctactacaaaacattctggataagtgaagcctgattcagcctccaactaatttaaaatgactcccaaaaccaagcaacaccttaaccacaataaaaaaacaatataaaatgaaacccaaggcattggcaggtgcaatcaacactaggatttcccactaccaaatggggatgcaactcccaaaagtttttaaacaacactttacctaataggttagaacactaagcataacaatccacgaattcaacaacctcgtttgttaatgccactaaggtccaacatccatgtagcgacaatgtacaaaacacctgacatactcgtctctagcactataaaacatggttgttattacaccagaattcaactactagagatctccacaactattttgttgacgtgaagcaaatggtgctcatgtcatataacgtctttttctcctctcaaaagagataaaatttgcaacactcataaagcaatggagggataacaacaagaaaactaatgtacttctcgacatagactcatgcaaaagcttcataaatattactt

SEQ ID NO: 108666 - DNA, 274 bp, Zea Mays
gcctggggaagaaccccctcagcgagaagctcaccgatggaggaaccgtcgctggaatgttcggtgacatcatgaagctagagaacgagacccggcgcagcctgtatctcgaggtgagatctcggaggtgggagaaactcctgatgaacgagtcttcagggaaaggaggaactcccgccgatgtgaccgacggtaagctcaggagcatgctgaacaggatgtgaggctacaccgagagaaccctctcttcgcgcgaaacctgaaccctgaattc

SEQ ID NO: 108667 - DNA, 289 bp, Zea Mays
cgatgagttaattgatgctattatcttaggattttctacactagcaaacataccaacatggccaatggatgatgttggtgtattctttttagcattgatggtctccaaaaattattagcatacaatcatgttttcctcgatgatatgataactaagaacgactagtcgactatgtattcatgagtaaaagattcacttacatgaatgtatacatttttctcgcatgtagaagaggaacgcgatctcattaacattaggaacacatcgtgtgtgcccttggcgatattac

SEQ ID NO: 108668 - DNA, 726 bp, Zea Mays
gcctttagtattgctgaaacgactttccatatccgttcttggccaaaaataccggtcatatatgcatggatatttggtgataggctcctattactcaccccatgcatatttgcttgccagaaattagtttcttggattttttgtggataccatttcttcatgaaaaatccatagttttagcctttggtatagccgaaaatggcctttcctaatcgttttcaaccaaacataccgaccttatacccatggatctttggtgataggcttctagagagttaacaagtgtttgttgtagaaccaacaatggtctgaagtatctgatacttttgaccaatctaatcacctagactatgtcccatgctagggcgttatccactcatcccggggccagtagtaggtgatgtaaggttgcacatagtactcatgatggtgacaacaacctatcatcctactcaccaagactttcaagaagatggaacctcctgggttggcactgagatagagtcgtgcacccttctatgccactatatctctttaggacagatcatcttgcctatcaccttcgacacccgctgtaccatgctattatcttatcttgttcttaagatgacggtcgagaaagccaacttgaagcagttatataattatgacaaggaggattataatctcgccaagtcccaaatggtgaggaatcagaacaaggttgtatgtggtactaaaacccgc

SEQ ID NO: 108669 - DNA, 456 bp, Zea Mays
caataagcaattcaaatcgtctggaaacaagtcagacagcagacgccgtttcacgtaacatgacaccatttggactgaggtcaactgcttggacgatatgattacaccccacggtcacgtcaagttactactcaagggcagtttgctaaacgctcggcgtaccaagccgtcccttgattacacccattggggaggggacgtccaggaattttcaatagattttcccaagcagtcacatccatatagtatacataatgaatgtatcaaggcagaagaaagatatcgatggagatcagaggaaagccaaatatagctactgaagtacaagtctaatcaacagaagcattgaagcacaaagcgaaatgaagaccaaccaagagccatctaccagacatccaatctgtcagcgatcaaataaatttcaaaacaggacatgggtagatcgcgctgctgatt

SEQ ID NO: 108670 - DNA, 1548 bp, Zea Mays
gaaccccatcctccactgcagcaagcacatcgacaccaagttccatttcatcaggggctgcattgaggaagcacggatcaagatcgagtatgtcgagacggctcgacagctcggtgagacggtgaccttctcaccaagccccttgggcgtctttggctccaggaattgaggaacaaggtgggagtggaggagatcaagaaggagcatcacaattaggggaagaattgttgagtaattgcttagctcctatctttgtctctttctagcaaagtcaatggagttggtagaactcctcaagtgcctactgcctggccatatagggctgcagggcaatgagtagaagggcaagacatgccctgttgtactgtacatagtagctggtgctgaaaagatattgataaatgaagaatttagaaagaaaaaaaggtataaaaaactaatgcatattgcatactataaaaatcaaaaatgctactacttactgacagattggtaggaaggaaaattctgtaatcggcagcttcggtcctgaagagcttgtcttcattagctatgcagatggtgtagtagtacacttggtcattgcttctcatttcgccatctgcacatgcttcataaatctgcttactgccaattaggttgtactccaaagcaatcacatcttctggatcatcctcaggaaggaacttttcaacatatgtaaagtatgtcaacctggttttgaatggacataaacaaaatggatgtgagtgggtggaagtataagctcaaaaaaatgtaccgtgattgcaagatattactgtgggtgagcaatcctcttctcaagaatttctgccaccatcctcaaagctgcctgctttgcagccactttgcgacgccattcaggtctgaatagtgacacgagtccaccatatcaacctgaggcagctggtccaccataactctcaacatccacggcaagatgtggaggaggatcaaaacggtctagagcagcaaagtcgatgatggggaaaccattgtcatcaagctcaacatcttgggagactttcttaggcgacttcttgagcttcttctggcctttcctaatctgcctagtctcattggtacggagcgaagatttcagaggttgagcttgagaacgtgtcgctcgtggctgaggaggtgtgtactgaatgtcagtgtcatcaggtacaacctgctgacatagaattggttattactgaatactattatacaatattaaaagaataaaattactgattattactggcacacgtaccggggcatcgtgaaaccttgggacagggggatgctcctttcagtagaaccaaatgtagaaacattctttacatcgtgtttctcgacttctttcaacaaatcacgctgtacagggtcattcttcaggtcatccaaaatgtcaaatacatcaactaaatcttcttgaacgagatgttgtgactgggacgggtcatctggcatattcctgaccatggcacccttgtatgcccatgcactatgatcaaattggctggcaggaaaaccagatat

SEQ ID NO: 108671 - DNA, 286 bp, Zea Mays
acgagatcgagtcgttacccctctcctgatgctacccaggatgttgtccaccggatgatccctttgaattgtatgatggactctaggatgaggcactgatggttgtctttgtatttgctcctcctcatcattcacttgatcaagaggcacttcaccatcaatactttcgtgttcatcttctaccactgttggcatcctttgatgattttcttcatggcttggatgacttgaggttgatgggtttgcttcggtggagactttgtcactcaccacccttgcacccaca

SEQ ID NO: 108672 - DNA, 403 bp, Zea Mays
gcaaaatatccatggattaagaaatacaagggcataaacctgacctaatgtcactgattttcagagtttaagccacatggtgccattatgggtttttgcaaatcaccccattttgctccacatcacttgaaaatcttccaatgtaaaagttgtttagtttttgatactctaccactttgatatatgcactttggtccaaaagtgtatagaaattgaaatcaccttatagggcacaaattagggtttctagtgctcttattagggttttgagtgttctagggtttgtgtgccactcaaatccatcaagtttagtctcttatgaacatttcaactaacctttgagataaaactcaagttgttatcatactcacccacatacctctatcccttggttaagtacccc

SEQ ID NO: 108673 - DNA, 514 bp, Zea Mays
atggaatgtagacaacttacgaaatttttttgtctaagacactaagtcccaaggccttcgcgcctttgtaactttcacagacaatatttcagtcaggcccgcactcttttcctcgcagggggtgaggtttttaataaggcggagccatgtaataaatcaccgcaaaaatccccccaaaaaatgaaagcggcaccacgaccgcgggatttcgaaaaaagaccgcagagtcggtcttcggcattcgatgccaaaacagtcaccgcaacggcaagcctcagcagccgttatgtgcgacaagcacagtccaggcagaagtcgcctaagggcgcagctgggtcaatataagtgtgtagtcgaactagagacgcatatttttatccgagcaaaagccgcctaagggtggaaccggatcagcccaacaagtgtgtaacaacacccaaagggtgcaaaatcgtctatgagacacatatttccgagcaaaagccgcctaagggtgcagccggattagcacaac

SEQ ID NO: 108674 - DNA, 465 bp, Zea Mays
tgccccctttcccccaattcccaaggtggtttttataggttggttttgctgctgttgcaggtaatgactaatgtaatctgttgtttgaattggttaaggattttattatgttctaggcacgtagacatattttttctgttatttcctcttcatgtggattatgtgcttcatatgatgcttttggataccttgttatgtatttctctctttagataacttagcataatatcttttgaagcaacaacatcgatgcattgttgtttaggttcttacataaatagcttctttaaataaatgtttttatttaatacttgttcttgttctttgtctgtttgtagagaagctcttttttcaataacactccagagagacgctgacaccccatccatgatcatcctcgtgtccgctgctcgtgacgatcatcattctattcattcgcttcaacgttgtgagttctctgcttcg

SEQ ID NO: 108675 - DNA, 279 bp, Zea Mays
tatgcgttgttcagttatgatcatcatgttgcaacacggtggtgtcatgctattgcgatagtaaagtgtaaatgctgatcctgtttctgctttcctattgttattaaagtagaaaaggcaaacatggtgttctagctttctaggttatttgctaatgaaaactatgattgtttgatcaacaaattggaactgcatggtctaggtgatacatagaccaaaattagtgctggacctgttttttggcttaaatttgctccagataacacatttgagtttgat

SEQ ID NO: 108676 - DNA, 931 bp, Zea Mays
gccaccatcaagtggacgtggtgagtatcattgcgaagaagggaggtgatacaccgttggcgcagttcgagagcgagacgatgcaccctgtcgtgcacgctgctggtagacatgcatcaggtcggcgaagcgagtcgaagcgagcgaggccaccgatgacttgaccccagtaggcgagggcatggtcgatgaacctatggccacacgtggcacaacgggggatgttggggttgcacacgacttgactagggcatcggagcaaccacatgtggtgcggtggaaggcaccggggacacatgcggaagctgcataggcaaacatgtaggaaaaagagaggtggctagccataaggcgccgcagggtcagtcttaaggaggaagtccaactcagtggcagagctggatggagatgagaagggaaagtctatctcatcaaagataacgtgacaggagatcaacaagcgatgggtggtgaggtcaaaacattggtatcccttgttccgagaaagacacactgggaggagctgggtgaaagcttgtggggcttgtggtagatatattagggtagcacgcacatccaaagatgcgaagattgtcataggataaatgatgccgaagagggcaaagtagggtgcgggagcactaattgccttggtgggaggcaattaagttggtaggtggctgtgtgaagactctcagtcaaatagtaagcaggatgtgacacctggaactaggggtgaaaacagaaacaataattttcggttaccgagaatcgttttcgaaattttatcaaaattcagggctcaatggaaacggaaacgattatcgaaaatacggaaatgaaatcagtacaaaaaatcgaaaatggaaacggtttgggtctcctccgaccgtttccggaaattaacgtatttattccgtattttaccgac

SEQ ID NO: 108677 - DNA, 543 bp, Zea Mays
cgaaacaccaatgtgccggccccgtgatctcgccgaaacgcccagccgttgcggcgtgatttgtgaaaccacttaccgatctctccctctcgtgagctgtgacccgagtggctgagccaggagcaatgctacagcttcacgtattcaccttttggctgttcctaagctcctagccttgtagggtggaagttgcaggattcgtgacccttcgtgacatttcaatttttattactacattagaatttagaaaacaatctatatgcacacatatcacatatgcaggagtacatacatgggttcatgagccctgtctagtatgaccccctggccatcacccctctggccggcctaggctgtcggccctgctactactcgcaccgagtcttctgttgtttcaacctttaattatttctggaagggtatacttctacatgccatgtcctgttgtgctctacctgcaacaatgctgggcctgagatgattcatggcatgtgaaaggtgaaatagcattcactgctaccggagtgttcgaggaagaaaaaa

SEQ ID NO: 108678 - DNA, 380 bp, Zea Mays
gcttgacgaatcgtttgtttagtgacttgggcaagtcttcgtcttgtaatgtttgcaacaagtaggtgttaccaaatattacctgtgtgattttgtaagggccttctcagcttggcgagcactttctaaacttctggtccctgctccttagtggcatgatggtcttccataccaggtctcctacctggaacgacttagccttgaccttcttgttgtaagctttgacgaccatgatcttgtccttctctatttctcctagagctatcactctcttgtcagacacttcatcaatattgttattgttataataatcatcgatagttagatcatttgccttgcgaacctgatagcatttaagcttacctctgcccataaacaag

SEQ ID NO: 108679 - DNA, 311 bp, Zea Mays
caaaaatgaagatgagcatactgagcacctacacatcgtgcttcagcggctgcgcgatcatcatctttatgctaagttgtctaaatgtgagttctggctgaaggaaatcaaattcttgggtcacacaatttctcaggatgggatatcagttgatcctgagaaggtgcaagaggtaatggattggaaacccccgactacagtaaggcagattcgaagttttctgggattggcagggtattatcgacgatttattccggatttctccaggattgccaaaccaatgactgaactgttaaagaagggagtccgat

SEQ ID NO: 108680 - DNA, 322 bp, Zea Mays
gtttgtcttggaatgtccccgctatctcctccctaactatatcaatggcggccggtggaaatccaccgaccctttggtccatatgtgtgtgtgctggtgtatcattatgttgctcccttgcccatgggtttggtttatgtggggtattaatgttggctctaggtactccatactatacgttaggtctctccggccttctagggcccgaaaagggcttgtacctatgtgttggtgggatcattccacgtccttgaagggtcgtgggtgctagagagacgttagtttggggctggtagtaggattgctggtaatattttatatt

SEQ ID NO: 108681 - DNA, 919 bp, Zea Mays
ctggatcaacggatcggattagacgataaaactctacgcccaggatgtaatccacaccttcgatttcgtcatccacgatcagtacgccttcttctatctcccgtgggaaaactgggcagcggggcccggtacctgtgctgaccacggcggcgccattgccgcagcgcccagcggccagcacccgtgacccgagctacaattccttgatcctatcggtgctacgcctagcgagcgaaggttgaagcgagtctgtaggagaggatttcgcggagggtttcttactggcatttggagagaccgcagaggtctacgacggcgcaagcaggggcagggatagcggggacccatcgctcctccggccagactccgcggcaaaacgacggtgcacgcatctccctgcgacttagtcttcccttcctctctcctggatcctctcggtcgcggtgtacctgacgtatgctcgtctcttcaattcgtggtgacacaagacagatgaggatcgggctcagactttatagccgtgagggataggctagctggcgtaacaaactttcgctcgttacggaaggcggttcatcgatcagcgtttgagaggaatacgtcgcgaggttgttacgctacgcaggaggcagtgactatcgaggcaagaattgggttacgtcatgatgcttagcatcacgtgggtttgtggcaagggaataaacaaatgaagaaaagagaaaaaaataaaataaagggacgtgggttgacagcctgcactagggataggctgagagaggattcggccgactgcttaatctctttctctctcttttcttaattctaggattatttaggatttaaatccccatttggatatttacatatttctttttgcattattataatattgtcacaaaaatgcacacacaaataaaat

SEQ ID NO: 108682 - DNA, 427 bp, Zea Mays
tcaaaatgtcccctactatttgaaggatctaaactactgttaagcttgatcatggtgtcaggtcctgggtggccaagacgacgatgccaagtgatggaggaggtggtggagaccaaggcgggaggtggagacgcgccggtggtggaaggccggaacgtgtagaggggctcagtgctgtcacagctcgcgagagggttcctggtggccagatccttcacagaaaaaccagaggggtcaaactcaatggaacaagaattgtcggtggtgaaccaacgaacaaaaaggagattataggtgatgtgtggggctatgagaacgtcgttgagatagaacgacccaggtgacccacatagtggaaccgtttccaatgacgattgaggtgggatgggaggtaggaggggggtgggagcgagatagtgtgcctgca

SEQ ID NO: 108683 - DNA, 565 bp, Zea Mays
gaaaataataaaatttcttgcaggaaaatagtggccgagaagacttctgatgagtgggagactctgaaaattaccatcactacctccaacactggggggcaggtgcagccaggaaaccaggcgctagcgcctgttctgcgcatcgcggatggtccgacgcacagatgcggacggatcgggacaccaccagacagtccggatcattccagcggacggtccgacaacgcccaggaaccacgacaaccatgcaccttcaaaccacgacgaccggaaataggtacatggaaaactgacacattaaagtcagttggctggctggtcagatctggcccaaccttcgatcaattattgtctaaatatgtaaaaaagaaggcagtcccaagtgaccgccagtgaagcgatctcgctcacccactcagaagcgacagcagataagaccgattggaccacctcaccaattggaaaagacggaaggtcatactgtccagttgagacttaacgtgcctgcatggacacctccactcacatatctacctatgccatatccatatatatacataccacc

SEQ ID NO: 108684 - DNA, 850 bp, Zea Mays
gtgaggtgttggatgctccagcaactgcagatgtgagagtatcaaaaatgcttttgggagaagagatggtgagcatttagcgtttcaaatttaggaacatgtacagtccgtgagtcccatcccgggacatcttttctgacttactatattatgatgctaataacttctgatgtgtcccttgaaataatagaagttcagtggtgttctcattaaaaagtgtttctatgcactgaacatcaatcagattaccttgcctatgattttaatttggattagacaccactgtaattcgtaaacatgacactctggatattttggtagcgagtttccttaaaataggtgtatcaggacttctattctatgtaaaaaggtgaaaggttcatgttcaaacaaaattcttctacgacagcataggtggtggttgtaaaggaaaaaacatctgatttcagagagcatccttttgtttttgcaatcttttgtcgtttcagattttctgaataatcaacttttgtttcctagatatatctacatttgcatactctcatctgagatagatacggagtaccggctaaaacttaacccacacccacattactcttaactctggaatgaacaaggcaccgtggtttagtcattcctctgattattattgtttcgttcgcatttgctgcatcatctgagactgaactccctgaagagatgaaacaagatagtgaacaaatagaattctcaacaagaaaagagaacgatcaacaaaaagcaaatgtacagagcgaagatcagcccctcctgaaccttgtcccaataacaccacattttgatttttgcaggtttgcttattaaatatttc

SEQ ID NO: 108685 - DNA, 581 bp, Zea Mays
cccggcccgatttaggcattcagccaaagccattctccataagtcccaaacagatatgtgcttccatggtttttggcaactgtcctagccaccaaatgtttctaggagcttattctatacactcatgaacaacaaggggaaaacgaaaatttgagaaaagcattagctgtcctaaaggatatggacacaaggtccaactttcttcttgagggcactagtgctcaactactaccatctataataaattcaactagatatgataagaggagttgtggaacttcttctgtagtgcgaaagttccctccaaacatctcaaacatgagaaatcttgtggcaacaaaagagaacaaaatttccccatgaggtgcctatcaaagatgtggttcaaaatatcatgagtttgtgataaatgcttattagagacccacctttatcaatacatatatgtgataagtgggttgataagatgatacatatatgtgacaagtccaaatttcttcttgagggcactagtgctcaactactagcatctataatgaatctaactagatatgagaagagaactcgtggaacttctttcg

SEQ ID NO: 108686 - DNA, 1164 bp, Zea Mays
gccgcgcagactttcctttcgtcggaggcgactcgccaagcgatttccgcgcctccaatccagcgcagcgccaatccaccgccgctccaatccagcgccgttccattccagcttacatccttcaatctcccagcattggagcccgattcaagaagttccaggtaatccaacattgaaatacaccgagtttgtcgtcgttttttaagcatttcggtcgattgaagtggatttgattgtaatccttattctccagctaaatgtgtgatttgtatccgtttagacatctctctaatcgggtcattgcatcgtgcattgcatctcttttttgttcaggagccccgatattagagcatatgtatttattctagatccccactatcgcccgacattcatagatctagacaaaggttgtgaattaggtatttactaatgagttagcagagagtactcttacacaacccaagtaacacatatatgttttttgtatttaatatatatgcatatcttcagtactgtttatgcacattcacttgagtcatttgtttacacatttgttttattatatatgcatatagtcagtattctttatgcacatttactctaatgatttgttttcacatctattttattatctaatatgcttattgtatttcatatatatgcatatcctcagtactttttatgcccattcacttaaatcatttgtgtacacatctgttttattatatataaaatatactcattgggtttgatatatatgcatattggcagtaatgtgtatgctcattcatacacaagtttatgaacatttcgcaatataataagcagtagttgcattgttctatttacttgaataattagtttacactcctgttcattatatataaatacatacaaatactgttatttaagcaaaagttatttaaatattcatgtttgaatatgagctaaatgtttttattactatgaaccagttattaaaatatgttgtatagttagttgatgcaaaaggctcttattttatcatgatccatttacaattatatgaaatattaaatcaatctttatgtttatatataatcattgttcattaaatgctctcgcataaatgtaaaaggtagtttaagttatgtaattccatttagcattatatagtatgcattt

SEQ ID NO: 108687 - DNA, 463 bp, Zea Mays
cacgatcgtgcctgtggccacctttccattgatgcttgccataccgacggttctcgtggtgggcgccatgccacaaatccatgtggtgccgaacactgccgcgttgtcccctatgctggctatagtacccgcagtcatgccaaaagtgacgctgccgccaatgaccgccgtcgtgccgaaggttggcgccttgccaccaatacccgtcgtcgtgtctaaggttggtgacttgtcgtcgatgtcctctgtgtggctcgtgcctaactgttgatgccctccatcctgacagcgtcgctctccattaggtcccacgaacacgacacaaactcgatggacatgctgtgtagatgctcgtggagtcagtgagccagaaaatcagatgtacgtacatgcgtaccttggaggacatagacgagtcggagtagctggagagtgtcaggccaccggctgcgagcagatcaac

SEQ ID NO: 108688 - DNA, 551 bp, Zea Mays
aaacgggtatcaatgcagtcatgggcgggaagtgcaggaaagctgggtccacatgtcggcgcccactaggtgagcgcgcgtggtgtatgtgagtcggtctggcaaacaggaccacccagcagggagtaatcgaaaccagcaccaaagtgtcccccagcgcgcagacaacatggggctgagccgatgaccccacttgtcggcgccagggtgaggcgcattagcaggtgtgtttgccctttttcttttatttactttgttttctatttcaaatttcaatctccaatcttcccatgtctgtgctaattggatccgtgctagaaaacctagggaaactgaggcgggtgtatcttttgatgatccaaatgtcgaagaatctacgaaaaacatatatgcaatggcagctaagcagacccaacgatcatttaagcaacaacgggagagagacatcttaacggctggtctcggtaaccctaagcatccttgccgtgtacgagggatctcgtctaaggaaggatggaaggaaggattcgaaccacagtgggaaggtttgt

SEQ ID NO: 108689 - DNA, 487 bp, Zea Mays
caccgacttaagtcattgccgacttaagccgattgctccgtcagtagggtatagtggtcacccaaagtcgagtaagcgtgagcatgtcgcaccgacttaaatcgtcaccgacttaagccgattgctccgttagtagggtatagtggtcaccaaaagtcgagtaagcgtgagcatgtcgcatcgacttaaatcgtcgccgacttaagccgattgctctgttagtagggtatagtggtcacccaaagtcgagtaagcgtgtgcatgtcgcaccgacttaagtcattgccgacttaaaccgattcttccgttagtagggtatagtggtcagcctaagtcgaataagtgtgttgatttcaagtccaatccaatcgaagtcagctgaaagtcaagagtctgaatgcctttgaaaacgaaaactttattgatgatgaagtccccaaattacagagtacaatgtttcttcaagaatttttgaggcgtcgctagg

SEQ ID NO: 108690 - DNA, 409 bp, Zea Mays
attataccctgctaacggagcaattgccttaagtcggcaatgacttaagacggtgcaacatgctcgcgcttactcgacttagggtgaccactataccctactatcagagcaatcggcttaagtcggcaatgacttaaaacggtgcaacatcctcgcgcttactcgacttagggtggccactataccctactaacggagcaatcggcttaagtcggcaatgacttaagatggtgcaacatgctcacgcttactcgacttagggtgaccactataccctactaacggagcaattggcttaagtcagcgatgacttaagacggtgcaacatgctcacgtctactcatcttagggcaaccactatgccttaccagccaagcgattggcataagttaggaaaaaactccaaaac

SEQ ID NO: 108691 - DNA, 525 bp, Zea Mays
ctggggtcactaccaccataaggaccaggttgaggatgatagggaggataagccgcgaagaaggcatgtaccatatcctcttcatacgacgagtctcgaggagggtcgttagaaggaggataagaagaagaagagggacccgaataaggtggcagaggaggaggatgagcagaaccagatggtctgggatcacttggaatgggtcctaaagcggtagcaggagtagactggaagtaaggtgaatcatcatagtcctcttcctcatctttctgagtaataaacgacacaccatattcctgctggtgccattcattgagatattctagataggcaggaattggaacaagaggaggtcgctatggcatgggatgtcccatggaggctgcaaagcttcgcatgtcatcatgaagttcttgggtctcacgctgttgcatagcctcatcaacagcatgacttctgcacatggaaaaaacctccaccattcccttagccagacacacaaacaaacctcgtcctcgatccctg

SEQ ID NO: 108692 - DNA, 510 bp, Zea Mays
aaaaattgtgtcaaaatcataaaagtatgtgtgtacttaacactcttgcattttatatcttcgtccattctcgttgtctctggaattgagtagcattagagtaacgaactggttcaaatctacatcatgtgttgagcaccatatggaggaggagaactaaatgggggagcgaacgaaagaggagcaatatacgatccgtgaggagctcaatataagtacccatacatatgtggaggagggtaagaaggagcatcaatggtaggcacatcaatgttaggaggagtgtaagaatagtagagaatatgcagaaagcagtacctctcccaggaggttgccgatggttatatagccagccaaacttggcacacaagttacagatcgttacagatatggacttggttacaatacaaggaaatctaaatcaattctatctataattatacatgccatagaaatatagcttagcattccccctcaatcacaactttaccaagttgagattggaacgaa

SEQ ID NO: 108693 - DNA, 370 bp, Zea Mays
gtggtgttgacaatgtactcgtcaagggggagattgcaaaaacaaggttgacatgtgcccttgtgtttgggttgtgttgagttgttgttaattgtcggggaaatgatcctcagggccctagggcccattagttagtagaagggcgtgggagaggtctaacccagatggacccgccctggataagcatgaagcaccgaacaaagggttaggtgagagtgtgaggcggagccgcaaggggtcaggcggatcaaggggaagcccctcgagtggagtccacacctgactaggactgaccgattgtgccacattaaccacgcctagcggcgaaccatagagggtgagttgatccacttaccaatcataacccatg

SEQ ID NO: 108694 - DNA, 714 bp, Zea Mays
ctctgttgaaacgatcttcgttagaacgcgacctaaaagatagtaataatagtaataaaataacaaaaatatccattaccttgaagttagcataaagcaagcttccggcgatgtggtgtcgttgataacggcacaagtcaatttccagcttcggcaagccaatgcttttggagagggttctaacaattttggcctcggtacggttccgaaggcatcttagtttcccttcgttcgccccaccaaatagcatagcccctgatttatatccgcaagatatggcatgttttttcaactcctctttctcagcgtctgttaactcttgtccaagcaaatcttgaaagttaaaatcttcttccgaaatttcatcaatttgctctttccccttttcagttgtcgtgctcaccgcagctgcagtagtttcttcttcagccattttcaggagtatattgtcaataacctcaagtgtggtttccaggttcgactcttcggtggtcccggcttcggccccggtagctttggcttcgccgatctcagcttcagtggtttccactccagtagcttcggctgcggcgccttcggcttcggcagtctcggcaaaggcaatttttgacaccatcgccggtggcggtgtctgatggatcacatctgtcacttgaataattctccatttttttggcttcacaggactttttgctgccgaagctgccttgtccc

SEQ ID NO: 108695 - DNA, 495 bp, Zea Mays
ctctggtacgggtcgtaatccgattcccagaatgtgctgtcttgatatgcacttgttgggcgagcacgtctgcactgggagtgggagttggtctgagccctgggttgcaagttggacggacgatcttgacagcctgcacctaggcttctgctgatggaagcggccacttggcctgctgtgggtgtcatgcccggtagtgagctggagaagcctgccatgcagtgggagctgtccgcttcatgggaagaaaggaaaaaaaggtgacactcaagttatgtccctgtagctacattcttgcaattgcaaagcggactacagtactgcccagaatctgaaattttgaatccttcagcgctggcagctgcagcacctctagattagcacggcagtgtccgagtcacttcagcattcagaaaagcgaggaacagatcagtccctttggctttgctgctctgccaagctagatggttgtagagcgcccgggatctaaggctg

SEQ ID NO: 108696 - DNA, 663 bp, Zea Mays
ctgtaacaagaggacagtaaagttagtgtcctcatccgggaaagaagtagtaactgaactattcttgcctaatctagaagaaggatcatgtcaccatatgtatgtagatggtaaggaggccaacctgcttgaggccatcagagttgtgtcagaattccccgacatgtttcctgaggatttaccaggcatgccacacgagcgtaatgtagagtttgccatagagcttgcacctagcaccacccctatttccaagagagcccactgattgtccggaccagaattggtggaactcaagaagtagatcgacgagctgttagagaaaggctatacaagaccaagtactttgccttgggccacaccagttttgttcgtggagaagaaagatgggacaaagaggatgtgcattgattaccgagctctgaatgaagtcaccatcaagaacaagtatcccttgccaagaatagaagatctgttcgatcaattgagaggagccggagtgttctcaaagatagagctgaggtcaggttaccattagcttagaatctgaccttcggatatatcgaccacaacatttatcaccaagtatgggctatatgagtacatagttatgtcattcgaattaacgaatgcgccagctttatttatgtacttcatgaatagtgt

SEQ ID NO: 108697 - DNA, 344 bp, Zea Mays
tgttgaattctcttgggatgacattgttgtcatgccatgccttagtctggacctgatacttgtttagggccagcagggcgaggacacggtctccgtcaatgagatctttggaggttggttcgtcgacgtcggggacggctgattggtttgttcggggggacccgtgctttaactcttgcggtgtcattgcttcagatccatacataaggcagaagggtgtgaacccggttactcggcattctgtcgtattcaacgcccatatgacttcgggtaattggtaagcccgttagccctttttgtcgtcaaggagccttttcttaatggcgctaaaaatcttgttgttg

SEQ ID NO: 108698 - DNA, 553 bp, Zea Mays
gaaggttggagatggtcgatggcgaaggcgaaggttaaataggttcgtgtcgatgaactagtagtggtgagggataactgtggagggttagaccgagggatcggagaagccaaaatactaactgtggtgtttgacgcttagggacatcgatgaggcaatggaggagcatactgtgttgaccaactgtgttgaccaagtcaagatgacatttcaccaactcaaatggaggcattgaagaatttgatgctcggtcgttgaacgactagcgatgacacatgttgtgatcatgagggaacatatcagatacgctactcataaggggtttgatggtttgggcctcaaaaccactaacaactattttggggattgggcttttaaaactcggctagagttccagcaggaactagaggtggtacgtggcggcatcgtgaaaattgtgtcaagatgaagtgaagtcaagaagatcaagtggtcgttagatgcactgacccaaagttagaccattttacccctagttaagcggtttagccaaaatatctaaagacatattgat

SEQ ID NO: 108699 - DNA, 357 bp, Zea Mays
gtggacatttgtaagcctccaaaacaatcttacctcttctgcaacaaaggttgtacacaagcttgcgctgcgcaacagcagacacgcttttgacccgttcctgaaccagaaaacagcgccacaatgtgggcactcgtctgatgggccaccatagtatgagcgatctttgtaggtctctacaggcaaagatgggtctaggctacatggattactttaggaatacgtagataaaataatctaggcaggtggaacacaaacacctttaagcaactcgacatatgatcgttcaagaggcgatgaggctacatccgtgctaactataagtagcaagtcgggcataaattcataggatttttt

SEQ ID NO: 108700 - DNA, 621 bp, Zea Mays
gctatttccataggaacatactagctaaggttttgggcgttattgcagcctgagaagaccagagataatttagtgagcttcaacttggagatagaagccatgaagcttttcatgaataagagatgaaaatataattatagactttgtccccttgattaatgtactacgtttgttgggcttcatgaccccctctcccgcgacgatccagggggttggacgcgacagaggaggatataaggggtcagacgaatcgattggaacccactcgagtggatctcacgtaaccgccagactggccgcaccgtcatctttgctcacgccgcattaatacgtcagtcggcgtgatacgacgcgtgtggaattgatcttcttctcacttatgacctacataccctaagcctaagtctcccgacaccctactgccctgcacgaagacaagagagaaaacccgtagaaaggctacgaaggaaaaagtcggcataggggtgaaatggacaaaaaacaacaatgatggtgcccgggttttcatcgccagcacggatcacgtcctcccccaacaatctcagagatacggaagaaggctcacacagggaaagataccgacgcacaacaaggttttta

SEQ ID NO: 108701 - DNA, 380 bp, Zea Mays
cgagtgcacgagttgcactaccagacgaaggccagggcagacggtcttcatgaaaattttggttgctacaattttgcgtatcacaaggatacaaaggctccagttcttagttaccgcactaaatggccaaccggctggaaaggtgaatggttttatattaaggctgatgagaagaagaggggtaaactgatgacgatggtcatgtgcccgctatccttaaacttcggaatgaccaggcccctatgcaacatgtagctagggtcggcatgccagctgactgaggtagaattcagggtggtggctgagaaaatcagcaccagggacttggtgcaagaacacctagccaaccggacgtatccaacgtcaagtggctaggggat

SEQ ID NO: 108702 - DNA, 291 bp, Zea Mays
cttctccctaaatctgaaggtatacttcaatcggactagaccaccttcactggattcggtagtagtctccttcggcatatcccagctctccaaaagtggccacaccctaaaggctatgtgttcttgaattaaatccctcgtgccaatgaaggcgcaaacagtactaaaggccttctgacatgcttcaacatcactatcaatatccaccttcggccttcggaggccgaagcgagaccagatggggcactggataatttccttgatgtcttcccttttaatcagatcattttt

SEQ ID NO: 108703 - DNA, 376 bp, Zea Mays
gagggatgatggcattccaccgcagcacattacttgagtctttacccccgcatgagacgtaagacgtaggcaggtcaaaggtagtgttccttgaaaccatgtacacacataggcagcaaagacctttttccagttcatgaattggccagatgtcgatggaatagaggagggcatcacaacatgaggcagtagggttttgtggtgccgtctcctggtaggatagcagcgccacgctggtgaagtcaagcctgcaactctgcgaggagcaagcaggtgacgacgacagcggtagcagcaacatgatggtgacgagcagcgaaacggaggcctacaatgatttctatagaacactgaaaattttatactaccattcgag

SEQ ID NO: 108704 - DNA, 368 bp, Zea Mays
gctttccctctatcttgtgggaggtactctgcgtagctgggtaccccacaccccctctatacacggtgcagttgtacgaggagcaccgggtgccatgttgtcgggtttggctaaccctggagtctcaccctctgtagcttgggtggcgttcacttgattctgaaactgtcggattcagggcagacgacaccacagaggccgcggcactaacggctttgacgactttctgaggataccacccactggagatggtgatgcaccccacttggactcttccccgctgagaagagggatgatccgatgtgctgcaacagagtgagccacgtcaaggacgtgtgggccatgcatcctgactaggttgggagaat

SEQ ID NO: 108705 - DNA, 392 bp, Zea Mays
ttgtgatgcaggtgatatggggattgttctaacggtagttcatcaaaaagatttgttcttgtcacccttctttgatttgttcatggtcatgatagcgttgaatggtcatctcatcttgcttaataaaccacctttcgtgtctctataatcatcgcctttatcattatattggcggtgtcgactatcaaacttcgctcttactgtctttggcatctgtctagttgtcgatgatgtcatggaactcaagtatcatcattggtttattccttgcaaaatcctagtactggaactttccataagaccatcacgtctatatcaacaatgttcacaagggtagagcgtatttcaatgaatcacatacagtagttgcatatactttctttgtccttctg

SEQ ID NO: 108706 - DNA, 717 bp, Zea Mays
taaaaccaaatgttctactcggggtaaagccacacgtgcttgtgggccccagggtcgcctccctgtctcgtatttattatggaggacggcgcggacagcgtggtctcaggtgccatcattcaagctatgtcgactcctgaccttcgtagcctggggcttggcatggctcgtcgtgttgcgccctgccagcggtctgcacacgtaggcctagtcacgatatataggttatgagtgcaccgcaggacgagggacacagggccataaatgtgccacagtccgagaggtctgtaggtcatgagtgctatgcggctcgagaggttcctaggtcatgagtgggaagcgaatcgatgcctctaatgcggctcgacgccaggcgtagttaatacggttgatcacttatgacgggtcagtctcgggtcaggcacgggatccactcaagtagtttccctccgacacgtccggccccctgtcaggttctgccacgcgcgaccccaagatcggtgccacggggttcgaatgggggatggttcttccagggtagaagatatccatctcttcctgctgaccagtgggccccagtcgccagaggcctttccccagtgcgctcgctgatcgatgggccccagggaccggggacaatatccccaacattagccccctgaacccctatggaagtgtatcctttcggaggcttttcttttctcctcctcgggtcgg

SEQ ID NO: 108707 - DNA, 522 bp, Zea Mays
ctggatctcacaaattaggaagtcaaccacgtcgaactctaaatgtgagaccaaggcaccaagtagccattgctgaatgtgagtggtggcctctctgtatcccatcctgggtagtagtgtacgtctcatcagctcatattggaacttcgttgcagtagtgaagtcagcaggagatcgtcgcgacccatctgtgaaaggaggtctgaacagggctgcgacgtgagctgtagcgggtgcaactctgccgtgagggcgacgaggaggatccgaagtgccgtagcacagactgtgaagcctagtcgacgactctggaaatccaaaaagctaacggatctgactggcatgcaaagtgacatcctctcgctcgaaacggaatcacatccactgatggtcagggtcaatccatacggtagcatagaacactctgacccactcctcacctgccactcgcggtcaacagtgaaagcagtcctggaagataggtaagatgaccctctgaatcggaaccaacggctagcagaa

SEQ ID NO: 108708 - DNA, 415 bp, Zea Mays
cacacatatagaatcacaaagctggccaaaatcaaagttcacacagatcaaaacagatcatcgagcaacattctatcccagagtttttcctgtagcttagcgctaccgggaagaggaagtagaacggccgcagagttgttgaaccaaaatagccaaataacaaaacaaatttctttcatcggattcgtctgtcaactggcctccaaccacgagccttgctgtagatctcacacgccatcttttttattttgagacttccgagctccaccagttttcttgccttctttttttgacgaatagcccaagtttcaagccaataacaacaagagaaaatcacattagtcggatcatcaattcggtcagtcccaaagcaacaattattgcgacaacgccagatcgcccaaatgacagctcc

SEQ ID NO: 108709 - DNA, 491 bp, Zea Mays
agaaaggacatgactcatcaaaggtctcatcccgagatactcgaatgcgacgagcgatagggtcccaacaatgatatcccttacactcggtgtcatatccaaggaaaacacactaaatagattaggccatgagctttgtcctctcatgaggctaaagaaggacaaatgcaacacaaccaaaagcacgaagatgagtatactacagtggccgaccaaaaagacgctcaagaggagtgacaccatgaagagcaatggaaggtttaatgttcacaaggtacacatctatagacacacctttggcacagaactgaggaggaacagatgatgccagaagtaatgcacgggcaatctcaagaagatggcagtgcttacgctcagcaaacccattctgagcatgagcacctgtacaagaatactgaggaagggtgccattctcagcaagaaaccagcgaagagcacgagacaagtactcgccagcagagtcagcctga

SEQ ID NO: 108710 - DNA, 430 bp, Zea Mays
gtacactaaacaaaatagggaaaaggatatctgtcataatagtgggtggtggtaatggaacaataatatggagttattcagaatagaaagaaagtgtggtagatgcatatccattcagggtaagttcggttgcctaccctagtcctcggccacgaccatcttgtgcagcggcaatatatttggttgcctagcctcccaccacaaccatgctcgtcagatgcagggggacatcccaggccttgactcgagcgacacatagaatttagccttcgctcctaagcttggctcagtggagcacacacatgagttgtgctgatgcaccttataaaaacatgtgagcttcgcaccctcacacttcctaatggctagggttatcacttgcattgtgctccctcacctctctctccgctctcttgctcttctagatttg

SEQ ID NO: 108711 - DNA, 529 bp, Zea Mays
gcgataccagcaaactctgaggcgctatcatgataaggccatacggcgtcgatccttcgcagtgggagatctcgtcctccgccgaattctaacgggggagggacagcataaattgtcacctctatgggaaggaccattcatagtagcagaagtcactcgaccgggatcatatcgcctcactcagatggacagaacggaaattgggaactcatggaacatagaacatctcaggaagttctacccatagctacatcacggaggctctcggaacaacgatgtattctgtaaattgagaaaaatatcatcaataaaaaaggtttcaaaggcactcagattgttcactgtcaattggcacgcttacttaactcggggtgaccactatgccctgctaacggagcaatcggcttaagtcggcaatgacttaaggcggtgcgacatgctcacgcttacttaactcagggtgaccactatgccctgctaacggagcaatcggcttaagtcggcaacgacttaaggcggtgcgacatgc

SEQ ID NO: 108712 - DNA, 559 bp, Zea Mays
ccgcggtgcgcgcgccaagagcaagcgctcgacgtcgtacacattgcagtacccgttctccagtataaccttgcatcctccctcctcttattgatctaggctcacaatattactttttagcttgggaatgtaatatacctctgttagcaccttgtgaccctccttcgtctggagcaccaccgatccgatgccctcgatctctacgagcgagacgtcgccaaaacgcactgtgccgtgcacagacgtgtccagcgatgcgagtgcctcacacctccctgtcatatggttgctagcccccgtatcgaggacccaaacattcttgtcttcatcactgtgcgccgggaacaccttcttcttgttgaggtgcacaacttgttgtgtcgtgcgcacccctgatggctcgaggtcgaatgacgccctatgaacacgcaccatggccaccgtcgccagaagcagggaaggattctcctgctccgtctgtgacatttgcctcctccttgcattccttcttgggtggccgcttgcagtctacacatcagtggccgtatatgccacagtt

SEQ ID NO: 108713 - DNA, 412 bp, Zea Mays
ttggacaatgaaaagacttccactgcactctggtattattgtacttacttccaagttcatacttatgctctcattgcctttttgctcttcattgacatttttggtgaggcaatgggctgggtgtgacactctgaagttagatgggattcttcttcgctttgtttggtagcttcgtctgctatttcccttccgccgttcatccacacttcagaataaaatttcccgccaaggacggtagcttcggctaaaggttctctaatgtcattcactgaaactaagaattctagctgaattacagccttcgcatgttcacagccagctttttcaagtaatgacatggcccctcgagcacccacataggcacaaaagtcccctctgccgatcaagactttgtcaaaagcttcaatctcac

SEQ ID NO: 108714 - DNA, 750 bp, Zea Mays
ggaaagtgagttgtacggcttgagtatgtataataagtacgagcttggaataatgtaacaaaggttgtgtaataatcaagtatattttcttctctagatgtcgacaaggacttgtggtcatgatggggcagggcttctcggggtagtggggaggagaccccaatcccaccacctgtacctccaactttggcagagggcattggtgccttgcttaatgttatggctgacaatacccggtttctctaggaaatgacgggaaatcaaatccatctgcaaggaggccgaggccaaaaccaagcccctcgagacactacttacatggaattctcggaaactcgttccccctgtttttgttaaagcagaggaacccttggaggcagatgaatggatccgcatgatggaacaaaagtttggattgatccgatgcatggagactcagaagccgatgtttgctactgaacaactgcgaggcttcaccagtacatggtgggcaaacttcatagctattcaacctgaaggtcatctcgttacatgggtagagtttaagcaagcgttcagggagcattatattccagatggtattctgcaaatgatgctggaagactttgttcgtctaaagcaaggtggtgtctctatgatgcagtaccttgctaagttcaaccatctctctcagtatgccatagaacaagttaatacagacttaaagaagaagaattgccttatgagaggtctgagtgataggctgcagcg

SEQ ID NO: 108715 - DNA, 536 bp, Zea Mays
ggaggttgggcgccgacgatggaggctaagacgagcagggcgtagggaagaggacatccaagcgtgaaagcaacggctagacctgggtgagcaagaatgggaggagtagagggaggcaggtctggcgtgcgtggctaggcgcgagcgctagtgaggaagatgaagaccggtggccctagacctagtgagcacccgacatggaaaggtgaagatgagggggcaaccccttagactagaggaagagcacaatagagaggagcagcaggggcgacgagcgcttgatagcgatggacgaccggtgcgtcgagctcgacagtgaggaagttgtcggagctaagtgcctagaaagaagaaaccatggaggagaaaagagaggagtgtgttgtgcagatgcttgggggagaggagtggcagctaggggtaggagtagaaaaatgtcccaagtgcaagaaagaggtcccatatttatagaagaaaaaattcagggtacgatttgagatattgcttaggggagaagcaaagatgtttacttagaa

SEQ ID NO: 108716 - DNA, 349 bp, Zea Mays
gcaatgctgggacgcagcgcggagcatatgactcccaaagcatcaaaagttttgacgtacatgatgttgagggcgctctccccgtccattaggacccttgagaggcgtttcatgccgatgatgggcttgacgacaaggggtcagttttgggacattggatcttgcctggatgatcacgtcgatcgaaggcaatcgggatctccattcagcggtggtgtgggggactgaatgattctgtcgcgtctacatcttggttgcttggtttgtgatggctcttgacactgacaatctctagggtcggtggcagggcctccctagtttgccgcttaatggcagcgacagattggcc

SEQ ID NO: 108717 - DNA, 313 bp, Zea Mays
gatttcgtccttgattcgtgggagaagatctggacgaaatgctctagctttctgcttgaaaggtctgaaaccaaacttaataggcagccgatgttcgacaatctctcggcttagtccaggcatttcagtgtagttccaagcaaaacaatctgaatattccttcaatagaccgatcatctcatttctagaatcggtctccagggtcttgtttacaaaagtcggccttggagttttaccatttcctatgtcaatctcctccaaaggatcagccgatgtaaacccctgtcctagtttatcaagatctctgaattcc

SEQ ID NO: 108718 - DNA, 386 bp, Zea Mays
ttgaagtactagccatgttcccctttccttgattggagctcccagagttctgctgagtgttgaatttgttctgctttgggtatggacagtcatttataaaatgactagacttcccacaattgaagcagccagtagaagaactagggagagcggggaaacgagtaccaagggcactcggctgatttgtagaagtgggggcagtggtaggacgaatgaaaacgggctgtttgaacggataggagggtggacgaggcgaagaacgattctgattaaaaggtcggattaccaacctggttcgcttcttaggtccctgattagacctgtcacctccaaatccctttgattttccgtggcctgtgttcttggcttctacggccaatgtcgtg

SEQ ID NO: 108719 - DNA, 426 bp, Zea Mays
gagaagatatgggctggaatgggccttgtaatcctaggctaagtaatggcaggtgagatataaggcggggaataattctgtaaggggtatgcacaatttggttatcaaaggatcatcttcctcgctttatccccttctccaagctttcttctacccgagcacctctcctctctccgatccccatcctaggtgctaacatctgatatcaaagatagctcgcatcctggaacctgctcacccattctcggccatcagccacgttctgctgctactttaggcatggatgctgcgatgcaacgtcttctggacgagatggcgcagatggaggtacgcttaaccagtgcgttggctcaccgctccctgtccatgctaacggccaccgcacgcttcgacagcacgccatccatgtaccagaaccacatggag

SEQ ID NO: 108720 - DNA, 549 bp, Zea Mays
tggagatgcgccgtgggaggaagacagaataccttgacattcctctcaaggacagcattaaagggtggcgccttgagtggtttattgtggaaaaccacggcaagtcccttccccctcggtcggggagacaaccagatgtacgcactccgagttgggttgagtctcccactgccttggaggtgacggaagctagggttctgcttgctgagatctgtctgctgaaggagagaggtctgactatcgaagctatggttgctgacttcgttttcaggaatatttagcctttgaaagacagggcgtatctagcttacttgtacagtggtattactgactcaactggggttaccaacaggaaaattcctactaaggtcctggtgagccgactagacatgatcctgaggggcaaggtatcaaatgtgggtgctcttgttgcttattctgcttggaatctgccacctcctaggtcattttttaatttcgtgtccaaccctcctgctagtgatagtggtttgggtcttagagtgtgaccctctcctgaagacattgaag

SEQ ID NO: 108721 - DNA, 500 bp, Zea Mays
attctcttcccataatggttaatgtcaatctacgtgtcatttgatttgcctcaataggccctttaggtgtaattactatcattggttttctcatatttagcagtggtatctcattagtgttggcatatcgagcagacatgaatgaatgtgtagcaccagaatcaaataatatggttgcaggaatggcattaacataaaacataccaagtacgatgtccgcaccatcaggagtatcatcaatgctgacttgattcaccctagctatagaatatcccttgccaggcgtctgttgcttgttcttagctggtgtaccagaattccccatcgggcaagcattagcatagtgtccaatctgactgcacttgaagcatgtagggccggtcttctgtcctataggcctcatcggggtgccagtgggagtagcctgacgagtagggggtgtacgtggagacccctgtggagcatactgaactgggcgtggtccttctggtcgagtcggt

SEQ ID NO: 108722 - DNA, 381 bp, Zea Mays
ctgagcaatttgtgggcttaggtgagtaattggaggcacaagcgggtggattggatgctggaatacctaacgaagccaagggggtgctcaatttataggactcttgattggtggctcgtgaatttgaaggagacgcgcggcggccggagagggggaagagtactggcgcaagcgattgatggcatttaccatggcgggctcgccggcgatgaccagacgtgctagagcgagtcaatacgatgaagtacagcgtctaggcacatgtcatctgagcggcaaatggctactccggtgaacttatccacagcggctgtgacccaggcgggtacggcggccggagtagaatagtggccggagttcatccacggcgcgatatttcct

SEQ ID NO: 108723 - DNA, 322 bp, Zea Mays
aggctgccaacgccggtgagcttatctgcgtcggccgcaagacaagggggtacgacggccagccaccggagttatccccaagcgaagatctttttacctaggagcattatccagtcaccggtgagcatgaatcgcaacagcggcgtggatctaggcgcacagtcgccagcggtcaggtgcgctgcaccagcgatcttgtttagggcactgtaccattggaatcccctattcagtcaacctgacagatcaactttgagttcaattttctcctaaatttacatggcaacttgttgatcggctagtagcaaagttgttgtctaat

SEQ ID NO: 108724 - DNA, 560 bp, Zea Mays
aacggactaaatcagagttaaaacgaacacaatatgaattatctaaatttatgggtttatttgcatgtttataattcatttacttgtccaatttatgaatttattattgttgttggacgacggacataattatagggaaaaccagggtgcacgacgcaagactttgggcctgtttgtgatgttctttgcatatgactggacgataggctaatttgcaaaaagggagggtctatttagcaagaatacgtagccgaaggggtactggctacacatagtcgtccgatcaccaatatgtagctcagagtaaatctcccaagggtcgaacagatatgctacgctacccgctcgattccagaccgacgaccaaatctttatgaagcatgatccattttcatccctcggatcaaatctcaacagttggagttccatccacatgaaggggtaagtctttctaatctaaggcgcccatccacaatcggacggctcatgcccatcttctacctctcgctgggaaaactaggtagcggcgcctagtttcgacggtccacgcacccaccctc

SEQ ID NO: 108725 - DNA, 478 bp, Zea Mays
ctctggattgggcgctaaattctggaaaacacagggtgtaatccatagttttcccaagactcagtgaacaacacccacggacagcgggttctatttaaaataaacgcaagggctaaattgcaattctgcagagccgaaggggtatcatgagactacagccgtccgattagaaaccggcggtccagattacatctgtgtttccccgaatcggtacgctgagatgaccattggattcggattcaaaggcccggatttaattaaccctagatctagttcctgccgtacgacgcgagatcaacgacatggatctatccgagcgaaggggtacgcggcgcctaatctaagccgtccacctagtcatcaattgcccacgaccttcttctctcatccgcagcctgagatgacggtggaacgcgccctacgcgacggcgctactcttgcgagcaggcggtccggagcataagtgaatgaaatccca

SEQ ID NO: 108726 - DNA, 1019 bp, Zea Mays
ggaaaaatcagtttgctgaaaagggggcaccggaatgtccggtgtgcaccagactgttcggtgggtgtgcccagagtttatgcagagaagccagccagcacaagcaagagaacaccagattgtctggtgttcatcgaattgttcggtggcatttatagcggtgaccaacgaactcagcaatttcgagttttcgacgtgcgagaacatcggactgtccgatgtgcaccgatcagactgacgacatcaacaacggtaacctgctaacacaggactgtcgcctgacgggctagaacgataacctaacagcacaccggacatacactatagagtgtcgttgtgcacaggacaaacacgattcactgtccagcgcaccacccgacagacaacttttgaccatttactccaatggttatttgagtggtcgggggctataaatacccccaactagcacattgatgaaaaaagagccacaccaaagtgatatacatcaagtgaaataactcccaaccttccaaagccatacaaacacagatttgatcgtttcgagtgattagaagtttagtgcttgtgctctcaagtgttgtattctcttatgctcttgatttgtattttcactctcgctctcacccccattctccttgttgtaaagcggggaagagactttgaatacttcgtgtggagatccttgcgggatttagtgtccatgtgatagtgaagcaaactcaaccggtctccgtgaccgtttaacagagggaaaggttgaaaaagacctgacctccgtggacttctcaacagggacgtacatccttcgggatggaaccttggaaaacaaatcatcatgtctttgtgttgatcacaatctttgtggtttgcttcttccctctcccttgtctagtttcgttgcttgaaatcgtttcgagctggctcccaaagtaatctgcattagattgagcaactctttgcaagaactctcttccgcactctgatttcattatcactcactctaacgttaacctccg

SEQ ID NO: 108727 - DNA, 632 bp, Zea Mays
cgtcacccttcctcctccacatccacgccgtcctctcccacacgagtctctagcccggaggccacacgagggacgggaccttctcacgtagctcaagctcacctgccagcgaaggctacgacacatcgacgaccttgatgttgtgctcggggtccttgatgtcgacatctcctactggtcgtcctcctctccgccgcagcagaggggtctcgcctctaccgtccaggacatcatggtctcggtcgccatcctcgcctctaaatccgccagcgctagggagggcgccgcgccacccaggttcgcgtccttgtctgtcctctatctgttgccgctgtcctcccccaggccaccagaatcgcctagggccaggaccgctgatgggtggtacgactgtatgacccacgtgcctagatgcgggccaattttcccttctcttaaaaaatcccttgttttcttctttcacccattctcatctaattaagtcactttgttgaatgtctggatgtgaagcaaggtatgctctaattgctcggagatcattatggagagtgacatattcacgtgtgtaataaaagtgctacatttacaactgacaatgtacgattctgtagttctaaaaatatgttgatatg

SEQ ID NO: 108728 - DNA, 501 bp, Zea Mays
attgtcttcgaaggggaggaacataaggacagaaaggtaaagagtacattaggtatgaaaattttgtaatggagcccctgtgtgacttcagtaaatatgcctcgactcgggcactgcgttgttgactgtgcaagcttcggattcttcacgcgcgtcacgctattgctgagcctaacgatgcccttttggttgttggttatggaccaaggaaggcgccagtggtggcggtggtggcaactgaggccaggaggcttgggagtgacttgccgaagcaacagaagtcgtaggctgttgattgcccacatactccatgatatacggagaatagcatgaagcagtatgcaataccttcttcggcaggttctgccgtgcttcggtttcagcgatttccttctgcttttggattgtgacttggcacgtccttgtcgtgtgtcccttatcttcgccacagaacaggcagaacagcatcctgagctgattaccatatcttcctccgaagct

SEQ ID NO: 108729 - DNA, 336 bp, Zea Mays
ctaatgcttgagactgaatggaagacctgtgaatgaagtctatgatgaactcattgagttctgctgtccactttccaagttagcccaaagactctctatttcttatgatatccttgagtggttgagatgatggcacaataatgtgggattggaagtagtgccgaagctttcttgaagccattaggattgcataaaggaccatctccatctctatataatttattttggatgggctcaatatttcagatacgaagtagatagacattttccttttcacacatttgcttactacttcttgaaacaagacaacacttacagtaagattgtgaagctgat

SEQ ID NO: 108730 - DNA, 510 bp, Zea Mays
cgaaggggtaccagcgcaacagggccattggatcctgatcccacggtgaagggataccgtttatccctagatgcccgatctaaaacggaggggcacgattagatcacacatccagtgaatcgatacgttatgtgggctctcggatcaaacaccgacgtccaggatttaaaatacagcggtaggttcttgatcgtttgatctcaatctaacggttacgaccaaatttgttttcacccctccgatgaagatcagagggcgcatggctttcgtcctcctcacccacgctcgccagagtggcgcatttgggtcactggtgcacgattgcaaagtctgctaagcactactcaaggctaagtcaatggcggagcaggggagaagtttcccaccgatggtgaagatgatgccgagactccccccctgcgtgaaacgaatccgcggcgggaatccgctccagtgagtgattccgttagcactagtaagctacccccgtttggatcgatgctacccgag

SEQ ID NO: 108731 - DNA, 674 bp, Zea Mays
tagcctgatagctgttgttataagcgaactcagccaaggcgagatgatcctcccagctacccctccatgaaagaacacaagcacgtagcatgtcctccaaagtttggatcgtacgctctaactaaccatcagtctgagggtgaaaagcaacactaagagaaagcttggtaaccaaagcactgtgaagactctcccaaaatttggatacaaatttggagtcctggtctgaaataatggacttaggcacaccgtgaagccttattacttctttcatatacaagggaaccaattctgaagctgaatttgcggtcttcatgggaatatagtgcgcagacttacttaggcgatccacaacaacccatatagcatccctgcctcgaggagaacggcgtaagccaaccacgaaatccatggtgatatgctcccacttccattctagaatttccaacggcttcaataaacctgcaggcctcttatgttcagccttcacgcgctggtagaccccataggctgccacatacttagaaacatcaaccttcatcctcttccaccagaagttttgcttcatatctctgtacatcttggttttgccaggggtgaacggtgtaaggcattttatgagcttctctcaatatatccatcttcacctctgatttctgtggtacacaaagacg

SEQ ID NO: 108732 - DNA, 384 bp, Zea Mays
cttctcgagaaggtcagggaagacaggtggggatggtggtgactgctccatgagacccttgctgaagaattcctcaggtgtggtggccatggtgatcaaatgtagtgcagtcagtggttcagtagccaagatgaagagaggacttctaatttggtcaatggttccaacagttccaatgctgcatggatagcggagatgatggctagcgatttttccaatgttgcttggctaatggttccaaaatctagcatttgttttactttacctattgaaaataacaaagcaagaagataccattgtgcaacgcgaagctaaacaagagcaagaatatgctgttgtacaacgcgaagcatatttaaataaagctttacaggcaaatatatg

SEQ ID NO: 108733 - DNA, 496 bp, Zea Mays
caactatcctagagcctggaaaaaccttgaatgctcaaaaatctgatagtgctcgcccaaagcgccttcgcccggccaatcatccaactggtcctgccgaggggaagaagaagaaaaagaggaggcttcggcgagtctcgtgcttgaatcaggatgctggcccttctattcctgctgctgaagaagtacccgtggaactttttactggggctgaccccaatgggtgtgaccttgatgatgctgatcccaatgggtgtgaccctgctgaagctaaccccaatgggtgtgttgttcgtattgttgacgaggatgaggaagaagaggaggaaattcccttaattcggaagaacagtcggcgttacatagtcagtggggagagtagcgatattccttctccagctttgtctgctctcgttggtctgcaggaattgtccatagctaactttgatcaggctctcgaggatgtggtacctgaagatctgttgtccgagccaac

SEQ ID NO: 108734 - DNA, 366 bp, Zea Mays
ctcaactaaaataaaaaatcatgatcaatgcttcacaagtaacattatcccataactaagtatagcagtaccaaatgtacccaataataagtgaaccagttataaacaaggtatgaggaaaaacaaactatgtaacttattaggccccccaatttaacataaatgttcatgcatatatgagaatataacagtaaatgttattaggtcaaaacaatgtgatcaagaagacacatgccttctaatgtgagctcttactcagatccctcaaactgttgggctttaggttcctcgtccacttgatcgtctattcatagcaatacaaacaaacaaaataaaaataacatcacaccaaacagagaaacaaac

SEQ ID NO: 108735 - DNA, 735 bp, Zea Mays
gcagggcgtgagcaagatgccgcacggcgtggcacgtagtgctaccatcgccgatgagcatgatgagcgccatcgtcatgagcaccgtggcggagaagagaaacgaagtgtcacaagtcattgctagccgctaggaaaagtgcttcctcaggagtgaggagctacaaggctgttgcgtgcttgcaacgagtccttggcgagtattttattgtagttccatttaaagctgagcatatactattttgctagagctaggccagttgggaacgagatagagatggttggtggccttccgatgcaaagcatggacgacagatacgtagtggatggatgttgttcgagacatttggttcattagctcatctgtttcttgtagctggatcagaattaaccacccctcgtgcatgacgcaagatgatactggacaccgctcaactcatgcatggtttatgaatgttgcatcatgaatccatgcatgacctctgtttgataattgttgaggcatgttttttctctatcgaattattgtgcaatagccagagacatctttatggttctatctatccatgaattgtgtgtttaatgcgtgtgtctaagagaaaataaaaggacatatgttcagtggaagatgttgtgggtctttaaaatcggcagtcataccgtgtatttatatggagtcaatatcttgagttataagtcatcaagactgttacaccatatatatatatgtcgtaa

SEQ ID NO: 108736 - DNA, 400 bp, Zea Mays
accaagtcttgtctgtatgcactgttcaccagcgacaaaaaggatgccaaagcgtgtcaaactaccctggtttggtttcaaatttttcaggggtgtgccttgggtaatttggccactttttataatttggaccaagtggttttggcgccagcacaaaggtgaacacatctgatctttaggctagggttggtttgggacttggagaaatttttgatggctctagtgtgctttccacttagtgaactgatttggggtttttgttgggcctttttgtaatatcttccttaatacattttgtagattttctaacatacttcatctttagtaaaggtttcctttcatgatttggccatttgcctaatgttttcccctttaatcccatgtttagggtttaatggct

SEQ ID NO: 108737 - DNA, 380 bp, Zea Mays
ctacaggaggagctagagtcactcccgtccatcgtgacaggccttatgtcctatgcgtcgctcgtgtcctacgagggggttaagaatgccttggcctgcaagggctgtaggcacttcaaggcattcgattagagcaatgatgactttgatgcttgtgtattccaggtcgaagacgatgtgctgaagcactcagctagggcgctttacgataggatgtgggatcctcacagtcgcggcgttgtccgggagagggccgaccgagcacttgcataggtacgtttgtgcccttagcgagagtgatatgtatgtttgctgtctaacgcgttgttgtgccgtcttcgcagacaatgaaggatgaagaagtggaggacctcgctggc

SEQ ID NO: 108738 - DNA, 762 bp, Zea Mays
gacaaattaacccagttgcttataaactgcagttaccagctggaagttcagtgcatcccttatttcatgtctcgcagttgaaagtcgtggtcggtccacataccccggtgagcccctctctgcctgactcaattcataatctacagataccagaaacggtgctcgataccagactacgacaccgcgccggcaaagtcatcactcagctgctgatcaagtggacgggctggcatccttcgctggctacatgggaggaggaagttgacatcaaacgtcgcttcttgttcgctccagcttggggacaagctggctgtctacggaggtgaaatgtcagcaacctgatggcggctgcccaaggagaaaccagtgcatcgacgtccaaggatggcgggaaggatggagctgaagatgatgggccatccaggccgggacctcgaaggagcaagagaagaccgaagcccaatagtcattttgctggcccagagtggcagccgtaacctacacatgcatatatacatgtaaataagaaaggcagagggtatttgatcgaggaacagaaccctgatcccggctgtgtccggtggctggtgctgtgtcgccgtgtacggatcccagacattcataaaccacagataccttcgagagaggaccttgagcaccgggagcggtgctcaaccatcgaaaccctgctggtgcttacaggacgcatggacggggtcaagactcaccggagtgctcgtgtcggcgtgccatgcgtgaccg

SEQ ID NO: 108739 - DNA, 540 bp, Zea Mays
tggccataaccatccacggtccagtgttcgtcaaaacttgtgctcagtttgtggttgctacagttttttatttgattttgtctttgctctttccccttcttttctcttgttggatttagtgaaaattgttgatttcataagtttgaggattgatttgggggacacttgctattgggacactatccttggatcattttgagtcactggttagagcatatcatgtatgtgcttcgttctagcagtttgatacaaaatagccaaacccgacaaaaccctaatcgcaactgagattttgaatctgttcgagaaggctgcaaatcaagcagacccaagatgggacatttgtgcaccaaggaaaatacacaaatgatgtcttgaaaacattttacatgggcgaggccaagcctcttttgatgcccatgtccaccacgatggctctggttgatgatgaggatggcgaacacgtggaccagaaggagcacatgaggtcgactccctcctgtacataactgtgacgaggccgaacatacactttgtcgt

SEQ ID NO: 108740 - DNA, 947 bp, Zea Mays
tccattgttactttgttaatgcttggaaagtagtttgcatttgtctaggatctgctatggttttctatctaatcctttgttttgtgttttgtcaaactgtatgtgtattttcaaaaatatggttttactcattatgcggttactaatggcattgacatagctgcctttgtagagacaaatccaattggaccagtagctgtttatgagcatgctctctgttatgtttcatttgtttttattttgcattgccatccttttgcacttatccacaaatagcaaattacactgaatttgattgcgtttcctgtttagttgtgtgtcattacactttaagtcatttgccagatcattgagctttgctataatgagtgaatttctgccatgtctttatattttttgtcctcttaatgaccaaagatcaaagccttgtaagctgtgaaggctttctgtgttacctttgtccatgacctggaaacgttagcagctagcaaaataactctgatgttttctttgaaatgtaataccgtctccttatgatttaggattcattcccttaagctttaaatgaataaagctactacatcagagatagtattgacttggagttgggtgcttccatactggtgtacatttggatcttagggttagggtggcgttttttggctgggccttgtgtttggaatatcctaatgaaactagcttgctaaggacgactagagtgtactggcacgaaaaataactaaacctttaaagtgtgagtttcgtcgcgcgttgtccccctccccacgcgaccaagcgagtgtcgtccatgttttatggcagaatacttactgttgattcattgatacatctctttctcactttgttgcgcgtccaccactccattctggtcatactcgtgtaagcatatatgtggtgtcttcattatgacactggaggtccagctt

SEQ ID NO: 108741 - DNA, 274 bp, Zea Mays
tttgatctgcctagcttgatactctgccgcaatgacttgcattggctagatgagcctttttcaaagcaagaaattgatagtattgtggcggcccttccttctgataaatccccgggacctgatgggtttaataccaactttatcaaaaaatgttggccgattatttcacaagacttctatgacttatgtgatcaattttaccacggggatgtttgccttcgaagcattaatggttcttatattgtcctgattccgaagaaggataatgccagag

SEQ ID NO: 108742 - DNA, 678 bp, Zea Mays
ccgagctggacagcgggttctaatccatgattcccgaggggttcatgtgtaaaacgaactagtgaaagggtttggatgattctcggccgcaggatcacacaccaacggtgtggattagatcgggcctcccaggtcccatcattgcactacgaccgttggatcaagtatccacagtccacggttcgtgacaccctattctccccatagccgttagatgaagaaactgtggatcggatttaacaacacccatagtcgactttcacccgtcagattccagatccatggtccacatctgatttcgcgaaaagtcatgccctggcctaatcacgaccgtcggttacttgatctacgatgccgaacccatcttcttcctcccctggctgtcaacacggcggcgcactatccccgcggtggtggttcaccggcgcccagacgatcaacgattgcgcacgctagtctccaatccaagcattgctacgcctactagggacaaagacgaaaccgagcaaggagtttataccgtaaatcgccgtgcagagatctctggcgccagagaatcgcggaccgacggtggcacagaatcgacggcgacgaaatcctaggattcccggtcaccaccgcgcccgcgagtacctctcccacgttcccgcgatgctccccaacccaatccgatgcgcc

SEQ ID NO: 108743 - DNA, 386 bp, Zea Mays
ggggtggcagccacttgagtgtagtagactcgcccagttttccttgtatttttgcccacctaagtgctggccacatttcccttgccttgagatgtgctcccagaagtctattggaaattggatttattttgttttggatagggcagtccttgataaagtgtccagacttcccacagttgaagcagctgctagatgaactgggtaaggcagggaaacgagtaccagggtcactcggctgattgttttgagcaggggcaggagtgggacggataaaaactggctgcttgaagggacaggcgggtggacgaggaaaagagcgattagggttaaaaggacgaatcaccaacctcgaccacttctcgaatccttgagaagatccttcacct

SEQ ID NO: 108744 - DNA, 533 bp, Zea Mays
cagacccgacctccataggcgccatgaaaagaaaaacagaggtctgctgcagccgctgctgcgaggattgagattaggggcgactctgcccctgaaccgtgtctcaggggcctcaccggaggttggcgaagctggggacagaagtaattgcactaaggataaccggttgcgattgaattcctcgccggagtacaagcgccgccgcggatccactctcctctgtggacaggctcgcaacctcttcaaacaccggtgagaaccctctctgcagtttcgccatcttcccctctcagttttgtatcgatcaatttttagattgggcggttaggcaccggatttcgtgctcgtcggcgtaccagccaccgtgggagctgagctccatcgccggggcgctgtcgggttggggaaaagagcctgggcgtcggattaggaacgtccggtctggattagatctcagcgtacctgttcactagggttgatccagagtgtttgcggttgatcggacgaatcgggcgattaagggtgatggcgtg

SEQ ID NO: 108745 - DNA, 379 bp, Zea Mays
aatctgcgtaccgtttcactcagggtgatcatggccattagatttggatcgtagggttcacgattgattatgacgtagattcagcgtggaccgtgcgattgaaatccgagggcccgcattccataccgcttcaatatgaaccgtgatctaatctggattgtttaaattgaatcgggcggccagggtcgttggataccccttcggtcgggtcgttttgcaaaagaaccctcggggaaaatgggaatcaacccgcagtccgctcgggtgtctccctgagtctgtggaattcttgcaccgtagcccctgctctttctggtatttgaggcctagtccagagaacagaaaaaccagagaaatgaatttataaatagatttttaa

SEQ ID NO: 108746 - DNA, 696 bp, Zea Mays
cattagttttcttgttgttatccctccattgctttaggagtgttgcaaattttatctcttttgagaggagaaaaagacgttatatgacataagcaccatttgcttctcctcaacagaatagttgtggagatctgtagtagttgaattctggtgtaataacaaccatgttttatagtgctagagacgggtatgtcaggtgttgcatacattgtcgctacatggatgtttgaccttagtggcattaacaaacgaggttgttgaattcgttgattgttatgcttagtgttctaacctattaggtaaagttttttttaaagactttggggagttgcatccccatttggtagtgggaaatcctagtgttgattgcacctgccaatgccttgggtttcattttatattgtttttttattgtggttaaggtgttgcttggttttgggagtcattttaaattagttggaggctgaatcaggcttcacttatctagaatgttttgtagtaggtttcttcatgtttgcatatgatgcttaatcacccagtttggtctaaacatttgagagttatgggtttcctataatagccttaattttgtacggaagaatagaccttgaagatggtataatttggtctttgttagattatgaaagtttagtaatttcatgatctttccaaagagtattggtttgtaattttcat

SEQ ID NO: 108747 - DNA, 357 bp, Zea Mays
tttgtattctatccatttggtgaatttgtcaatggcgaccaacacgtgagtgtatcctccctgagctttcttgaagggttcaatcatgtccagtccccagcacacaaatggccatgttacgggtatggtctgcagttgctgtgctggtaaatgttgttgctttgataagaattgacaagcttcacatctctggactaactcggctgcatcactttttgccgtcagccagtagaaaccagacctcaagactttcccaaccagagttctggatgttgcgtgtatcccacactgtctggcatgaatttcatctagcaattgcatcccggtaactgagggaatgcacttcatgaggactcc

SEQ ID NO: 108748 - DNA, 454 bp, Zea Mays
tgttatgactttgtgttatgttggctaaattggtttctcacgttacatttgagaggtagacggacggcacatgaaactcactttaattgagtagagaaaagaaatgttaatatcattaggcaactgtcagggaaaagatccttggacccctaaggttcaccagccagagagagcattggggaaaggtccccggactaccggatccaccggtcagcaggagggtaatgaagcatctaccctagaagcacttgtccctggataaatctcgaggcaccgaacccggggtcaggcgaggcggagctacaaaagggggcagacgaacctaagggaagccacttgagtgaattcctcgcctggctcgagactggcccgccataaatgacctaccactttaactacgcctggcttcgagccatagtaggagagatggtctgcctctcaatcatgacctacg

SEQ ID NO: 108749 - DNA, 516 bp, Zea Mays
tgattggatgtgtttttacatggtcgatagtctccagattttagtggaccattcacctacgtgttgtgcaccaatgccctttgccccaccccgtctggtgaggcaagatgagcgagcgagggaacgtgggcttcctttctcctcatctaaaagctatatgtgtgattttggtaattgaggcaattagtcgagtaacctatattataagcattgtgaatgagctaggttaagtccatatcaaagatcgagcaagaatgacaactatataaaggatagtttagccataaaggataatcaagtgatcaacatgaaaagactaagaaaagtaaaatgtaagggcttaagacaaaggtataacaacaacatttcgttttgtccatcaagatacaatatattgcatgatcaaatttagaataagtggtcatactataaaaaagggaactcaaagtttagaatggttacttagataccacagatgaattaactctatgaatgaacatttgacctagtagtcat

SEQ ID NO: 108750 - DNA, 374 bp, Zea Mays
taagcttgctgcacatggtcccatacttcacccctacatgcctccatgctcatgttatcatctctagttccgttacttgttccattgatcaccactaacaacaatccattggaggaggttcaatgctacatgggtggcttcaacatgtcactagcttgttgggattgggcggcatcagcaaaacttcgtggttgcggtagctctcatagtttgccacactgatcagcctccttgtccgcatcaacctacatagctctaaaaaattaccgatccgatcagctcatttatcttctccaacctgaatccactatggatgacttcatctgctcggccttgaacctacgaagcaattcaagagaaacagttgctttgat

SEQ ID NO: 108751 - DNA, 476 bp, Zea Mays
cagaggtttccgaggtgggagtggtcgtggtggtatctctgctcctcttgaatctttggaggatgaagcagaaactgaatctgaagctcgttcagctgtggtaaggcactattttatacatgttatatgttcatctaacaattaaacatgattgttattttacttctgccactttaggatcaaactctttcatcaataattatgaatgctccctttgtttagcatgctacgtgtatatctatctaatgttgcatgcacaaccttgatcttcattcgtatgaatgaagaggaaataaagaccatccatacagttaatgggttcatgtcttatatttactatagtttgagtcacatttcctagtctttcctatagtttttgctttagttttccaagtggtcgcagctgcttattcatagtttttgcttgtatctatctctgaaatctgttaggtagtatgtatctatctctgaaatat

SEQ ID NO: 108752 - DNA, 528 bp, Zea Mays
gtttagttcaattggctaggtcgatgagcatcctaagcacaccagggtgcagtaacaagagagaggagggcgtgaatagacatgtagagagctgggcacgacgagctcacacacggcggggttcttgactaatttggggaaaatcccaaattgggagatgtgggggacgattggaagtgagggctggttcactgggtgcacaattacttagccgagcaggctggggtaccaatttataatgtccaagggcggtggctcctaattttggcatggcgtgctggcggccagagagaaagacggtcactggtggctcaatcgtggcgttcaccggtgcagcggttctgagatggtaagcctaggcgtgccacggttactactgcacagtaaagagccacgacgtggcataattgaggtcgccgaagttccacgacgacaccgatggtccggccacgttgcacgactataggcgcggttgataagcttcaccctgcgaccaaatccgctccccctcaatcttttcaccccccg

SEQ ID NO: 108753 - DNA, 427 bp, Zea Mays
agaagacacctctgaaggaaaataatgaggtaactcttgagatattacttcctgattgttctaattatgattcatggtctactagggtgataaatgcttttagaaccgtagatccacaattagaacaaattttggacaagagtatcattccttctaactatgataggaaaaatgcttcgaaggaagatctaagatgtatacgcttaaactatctaacttatcacatcttaagtaaatctcttagcaaagaagattatcgtgccttcataataagatatgatgaacctatttgtgatgcgcatgatatttggactagaattaaaatcaaatttgatgagtccaaacatgatagttcattttgtgcttctacttcctttagtccttgtccaaccctttgaaggaagaagaagaaaatgaatgatggaga

SEQ ID NO: 108754 - DNA, 331 bp, Zea Mays
tggaaagcctagtttgttcaaaacttgttaatttcattcttataaaattattttatcagccttacctctttaaaatttcaactgagttgacatttctcttgtagatggttcgtactctccaaactacctgggtcaacactagctacgcccctccgccccggcaaatccctgtctacccagtggtagtcgaggaagtttcggtggatctcccttacattcgagtggagaatggagtcatcctagaggacagctcggaggaacagctgccgacgcccaccccgttagcagagtcactggccttcgcagctaggtcatggacatcggcaccgct

SEQ ID NO: 108755 - DNA, 472 bp, Zea Mays
gttgcattgtttgatgtcgccatcactctggcgacgcaaataaagctggtccctggtgcttactgatacaccaaatccattacgaactttgttctagtaataagatattaccactgcctttcccaagtcgaggataacactggctgttggagttttgttgcctgacgagtgacgacgacacgcatgagcatccgatcccagctcaggcaatagctcgatccgctctttaaatattttttgggccctcgtttgaggtcaccgtcgaatctggcagatctaagcagagaataaaatagatctggagcttttaataatttctggtgcctgattcgttttgcaaactttcttcttatattgaggatagatcactatagcgctgatataatttgttacgttgtctcgtgcgtggcaacgcacgagcatcactgcttagcttaggctacagttctattcagccccactaatgccttgc

SEQ ID NO: 108756 - DNA, 467 bp, Zea Mays
gtatacctgggacatcgtaggtgacgcagaaatcatccataccgaaagaatgttgatgcatttgatgggagtattgaaaatgaaaaggctccatcacgcaggtctggacatgtggtttatgagagtgtgaaggacattgaaaataagttcgggaaacacaatttagcattgtctggaatttggaagaaaaaatccatattttggaggttaccttattggcgcgatctaagtgtgcgtcattgtcttgatcttatgcatattgagaagaatgtgtgtgaagctttgattggtacaatttttaacataaaagggaaaactaaggacaacaccaacggccagtgtgaccttgatgagctgaacattgaaaacccctaggaatggtatactctgaccaaggaggaaaaaattaaagtttttcatctgttacatgatgtgaaagttccatctgcttattcagcaaatattag

SEQ ID NO: 108757 - DNA, 353 bp, Zea Mays
ggggaggggtggaataggaggaaggggtgtctctggcaggaggctgcgatagggagtagttgccgccgattatatggcaacgaggaaaggaagcgcacgagcggttggggtagggtcaacacggctagggtttggaggttggtgggcgagtgaacttaggcctggactcgtggtaccttgtagaataggcttagattggaggaatcaccacacacctattgttcggctgcctttcatatataccatgtacatgtgactaggataacatgtggtacaagtagcgtgaaccaacgatatggttatacaataatcctaatactaggtatgtcatggtcattataaatggtgagctc

SEQ ID NO: 108758 - DNA, 374 bp, Zea Mays
ggacaagttaatacttgtgaaatagattagaccctatccacatgttttaactaagttcaccctacactaaataaagaatgatagaccaacccaaccaatagagtcttgatggattgcatgatctgcctatccccacctaacatcaaacaaacttttgacctacatcatgtagtctatctcatccatatctaaaccatattccctagcccgataatatgcactaactcctaatcaatgagacaagaccgaagaagatgatcaactttatcaagaaaggatgagcaccaactcaagtcttcaaggatcaagtgaggtcaccaagatgagtcaagatccacaatcttggatggagtctttccttaccccactttttc

SEQ ID NO: 108759 - DNA, 461 bp, Zea Mays
ttgacttagagggacttgcaattttcgccataaccagtagtggacttcgctaatttttgccatcgaccaacaaatcgtggacatagatgaaccacaaattatagagaactatgtatataatagcaatctggtaagacttgtgagtcgcaaaattgtaaatattctgtccttgggccatagacctagctgtggtcctacaatttggcccaataactgctaggtcacctcagccaacactcctgctattattccttcgcaagaccgcaagatagaggttatctccatcctccgcaagtccacaactttgcaacttcctcttcctccgtagccccacgctttgcgcctccatctccatcattcggtggccggtgctgcagtgtgtcacgccctctccccatggccatgccggatctgcaccccgatgtgaggatcggccaacaccgatgagcaatcacgtaagc

SEQ ID NO: 108760 - DNA, 1113 bp, Zea Mays
ccttggtgccccaaacctaaggtcagcaggtagcactgcctccgaactatagaccatgaagaaaggagtatttccatgcagagctcgactaggttgagttcttaagctccaaaccacatacggcaactctctaatccattttcctgcaaacttttcattcttgtcaaagactttcttccttagtgcttccagtatcattccattagccctttctacctgaccgttagcccttggatgtgatactgatgcatatttaatctggatgcttcattgttcacagaaatcaaagaattcagagctagtgaaattggatcctaggtcggttatgatgctattcggtatcccaaacctgaatattatatcttgtatgaactccactgccttggctgaagtcaaagaagctatgggtttgtattctatccatttggtgaatttgtcaatggcgaccaacacgtgagtgtatcctccctgagctttcttgaagggtccaatcatgtccaatccccaacacacaaatggccatgtcacggatatggtcagcagttgctatgctggtaaatgctactgctttgataagaattggcaagcttcacacctctggactaactcggctgcatcactttttgctgtcggccagtagaaaccagacctgaagaccttcccaaccagggtcctggatgctgcatgtatcccgcattgtccggcgtggatctcatctaacagtttcttcctagtagctgaaagaatgcacttcatgaggactcctgttgcgccccttctgtacagtgcatccccaatgagggtgtagtgggctgactgccttgcgatgcattctgctacagctttgtcatccggttcctcttcattctttatatatctgatgatgggctccctccagtcattagagtctaactctagctggctcaaaacgttgcactcttctgcttgatctgaggaaatgcttgggtgtggcacctcttggacgaaaactctaggtgaaacctgggtccgactggatcctagtttcgataacgcgtctgccaccgcgttgtgatctctttccacatgatgaaattccagcccttcaaatttgtcttccagtttccggacggt

SEQ ID NO: 108761 - DNA, 505 bp, Zea Mays
ccatgaagacgcctgtgaatgtttatgtggccaatgggtcacaaattacttgctgctcggaattggtggatgcttcatggtctattgggggagtgtctttttcgtccacacttcatgtgctgcccctgtctacatatgatctcatagtagggatggattggctcgaagctcacagccctatgctggttaattggtcccaaaagtggcttcatattccttttcaagaatcttcagctacactgcgtggtatatcttcttcagtgatgacaaattcagtagtacaaatgtgcaatatgttggagttgtctgataaggaacatgatatctatgctagcttacctgttcaggttcaagacattattcaacaatttgctgccattttcgagctccctaaaggaatgcctcctatacgagattgcgataatcaaattcctttgttgccaggagctcgacctgtccaaatgagaccatatcagtatgcacctgctcttaaagacgaaattga

SEQ ID NO: 108762 - DNA, 679 bp, Zea Mays
ttgcctgccgatggagctccaaattccatgagagttagggataggggagtagcgctaagagagagcagggataatgagcttcggtgagcgacgaacaacggcgagcttgagagcaagagaggagcgcttagtggcggagtggcgtggttcactgccgatggacaggagagtggggagcgttcctgggatagagaagagagtgattgagttcacggaaaggagagggggcgataacgtccaaactccaaagagtgaatcgactagatgtttaaagcacaacatgtgatttgggcttaaagagagagagtctgggtcctattttttggaagcgacaatggcacggttctgtagttgaagcaagcaacgttggcattctcattttcagcatgcatcttcatgcccgttagcgagaatggcgttggcgaatgatgcacactactcttgcttctttgtgtttcatcgccccgtcgatttccatctgtttacacgatatacatacttgttttgtatatacttgtgttttaacttattattaagatttgtcagcatgaattcagtttcctcctaatgtttcatcaaatttggtacgtaccctccccgctcttaatattgtagtcacattaagcacaattcaatttctgcatgactgaggataatttcttaccttggtggacagagc

SEQ ID NO: 108763 - DNA, 346 bp, Zea Mays
cttgcacactcaaaaatagccccaaaaatttcttagcttggacatttctaaggtctttgacactgtctcttgggcctaacgcttggatattcttgaaaaagggtttttggggctatgttgaagggatttgattagtggtcttcctccacctaggtgttacttaatggtatttctgaagatgtcattaatcatgggtgtgggctgaggcaaggtgaccccctctcccccatgttgttcatcattgtcatggatactctaaaccttctgatctctaaggctatatatattggactttttcaaccactctccactagatctattcaacaccagttgtctttgtacgccg

SEQ ID NO: 108764 - DNA, 1137 bp, Zea Mays
ggcagatatagctcctgacaacaaaaatttcctggcccagtcaaaagaatccggcctgattagaaggcccatgaagaaagcagcccaaacttttggaacagagactgagccaacattgtcagggaataaatcagcccaagaagaggaacactttctggccatgtagtcttcaaaagcaggatcagggttggactgttccaaatgcaacatgaggcccacattgatgttctcttcaatttgcatgtcatcttctccctggtcgttatttccctccaaaatcatgttttcgggagggaaagctggcaaggcgagaactgcttcagccggcaccgaggcttcttcctgctggaactggactccctgagggataatgatatcgttaaagtagcccaccaaatcgtcagaaggaaggtcttcaagacccaataactgataactgaactgctcttctgcattgatcgcaatgtttgcattgtttgcgttggccactggctcagggggttgtgtgtgctgaactggccaagggtcccaaccttcatcatcattgatggcaacatcttcctcaacattgttcccttccatgggaggaatgttgagatcgaactgaaaattggccactggctgacccattccaaaaaactcaactggaagctggtgcccatcatgtgggtagggtggcacgggatcctcatcttgaggttgagcaccaagcataaattgttgcacaatgtcacattggacagtccatgaaactccctggaaaccttcagccatcgagagcacgatgaactgtggcacttcctgtaaagatgccactcgtgcccggaccaacaacctagttgcattatttgggtcagggtcccacatgagaaccctcccaaacgctccgaccgcattttgaatgtgttcatgagtccagaagtccagagtaaaaccaagaagtagaagccaacattcatggttaaaggttagggcacgctgattctagccctcattgtgtcgaatgacagtaaaagagaatcccagggcttgctgaggacctaatgccactaagttgtctctgtcaaacgcgaacctgaatcgtaccagagcctgtcccaaatgggagcgttgaatgctcctgacttgaacacgccg

SEQ ID NO: 108765 - DNA, 763 bp, Zea Mays
agttaagggctgattccttggtgtcttgttgatttttaatgtaattaatggatccttcaaaaattttggtatggaatgttagaggtctgaattcttctgtgcgccaagattctgtgagagaacttgttgattcctcaagagtagaggtggtctgtctacatgaaaccaagatgcaagttatttcagattgattcattctttcaatgctggggacatactttagtgactttatttatcttccttctgttggggcagccggggcattcttgtggcttggaggaggcatttgggtttcactggtcaaaaaagacgggataattacaatgtatcagtttagttttataacgatagggggaatgaatggtggctgaccagtgtttatggtcctcaaggaggcaatgaaaagattatgttcctacaagaaatcagagaaattagggctgagtgtcctggaccgtggatgttggctggcgacttcaacctcatttataaagattcagataggaacaacaataatttcaataaagcaatgatgggtagttttcgaagattaattgaggatatggccctaaacgaaattcccttgcatggcaggcagtacacttggtccaaccaacaaaatgtgcttgtactggtcaagctagacagagtgttttgttcagtggattgggagttgcacttccctaatgttcttcttcagagtactgcctcacaagattcagatcactatcctctactcctggggcttagggataataaatcc

SEQ ID NO: 108766 - DNA, 450 bp, Zea Mays
ctttagtatgtgacacacttagctaataaatccccaaagtaacatgcttcgtaattacctatcttgtttataatcctttctttcttaccatatgtttataactcagatggtcaatagcaggaagggtggtggaattgatctaccccccaatcaacacagtcggaggatattcagacaaccccaacaacaacaagctgagatggatcctccaaatcctccaccagccggaactgatcccgcagttgcagcccagatacggataatgcaacaaatggcagatactatggcggacatgcatgcacagatgcggcaggaatgccaagagatgcgctaggagagagaggagatgcgtcaggagagaaggggacaacagcagcaagtcccatcgccaccaccgccaccaccacttccaccccaggacaagcaccaggaatttatgagccacaagcc

SEQ ID NO: 108767 - DNA, 568 bp, Zea Mays
ccccgagttaagtaagagtgtaggtcgatcatgaacaaactgagtattcttgaagccttttttattgatgacatatttcccattttacagagtacattgtcgtcccgatagcttttgaaatacagctagggataaaacttcctgaggtgttatatattccatgagttcccaatttatgtgtcgtccatctgagtgagacgatatgatcccggccgagtgacttctgctactatgaatggtccttcccataagggtgacaacttgtgccgtccctcccccgttagaattcggcggaggatgagatctcccactgcaaaggatcatcgtcgcacggacttgtcgtgatagcgtctcagagtttgctggtatcgtgctgattgaattactgtgttcagccgttcttcttcgagtacatcaatatcctctagcctagtagcttcggcttctgctatgctttcaaagaccaaccttggcgccccaaacttgagatcagcgggtaatactgcctctgacccatagaccatgaagaaaggagtatttccatgcagagctcgactaggttgagttc

SEQ ID NO: 108768 - DNA, 442 bp, Zea Mays
gtttccacatatccatctttacctatatccgactctgtcgtctagatccatcttggatggcctaccgaccctaggatcttaccctaaggaggtccctctcgagggaaagatctacttcactcaagatcttttcctccacctgatttcttaatccctaggcgactctacaccgtctagagacgtccagggtagcctgtcgatcctggggcaccccctggaactctccttccttatggggtccctcctaggggatgagttctagagttcttcacgaggaagacgaccccctgcacacgtgtgaactgtccagcccaaaatgcagatcgttcgacacgcgagcacatgagaccctctcctacagcagggtcagtctcgttccacggaccgtccactccgctgcagagagcaccgccaggtggtacgcgcctagtttttggccccg

SEQ ID NO: 108769 - DNA, 829 bp, Zea Mays
gaatttcagtgttttcatagcagttttgatcctttcatttttggtcttggactgctgcaacaaactaatggagctatagttggagaatgcttttggttgaaagggatgggtttgttgccatggtgatttgtgcaataacaaggcttgaatagggaggtgcagatggtgcagcaaggccgtttcagtcacgttcagagtttggtttggaaactgaacaagatcatcccctgctgctcgcccttgtttgtgtttataggttgagatgtgtatggaaaggatgcctgatgtctagaagcctcaatcccaacggaaagtatctagttttggattaatttgtgcctgctcacaggtgcacaattatctattgccccggacaaagaaaaataaaacaggatctagtaaccttatctcagcagaaatatcaagtattggaccactttgtgcttagccacaagtgatgttcccagctgcttttcttttgtttgcagtagaagacaaaatggatattttggctttggggaagggaccaaattcagtgtctctgactggtgctgtgaaccagaccaggtgcagtgactgcagtatggatcaggttagggaataaagaaaaagatcttttacctctcggctgctgtaggaaatattaggttttggggtatttgaagcctgccctcgatggagttctcatcggctgcttctctagttattctcaagtgatattttggtgtagagcttgactaggttcagtgtttctttggacagtgcatgtgagccagcaaagtatatgtgcatgggagccacgttgagttgctcctgcagtgctgctgtg

SEQ ID NO: 108770 - DNA, 587 bp, Zea Mays
gatcttcggctcttatgggttgaactgggttggatgaagtgagctcttggatccgcagggctctacgttggttacgggtgaccaagtaggcctccatcaacttctggacatgctcatccttggcttgctttagggcttcaatagcaatgacttcacgactttccaaggcagttgcatgggcttgagctgtggtgagatccacatggagcttacgattgagcttctctacatcttctgctcgggcaatcatctgagggtggtgccgagccaagaaatcatactgtgcatccagggtgagcaggtatgcagtgaggtacacgactatggggtcgtcctcaagcagctgctgcccttccaatgcacgcatcctggccatccaaacgggacggtttctctgaaagggcagaaagaatcttagcggggtgtcggccacttcttcttcataaatttgatacagggccctcaatgccttgcgagcgacgacttagcaagtgtctttgaatctgtgtcccgcagcagtgacactccattccacatggtgcggactggatccaatgtatacagtcacgacacactttctgtgccat

SEQ ID NO: 108771 - DNA, 435 bp, Zea Mays
gctctttttatgatgcaatgtggcacataaaataaggagatctactatatcctttgtatacaaatttgagtattacaaatcctacccccttaaaaataatctcgtcctcgagatttaggaagatctagggaaaaggtggggaaaatctatgcgaagctcttcttctctttcccaagttgcttcatcttcaccgtggtggctccattgcactttgcacatctttataaccttattcctcgtaactcgagtcagtgtatcaagaatcttgatggggtactcagcataagtcaggtcatcttgaacattaaggtcttccattggtaattgttcctcaggtaccctgagacatttcttcagctgagacacatgaaatacatcatgaacatccgcaagatgatccggtaactccaattggtatgcaacctcacccactcg

SEQ ID NO: 108772 - DNA, 584 bp, Zea Mays
gctccttctgagtgaaaatatacttgagacttttatgatcggtgtaaatgtcacaagactcaccataaagataatgcctccacgattttagagcaaagaccaccacgaccaattcgagatcatgagttggataattcccctcatgctttctcaactgccttgagccataagcaatcactttgccttcctgcatcaacatacagccaagaccaattcgagaagcatccatataaaccgtgaaacgcttaccactctcaggcaaagctaggataggggcgtccaccaacttgttcttcaatgtctgataactgacctcgcaagcgctggaccagacgaaaagaacacccttctccaagagtctagtcaatggcttagcaatgctagaaaaatttggtacgaagcgtcgataatatccggcaagccccaagaaacttcgaatttcagagacactagaaggtctcttccactccaccacaaccgcgacattcttgggatcaaccgcaatgccctgctgattaatcacatgacccaggaaagccacttcggacagccaaaaggcacacttcttcaatttgccataaaac

SEQ ID NO: 108773 - DNA, 595 bp, Zea Mays
atttgatgcaattggaatggatcaaaaaggagttaaaatgaattacttatgaattaaacaagtttttggaattatttcaaaactagaaaacattttctgagttaatttattccatttattcactccatgggctgcggctaggattttctaatagttcatggtttagactgttaaaatcaggacctatgtgcaatgttttcaacacagaaagggatggtgggttgatatgtaaaaagggcaggggctcttttacaaaatgggatcggtgaaggggtaaggagtgcactgggccattagatccagtacgcatggtctcgatttaaattaaccgaggcacgaaccgacccgagatatgcccacgccagaacctagtcctagccctctgattcaatcttaatggctctagattaaatcagcgggaggtatttaattatttaatcctgggcgcacaatgacggatcaacggccccgcaactctcttcttcctctgacctgctatagcggtagagacgggcaccacggcagctcccacgccggtgaacccgactcagttccccccgagtgcgcagaaatccaccctgttcacgatcagccg

SEQ ID NO: 108774 - DNA, 473 bp, Zea Mays
atggagaggtcatcgtcgtctccttttctcaaacggtcctgaagtgatgcaacaacgaactcatctttagacaaaccaagttcaaccctcaagttattgcccgccagtgcttcatcgatgcctagtggcttaccaccgctagcattcagtaggccaaggattaggtggacagtttcttttgtaatctttagttccttgccttgaccgaggcgaattgtcatgtccttgtggtccaacttatccatcaaccaccgaagatgagatcgactgcccagtgcatcaagggtcatgtcgaggatattggaaaacccttttctcgcaatggcttgttgttgcctcattcaatatctaaatagttataataacatcctggggattgcatctcacattgagctattaaaaaatgtatgaaaaattgtaataaatggtgtatcagccatcaaattagcacacagaatgtatgagtttgcaac

SEQ ID NO: 108775 - DNA, 359 bp, Zea Mays
gcgaggtccatcatcattcatcggcttgggaagatccccagcgcgctgaacttcccaactcatgattcacggtcacgcgcggcgtgcagcaggtggacttcacacgaggaacacgtcctcatttctgactgcacacaggccactttactacggccttcgtctccgtttgttaggtcccgggcgacattttagtcggttcatgcctgtactactagctgcggtagcgcgtggggctgcatatatagcgtggtgctcgttttggggccgttgtgcatgcgcgctcatggactgaatatgtacatgtactcacgctgaccctacttatcctactctatgttcattctcttgttccaaacttc

SEQ ID NO: 108776 - DNA, 486 bp, Zea Mays
gagaggagacgagcgctgcgaggggtgtccaccgccttgagctcgccgtcttccggccgccggggatctggaggcctcggagatcgatcggatttggaggcggaggtggagttgaggcggggcgaggctcagcccacgggggagggggaagcggtactgttaaaagaaaaggattaattaagctagaactggcactagatgtgatgtgctgctatgcctatgctctcagttgggttggacaactagaggtggaagctggctggctcgctcttgggtcctggctgttgctgcttgtttcttgtggtggcagatgatacctggtgatgggtttccaattgcagcctgcaggcaggaggaggaggcaagtggggggtgcgccggtgcggtgatagatgggagtattccaagaaattcacacgtcttgataagcaaaagcaacgggagaagatagttgctgcacctttgcgtagaaaagtacatgtggtg

SEQ ID NO: 108777 - DNA, 341 bp, Zea Mays
gtaactcttctgtcgactctgagcttcatgtaaccttctgcggaccaaagcaaccttttcttcggcttctttaacaaagtcgggtccttctagtgtcctctcccctacattggaccacatcaggggagtctggcattttcttccatacagcgcttcgaatggtgacattttgatgctggcttgatggctgttgttgtatgagaattcagcgtacggcaaactagactcccaatctctgtcgaaggctaatacgcaggctctgagtaaatcttcaaggaccttgttgactctctctgtttgaccatctgactgggggtgataagcagtgctgaaatctaact

SEQ ID NO: 108778 - DNA, 276 bp, Zea Mays
atcaaggataaacttggtgatactctatcaaaaacacacagttgcggaggttccaaatagaccaagctcccaagatgatcatcaaatcgattccctgtctaacctcctcatcaaccttggaacttgcatcagaccaccaatcgtcaaaggatgggaatgtaggctgcggtgaaaggctctgcaactttcgttggagctacaagaaccagaattctcgagaaaatacacaagcaaccagcaaaaggttgatcatttcaggctcctggtcacagaggg

SEQ ID NO: 108779 - DNA, 509 bp, Zea Mays
tgatggtcgagctattattgtcaacatttacgcttttgaaatagcgtccgagtgatgacgaagccacgtcagcgtcgaaatgactgatgactacgtcggcgctcttagaggtaacagccgagtgacttatgacgacgtcggcgttttagaggtaactgccgagtgacttgaagacgacgtcagagttttagagataactatcgagtgaatgatggtaacgtcggtgttttagaaataacagccgagttagaacgggctgcgtcggccactttgaggataatagccgagtgatgatgtggcataccggtgccttagaagtagccgccgggtgatgacatggcacgccagcgttttagaagtaattgccgggtgatgactgggtgctttttggaaacggtatctgacccgggaatatcccatatgtattgcgctttcagacgcctctgctttccatgccctagttcttgctttcttgcctccagatcttctctgtccttttgcaattcggc

SEQ ID NO: 108780 - DNA, 324 bp, Zea Mays
ctactaaaggagtcattcggttcggtgtctccggaaagcttagcccgagatacattggaccgttcactatcttggcccgggtgggcagcctggcttatcgcttgcaattgccggattccatggcaggggtacacccagtatttcatgtctctttgttgaggaagttcttgcgggatccggatcatcagatcgaaatggaaccaattgctgtgcagcaggatctgactttggagtgtcgtccggtgcgtatcttggagtcctcagagcgtgttatgagaaagagatcaattaagtatgttaaggtcttatggactaatcagtctg

SEQ ID NO: 108781 - DNA, 373 bp, Zea Mays
tgatttttgacttagagaaaatttgggttgctctatagtgctctccacttgggggctgaatttgggggttttgtgggacctttttgggataatttccttactctttcttgtagatatataaatgtacttcaactttggtataaggtttaagtcatgaaatggtcatttgcataggtttccactaatcccatgcttgggagcctaatggctcaaaggggggtctagggtgttagcatcttttccaaggtgaagacacatgaaaggctagggtattccctctatcatgaccattacttaatagatccatggtttctaaggttttgtgccccttctccccacttaaacacatgtgataataggccataggtgcatg

SEQ ID NO: 108782 - DNA, 285 bp, Zea Mays
cacagagttggacctgcggcacctaggcggccaagaactctccggtgaagatatttctgaattgaaagaattcgcccttgctcgcggatacaagcccggatctgtgctctttggcggcgtgaacgaagagattttggggtgtattcctgaccgtgccagagcaaaaattgttaatactttatcaaagactatcagatttccgaagcttgagcgggacctcagtaactataggagacaacaccttactgggagcttattctactcgaattgtaaggtataaactct

SEQ ID NO: 108783 - DNA, 578 bp, Zea Mays
gcaacttctaacatttttgttccttcagtatttggcttttcggccttatctttactagtttttgcctcagcttgctcggccgagggtgccttcggcatggtggccggttcttcagccttctgtgtagaaggaattcgctcctttggagcagcagctgaagaagtttccccgccaaactcgggcaccacggccggctcaatataacggggccggtgggtgaggactttcaattttttactcttcggcggagactcgcttggagcagccgaagcggcaacctttcaagaggttgcaccctttcttttctgtccccgtggcgggtagcaatagttagggtacacaaatccaatagcatcgaaaaccctatttaacattttcttttttcggctcccgaaggccgcagatagtgcattatcttcggacttggaatatgctccaagtagctcatcgctagtattttcaacacacttcagccagtcatcatctggttcgacaaactggtctccaaacctgaaggtgtatttcaatcgaatcagaccgccttcgctagggttagtgatggtttctttcggcatttc

SEQ ID NO: 108784 - DNA, 358 bp, Zea Mays
gcatactcatggtgacctctaggtatctattgttgtacacgtccatccccgttttgcagcatgacacaacatgaggacaaatagggcaccaggggctgatctaaagggggctctagccccctatatgcatcaaactccgttcgataaatttgtagagatagagaagggaggaggaagaataagaggagagaaaaataagcctctcactctattggagaaagaggtggaggctaagaggagaaggaggaagaataacagagaggaaaatgaacactctactatctagtactgtctctgccactagtcaccacccctccctttagtccatttctagatctgccactatagggcatgattt

SEQ ID NO: 108785 - DNA, 596 bp, Zea Mays
ggaaagagcaatatcataacaagttcggatgctatagctttgtgtaccggtctgatgtgaggtgtcttgtgccaacgttccgaaagaaatggccaagctcttgaatgaagcaatggttttatgtcaagaatgacctgggtaatagggaagatgtgaggggtataatccagcgccctgtatggtcacacttcggcattaggaggccatcgatcgcgagtgggaacgaagtgcaagcatgcttgatggccttccacacggtgtgtacttacattggcactaggaatttggttcaagagcatatttcctataaggtgtggccgcttgttaatgactgggagatgccgaaggagactgctgctggctctagcgaaggtggtatggtttatttaagatacacctatcgctatagaagtcaatttgacgagccgaatgatgactggcttgaggtcattgtggctaccagcgacgagctgttgggagcttatacgaaggcagaggacgaagccatgaccactgccttcggcgctcgtggcaagaggagactgaacagagtttttgatatgatcggattttttatcctgattacttctttcctg

SEQ ID NO: 108786 - DNA, 1289 bp, Zea Mays
ctcgatccttgttaagtggtttcatcagactagatccgatagactaacagtttattctgatttaagtccgttgttgcctctaaggtgagacttgggcacttaaagctagaataatctagacggttccgccacatcctcttgccttcttcacagaaatcctgaggttcctcttcgaacggatcctgattttcaactagagttccatgaactaaggaacgaaggtgctcaatattccatgaattcccaactagagttccatccatccgagatagcctataggattctggacaggtaacttctgtgactgtacatggcccttcccaaggaggggatagtttgtgatgtctttctccacatcggtgacatgatgtagggtttcgcttttttcgacgatgcaggtaatagatctaaagtgaaatgtttcacctagggcaaagttgacggcattggggaagaggatggccatggagttaaatggtgtcaaagttgcctcccctatctgacgcacggctatcggtgtttagcaccggcaatgccctacatggtatcccacatagtgcttttgtggttggcgagatcgacaattagctcgatggttcatgcctaagcacaatgggacacaatataggttcgggtcgcagagatgtgcaataccctacgttttatgtgtttctatgatggatctgctcttgagtttaagattacaaagggtgtggatactatgctctagctagcatatcagatgatccaatcattctaaaggggcccctaactcgccttatatacgtgacgatgctagggttacatgataccaaacagattactattgtgacacctatatccacggaaccaactccgactaacacgtacatgtgtggtccggttggcttgtcttctttgtgtgtacaagaatctgttatggaacaatcgttatcctctgatgggttgggctaattgatcaacccaccaagcctgtccatccgacctatcagggtcctttggcggcccataagctgaatctggcccatggagacctaggggatatctgtcgcccataatttccatgccatacttccgaaggttgcaactagaaccatgttgtagatctctattatatgaagcgtgaagtgtctatatcatccgccattttttgtctgtcgtccgttgcatagaagcggttgcatttgtgcctccctagttctcaaccgcccatgcaccccaccatgacccaacactaccccaccacacatgtcatgccccactacataaccattctacctcaacactat

SEQ ID NO: 108787 - DNA, 325 bp, Zea Mays
gtgccaataaaggagcacacagtgctaaaggccttctgacactcttcaacgtcgctatcaatattcaccttcggccttcggaggccgaagcgggaccaaatggggtgctggataacttcttgatatcttctcttttctttaaatcatttttaacgaaaaaccactcctccatccaggcttcgggccatcttttccggaatgttggcactgggtggcttgcattggggcgagcaataaatccataacaaccgaagttgttgtggtactgttctttgccagtagccttcgtctcatacaaaagctcgtgcatgctgcagaagcactt

SEQ ID NO: 108788 - DNA, 309 bp, Zea Mays
tttggagatataatatcacctaggaaaggcaaatgtagtagctgatgctttgagccgtaagggtcaagtaaacaacatcactactcatttgatgtcacaagaattgtgctgggaaatggaacaactcaaccttggtatgctcaataatgtagaagcaacagttatggaagttgaatctactttggaagaagagattcgtaaaggacaagagtctgatgagaaaatcaaagagatcaagacgcaaattagtttgggtaaagccccagatttcacggaagatgaacaaggcacaatatggtttaagaagag

SEQ ID NO: 108789 - DNA, 342 bp, Zea Mays
agcggacgcagtagcagagcgggcggcaatggagaggaacgagttgtacgccaaggtggaggagacaggcaaggagatgtcacaactgcgtctggagcagatgggaagggaactgggagatgcatcaggaggatcggaagaagaactccctaaccgtgatcagaatcgatttcctcaacaaaacagacaggtgaagcgggagcaaggaaatggaaacagagaagggtgacacccatttgatgctaacaaagaggtactgcctaaacttccttttcccaagtttggcagtggagatccagtggtttggattgatcagtgtttggattatttcactatctatcg

SEQ ID NO: 108790 - DNA, 284 bp, Zea Mays
ttctgggatgattgttctgttcttaaacacatcacttttatgctagattcttcttaagtttcattcaacaaattttggtattactcccttcctccccttttgataaccatattagggaaaaatatgtaccatattgatcgtcaatttgtcaaggagggagccttatcagcgtaaatgtggcattggccacttgagttccagctccaatgcaagttccattggttctccatgcaagagagatgccgcagcgcgacgttctccatcaaggagatccactagccggc

SEQ ID NO: 108791 - DNA, 422 bp, Zea Mays
cggattttttaatagtctaagtcataaaccaaatttgtagtgatctatgtatatcaacttaacagtgctagttatatattccatcgtgtaaagagttaaatctttcggacacctctaaatttgtcatgctaatcagtcacttattgaacttcaaatctagccaccataatactccagtacctgtaaaatttctaaacggttataccattatcgaaaagctcagcaagacgaatgataacctaaacaagacatgtgttctagctggggtatgagaagagcacatagaaggccatctcatcaactgcctaggataaagatataacagtacgataagaaagtcaacattgccgcttcacctataaaaatggatagagctattccgaattgtgcggtcaaatttcaagtaatacagtggagggtga

SEQ ID NO: 108792 - DNA, 512 bp, Zea Mays
ccaactactaactaccctgtttaaaaatgttgaactccccagtatactagattaagaagagattaaccacaaaaacttgttttagtccaaacattaaagaaatgaaaaaggggattaaaaataagaaccagggggcaaccacattttttctagcttacttaagtagcatagttcacaagaaaattttgttaaaccctctgttagtacaaaagaaatgcaccacattttatttcttaaaaacaatgagaacttagaaaaatcctagagaaataatcctaagaagaaaccatctcaatccttgggataactaataatatgctagtttaaatctaggaaaagtataagttgtgttgtttgacatttttcaaatggcaagttagttataagtacatttttgacattaaactttagaaaatcacaattaaataaccattaggtcactttctgtgatttttggcacagagacctactatcacccatgaatcttgggaaaattaaattttagtccagaa

SEQ ID NO: 108793 - DNA, 293 bp, Zea Mays
ggtttactttctaaaaaccgggtgtgacattgccgatgcaagtgggtacgacgactaggcagtacagtgccccaagttcatcctcacgcgagatcttttcacccgccacggttatccactttacataggcacgaatcgcgacggtcggcgtgaatcatggcgcggagatcaccgacggcgacaggttcactgaatcagtgatctgattcaggttactgtaccatgggagctccattcagtgcgcctgaccgagcaagttgaggagccccgttctctaatttccatgtaacaac

SEQ ID NO: 108794 - DNA, 458 bp, Zea Mays
cgacgagccacgccgaggcctaggctataaaggccagaggttggtgtaacgatggcgtcggggctccacgccgcccaccattaaggatacagccagagaagcctaaatgacaagggcgcaagacgaaaagcacgatttactagggtagaatgtctcgttttaccccggctcggcagctccttctaagagaaggagccgataatcaacccatgccttggtctataaaaggggaaggtcggagatggaggaacggacacaggcaacacacaagaagaacaaacgaaccagaggaccacagaggccagagcgaacaactgtgatgtccaaggcttagtagagagctctagtcctgtagttcttaggtctagccacacataagagacttcagagctcttcttccctctctcgcccacttgtaacccctactacgagtattgagcaacaaaggtgtccgcgcc

SEQ ID NO: 108795 - DNA, 561 bp, Zea Mays
cactaaacatgcattcaagttatgtcgactttcatcccacatgaagacctatgatccacatcaagaacctaaataaaaactaaaacacaaaaccatgcattcaaattcctgaacttcatcccacatgaagacccatgaaccacgtcaagaaccaaaattaaaattaaaacccacaccctcaagtaattataaggttagaaaagaaagtgggtgagcatgtcctgtaagaacatagaattcaagcaactgaatacctaatgggctataaatattgtcaccccaaggttctgacaaggaaaagaactcacaggcatacacgttactgtaaccaatgcccattatgcataaacaccagtagagcttttacctgtgaaattgcctcaaaaatttaggcagaaaatcaccctctccagtaaaagttcactatgaaccctagatgaatcacgcgggatactccagttccctacaccagctatagagagctgttctaattcaagcctagataagctacagaccaaaagctcaccactctgctactctactcctaatgcaaccctagac

SEQ ID NO: 108796 - DNA, 462 bp, Zea Mays
cagacatgtctggtgtagtatgtttgacttggttcaaaatacaaactatctgattgtcgtgtcatgtgtgccatccagtgcaacatcggacatgtcaggtgccttattatgactttctccatttcaacaccctctctgagtgtcaaatccgatggagcgttcagggtgccatcagatacatttgatgtcctctatatctcaaagtccaaatttagcatctctacagcttgtatccggtgcacccaccaaatgcatctggtgttctctaggctattccgagttatttcttcgagttctaatgcttgggcttgcttttgtgttgtgtcttggacttttgtgtgacttagacaaatcttcaataagtcccttaaagtccctctaagttctttgcatgataatatgtctaagttgatcttatgaattactttgcacatttttgtccaagtctatgctgcatccttt

SEQ ID NO: 108797 - DNA, 389 bp, Zea Mays
cttagagtcacttcaatcctcacttcctagtactcttatcttattgaccaagaccatcaatcgatcaaagagtgactggagagactcacccttgttacaataatatcttgcaagctcgctttccaaggcttcgatcctatgtctcttggccttaggatctccttaatggacacattttaagaacgtccctaataacacaagcatcctctctaccttgaactttccggtactcttccagacttaaacttcctttaataatgctcacggcttgagcattgtgatgcacttcttgcatcattttcggtgtcatctcttctccttgggcaggcttgatcgtacctatgtttataatataccaaagacttagatgcacaccgattaaatgtgac

SEQ ID NO: 108798 - DNA, 358 bp, Zea Mays
tcttcatccaattcaccggccaccgctcacggactctataaattgggcacgccataagctctgtagggtagtcaagcaccaagccgtgccctcaattgatcaccagagctcgctaatttctcattctccccaaatctgttctccgccaccatgaaagagccctcaccgtggtcagcgtattccatgtctgttcgtgctccctgctctcttgttctagcatccttaagtcctcctgaagctcctcgaccaattcaattgggttaggcttccctggatcgccgggaacacgttagttcctttgactgtccgcactgtctccgtggaccagatgattcagagccttgtttgtaaaattaag

SEQ ID NO: 108799 - DNA, 289 bp, Zea Mays
ctaatcgactcattttgcatcgctcattgcatctctctttgtttcaggagctatgattttagattatctgcatttcttatagatcctctgtatcgctcggcattcaaagacctaggcaaaggctccggttcaggtatttattcatgagtttgcatagagtaatttttacataatattagtaacacgtatatgcttattgatattgatatatatgcacatcgtcaatactgtttatgcacatttgtacagatgtttatgaacattggtcaagatattatgcacaattgca

SEQ ID NO: 108800 - DNA, 348 bp, Zea Mays
ctgggggacaatagattggtgttcggtggggatgcaagcatggtctctctccgaatggtggatcatgaggatttgagcaaagaactgagacactaggttatactggtttaggtcggagccctagtctagtgcagtgctgattgtagtattatagtagagcgtgttacaactattgtgcttgtgtgctcatgtgcccctcttttctaaggaggagggggcttgcccttttatatctcaagggtaggaccttaaagtgggattggtattctactggatagcgaaagagagagagtgaggggagagagatctgctcccctggtagtcgtggtgggtcctccgtagggtcat

SEQ ID NO: 108801 - DNA, 333 bp, Zea Mays
gggtaaacaaaaccaatagcatcaaaaactctattcaatctcttttttcctcggccctcgaaggatgtggataatgcattatcttctgatttggaatatggcccaagcaattcatcacttatagattcgatacatttcagccagtcgtcatttggttcatcaaatttatctccatatctgaaggtgtattttagtcgaaccaactcaccttcgctagacttgctgacagtatctgtcggcatctcccaatcctctacaagcggccatattctgaaagctatatgttcttggattaaatctcttgtaccaataaagaaacagacagtaccaaag

SEQ ID NO: 108802 - DNA, 302 bp, Zea Mays
gagaagaacaaattgtgtagctcttgtcaagccaggaagcaagtgacaaatactcatctaaataaaagtcaaatgtccactcatcgacctttggatttacttcacatggatttatttgggcccacatcatttgtgagtattggtggtaattcctattgtcttctgattgtggatgattattcaagattcacttgggtttattttcttcgagataaatctaatgtgtttgaaatattcaagtcctttgctatattggctcaaaatcaatttgattttgatatcaagaaagttagaagtgataa

SEQ ID NO: 108803 - DNA, 596 bp, Zea Mays
ccggtccgcgacccctcacccatccattgccgatccaacgacggatatcggatccggccgaactacatcttcgaccgaatcccagccgtccgtttaccactccacgacttacgtatcatctccctccccaagcggccggcacagcgacacagggccttcccccgacgacgccatgtccgtcaaaggcggatccgagcccaagcttcccgagctcaaaaccgaatgctactacatcgcacggaggacgaagcagaggtgttaggggcctttttacctggatataggacgcctacgtaccccgcccacgcgatccgtggcgcggtggtgtattcttgctccgtcgagccgttcgccatgccatggtcgatgactccgcatgggatggccatgatccgtcgcaggcggtcctagtgacatgtctcggccacatgctaagcccgggaccgtgacgctggggaaaaatccgggcagcggcttctctctgctccatatcgaacggagcgacactggtgatgaaccaccccgatctagactcgtagcgcagcttgcgatgactggttgaagggaaggggtgcctcggcgtcacttttatattc

SEQ ID NO: 108804 - DNA, 315 bp, Zea Mays
caatcacatgaaaaacaactaattgtgattcctcttttcaagtattgctctagctaaattaggaacttgattccacacaagaggacacattaaagaatttggtattcagaaaggaaaatataggagcacgtcgtcgtaaaaatatgaacgccttccagagatggtctcaagcagtacaaagcaaacttatacactgtgttgtactcatcaggagcattgtactattaaggcgataaggtgtaggttgtcattcctggttctgccattccgattcccatgtccccacccatggcgttctgccatttccgattccca

SEQ ID NO: 108805 - DNA, 292 bp, Zea Mays
gcgcgagcgtctcaacattgttcgggctaacaacttcaatgtgttggtcaacctggccatatcataggaagactgtattgtagctcaccgggcagagaagaagaggaaagcaccaatgttgggaccctcagctccaccccaaaaattctagattatctccagcaatcagagcagaggatttcatcagcaggcaggaagatgggttatcaggccacctcagcagcagcaacaagcacccaaccgctttccagctcccgccctaaggaacaatcaaccccagcagcagcagcag

SEQ ID NO: 108806 - DNA, 283 bp, Zea Mays
tagaaaaacttctcttgtggttgtcgttatatgcttactattattgatgattactccagaagggtgtggccttattttctgaaacacgaatatgatgcttttgaagattggaaagttaaggtagaaaggcaaaccgagaagaaggtaaaggttttgtgtactgataatggcatggaattttgttcagatgcttttaagtatttctgcagatagtaaggtattatgaggcaccattaccattccatatactccacagcagaatggagtagcagaaaggatgaac

SEQ ID NO: 108807 - DNA, 662 bp, Zea Mays
gcccgacccaggaaaccccctttatactcgtgtcgacgtgccttcttgatttccaagccctaacttcactttttcccttcagccattcctctacttccctaaaattctgagcctacttgccccgctggaaagatcgcgatggccccccaagcggaagaggcagagcgccgctgctgcaatcatcccgcccatcgaccccaacagccagctgcccttcactggtaaccatatgtctgtcatctctgaatctgaccttcttcatctcgttgagattggggttttgcttccgaaggagctctgctcttggtggatctgccgcggtatcactgttccgataaaggacactcatgaatctgccgtttatgttccatttctcattcgtgggcttgctcttcccatctccccctttttccgcggcctccttgttttttgagttgaatctgacgcatttgaaccctaactcaattctgcaagttgccattttcgtacatctgtgcgaggcttttcttgggattctcccccacttcggactttggaagtatctttatcactgtcagcccggatggctaggggacaacaccagcttgttggcggcgcaagtttagagcttcaccggggaaggaaagtggagtacctcgatattcctctcaaggacaatatca

SEQ ID NO: 108808 - DNA, 459 bp, Zea Mays
cttgatatgcacaataaatttatgagctcctcttagtccgcataacaaccatatgaactcattctttacctctccggcacaatgatctgattacaaccgtgtacaaacttgaattggatcaccaacaaactctctgactgatcgtcgtactcttgatcatcaccaaactgtctagaacatgtcgaccaccgagagtaacaagcacaaacttttcacttgatctaatcaaggctagtgagaacagtaggtgcacactaactattctcaacacgctaatgaaatcgctaatcgagtgattatcaactctaaaatccttcattagacaaaggctcttcctcacacacaaatgagtttcttcaacggttagaatgggcaagagagcttagagaatgtaagagttgactgtatatttgtaacctctaaccggtcaaatagcggttacattactatagaaaaaag

SEQ ID NO: 108809 - DNA, 470 bp, Zea Mays
gcgtgatggtgaaagagagggattcgttttgtaggggtacctctgcagccttatatagctgactagggagatatatctttacagattgtgaaaacttatctacttcagctattcttgcacgccgactcttcccctctgagttttgcgccgagcaatatgttatctggtcccctgcggggtgcgaacccggaattctgttggcccctctatgatatatgcacatagataatgtctttgtggcgtactctttagaatccatctaaccaaatgtgttatccttcaagtagtacctgtttctcctaaaggttggcccaatagcacatcttggtggacgactcatcgggggtctgtttaagcgccccatggaacgtatccatgcgacgatgacccttgggatatctatctttcacaagcccccgaggctcaagccaaattctgagggtaattagctagagttggcttgaaccatg

SEQ ID NO: 108810 - DNA, 346 bp, Zea Mays
gtttgagatgcaccagtataaaaaataacattggcagggcaatgggcaatagaaaacgtacccattagaacaggttccccttctagtgtggtatcaacttgtgcgtaatacactctcactaccttcttactattttccctttcttattgtttgctggggcactcttggtttgactttgagaagcattggcagggggcttttggaaggtgggttatttttactggggtaaggatggtcctttatgaagtgcccaggttttccacagttgtagcagggatatttggagttagtgcgagttggcaagtgaaggtttgggacatttggttgtggtgggtaggtaggtgca

SEQ ID NO: 108811 - DNA, 365 bp, Zea Mays
cgacacaccgctcagattctttccgccctttcagagaaaccgtccagtttggatggccatgatgcatgcattggaagggaagcaactgcttgaggatgaccccatagttgtgtacctcactgcatacctgctcaccctggatgcacagtatgatttcttggctcgggaccaccatcagatgattgcccgagcagaagatgcagagaagcgcaactgtaagctccatgtggatctcaccacaactcaagccccgtgtagctgccttggaaagtcgtgaagtcattgcggttgaagccctgaagcaagccaaggatgagcacgtccagaagctgatagaggcctacttggtaacccacaaccaacgt

SEQ ID NO: 108812 - DNA, 584 bp, Zea Mays
tgatgagacacggggacacgggtaggtatttattagcttctctttgacgacacacgctgctgctgatgaccatatatatgaaggattcatctcttctctcatccaggcgggccatgcattcagttattatctgtgtacgtacatcgtcgtttgatattcctggttgctttgacagccagagcaaagatattttgtgctgatatatctagctagctagatgaccagggctagccaatagccattgtcatctgtcgctgcatgcgcgtggtcctggagttcacatcgtcatcctagagcttgtcctatggcgagcttggtgtgcgatgcgtagctggcatcatatgcatacatggttggcgggcattcagctgggagaggacagacgacactgtgacacaggatcgatgatattcgttactcgacatttgatctgtagctacaatatctgttttggccaaacgcgacccaatcagcaccctgcacctttggttcccagagcatgcggcttcaaagtaagccctggcctcctctgtcatgagtggtctctacaaaagaatcttcacatatattttttttggcagtac

SEQ ID NO: 108813 - DNA, 309 bp, Zea Mays
gtcgctgtgctggaaggtgttgttgctttgacaagtattggcaagcttcgcacctctgaactaactcggctgcatcgttctttgctgttggccaatagaatcccgacctgaagaccttcccgactagtgttctggatgctgcatgtattccacattgcccagcatggacttcctccagaagttgctttccagtggacgggaggatgcacttcatgagaacgcctgatgcaccccttctatacaatgtctccccaatgagtgtgtagtgagccgactgtctggcgatgcgttctgccaagttcttgtcgt

SEQ ID NO: 108814 - DNA, 530 bp, Zea Mays
ctatagcacctatttacagaaaacacaatttgggtcatcaaacatacagcacatcgaaaatagtacgtacagtccaaaacagcaatcaatacatttcagcttctatacaattcaagaattgccgcgttctagagacttgaattattctaacactttaccaattgttagagttaaaataatcgtttgaggactaacaagtagactcactaattttcatctaagttatttagcgcactaaaattactacaaccaattaacaacacattcttcacgataatcactcaacaatttgtgttttaaattagacatcacatgagcactattactcttttgcccgcgaccacaactatacacattttgaccacaacaagcaatttatcgtgattatgagctttaaccaaaggcgtctaacaattcggctaactagcgcaatcacataggccgctatacaccatacacatcggcttgcccattattatcgcaatcctagacacaacctatatatcacaatcacttacgcaatcgactcc

SEQ ID NO: 108815 - DNA, 516 bp, Zea Mays
cttatcactctatcgaggatttctcgatagtgaatttatgggatagtaagtcgcaagatcgagaactaaaggtaagtgcacaatagacacaagatttaggctggtttggactctcgtcatgagataataccctacttctagtgttttggtggctattgatttgttttgttctggtttgcgctctcggggctttctcgctccaccttttatagccaaggagaggggtggttacaaggatgaatatgagtaggttacatgatatgtctaatatgttaacctagccatatgagaatccaactctctctaatacaagtgtgccttccttatccattaggatcatgtcctatcaacttaggactctaccttgtatgttagaattttatccaatatatttaggactctgacttgtctctcctattccattaatatattttccatatttatacttcttgagtcctcctcgtattagaccttccaataatcatgacgactaagtccacggactctacgtaggag

SEQ ID NO: 108816 - DNA, 328 bp, Zea Mays
gtaattccttctggtaccttgtctcacatctccattgagccaaccttgcaagattagattattatggcccaactcagtgacaagggaatgtaaatcattaaggagaatcttcataagaaagcgaagaagtataagtgttttcgccaagacagcaaggggatattatggtttgaagacatattggtggttcctaaaaataaagacctcaagaagaaaatcttggatgaggctcatctctccaaattctccatgcacccgggaagcaccaagatgtaccatgatctgaagcccctatattggtggaccagaatgaagagggaaatagccc

SEQ ID NO: 108817 - DNA, 393 bp, Zea Mays
caaatctgggcgaagggcggtcgcgagctggctggagacgaagctcggaatctacttagcaaagtatagaaaatctctctaccattaggcctttattttatattttcccttaacatgttccttattacccttgttgttgtcccttttttaggatgatgatgccgaaggtcgatgagccgaagctggttttgaagcgttgggggccttaggaattccttttgctgatatctgtagaaacacttggaaactctttgtacaaggaaatgtattatttgacaaaagagttgttattgaaagcaaacaaattattgttaatgctttgtaatactatttacctttcgcttatatgtcatttggtttggtgtggacgaaaccgacatttgtagctttttg

SEQ ID NO: 108818 - DNA, 342 bp, Zea Mays
aaaggtcgggcacctcatctatatcaagtggtatcagatttccaggttgatcggtgagtttatcgagtgttttttctcctacagtccacaaaaccacataaaaatttaggttagaccttatcccagcacccttttgagcctcacactttctttcaataatctgcattattgaatttgtgtgctttcgcgtcatttgttgctagtcgcattgtgttttccaccattcaaaccctagcgcgccgccaccatctcccatttgatcacgccacaaaccgagtcaaccccgtttccttgtttttctccttcggttacgtaaaaaaacagaaagagaaaagatagaac

SEQ ID NO: 108819 - DNA, 386 bp, Zea Mays
gaaccacacttccacctgcctggcgctgagatccacctgtcgtgcgagctcctgcttctgcgcctgtccaacaatgcatgaaacattcatttgttcgtcagttaatagcaaaaaagaagcagaaattctttatgcagacatgaacaatagattattcaggcgctactactggctaatccttcttgcaatagattattcaggctgttgcaccctttgaagaattgtaccctgcattgtcacaaacaggcatcaattcatcttgtttaacaaaaatcacagcaaatatcttgccttccattaaaaacaacaaagaggcattcagaaaccaaaaatcattctcaaacaacgaaatgaatgtgggcttatgaatgaacattagaattctt

SEQ ID NO: 108820 - DNA, 1405 bp, Zea Mays
ctcctcgcccgtttcctgtcctccccttctcaacccctctcccaccacctcctccctccaacgtagcccctcgtcggactccacttcggaccgggcgaccaccctcgcggacccccatgtggttcccctgatgggtgttgcttcggcttccaggactcccaggctggacgttccaaattcttgcggtggagtgattcctgcccggactcctcgtcgggagggtcttgcctggcgcctcactcttctcactcctataaagaggtgttgttatccaactctgagaggaatatctcctctcccccggtgtccaacaagagatcatcagggaaggcaaggactgtgatctgcactcttcctaaagcgcaaagtcgacatgtgccttcgaaggtggaccatgtaatccctctcttgtaatgggccttgacccagttactcaattatattaatatactcccaacccacattaggattaggtttcactctcctaacacctactatatctgtagagtatgaaatgacatatatagaaagtaaatgcataatactcgatatttttttctcaaaaagcgcacgagaactacacctcattatatattaagaagaaacaaaggtctaaagaagacccagatacaagaacctcatggaggtcagaaaacaagaatacaaaaaccgtctatagagtctgttagatacccatcccttgtaatgggcctggcccagttgttttggtctattaatactggcggctgtccataatgatggacatgagggcgtccagcgcacactacaccgcctccgtcgtgacttccattttcccaacatgcggagtatggtgcaggacttcgtacgggcatgtcccacttgtcagcggtacaagtcagagcatcttcacccggcaggtctcctcatgccactaccgattcccatcgtcgtttgggcagacatcggcctcgacttcattgaagcacttccccgtgtcaacgggaagtcggtgatcctctccgtcgtcgaccgcttcagcaagtattgccacttcatcgccctcggccacccatacaccgccgagtcagtggcgcaggccttctttgccgacattgtacgtctccatggtgtgccgcaatccatggtgtccgaccgcgacccggtgttcacctcgacgttctggcgtgagctcatgcggctcatgggcactaagctgcacatgtcatccgccttccacccacagtccgacggccagacggaggcggccaaccgcgtcatcattatgtacctacgctgtttcacaggcgaccgtcctcgacaatggcttcgctggctgccgtgggccgaatacgtgtacaacacggcataccagtcctcgctccgggagacgccattccgggtggtgtatggtcgtgacccgccc

SEQ ID NO: 108821 - DNA, 292 bp, Zea Mays
ctaacatcaaacaaacttttgacctacatcatgtagtctatctcatccataactatcttaaccatattcccccaactccgatgatatgcactgacctcgaatcaatgagaccaagactggagaagaaaagatcaacatcgacaaggaaggatttaacagtcaaagcgaatctcgagatgaatcaagacttaaacaattcggatgaagtcttttccttgccataatctttcttgcctcaacttgtccagcttatatcctacataataagtagctggatacctatgctctccta

SEQ ID NO: 108822 - DNA, 451 bp, Zea Mays
ttattttctccactttgccacttcgtgagtcctgccttaactctatcccttgttatgcttttcacgatcatctttacccttgttgcctctatatcttaccttgatgcttatagtatacccgtcctaaaaaaaccttttctcctccatcctaatcttatagttgtattttacctatttaccctcggtcgtactgtcttcattgtctcttgcgaatcttttaactccaccctttgttgtttgttattacctttaccttcgtcgtctctccatcttaccttgatgactatcttatgtctgttatctaaaattccctcacccatcttgattcgagggaagtgttttacttatcctgcccttggtcggaacctcgtctttgctaggtgtgagtcttatcttaactccatcctttgttgtactcataccactggctcttctgtgccttcatcttttc

SEQ ID NO: 108823 - DNA, 500 bp, Zea Mays
tttctttctctttgtcgcgctttcttcctgtcaacattaaacaatatatcatacgtcaatagttcaaagcgtcattatgtaattatattagtgtaaataacaatttgacttacaggttcctcacgtcttgtgcagttaacgggatattctctggtccaccatgcatttccgaaacaaaatccataatacagtgttgcggaatcctgctttcttgcatcgcactaaggaactccatgtatttgggatcatgtgtcttgttgcactgtaactgattcttttctgtatccttcctgaagaactcatgattatgttccaaatgaatcagatcaatctgcaccgaaataatattctctttggcatcgtcatagattttttttaagtttcattctagctttgcattgtgttcgcttggaacttgtattacgcacttttggattaccagatcctcttccggcacgcttgccttctattgaacaattcaaccacttgcaattttttct

SEQ ID NO: 108824 - DNA, 494 bp, Zea Mays
catttgtgttgccttgttcttgatttatagctttcgagaacaagtgaccaacaagcctgtaactcacttatggccgaacgagtctagacctgagtcccctagttgtctataggacccacaacacgatgagccgcgtcaaggctcatgctatgaaggtcagaggttggcgcgtcacaggaagatcgaataatgatgacacttgagctcctcgttgtccatgcaaccagacttaatgagcccgtccaaagagttaagacaaccaagacaaatatcgacaaacatgtttcaaccaagagtaaatgcttctgttgtaccccaacaccataaactccttccatgagaatccacttgtaaccgaccctccttgttttataaaagccaaagagcacaccgccacgacgtttaaggcttagctaggtagcaaacaccagatctgtagtccacagaacttactacacataagagacttgcgagctcctccaactctcacccac

SEQ ID NO: 108825 - DNA, 406 bp, Zea Mays
cagggcgcggcggcgctctacccccacggtggttcgcacaccggagcaagccatcctagtgttctagtgcacgaatcttccccggacaggtgctacataatcctaggatcaagtcacagctatttataggtcttaccagagagtgtatcagtggagggagggcttttcacggctaatggcggcttgactgcaaagcttccactcaggcgagcaatcgtcctacgcccgcaccaactctaagtacggagagaccacgaacgtaaccgatgcacctcggtgaacctcccaggacacctgtacgaccttaaatggcgatggtggcgagtgggaggtaaatgacggcatcgttaatcgagataaatgacgcaatcgagataaatgacgcggcgggagcggccggattata

SEQ ID NO: 108826 - DNA, 298 bp, Zea Mays
gaagcttggtcccttgggtggaaacccaaaggatcgaattctctggtgcctatcctgttgctgagctcggaggacttggaattttctcttgaggtgacccttttcttcttccctagccctttctacttgtatggccttgtttgagaggtgtgagaagttgaggaaatcttggctagcaaggatagtcttgagttctggtctcagccccttcaagaaacgggccatcttcttggcttctgtgctgacatcgtcaggcacatagcgagccaattctgtgaatttgtgtacgtactcactg

SEQ ID NO: 108827 - DNA, 333 bp, Zea Mays
ccggagcaacattaatgttggaaaaagaaggtaatgctaaagaatctgaatctcttgccctcggagcgtctatcgaagaattagaattcatagtacgacatgcttcggggaaaaattatcgaaggagcaaattgtcgaagcgcaacactatgacagggatctgaagtaccctcgagggtcgttggtgtataatggtgatgatgaagatgacttcctttattgtctgccagaatataaggagatacatgtctgtcgggagatggcagacaatgtaggatatccgaagcttgaactaggcttgtctgcaatgacgaaggaccagcttgcagtaac

SEQ ID NO: 108828 - DNA, 716 bp, Zea Mays
gtagattagggtttcaaacctgggttagaattttgggatgttacaaacctaccccacttaaaggaatctcgccctcgagattcagacggggctcgagaaaaggtaagggtattccttcctcagagagtcctcactttcccaggtggcttcctcttctccatctctgctccactgaaccttacagagtctcacttctgagttgcgggtccttcggactgctgagtcgagaatcttcactggcttttctcggtactggagatccttttgaatctgaattgcctctgcctcgatgtggttttctgatacttgcaggcatttgcggagctgagacacatgaaacacattgtgaatatctaacatggattctggtagctcaaggcggtatgctgcgggtcccactcggctaatgacgggataggggccgacgaaacgcggtgctagttttcctttcatttggaaccttttgacaccacgcattggggagaccttgagataaacgaaatctccttcctcaaatctgagttctcttcgtctgttgtctgcataacttttctgtcgactctgagcttcaagtaacctcttgcggattagggcaactttctcttcagcttctttaacaaagtcgggtccttctagtgccctttcccctacattggaccacattaggggagtctggcattttcttccatacaatgcttcgaacggtgacattttga

SEQ ID NO: 108829 - DNA, 807 bp, Zea Mays
caatttcctatggcttaatgttcctttcctttttcttttcagttacaattgcctctatgatgcttttctaagttcaacagtttgacatgccatactcattacaatatttgttgcatagcaagaagaaaaatactggtcacctatctcctcctagctgtccactcttaggtgctgacagagaaagttttttttctttcatttgaagttttggctaaggacgtcactattgtagcgagtaaggtacatattatgcacatttgtctaacaatatatatggatatatattgttttatactatagtagattctgaattaatttcaatgaaccgtgattcatttccatgtgcagtctgaaacaagggtgcttttttcccaacacaaatagcacaaattacctggggcgtttttacagataaaataagattatcttcttagaacaacactagctgctcatgatgtgtctaccttctggtctctatgataatgtttggtttgttacctcagtcacatcaactaaatctaggtcatatccataaccatgacattattggtctcatcctgatcaatttgttaggaattatgagattggtaaaaaaaggtccaattacatagttggttaattaaatgtttaataggtcaagtatagaaccatcgaataatcattcttcattgctgctcacattgctcattaaatacaagttatcactgttgagaccccaaataatataggactgaagaaatttcagaaacaaatagttaaacataaaatgcaactcaatgttttttgctacaacatgtaacctaggca

SEQ ID NO: 108830 - DNA, 825 bp, Zea Mays
gttttaagtatcaatgagtggtgatgtcatgtacgggcgctcgtacgccaggcagcgtcacgcccgtaacaggcgccacgcacaggagcgcgatctgggagggcacgcagatctgggagatccgcaggagcatatggaaagtagtggctaggaaggaaaataggagaatggaaagtagaaggaaggaaaggaggaagtgattagtgttaccatgtttaagcttgcctaaaataaaggagcgattggctccaggacagcaagccgatggctatatatgcggcacagggagacaggaataaaggcaacaaagaagttatctcttctccacctctctctaccaactaagcctacggctgtgggggataaccacgccagagaagacgacgaaccgcggctacaaccttcgtagccgagggccccctgctctagacgaccaggcccttgacaacctggtatcacgagtcaggcgatcttcgtcctctcgatcccacacctccgatcagtccctcgacgtcacccaaccaccacctagccctccaccctcaccatcgtcggcctcctccattatgagcaccaaaaccatcgacgatctggctgcgatgatcgagaagctcacgggcacgatctctgtcctccaaaatgacgtcgagtcgttgaagaaggacaaggcgccttcctcctcgccatccggcagcggcggccagcaccacatcgatcgaccgccaaggttccaaaagatagacttcccgcgttttgacggcaagtcggaccccatgctcttcgtcaaccgctgcgagtcctactttcatcagcagcggatcatgg

SEQ ID NO: 108831 - DNA, 336 bp, Zea Mays
cctcactctcccaggtagcttcctcttctccttctctgctccactgctctttgcagagcttcacctctgaggtgcgggtctttctgactgctgaatcaagaatcttcaccggcttctcacgatactgaaggtctttctgaatctgcactgcctcttcttcgatgtgactttctggtgcttgcaggcatttgcggagctgggatacatgaaacacattgtggatgtcggacatggattccgataattcaagacggtatgttgcgggtcctaccctgccaatgatgggatagggaccgacgaatcgtggtgctagcttcccttttacttggaacctcc

SEQ ID NO: 108832 - DNA, 744 bp, Zea Mays
agacttcttgttctataattttattagttgtgtactaaatattatacagtcgggtaaagctatacctaaaaaaattcatcctccgccattgagctaaatcaaacagactctgaatcttgtgtgctattataccattacaaaagtttagtgatcagatgtaacactcgtcagtttggttttcgctctttatttggtcttcacggtgtcccaacgctatcctctctccatgttgcattacattctcatgcagtcgtgctcttgctaaacccgagcaaccggcccactttccatcaccgttgtcaccaaactaggaaagacctcgagttgttgtatcgagcttgagcactatcgattcaattgcctagatggatcacgacaatgacaagaactgcatcgtgttggtgagcctcacaacaatggcaacggagaacaacttaggcaccgctgcctcttcaaaatcctcataatttttctcttgaaccgtcctggtcttgcagccaatgaatgtggctccacccgtgagggcatgactatgttcccccaaggctaagttatattcctcctgtagtgatgggtctaaagttgagtccttgtccctccatcacattaccattatcacgcggatatcccgatacacacccatgtttatgtggtgctcctagacaacatcttcatggatgtgctgacgtgtgttgcacttcctcctctcccgactcctagacaacatcttcatggatgtcagat

SEQ ID NO: 108833 - DNA, 474 bp, Zea Mays
tgagtatattgctctaggagaaaagggcaagaaaagccaaagcatgaataagttccgtcaaaaactaggtcggcaaagctatactgtacaaaagagaaaatgggcaaaggaagatgcacaagcattaactgagggtaaatctattccatttcaagacatgccagatggtcgtcataaggattgggcaagggtgaggaatccttctggtgacgtgaacataacagagtcgcatccaatcataaagaaaattgtaatgttcctctccacacataacttgtccatttaattttcttaccctatttgattcacacataaaactgttttttcaggtagatgtaaatgaaaagtcagtagctagtacctttacaccattttataatatggacatacttgcaacagcaatagggagtaatcatccagggaggacaacaggggtgagtgcttatgtgggtttagggatgggtcttgctcaag

SEQ ID NO: 108834 - DNA, 340 bp, Zea Mays
gcaaaatgggcgtgtacatggagcctttgatcgatgaattggtacgtgcctgggaggaaggggtatggacgtatgaccgagctacgaagacaaacttcaggatgcatgtttggtaccagtactccatgcatgacttaccggcgtatgggctattctgtgcctggtgtgttcacggtaagttcccatgcccagtttgcaaggaagctctcaggttcatttggttgaaaaagggtggcaaatattcgtccttcgataaacatcgacaatttcttcctgatgaccatccattccgcctagacatcaagaactttacgaaaggtgtcgtagtgacagaccgccc

SEQ ID NO: 108835 - DNA, 526 bp, Zea Mays
ctggtatatgccccaagcaactcgtcgctagtagcctcaatgcatttcaaccaatcgtcattcggttcgtcaaaattttctctgtatctgaaggtatatttcaatcgaactaatccaccttcgctggacctagcaacagtctccttcggcatctcccagctatccacaagcgaccacactctataggctatgtgcttttggattatgtctcttgtgccaatgaaagcacagacattactgaaagccttttgacatgcttcagcatcattttcaatcgccaccctcagccttcgaaggccaaagcgataccagatgagacgttggataatctccttaatgtcctccctctcaatcagatcattcttgacataaaaccattcctccattcaggccccaggccatcttttccaaaatgttggaaccgggtagcttgcattgggacgagcaataaatccataacaaccgaagttgttgtgatactgttctttgccagtagccttcgtctcgtataatagttcgtgcatat

SEQ ID NO: 108836 - DNA, 513 bp, Zea Mays
accaacgtccctgcacaggcctcccattcgtgcctcatagaggagatgaagaatcaaatgctgcattggattgaagaagccgggtggaaatatcttctcaagcttacacagtaacacgggtgccaatctttccaagtctacaaccacggtccgagataactcttttgcacaaagttgacagaagaaataactcaactctgaaagcgctagccagacatgctcagggacatagcctcgaaccatcgcaggaagaatccgttcaatccatatgtggaagtcatgactcttcatccctaagactcacataatatataagttcaccccctacttaggttagctgcatacccatcagggaacatcaacatcttgatccactgaagtacttccttcctttgggccctacttaggacgaaatcggccttaggccttctccacgtcttttcgccacttggcggcttcatctctaggtttggtctatcacataacgctgccagatccactcttgccttcatg

SEQ ID NO: 108837 - DNA, 438 bp, Zea Mays
acgagatatgagcatgcggttggaagataggtcaagacactggtagcctttgtgatcggagagtagctgagaaagacaccaaatagatcgaggagcaagcttgtgcggagcaatagcggcagtgttagggtaacacgcacaaccaaaaactcacaggtggtcgaatgaaggtgctgaaccaaatgtagctacatgaggacagacaacgttgatcgtctttgtgaggagaccgttaagcaggtaagtggcagtgtggagcttcttatcccgatatcgtctatgaagggatgcctggatcaacaatgagcgaacaacattgttaatggaacgaacaatatgctcgactttactgttttgaggggtcgtgtaagggcagaacatccgcagctgagtgcctttggagagcagaaaagtttgggtagaagaattatctaattc

SEQ ID NO: 108838 - DNA, 1198 bp, Zea Mays
tcatgtcactaccacagaagtaaacacatccccttgccgctatccacgcctcgcagcaatccaacacgtaggaatcccattgccggtgacgcgcaggaccacccattgcctattcattctttccatgcaccgtggatgccccgcccattatccttctcgccccaaacgcaatccacgcctcgccaccatggaaggaatcgcaacccaatcccctcatcgccatccagcgcacaggaccaccgtcggcccgcatcccatcgcaagtgcaggaccaccccgccatctcattctttccattctacgcgtcagccccgtctggatcttccgatgctcgagtacttcccattctacgcgccagccccgcccagatcttgcgatgctcgagtatgagatggaagacacctctctgagcgctcaaatctgaacaccacacctttcttcacaaacattaatatggtatgcagtatgctatccaaagttttgtctaaaaatatatctacctgacctcaatattcatggtttccctttatatgaaactgtagttcctgacagatcacgacatttatatgaaacagtagacttatccaaattttttgatggttcaaactatgtcctatatatctctactactctataagaacctaacgtagaccgtggtgcacggttctgctttctcacgacgcatacaacccacatgctagtgtctcccttcttccccgtgcgcgccctctcccctctacccctgcatccgcatggtatcgccgcaatcccctcaccgattaatgcctcagccatggaaggaaaaatcccgtcactgccacagaaggaaacacatcccctcgccgctatccacgcctcgcagcaatccagcacgcaggaatcccattgtcggtgacgcgtaggaccacccattgcccaatcgttctttccatgcatcgcggatgccctgcccatatccttctcgtcccaaacgcaatccatgcctcgccaccatggaaggaatcgcaacccaaacccctcatcgccatccagtgcacaggaccaccatcggcccgcatcccatcgcaagtgcaggaccaccccgccatctcattcttcccattctacgcgccagccccgcctggatcttccgatgctcgagtacttcccattctacgcgccagccccacccatatcttgcgatgctcgagtatgagat

SEQ ID NO: 108839 - DNA, 330 bp, Zea Mays
ccgagatctaatcatggccacacgatcccagatcgaaggccccctagtttgtcttccccaactcgcagaccgcacggcggcggaacacatcgccacggcagtgaggcacatcggcgacgcattcccagtactccggttccatccacctgacaaactccctaaatcgcagtgggatgatacggaaaacagtagggaaggattctcaccaaagatctatgtagcgacaatagtgtgcggcggagagcggatccacggcgattgcgccgcgccggtgagaaattcactgataccagtgcacaatcccaccagtcccggtcgcgagcacctccc

SEQ ID NO: 108840 - DNA, 895 bp, Zea Mays
tcgtttggtttcatttagtcttaaccaaaagaaggaaaactattgatttttgtaaaaaggagatgttgagttcctacataccagatatctcgttacgggaatctgcacaactacaatcctttgccattgtttatgatgataaattagtctctgtacccattgcctcaacatttttataacacaaacaacttcaccaattttctaaacaactacaaaatcaaagcaacatatttacctgtttatgttgtcacctaaatatggctaatgtgtgtgggccttgcgctaggtgttaaccgctggctgaccctgtgtatatttggttagggagatttgaggagatttgattggtgttgtttccataaaccataagatctcctcacccctatacacacacactaggtttctcaaccaatcaattaatctaccaattccacgcaatcttattctccttcatggtatcacgagtctaggttaatcacttgtttcactttctccatctagggtgtgcctctgtccctagcgctactgctcaatggtgaccctgcctaaagctccttcctctggcgccactgtcgatctcgatggccctgtcacccacccctctactgctgttgatctccagtgcatggaggactcccatatcgccaaatagaccaacaagcgtgtgacacaactcgctcgtgacgctgctcctgcccgcacctaggaagtcgagtgcgagtctactcttgcctagcaggagcacgatacggctgacacacacctttgggccgtcctttactgtgttgcttgtgagcgtgtgacggtcgggcccaaataggatgataacattgccaatgacgatgttgtcaccaacactggcactcatgccgacgaccctcctctcattcaagtg

SEQ ID NO: 108841 - DNA, 400 bp, Zea Mays
caaccaggggcctagatgctttcaatatccattagagggaccatgttcaaggcatttgtagctaaattcacacgagtcgacatcatgtgttactcaaagcatcataccccaatcgacacaagcagaattttgcagtgtcattccttggatgtccacgaacatgaagagggagaatatgatctgagatagtaccaaaaagaagacaacaatcagtgagcaatcgtaaagaccatctgacacccctactagccatagatgtacctataacccgaatagcaccggagggccttagctatcgtaacagaccataaaataccatatagtccttatatttctagacaaccccggtagcctctaaggactctaagaaccctacacgacccagagggcttagacccgt

SEQ ID NO: 108842 - DNA, 1226 bp, Zea Mays
caacaactgaaaaactactgtcaggtgttccaaatgatctccaaaagacttgctataaactaagatatcatccaaaaaaactaaaacacatttcctcaacaatgatgctagtgtggtattcatggcattctgaaatgtaccaggagcaccagataacccaaatggcatcaccacaaactcaaaatgtccagtgtgcgtttgaaaggcagttttaaattcctctcccggttgtaaccgaacttgatgatatccagaaatgagatccaatgtggaaaaccaactagctcccgccaattcatcaatcaactgatcaaatataggtattggatacttacttttaaccgtcaaagcattcaaataacggtaatcaacacaaaacctataagacccatccttcttccttactaaaagcacaggagagctaaaagaggatgaactaggcctgatcagaccttgttgtaacatagagttcacttgcttttcaatctcatctttcaaagatggtgaataccggtaaggtcttacagacactggtctagctccggcaatcagtggaatagaatgatcacaaggtcttgaggggggtaaagcagttggagccgacaccaccccaggaaacttgtctagcaagattgcaacctcaggcaacaatgatggtgttgaaggcttcacctctggataggacactgaagcaatatgaatcagcaactcctcactcttattgtgccctgcaccaaacaaacatacagtggtaccctggtatgtaatagacaaccatttctgacgccaatgaatctccatagggctatgattttccaaccaatccatcccaagaattagatcataactctgaatgggtagcacttttaaatcttggtgaaacaaataatcctgaatggacaactcagcctgcccccactgagatgtgcactgcatcaggttgccattagcgaccttgacagaaacgaagtttcctgaagtaccactgaagcaaattttggaaggacaaactgactcacaaaagagtgagtactaccagaatcaattagtatatatacttctacttgttgtataactcctatcaattgtagcaccccttttttagaattcccagtcaccacttctggcagcaccaccgaaaacagctgctcttcaagtgcactctctggctgtggtgttgtagtgtcctcctctgtaggcaacaactcccagacttcctgtatagc

SEQ ID NO: 108843 - DNA, 393 bp, Zea Mays
tttagaaagaaagccagggccgaaggggtatcaaccattcacagccgtaagatcatgattctatggcctggattagatctagcccaatccaaaccggtacgcaggcacaaccgttagatcgaggattgatggcgtagatttaatgtagcgtgcgttaaatcggaaccgcacgatctagatcgacgactcagatcaattcacgcgaaggggttaacgcattctaatcgtagccatccattaaaagatcgacggtccacgtagcttcttctacccccgacggacgattacggccgcgccgccaggatcccacggcggagacaacaccggagcacaccggagttgtggggattctcccactggtgtactattctcccaaccgtaaggtgctacgcg

SEQ ID NO: 108844 - DNA, 439 bp, Zea Mays
aaggtgatcccatgtcccctattcttttcaatatcatagcagacatattggttgttctaactaaaagagcgaaagcagacggtaagattagtggaatcattctgcatcttgttgatgatggcttgttagttttgcagtacgttgatgacaccatcattttcatgaaccatgatttggaacaagcaaaaaacaagaagcttttgctaattgtcattttgaattactgtctagattaaagattaatttctacaagagcaagattttttgctatgacacaaccaaagagcttgaagatcaatatgcttaactttttggatgcaaattggggattacccgtttagatatttggggatacctatgcatcacaaaaagcttcgaaacagtgattggaaaatgatagaagattgattcgaaaagaagctcaattgttggaaggctt

SEQ ID NO: 108845 - DNA, 319 bp, Zea Mays
tgcggtggaagcttctccgcgcgtggtaggtgctgaagttattcctagtgcgagtgctgggcgtaggcggcgaagggcggtcgcgaagcggagggttagtgaggtggagggaagtcgtcttcgtgtggacggggctggcaaacgagaattgttgtcctcgccggctgggacgagtgtaggtgagggggagttgcggaatctttttgagggtgaggagctgaggataatgctgttcaactacagggagatgggcatcatccctaaggttgagccaatgtaatgtgtgatgccctcgctgtatgtatgtacccgtgatttg

SEQ ID NO: 108846 - DNA, 394 bp, Zea Mays
ggcgtgggacatgctctaggggccgatgagatccctgaactggagggggagccggtcgtctttgagccgtttttcatagcctgtttttgcttgcctgtgcatcgctttgtttctgaagtcctagcttggttcgaagtccagctccatcagcttacaccaaattgctatggtggtgttggcgaagtttattttggtggaggctacatatggggggatcctttggtggatgtcttcgtgaagaattactgccttcattggcagaagaaaagtcatcggtggcaagattgcacagtttggcacgtgcacgctcacgtcgtggactaggaagacttcaggtgagattgtgcctatgcgaagaacaactaggggaattggtggggtttttggttttatg

SEQ ID NO: 108847 - DNA, 563 bp, Zea Mays
taattaagtgatgatcatgatagaaggaataccctagcttttcatgtatctcccttttggaaaaagatgctcaaaccctagaccccccttgagccattggagccccaagattggattagtggaagagctaagtagattgccaaatcatgacataaaacttttacaaaagttgtagcacatttaaatacctacaagaaatagtaagggagttattccaaaaaggtcccacaaaaaccccaaattaagcacccaagtgcaaagcactcgagagcaacctatttttctctaagtcaaaattcagccctcttctaaagattagatatgttcaattagttgcaaatgccaaatcaacatggtccaattgacaaaaagacgccaaattacccaaggcacacccctgaaaaatttgaaaccaaaccaaaaccgtttgacatggtttgacacgagttttgtctcgggttgaacagtgccgacaaccctaacttggcacaaccatatctcacaaaccagaccaaatcttcacttggaactcacacaaactagatagccctaggtacaaagag

SEQ ID NO: 108848 - DNA, 354 bp, Zea Mays
gtttggcattatgtaataaaggtggtgtacttacaacctgtaataatcaagtataatttttccttagatgccatcaagaactcgtgctcaagatggggtgggaacttcccgcggcggggaggaaactccgaacccgccacctgtacctcccacattggctgaggctatcgctgccttagttaatgctaccactgacaacacacgtttcctgcgtgaattggcggggaatcaattttagcaacatggaggcagaggtcaaccccaagggccccaagacaccacgtacttggagttttctgaaactcgtccaccgctttttgttaaagctgaagaacctttggaagcggatgaatg

SEQ ID NO: 108849 - DNA, 412 bp, Zea Mays
ctcatggtgcactttactagtaagtcttttcatctcgagataataacaaacatgtgattgttcaacctagaactttgtgtgtggattgttgtaatatgtatcatctgtcattcatccatagatccctagcataagaagttactgtactatacctaaaaagaaaccatcgatatctaccaaattcctacaatttaggactacatattccaaagttaatgagggaccgaatccatgccagaaccttatcttggctagatttacacacatatgttatatatactatcttggtcataggaatgtaagcctaattctgtctatcatcaaactatcaaaagccttcaccaaaaatatataaaaatcaatacttttgacataaaataagtgtaatataaaaggaactataaatctaatg

SEQ ID NO: 108850 - DNA, 531 bp, Zea Mays
acaagcaatagaagctaacaagacatggagttggtcagaactgccaaatggacagaaagtcataggactgaagtggattttaaactcaagaagaatgcagcaggagaagttgtggtgggagtatatgttgatgatctcataatctgtggaccatcagtagtaaaaatagaagaattcaagaggcagatgatgcacactttcaacatgagtgaccttggtttgctgagttactacttgggcatggaagttacacagaaggagggtgagatattaatctgtcaaagttcatatgcagcaaagattcttgagctgtgtcacatgactggttgcaaccccattgatactcctatgaaacaaagaataaaactcactgctgctaagaaagggattgaaaaggatgttactagatacatgagtgtgattggtagtctgagatacctagtgaacacaagacctgacttatcctttgctgttggacttgtgagcaggttcatggaaggtcctaacaaagagcactggacaacaattaaa

SEQ ID NO: 108851 - DNA, 450 bp, Zea Mays
ggtagacatggtcatttgcttaaaaagcgatggttgattgtattgattaatatatcttctattaatgtgtttttcaacattgacattttgtccaaatggaacatctagcaatgaacaaggaacttaaatcttgtaatttcgattggttgaacaaaatatgtctgcactcacttcatttttagtaggccatagcggcagtacaaattttgaagtacaaccatttctattctgtgtttggcagttttagcacaattcaaacaactcattccccccatagattctgtgttttttggtcttgtcaggatgttgtagtacattgactggtaatgttaggtcacacatggttggattatccttagctctaatgtcagaattagcagtatatcttttcacttccctgtgagtatcaacaaatctcatgatatcagcacgttcattcatgtgctttcc

SEQ ID NO: 108852 - DNA, 791 bp, Zea Mays
gcaaacagtggcttttgcgtctctgtgcatcgaattaacccaaacgtctgttccatcactcttacccattcatcgacttctagaggttcttctgctttgatgaagagcgggggtcgagtctcagagaattccaaataagtagtatcacgcagtccttgaggaggagctcttaccctgtgttgttggaactgattgcccgccatttcacgcaagaagcgcgtattatcagcggtggcattgaccagggcagcgatagcctcggccaaagtcggtggtactagtggcgggttaggagtatcctccttagcgcgggaagtccccgcaccatcatgtgcatgggtccgtgatggcatctgaggcaaagaaacatttggaaaaaaatataacatgccaacatacaccatcatattacattaccaaaatgtaataattatacagactccagtgtacaacttgacttcattacttattttacataagtataatacctaactatactattctagtcttcttcatcctttgttgctccatttcctgtggcaggagagcgttcatcagcaagattcatggaaggaggtggcctaaataggtctagctccaatcaggtccttcatttgctattcctgatggtccggctcccattgcagcaacgtctggaggcatgtccgggtgcagtcgagcatacaatacatgcacttcttcatataaagtattacggtacacttgcaggcttttgaggaatgtgctaagctctgccacacgagctagagctttcgcttcacagtcccacg

SEQ ID NO: 108853 - DNA, 292 bp, Zea Mays
tgatgacggaatcccatagatcctttcacacatctcgttagagcaattagcaggatgctagcgctgatggtagtgtttggtattgctagagaaattgagaacgctgaaacataatcaaaggccagggcatagtaattactccccctatccccaaacagtgacctaatcacaaaacaataacagaaaggagacagtagattggcagggacagaggtactgttcacctgaccttagtggcgaccccaagatcctccgatgttgttgtcttgtcccgatctctcctagcctcatc

SEQ ID NO: 108854 - DNA, 534 bp, Zea Mays
cggacatcaggtcacttgggatgaatttaaattggcattccgtgagcactatattccagaaggagtgcttcacatgaaacaagaggaattcattcgactaaaacaaggagggtatactgtgatgcagtatctcaacaagtttaatcatttatcccatatccgattgatcaagtaaacactgacctgaaaaagaagaattgcttcatgagaggactcaatgaccggctccaaaggaaaatggccacctacctagatcttacatacaacagggctgtcagcacggcgttggcagtagaagctaagaatacatgccaagaaaaatccatgggatttggaggtgacaggtccaatcagggacctgagaagcgaacaaggttggtaatccaacctttcaatcagaatcattcttcgccttgaccaccctcctatccgtttaaacaccctgttttcattcattctaccactgccccacttctacaaatcaaccgagtgcccctggtgctcgtttccccgccgtccctagttcttcaacta

SEQ ID NO: 108855 - DNA, 1054 bp, Zea Mays
agaggaatagggccggcggttgaggaggtaggtggcggtgacgagcgcctcagcccagtaaggtggcgacatgtgggcatgtatgaggagagtgcggctgatgttattcagcgtgcgaaggatctgttctaccttgccgttttgctgggatgtgtaagggcaggaaaatcggaaaagaatgccacgagatgaaaatagaggtgagggtgtggttagcaaattcagtgccattgtcagcctggaaagattttattgtgacgccaaattgggtttgcacaaaggcgcagaaatcagtgatgtgagaggctacttcagatttgcgaataagtggaaaagtccagcaaaaatgagagtaatcgtccaacaaaaccaaatagtactggcaccctgatatgctagccacgggagacgtccaaacatcgcaatgaattaaatcaaagagtgcagaattgcgtgtttgagaaggagtaaaaggtagtctcacatgtttgccaagctgacaggaatgacatagaggtggttctactttattacaagaaatggcgaaagtatttctaagagtattaatagcagtagaagacggatgaccgagccgagagtgccacagggaggtggtgatggcaatggaggcgtgcggtgaggtgtgggtggcagctggaatggtgtagaggtccccatcactatcgcagcgaagcatcacgcgacgactcgccatatccttaacagaaaaaccaagagcatcaaattcaatcgaacaattgttgtcacgagtaaattgacgtaccgagaggaggttacgaacgagggagggaaccactaggacatcactcagagtaaaagtggatgaactggtaggaaggacagaggaaccgcggcaggtgataggtaggttgtgaccattgccgacagtgatggaagtataagagggtgggagacgagagaggagtataccatccgtagacgtcatgtggctggaggcgccagagtccatcacccagctgccctgtccctgaagggcgagctggtgcaaggcggcgatgaggccggattggtc

SEQ ID NO: 108856 - DNA, 748 bp, Zea Mays
ctcccttgtccctcctttgactcattcctccctctctccaccgatttatgccttcaattcgtgcatccatccttagcatcctcttctccaccaattgacgccttcagttcgtgcattattcctcatctcgaccaatttgcacctctgattcacgcatccttcctctgccccccaccaattcccatccccattagcatgttgtcacaatctcatgggcacacatgtatctctctctctctcatacacctccctcttatggttgttgcttgaacgttgcattgcccctccagcttgtgtctgctctgctgtgatgcacctgcttgtgcctggatgtgaagttgtgaactgctccgcctgcttgtcctagactgctagtgctaggtgcccagcagtccagcacttgtgttttgtgctctgcaagtttgctgctgcatagccatagatccagagtgcttcactgctatgggtgaatgtgtgcctgtgctttactgcctttagttagtttgttcatttttagctgattacagtttacagattgtgatatatgtctctgtgttctgtgacagctcacagctacatcaacaagttcgttcatgctgctccactgtaggttggaatgtatgtgtggtgttccctcaccacaagcttaggtgtctggaagggggtgggtcacctcgccttacgccatcataaccatgcctgtcactaatgattaatgttgttttgtactgtcatcttttttattcag

SEQ ID NO: 108857 - DNA, 635 bp, Zea Mays
tgggaaattttcgtgggtaaatagtgggaatcagtgggagaatcatgtagagctttgtcatacctttccaacgagtacttatgcggtcgatttggagttatattttaggagatatcgctgtttgaatccgggtaggttgctgtccaaaaacagattgcagggtttatcttgtggactgttttggctaattagggtttgtaatttaattatcatttgtatacaaaacttgtggggaattttatgtagatgcttttggggtttttatttgttaccactgttgtcataattttaaagatatgaaattgacaagcagcgccgctgcagttggtgggtgaaggtggtgataagccgcttgtgacgggtttgcaattgtgcgtagatgcggcgtcgtttatgagcgcttgttatgtgaatttgtgcactaagaagtgtgtcaaaaacaggtggtggacttccggatcacacttagggctttgtccaaattccccggtgaagacaagtaaaatagtgatggttattccgtcggtcgattaatgtgtcttatacttgattatagttatgatatttgtgttcgtactcatatccatgttgggtaccatcgtttgaaaatgtacatgttctattgattacatatg

SEQ ID NO: 108858 - DNA, 377 bp, Zea Mays
ttcgatttgattagacttgaaatcaacacacttactcgacttagggtggcctctataccctactaacggagcaatcggcttaagtcggcaaagacttaagacggtgcaacatgctcgcgcttactcgatttagggtgaccactataccctactaacggagcaatcggcttaagtcggcgaagacttaagacgatgcaacatgctcgcgcttactcgacttagggtgaccactataccctattaatggagcaattggcttaagttgacaatgacttaagacggtgcaacatgctcgcgcttactcgacttagggtgaccactataccctactaacggagcaatcggcttaagtcggcgatgacttaagacagtgcaac

SEQ ID NO: 108859 - DNA, 443 bp, Zea Mays
agaaagtacctttcccgaagcatggcagatgatgtaatcattgctctctttcaaagcttcgggagcaggagtagcaaccttttcaggcgaaatttgctctgtggctttttcttctgttgccttttcttcaatttccgcaggctttatctcagcgggctccaaaggcccagctttggtaccggcttggattactgcagcttcaatttcggcctactctgtttcaacttcagtttgcgccttcgaggcttcggcaattttctttgaaggagtcgagttcaaagtctttactgtttctagcacatctactacattagccatccttcttctcttgggagttgccgcaaaacttttttttgccttcggcactgttacttctgacgaagggcttaaaatttctaacatttttgttccttcaatttttggctcttcgaccttatctttat

SEQ ID NO: 108860 - DNA, 953 bp, Zea Mays
aggacaggcaccagagagttcgatcttttgggtttcctcccaaaggaccaagtttcaacaaaccagcagggtctgctccatcacatttcagtcagcagggtcaaagttccctccaggcccactcagttgcaagcaaccaacctccagccaatgcctgttggcactgcggagaccccagtcactacaagaataattgtcctcagttgaagacttccgtgcctacctactccaactcggtgaatgcccccaagagtgccccatcacccgcctccaaggcaccctcctccaacagccagctaagcaagacccagtattatggcagggcacgagtgaaccacgtcgacgcttaagaggctcagcaagccccaggagtagtgctcggtgagttcctagttgaatttactcccgctgctgtactttttgattcaggagcatcccattctttcatagccactagttttgtggaaaagcatggcattcccactgcacatctagaaattcccttggtcacccgaaccccagggtgagaccttctatgccacctcaaatgctcccaagtcaggattcttttaagtggggtagtgttcttggcagacttagccgtcttgccatcccacagaattaatgtgatcttagggatggattggttaaccaatcacaattgcgtcataagttgcgcagataagaccattcttctcactgaccaccaaggaaagtcagtttcatgtcaggctcaaccacccgcccaagatccaatggtgtttatatctagcagcaaaaagcatatatgtagtagaagaattcatggatgtattcctaaaagaattgctaggaatgccacctgaaagagaagtagagttctacattgatctaattcccggcaccgcaccaatcgcaaaaagaccgtaccacatggctcccaccgaattggcagaactaaaactccagatcgc

SEQ ID NO: 108861 - DNA, 409 bp, Zea Mays
ggccgttcgaaatcctagaggtggagtcattccaactccgtctcctcgtccggcgggtctggttttgctccaggctcctataaagatgatgttctctccagttccaagcgtgataccggctccctctccacttccaaatggggtgcctgctcccctccaactgctctgactccactagctcatgtgtcgaaaaccagtgtgctctctaggtcgctgatacgacctgttcggcgacaaggacaggaagaggaaggctggcagttggttgagagcaggagaagacatcgttttgctgtgccacttcctcgtcgagggtcccaggtggatcttcgaggcaagtgctacaactgtctttctgccccccatcttgtcgtagcctttcgtagcccaacgcagtgtttccggtgct

SEQ ID NO: 108862 - DNA, 497 bp, Zea Mays
gtttatcaaatgccttctcaaaatcaagctttagaatgaccctttcttttctggatttgtgacaaagggaaatatattcaaaagcccaagctaagcaatcctggatcgatctatccttgataaaaccatattgattctgatggacgagctttgtgatcaccggctgcaagcgattggctaagatttttgttagaactttgacactcgtgttaaggagggagatgggtctatagtcaccaactgaatcaggagagccatttttgggaacgagggtcacatatgatccgttgatgctatgcatgcagagaaatccttcaaagaatttgttgaataggtcatagaaatcaggggcaatcactagccagcattttttaacaaagtctgtgttaaagccatctagacctggcgatttatttgaaggcagacatgcaatgatttgatcgatctcaaggctagagaaagggtgctcaagctcggataaattaccaatcggctga

SEQ ID NO: 108863 - DNA, 437 bp, Zea Mays
gttgttcgttgcaagagtttcattttttcagtcatggagtgtgctgtcaagctccgagtatctggtatcttgttctactgttgcgaccctgattcctgatcacccatgaccgtgatagtgcttaccctgttagtgcctaactcggtttggtgcagaagcttctcttggtcttttgatatatagtgtatgacctcgccatcagctgttttgatgtcttcccgtgcttccaaattttatagactgcatctgatttcttacgtctttacttatcatttttcccattatacggtttataccctgcatttctctgtcctgcatttggtaattgattacttgttagaaggtgcaaatcagctcctcaattgctacaagatcaatattcagtctggataattttgtagcatatttctggtagaaatcctattattgtgggtggc

SEQ ID NO: 108864 - DNA, 653 bp, Zea Mays
cagtcgtagaagctaaacgaggaattaacgaatactgggcaaatcatttagagaaaaacattgaagagcttcacacatccaaagaaagatgctttgaaaaatctttagactgtgtgaacaaaattaatgctagctttgccaatgtgggcgcctattcttccgaagagaacttaatacgaggcgaccctgaaggtgttattgaatggataagtggggaggccgaagcctttgaagaaattctaagtgatcgtggggatgttgcgcgttcttcggtgcgcgagggatttcagctatcttggagaaggcgggatgcgaccatatcaagaccatggcccaggacgaagctgccttgtccgtaaatgatacaaaggacccctcagctgaagcaagtttaataggcgggaaattttataacgacatctgggcaaatggtggccgagaaatggctcatgaaattatgaaaaagagtgaaaaggacatccatgagacccgagccaaagcaagacaagctgaagaagctgcagagcgtgaaaaacgtataggtattgtgtcgtgatttttaacttcgacatttgttttcatagtttcagactgattaactttttatttcttcagctgaattatctccgctgtcggtaccgctcgatctcctg

SEQ ID NO: 108865 - DNA, 508 bp, Zea Mays
aagtcgatcacatgtggtccctttacaacagctcattcttccacctcgacgcaggaagcggatcgtgggcaacaaccccccgagtcaacccttggcttccccgatttctcggcgtcgttggtcctctcactccagaggccataaatatcattttcgctccttctactcattgaccgagcaccacggaaccagatagtgttttcgtgaggataggtaatctgggtggtggtgcggaccgtggggaaggagatccttggtggtgggcataaatcccagggcttcaagccgaggaggtgtttgagtcgctgcgacctggcgaacgtgttcgcggcaccagcactggtagtggagcccctgtcgccaaggaattgctcgacggagttccacgaccgccatggaccgtgcatcatcgtgggcgggtgttcctgcctcgctactaccggtaatttacttctcatgctattcaccgttaaccacattacctgtaaaacagtttacgtgagggtca

SEQ ID NO: 108866 - DNA, 283 bp, Zea Mays
ttcattgcatagccgtagtagtagatggtttgggagcattgggtgtcaccagggcttctctggtgagggcccaccgccgtggtagggcgcgccgctgcaacctggtcgagagagatagagggatgaccaggtaccgtggatcttgggatcgatggtggggattagatccctaaacacccttcgggtattttaatcggggatgattgatcgggtttgggtggcatagattcgtggatggcatggttgagcaagggtcattgatccgtgatcactcgggttacag

SEQ ID NO: 108867 - DNA, 945 bp, Zea Mays
aagccactagcccgctaggcgcgtttcaattttcactcctgtccttcaagcggtcaagcccaatcagccagcccatgcacatggcacattcgaaaaattgtgctcaagtacgggtaggatatgagatgacctagtatccatccgtatccgccacattttcacccctatgtggtgtccccaaatattcccgtgagcagcagatgccttttgtccgtccagtccaactcgccatcgtccgtcccatagctaaattgtgatcaacgtgatgccgacacaattagccatgtttttacttatcgctcactagtctccaaccccaacccgacttaattgtgttcacctgtactactagcacacgctaactaattaaactttaatatatagtaatgggttttgacaggagccgatgtgattgcaacggaggatttaatttcggatcggagatgacgacagaaagcttcctagctgatgctgattcctaggccgccgcacggaagatgccgcctccctgctatttggtctctctctgtctctctctatcttgaccatatatacgaccaagccaaggcacaagcacaacgccctagagtagaggctgagctgcatatatcaccgagcaccctctctctctctgttcccctccctcgctcgacatggaggtcgccgccgccacttgtacgctccttgctgccgtcgccctaccagtttcgtcctcagcagcagcagcacgctctgcgacgaaacagagctactcgaggaggaaagacgacggccgtgcgagccgtcatggcgaggccgcatcaggtgccgccgcctgccaccgccaccgccaccacgtaccgcgacaactggttcgacaagctggccatcgggtacctgtcccggaaccttcaagaagcttctggtacgtacgcagtacgcacagcacacttgttgcgccctgca

SEQ ID NO: 108868 - DNA, 1136 bp, Zea Mays
atcggtacaaactacccgacaactatctgatacctacccaagtagtatctgttattcatttcttacccgcctggattattacccggtcccgtcctgtatccgttccaaatcttaacaacccgtatccgatcccgtatccgagacatacattaggataggatacaggatgaccctgtatctgtcccgttttcatccctagaggtgcttgtgatcggtgaatgaagtgcccctagaggcctaaacagatgcctcgggagcttaaatagatgtcccaaggtctgaggcaccagggccagcacaagaagcgtcctagggggcaaaagaggtgccccagtgagtgaacgctgcccatagaggaactgctcgcaatagttaagctagttcaaatgatcctcctttgtcatcataggtggagaataaaaggaatgacgttgtcccataccccatcatccagtaggtaaaaccctaaggtatggatctcacataatgaggatgtctggtggctccccacagtggctagtcatgagagaacggtgacctactgcaccttgaggtcgatcaacttctagatgacctcgaagaaggcatttatttatatcatcaagggtggatggtggcactccctatggtgtcgatggcataagctactatgccaacgaagaagacgtcttaccaaccatcacagtagtagcttccaaaccaaagatctttgatacaagatattatggtggtgactagtgttgagggagcacaagggagctggaggattatggggaggctatactagcgcaaaacaaaattttgaccacataaaccaagatctattgttgttatagatcatggaattaccactaaacgtgcagggcagcggaagcgtctcgacgtagacaaacacatcgagcagtgtcatgcaatcgtcgacgtccttcacatccttacatggttcatcctagtgctccaaatgcagcacctttgaggtatccacacgtacagggagaaagcgcagcttaccgaactgctaggttcgagacattggcttgacgaggagagaggggtgcgactgctggtttgctggtgatgaattaggttaacctagccgtgtcattgtccctcattatataggcgttctggtgggc

SEQ ID NO: 108869 - DNA, 389 bp, Zea Mays
atggtggtgtgtctccctatcatatcggtccaagatgcactccaatggcttcgccatatcccccggcactgcatcgaccactaggcttttcgaccacttcattgccaactatcaatcactcttcgacaagctcgcgcagccgtaggacctgaaatcgattaggcacaacaacgacgaggccctccgctcgttcctcgagcatttccagtccatgagaaactgcatccctggcatcacccaaacgtcattgatcaaggacttctatcggggtcccgtgatggggcgtttgtcaaggctatccttcaaaaagcctcgacgacctccgagcaacttttcgggaggccgacgtctacatcacctctgacgagcgagctcgcgacctcatcaag

SEQ ID NO: 108870 - DNA, 1020 bp, Zea Mays
catatagaggagcatcatatgaatatccatatgggtaagtgaatggtgttggaggtctagaggaggagtattggtggtacgagcttcaatgggaggaggatgatagtcggcaataatatcatcattaggatgaggtggagcatcctataaggtcggtagggatacaaaggagggtgatataggtatagaatcagaggctgttgagtgaggaaaggggaataggcagaaacattctcttgatgatgttgtgtgcgagaaaggtcatcgaagaactcccccacatcagcagggatgttaggaaactggagattggtcattaagcaagtcggtgaaggtttgaaagttcggactccacctaagactcatataaaaaaagtgtaaggctacaatacgaaggaagatgagtgaaatggagagtgagggctatgaataaactcaaacaccctcctctatatattttttctcaaatttttagacctcgaacagttcaaatagggatggcaatatgtggttttgggtcagggtgggcaaaaactcgcccgcgatcgcacccatgaattctgcctaaagtggactgtgatcgcacccgcaggtgtaattcaaaacccacaacgaaacccgttgggtttcgggtcacacgcaggtttgtacttagtatacaatttaaagaatattttagctataagtgattaagtattgacaattatcgagttatatctacgaattttaagccttctcacattgagcagcaacaaaacaatatctacgaattttaaggtcggatgtgggtcacccacgggttgatgaaatagaaacctgcactcacatcagtgaaacttcgatcgagccgggtgtgggttgcacccccgggtcaaaatcttcacccatacccgcatccattagatttcggatttatgggttaaattgatatccattgagctcaacacaaatacatgcaacttttaggtaatatggcgcacgcatagaacaatcaaaacaagtcaccttagaaaagtcaaa

SEQ ID NO: 108871 - DNA, 398 bp, Zea Mays
tgggttggatgaagcgggctcttggatccacagggctctacgttggttatgggttaccaagtaggcctccatcaacttctggacatgctcatccttggcttgcttcagggcttcaacagcaatgacttcacgactttccaaggcagctacacgggcttgagctatggtgagatccacatggagcttacggttgcgcttctctgcatcttctgcttgggcaatcatctgacggtggtgtcgagccaagaaatcatactgtgcatccagggtgagcaggtatgtggtgaggtacacgactgaggggttgtcctcaagcagttgctgtccttccaatgcacgcatcctagccatccaaactggacggtttctctaaaagggtggaaagaatttgagcgggg

SEQ ID NO: 108872 - DNA, 318 bp, Zea Mays
gtcgaactgcacgagggcaaacagaaggaaaaaagaaccatggttagttctttgttggatcgattcttcattttttggtaaacatacaactaagataagaaataaatggaataatgtatgagacgggtgaacaagaacgaaccatgatttaataaaatagttagttgtcactgtgttactacgtttctatattcacaatatttataatatctatcctttatagaacatacacaaatatgagctcttatagtttcaggatcactcaagtctcccaagtgtacaccggagaagtttgagaaaagtcccgatgatgaaggt

SEQ ID NO: 108873 - DNA, 779 bp, Zea Mays
tggctaacttcttaattgagaatgggataccattcaatgtcattaattcaagaagttgggaaatcatgcttgagtctattggtcagtacggtcctggttataggtcaccaacataccatgattgcaggggcaaattgcttgatagggctgttggaaggacagatgaactcaggaagaaacatgaagatacttggaaggagtatggttgctcaatcatgtctgatgggtggacctctacaaaccatcgtcatatcatcaatttccttgctaatagtctaacggggacctttttccttggttcagtggacgcttcaagtgaggtagcaaatgcaaacatgctggcagatctattggagcagcacataaatcaggttggcaaggaaaatgtcgtgcaagttgttacagacaatggggcaaatttcaaagcagctggaagaatccttatggaaaggattccaactttattttggacaccgtgtgcagcccactgcttggatttgatgctagaggatattgggaagataaacgatttcagcacctgcattaatcatgcaaagaaggtgactagatttatatacaaacatggcataattcttgatatgatgagaggtataagaggtggagatctagtgagacctgttgtgacccgttttgctactgcattcctcacattggcgagtatgcaaaagaataagttgggtcttaaaagtctttttgttggtgatgaatggcagaatcacaaattggcgaaaactagagaaggagaactagttgaaagc

SEQ ID NO: 108874 - DNA, 686 bp, Zea Mays
tttaaatattcctagggtttcatctctagaccttgtcactgtgctttgcgtagggttagttgtgagtcatcgttgccttcttcctggaagtcaaagcagtggcaatagccacttttcatttctactctctctcaaaggaggcacatggtgcctcaggcttggagcccaatattgattcaagaacaaatgaaatataaccaataattctgtgataagattaaatgtaagtttctgtggatttcaagtggggaatgattcccaagtatgccagatggaaccatctcatcacatacaatgagaatctcgctgggcgttaacagcattgggtggtcggttatactctcacaattgtcacatcacatggctcacttatcatatggtccgtgtgatcctttaggttcttcacttgggaatagggagagagatagaggttaatgtatttaattacaagtgtgcaagttttaccttttattttccttacatggcccacaaccttttgcccttttcttcttcctctagtcatcttatttctccaatcatcttcctctatgtagtagcctttcttgtctagtcgttcaatcatcatggtcgcaacctatgaccttgactagttgcctcatggtagagcgctcaatcaagagggtcttgaaaaagtacaaactgctcaactaagttgcactatctac

SEQ ID NO: 108875 - DNA, 616 bp, Zea Mays
attttcacagttgtagacagtggaacagattaattacgagtactcatttcggttctagttatctcggtccgatttaatttttcagcacttctatcgtgaagttctagtaatatttacttgggcaaaaatacaagagtggatcgggattccaaattcatgttctcttaatccataaattctaaacaaacaccaggctcgacatttcgcgaaataaatacgcgagatcgatccggcatcgaaattgtgatcccttcggaagcgaagtcacacatcgttcacgtgggcgagaggctgtgcgctgtctagacaccgcttaacaccagccacgcgccacgatgccaggccacagagagacacgggcaacataagcgtgaaaggatttcaaatgaagtttaagaaaccagatccgatttccagaattaaagtttgggcaagacgttgatggcttaacccaaacgatactggagtcgatgttccgaaattactaaagtctgaattttgcaaaataaattaggacaatttagacagatggagacagacacgatatcaaaatcgtgatagacgaggatgattaaaatttagtgacctttacattcacagctatcacgtgttaacg

SEQ ID NO: 108876 - DNA, 320 bp, Zea Mays
tttagtgaaacaaaaaaggagctggttcgttttggcggggaggagattactccgaagccggaaaagaatgaggtggttgtgttcaaaagcttctttaaagcaggattaagatttcctttgaatgggatgattgttgatgtgttaaagaagtttggggtttaccttcatcagctgacccctaacgctattgttagattaagtgtttatatttggtcccttcgtagccagggagtggaaccgttcggtgaaggtttctgccgagtccatgaactacactatcagactaaagccagaggagatggtcttcatgagaattttgg

SEQ ID NO: 108877 - DNA, 843 bp, Zea Mays
atgtgccgatgatgatgaagctcggctacttcggggagacatagaagaagcttcttcgttttgccggcgaagaaaccatcccagagccaaaatatgacgaagtggtagttttcaaaagctttttcaaagctggattacagtttccgcttcatgagatgattggggaagttttgaataattatgaaatttatcttcatcagctgactcctaacgctatcgttaggctcaacatcttcatttgggctcttcaaagccagggaatggatccaaatgctgaagccttctgccgagtacatgagctacattatcagacgaaggctagagaagatgggcttcatgagaattttagctgttacagcttcacttaccgcaaggatatgaaggccccggtgctaagctaccgcaccaagtggccaactggctagaaaagtgagtggttctatgttaaagatgatgaaaataaaagggagaagctgaagacgttagtactgagcccgctgagtttgagctacgggttgactaggcccttgtgctgtatgtcaacggggtcaccatgccaacaggctgtggtagaatttagagttgtgactgagcaggtcagcactagagatctggtgcaagaattcttagcctatggagtattttcgacgttgagtgaatgcaatatgccaaagctgaaaggagaaaagaaaaagaatgaacttgttcgattgccctatcacttcaagttcaagaaacaattcaaagagccttgccaagagtggctagaaatgattgaggctatgtgcaatgagattttgggcaactatactaaaaaagaagatcaactgatgtctacggcct

SEQ ID NO: 108878 - DNA, 350 bp, Zea Mays
gcagctttgtagctttttatccaacggctatttgggttgttgaggggtataaatacccccaatcagcacaatgaagatacaagacccctcccaaccttccatacataaagtgcaacatctccacacattcaaagcgattcccacaccgtatttgatcgatttgtgtttgagagacatagaggctagcgcatttctgtgttgcaaggttttgtgatcatttgagctttgattgttctcattctctctcatcactctctttgttgtaaccatgaagcaagaggcttcaattctttgtgtggacgcccttgcgggacttggtgtccttgagattgggaagaaagctcaaccgg

SEQ ID NO: 108879 - DNA, 508 bp, Zea Mays
ggtcttggtatggagtatgagaagattgatgtttgccaggacaactgcatgctcttttggaaggaacatggcagagagcagaaatgcttaaaatgtggcaagtcaaagtacgtggagcttgtaaatgaagatggggagaaggtggtgacaaaggttgcacataaacagcttcagtacatatctcttactcctagagtgaaacatttgtttctctcgagtaagaccgctatgcacatgaggtggcataaagattgtacggacagacaagatgggttaatggtgcacctgtcagatgctgatgcatggaaggctcttgacaactttgctccagagtttgctagcgatgcaagaaacgtttgtatcggcttggcaactgatggtttcacgcctttcaatatgaccgttgcgtcgtattcatgttggcctatcattgccttaccgtacaaccttccacctgctctttgcatgaaatatgattttatgttcttatgtcttttatacttgggcc

SEQ ID NO: 108880 - DNA, 1170 bp, Zea Mays
accgaagtgggaaggaccatttatcgtcaaaacaaagtcgtctcccagcgcgtatagattaacaacacaatctggcaaagacctggaacattcctggaacatagacaaccttcgcaaattttttgtttgactccatagggccaactcggccttgtaattccccaaacaattttattccagcccacactcttttcctcctggggggtgaggtttttaatgaggcggagccatgtaatatacacgcaaaaaatcccccgcaaaaaattacgtcgaaaaaagaccgcatcgacggtcttcggcattcgacaaacacgaagtcagcgcgaggggcagcactggctaccctcgcgtgcgacactccgtgcaaaagtcgcctaagggtgcagctggactagcacaacaactgcgcaaaactagtcttccccaaaaagactatccatgcaaaagtcgcctaagggtgcagccggactagcacaacaagtgcgcaaaattgaagtcttcctcaaaatactatccgtgcaaaagtagcctaagggtgcagccggactagcacaacaagtgcgcaaaatcgaagtcttcctcaaaagactatccgtgcaaaagtcgcctaagggtgcagccggactagcacaacaagcgcgcaaaatcgaagtctccctcaaaagactatccgtgcaaagaccgactacaggtgcagccggaccgacataataaatgcgctaaacctagtgcacaagtcccctacgggcatgaccggatcagcgaaggtacacagcctcatcatacaaattatagttacatacgtacaacgagggcatcacaccttacattggttcaacctttgggatgatacccatctccctatagttaaacagcattatcctcagctcctcaccctcaaaaagacttcgcaattccccctcacctacactcgccccaacaggcgaggacaacaattcccgcttgccagccctgtccacacgaagacgaccaccatccacctcactcactctacgcttcgccaccgcccttcgccacttacgcccaacactcggactaggcaaaacttcagcatccgtcacacgcggagatgcctccaccgcaaccacatccaaggccacaaagtaatccaagtcctcatccgaagactcttccgtccacacaaccgaa

SEQ ID NO: 108881 - DNA, 509 bp, Zea Mays
gtccagagaccagaggaggtaggagactagcacctcacccaggatcaggagcacaaggaacacacgctccgcttcagtctcatttccagaacgtttacaactgctcatgtagtggctcattagatctccatgatttcattttattttattttaccacgatgattcgtttgtcgtttcgttacacatggcatgcgtgttttaaacaatagtccacaagcgcccaagttgtttctgcctagaattgccgattgttaacatgtgatagacagtgaccataaccacactttaggctgtagcaacatagaacagggaggcatccactgaccattctatgaaaaagaataagaaagaatcatggagtgaggtagtagcatggctaggtttgtttccccttttccgatctccttcccttgttgtgaattcctttcatcttcctcatatttgtttccccgattgatatgaattcctttcatcttcctcatatttgctttgctagccatagatctccc

SEQ ID NO: 108882 - DNA, 322 bp, Zea Mays
catagaagcgactagtgacgagctgcttggagcatattccaaggtcgaagatgaagccatgacaactgccttcggggctcacggcaaaaaaagattaaatagagtgttcgatgttatcgggtttgtgtacccggaatactattatccctcacggaaacaagggaaaaagaggaaagctactacttcggcaactgctggtacgtcgaggtcaaaaaaggttaaagttttgacacatcggcccagacgcattgaaacggccgatgtgccgaagctaattgagagggccgctcttattacagagccaagtcgctctgtgccagtc

SEQ ID NO: 108883 - DNA, 909 bp, Zea Mays
attgatgtaggcagatgcaaagccaaggtctccttctgttgcagcctaatgaaaagatgaggcacagcgaagatgtatctcacatgagatcatcaatgtgatgaacaaagcagaatgtagtttgaaaggccaaaagaaacttggaataagacaaaaataaaagagagaaggacaccttccaatagaactggggatcgtgaacgcgtatcgcagattttacatgacatttttcgcatgctttaccaaaactgaatgtagtgcctccttcttcgagtatactgtgtgcacagaactgctatgaggatcttaattgggtagcagagagattgtgatgtacaagggtttgtttgttctagtctcaccagaagttaccaatggttatgtattggtctaggcttcttgctacaagaagacgtgcgcccgcctctgtccacgatgagaccatcggttttgggttagacaaaaggtcacatttccttccaagcaatcctaaagctgctgctttcccagcctgaattaattcagtttgcgacaaatagaatgcactcagttaaatatccgcataataatattcagcacctttaatttgtcatggaacctaagaaggtgatcaggtgcgcatggaataccttaacactgtcctcatggtatccatagcctgttattcaaaaagaatgccataatacttcatacttagtatattgtaattggttaaataatggcatgcagcagggttgaagtgaagcaaaagtggtcaccttgatatgagccacagaaccagatgcccctctttccttgaatgctgttgagctgaagattagcctttgcagcagcaatggaaggaattggatggctaatatgacatttaagcaatacatgattgggaacacgaggagggttaagtgtcac

SEQ ID NO: 108884 - DNA, 295 bp, Zea Mays
gtttgctaatcacaatataagacctagcgaaccattttagacatcgtaactcaaaaacatggtttggagcagattacttaatgtttcttaacctttttctcaacttaaactagttaacacacaagtcacctaaaatagcacatcgttggggtctaacatagagacattaaaacatggcataaactccataagacttacactggctactgaaggacctaaagcacttatgtgtatatcttagcggattgttcttcaattttaacaaggactgacttgtgcacgctacttgcctcca

SEQ ID NO: 108885 - DNA, 405 bp, Zea Mays
gctttgtccacagccttcggaggtcgggggaagaaaaggctgaacatggtatttgatgctattggcttcgtataccctaattaccattacccgctgcgaggacaagagaaaaagaggaagattgctgctttggttaccccagctgagcctgtgccaaaaggcaaaaaggtgaaggttctgacccaccgaccgtgttacattgaaccggtcatggtgcctaactttggcgcagggtcctctttagcagccgaagcaatgcaaactgctccgactgcacagagcgctgaagaaccaattgtgatgccgaagacgcatacatttgagccagtcgaagataaggttgataaggctgaagagctgaaggttgaagagataataaaaatgccaaagattctgagccctccg

SEQ ID NO: 108886 - DNA, 321 bp, Zea Mays
gctagggttactcacgacggagaggaagtcgaaggtgtcgaaaccgctccaatctctgaagtgatgaaacagctagggctggtagtatcggaggatgcacgtgccgctgaagctgagcaggttgatgctgaggaaattgaatctgaagatgattacagtgccgttccttctaaacccagccacctggagtttgtgaaatccaccattaccaaaggtgatatgtctaagctgatgaagaaaaggagaagctagtccaaagtccactagaattaatcttcggagaaaccaggccccagtgcaacatgacaccgaagagtccaa

SEQ ID NO: 108887 - DNA, 341 bp, Zea Mays
cgcatctggactgactcgcttttgctaattccttttatccggcccatagcgggacgcctccagagggtggctgctatatggccccgggcgtattttcgcactcgtgtggagccgggggatatccatcccccacagttagggtccttggcatcacactttttgttcatctttgctatctaccgttccgccgggatgggtgttcgcaagttttcgggtccctcaatttccactagtgaccattatcgtagccttcgaggcataggtattcacagtctcgaccagcttccccatcaggtccttccgttcacgttgcccgccccataggtccatttctagcgaag

SEQ ID NO: 108888 - DNA, 329 bp, Zea Mays
ccaccttgataccgcccataagacatcttttcctgcccttaggccaccatgtgctccgtcaccttgccgattgttgtgccaccccacatggtaggtggccctaacacggtgatcctactaggcacaacctcttgtggagagcggctcgaggaggcagagcctatccctggccggtggactccagtaatatacaaatcctgcattcttcctactcttgcacgccttctcaccctcttgatctccatggtcaactttgacaaaagaaacacgttccttgcctctaccattgcactttttgctccttgctatcgcctgtcggcgtctcggcg

SEQ ID NO: 108889 - DNA, 584 bp, Zea Mays
ggaatttcttgccaatttaccagtagcgcgccgtgctgctgttcgtcgtgggcagcatggtcgctccctggactcacggtacacatacattcgtcgtgttcgccataccattgtccacgtatcgcgtcaatcggtttagagattagggcgagggaggggagatttgtttgtcgccggcgagagctcaccgggtggcaatggtggcgtcgtcgttcgcgatgtcctgggttgggttggggtggcgtaggagaagccacatggtccgttggatcttattcaacggctaggattagaatgcatttacccgtttggttatttgaatctgggtcatcaatagtcgatcgggcggtgctagtgtagctcatgcttcggaccgtggatctagatccaacggatacgattgcgtaccgattcggatattacggtgatctaatcaggaccgtctaatgcggatcggacggttcatggtggccgataccccttcggccatgcgcctttacagttagaacctccagtttatagaaaatgaacccgccgtccaccctaggttgccctgagtcttagggatttttataccagacccc

SEQ ID NO: 108890 - DNA, 1109 bp, Zea Mays
ttagtttctcgcacctctccaacaaagccatgcaagtgggaagggcaaatgaagaagaaaaaggccatctcaagaagaaatcccaagtcctccgagctcagcagcaagaccggcactagaaaactcaatcctttagatttacacccaagggaccaagcttcagtagaccaactggacccaccctgtcacggttcagtcagcagagtcagagctcctttcatgccccctcagttgcaagcaaccaaccacagccgaatgcatgttggcactgcggagatcccagtcacttcaagaacaactatccccaactgaagccatcaggacctgcttactccaactcggtgaatggccccaagaatacctcagcatccgcccccaaggagccctcctccatcagccagcagaacaagacccagtatcaaggaagggcacgagtaaatcacgtcgatgcacaggaggctcagcaagcgccgggagtactgctcggtgaattccttgttgaatttactcccgctactgtacttttcgattcaggagcatcccattcttttatagccactagttttgtggaaaagcatggcattccctcaacccctctagagattcccttggtccccaaaccccagggtcagaccttctatgccagcacaaatgctcccaagtcagaatccttttaagtggggtagtattcttggtagacttaaccatcttgccgtcccaagggattgatgtgatcttaggaatggattggttgaccaagcacaaatgtatcatcagttgcgcaaacaagacagtccttctcacagaccaccaaggaaagtcagtctcttgtcaagctcagccacccgccaatgatccaatgatgtttaatttagcaacagaaagcatatcagtggtagaagaattcatggatgtgttcccggaagagttgccaggaatgccaccggaaagagaagtggaattctacatagatctgattcctagaacaacgcccatcgcaaagagaccataccgcatggctcctaccgagttagcataattgaagctccaaatcgcagatcttcaacaaaaagggtacattcgtcccagctcatccccttggggagcac

SEQ ID NO: 108891 - DNA, 437 bp, Zea Mays
tgaggatagcaccactcggctcctcgtctcctcgatggttgtgacgtctaagcttctgcgacggttgttttccccctccccactatctcaccgtttctgccctcgctatcaatggcggctgctcgtgctggttcccttcccagcaattactctttccttggcctataaatctccgtgctgctctcagaccatctgccgcccttgctcttcctcctcttccatttgatgtgtatgtttccatctgtttcttctccactgtgtcgagcgtttcctgcttctccattaatggagtttgaagctttcatttatctgtaaattcacgacacatcaattagccatcaaatctacgttaatcaggcatcctttctccttccctttccacctatataaaaggaggagcatgccattcttctctctccgcacgctcttcactctgc

SEQ ID NO: 108892 - DNA, 433 bp, Zea Mays
ttagaagtaatgaagcgatcaggtctggttgtggtagaggaggttgctgacgaaggtgcttctaatgccgaagctgaacaaactgtggttgagggtgaaaatgttgatgaaagtgaagaagactatagcattctgatcccaacaaagactagtcatcttgaatttgaaaaatccactgtgacggaagatgacatgcctatgatgatgaaattgggctatttcggagaggctgagagcaaacttattcgatttgctggagaagaggtaatcccagagccgaagaaggatgaagttgtcatctttaagagcttcttcagagcagggctgcgattccccctgaatgaaatgataggggtagttttaaagaactttgagatatatcttcatcagctgactcccaacgctattgttagactcagcgtctatatctggg

SEQ ID NO: 108893 - DNA, 430 bp, Zea Mays
gcatactcctgatgatgtcgaaaaccatctcgactctattactggtggtcacaatccaacttttaccaaagattttttccatgcgacgaagtctattcctggtcttgggtgaaccgagttactggatgagccccatcacgatgactgtgagtcatgatatcttgggacttgggcactcagtctatcgatgaccctgactttttttagagttagatcatcttaggacttgacaacgctatgactcgtcattggggttgttgggctcaacccgcgcggttgtagaagccatcatgttattgatctgctttagatcatcatgagcttgcgcattgtcctttaggtagctatggagtgattttgtcaagcagtaactttgtaggcatgccattatgtgttggcgttgagtagtagacttgttgtccatggaagt

SEQ ID NO: 108894 - DNA, 1206 bp, Zea Mays
aagaaccgctttaaggtgctccggggacaaaaacacgtgcggtggaacgcggacataaaaatggtcgctgggccatgaaaacgtgtgctatagctcacgggaggccaaaacagccttaccagtctcaatggtcaaatcatgggtggcggacgggaggcacgaaatcgctgttcgacgacaaaaacatgtgtcacgggacgccctaaaacctaaaccctacagcttgtgggaggccaagaacaactttaaggtgctctggggaccaaaacgctggtggtggaacacgtacttaaaaatagtcgctcgaccatgaaaacatgtgctatagcttacgggaggccataaatagccttagcagtctctgtggccaaatcatgggtggcggacgggaggcatgaaatcgttgtttgacgatgaaaacatgtgttacgggaggccaaaaatagccttaccggcctccggggaccaaaacgtgtactatggtttggacactaaaattctactatgtcagcaaagttgataaggttgagagactccaatttcattttaccatgctttcaacacttagatcctttagtgtcgatgtttaggtttagggtttagggatagggattagggtctaggtttccataaaatcgtgtgctatagctcatgagtggcaaaaaaatgccataacggcctgcccggtctaaaacgaaggtggcaggtcggatacataaaactggcagtttggccacggaaatgtgtgatatagctcgcgggaggccaagaaccgctttaaggtgctccggggacaaaaacacgtgtggaggaacacggacataaaaatggtcgctcggccatgaaaacgtgtgttatagctcacgggaggacaaaacaaccttaccagtctctatgttcaaatcatgggtggcggtcgggaggcacgaaatcgttgttcgacgacaaaaacatgtgtcacgggaggccaaaatagccttacgggctgccggggactaaaacgtgtactatggtttggacactaaaattctaccatgcctgcaagattactatggtttggagactcaaacttcattttactatggtttggacactaaaaccttttagtgtcggtgtttaaggttagggttaagggattggatttggggtctaggttaccataaaaacgtgtgctattgctcacttgtggcaaaaaatgtcgtaacg

SEQ ID NO: 108895 - DNA, 652 bp, Zea Mays
ccagattactcgaggaacctgatgcagcaagcacatccgcagcaatgtcatcgggtaccatgactctgaccctcttcatctgcatccaactagcccagatcgccttatccattgccttgtcgcacaacgccttcatgataactcggtcgtcctccatgaccttgacaacacaacgggcggtcttcgtgtcgcggcgagcagcttctagctcctacgacaccatctccttgagacacgaagctctctgatgatggaatccttcaaggacaaagacttattgagcctcgactcctcatcttgggattctttcagctcatccctcttgaattccaactccgtcatagtgaagcgatggctcctctccaaggtggtaagggagatactagcatcccggtacaacctatccaggttgttcctagagccaagaagttttcgcatctcctcctgcgggtagaactcgtgatgaagggttgaaaacacaaaataggtgatttggagtccctggtaggttacctcatgagctttcttatccgaatcaagtgtcacatgtagagaagaattcatggtacgggtgctgttaaggaacatagtcaccagattaaggtcagcctggccctatgcacatctctcttaggaatcagagcaccaccga

SEQ ID NO: 108896 - DNA, 380 bp, Zea Mays
catgaatcgtcgatgtggtggttagtgggaatgttggtacaactatggtggcaactgtgagtacacctctagcaagctcaaggcaagcaagagtacacctataacaagcacaagtttaggggagattcgatgaggaggcactcaagaatgacaaggcccagagtttggcttctttgattccataagcaacctcaacatcaaatcaagataaaacaaatcttcttcctcttcaaatgatggtgagtgcaaaaggaaggtaatgggcaagctcactagaatgcttccacaacaacactgccaaggagtgtttttgcaccatggtgcttgacgccgagaccatgggcaatgacaataatgtgatagtaatgactccacctctg

SEQ ID NO: 108897 - DNA, 329 bp, Zea Mays
gtgaaatgtgcttcactttggggtaccaaaccttataatccatgcatgtttggctctgtagtgttgtagaaaagtgaaagatccatacttaataaacaagtttggagtggtatggtctgcccttctatagaattgggagaaaaagggtggtgaacttggccctgtagttgaactgaagaagtttagaacagtccaaaatccctgaaaatatctcaacccactggtttctctgggtagttctggcatgcagcagatatggagagattgtgttgaaaggggggaagtgcatgacatgagtttatcaccccatggatgagtttgaggaggtg

SEQ ID NO: 108898 - DNA, 403 bp, Zea Mays
tagtaaagtactttgttaggctttaattgggttcaaaacataagcctgggctacaagttttgccatgaggtacgactgaccatgcggtattatattggacatcaaagccaaggaaataactctacgtacatcatgacatcttagaccctacctttggctcactgactctcgaaggaccatgcatgcatgtggtttttaaaccacccaccaatttgcagagctacaataatgatatggttgatatgttgacatatcatgcgtatggtctttaatcctctaatagtctgatctgtaagggctagattggtagcccaaaaacccatcattttcccagccttttctctggagaaaaagtccacacaaattatttccttgggtttgtccatgtgtgtgtttggaagtg

SEQ ID NO: 108899 - DNA, 435 bp, Zea Mays
tgcctcagtttatcactagcgccagctctctgctctctgtctttctccttcgtcgctgcctaggctcatcgccggcgagctccagctgtcgtgctccggtgtgctgctccagctggtgttgtctccttcccagtctcatttttctctgtagtgaaggcgagtctcccacctcttgattcattctctctaatcctgtgaaatcgtgtgcaattactttgtgccattgtatccactatccttcagtgaggttctctgcaggttcccctctccttttcggagattttccattcacaaatagttgtttcgcggtcgtttaatgaacctgtgcaccaagtgcttggtgaaatgcccaaaccagtcaaaatagctcaaatcgacctcaactttttccagcacactccagcaactaccactacctctcacgccaaatttcac

SEQ ID NO: 108900 - DNA, 568 bp, Zea Mays
gatttcagtagatgtgtcttgacttgggcacagtgctattgactgtgcgagcatcggactcctcctgagtatcgtgctgttgttgcgcctagcaatgcccttctggctgctgattatgaaggtaggcaccagcggtggtggtggtggtaactgagcccaagcagcctgagaatgactcgtcgaagcaaccaacgtcgtgggttgctggttgcccacatattcagggatatatggcgaatagcatgaagcagtatgcaagacctccttcggctgattctgtcgcgctttggcttcagtgatctccttctgcttttggatcgtgacttggcacgtccttgttgtgtgtcccttatcctccccacagaataagcagaacaatctcctgggctgagtgccaaatcttcctctgaagcttctccccctctgcctcttgggtcgggtggcctgtaggaagtttgctgcattcccgaagattgtgagttttgctggctgctctgggtgtgatttgccttgtcatcatttgtgttgggattgtggatttttctgacatgcctggggtggagtcttc

SEQ ID NO: 108901 - DNA, 356 bp, Zea Mays
ctttcctagatcggtttgtgcctgtagggtgttcttgttaaagtttgcttgtaatttatgcgacattgcaatcatggtcgtgtatgattgtggtgttcgcagattttgtttccttgttcctagacagtcatttctgtggtgcaaatttagcatcttggatgaagtgaaaaagaacaattttgttcatttgttcttaggttctggcactaggacttggtatttggtaacaaagaatttacttatttaatagttatacaacctgtgtcattgtcgttgggcgaatgaatttcatcgacagtgtattgcatgaatgataaatgcatgccggtggccttttgccgaatataccattttgt

SEQ ID NO: 108902 - DNA, 381 bp, Zea Mays
tatatatatatttcaatttatctaagttgcttttttgtttggtttattcgcatacatcttcgtttttccttgttgctaggcagcttgtttcttctctcatatacagtattttcttttcagacatcgacgagtgtgctcatcctcatctctacccatgttatggggtttgcctaaataagatgggatctttcgattgccaatgcaaaaggggaacatatggtgatcccttcacaaaggggggctgcagttacctcacaggtgaaacactagttacctactttctgtttctttgagatgcacctataacctgattaatgtgctttcactactagtgaatacaccataaatgttggtgttggacctggctttggctatactccc

SEQ ID NO: 108903 - DNA, 791 bp, Zea Mays
acaagtgtaaaatcttcacggatcacaaaagcttgaaatatatcttcacgcagaaagaactcaacctaagatagagaagatggcttgcgttaatcaaggactatgatttggaaatacaatatcacctaggaaaagcaaatgtagtggcagatgctttgagccgtaaaggtcaagtgaacaacatcactactcatttgatgtcacaggaattgtgctgggaaatggaacaactcaatcttggtatgctcaataatatggaagcaacagttatggaagttgaatctactttggaacaagagattcgtaaaggactggaatctgatgagaaaatcaaggaaaataaaactatgattagtttgggtaaagccccagatttcacggaatatgaacaaggcacagtatggtttaaaaaagagaatctgtgtaccagaaatcgagcacctacgccaacttattctaagagaagctcatgattcgacttattctattcaccctggaagcactaagatgtactaggacctaaaggaaaagtattggtggtacggtttgaaaagagatgtggctactcatgttgcactatgtgatgtgtgtcaacgagttaaagccgaacaccaaagaccagcaggattgctacaacctctcaaagtaccggaatgcaaatgggaagaaatcggtatggatttcataggtggactaccccgtactcggaatggctatgattcaatatgggttatagtggacatgttgactaaagtggcacactttatacctgtgaagacaacttactcaag

SEQ ID NO: 108904 - DNA, 500 bp, Zea Mays
gaacgactcatgtcagaactacgccacgggagtagggagcatgcgtgagatagccgccgcattgctgagctgtcagcggaggttaatcgcttgcagcaggaaattgtggaacgagatacgactattgactggaccataaattcgcgctctttcgcttgggattgtgaggcaaaggctctagcccaggtagcggaattaagcacatccctggaaaatctgcaagcatattgtaacaccttgcatgaagaggtgcacgtgttatatgatcagctgcatccaaatgtgccaccagaagttgcagcaatgggagtcggaccatctagagcagctaatggaggacctgatggggagttggacctttttggagcccctccttccatgaacttcgtagatgaacgttctcccgatgttgttagtggtgcggccaaggacgaagataattagagtagtgtagtttaagtagtgtccttatgtaaagtaataaggaagtttagttgtac

SEQ ID NO: 108905 - DNA, 732 bp, Zea Mays
ccgcccgatcgcactgtagaaaactcttcacggccagctcagctagctgcccatgagccagatggcaacgcttcactcggcaccgcagggacccccggcccggcctggccattgcatggggtccatggctcgaacgtgttcatcgcttgcatggcacatggcgccggcttctcaaatgctccgggaccacacgagcaccgtctcttgcttgtactcaagagacaatggaataccgacccgttgagttagcggtccggtacggcgtatttgggcaaataaaaggagcaaacaagatggcgactactgacttgtatgttaatgcatgccaattatactgcacaggtagggtggtccgcctttttaggccaaattaaaagcgtgcatagcaattcatccttgtgtaaattcatcttgttgcaaaaaaccaagccctaatcatcaccattttcaaaaacccacgacgccccacctagctagtgcacgcatggctgtccgcaacatgtaaattagaggatttgtaatatagcgatgtttaaaatagcacataacattagaagataagatagaatagttgtttaatatagcgaggtgtaaatgactatgctccacctttttacgccccgtcagtactattcgtcttccaaccgcactccccatcttggtcttcaaaatgtaaacagctccatccgctccatatcttggcaatatccctcttctccttgcacttcaatc

SEQ ID NO: 108906 - DNA, 395 bp, Zea Mays
cacggatggaaattgaaaactaaaagaaatcacctgcagactccgagctaacggctctcgcaattctccgcagctcctattggtccatgaaaccaacaggaacctacggacgcctttccacgaacagattaaacgcgcgcgagaagcagcgccgccatggcaccaataagtagtcgcgaaacacgcagcaaacggcctaaaaggtttcctctttctcctctggaactgacctgatcggtttcccacgacgacggcgactccagcagccgcaaatccggtaggtttcggaatcgagggtcggagactctggggttctggaaggaggagctggtgaggaacgaaacgggaatgaatgaatgcgaatggaaagaaactgactggggatccgcgaagcg

SEQ ID NO: 108907 - DNA, 764 bp, Zea Mays
ttcagcagtagaggaactcctatgctagcatggctcaaagctgagatgcaagcgtcgaagtcgtcgttgccgcccgagtccagggcgctggcgccgcggaggagacgcgtggcgacatggtcgatctagtcggcgggctccttctccgcgacccgcacaaggccctccgctgccgacttagggaagacgacctggagcagcaaggtcgcgagaagagccaggacgacgccgcacattcacatggtcatgatctacagtaaccgaaggcgaagaaggtatacggatggacggacaggggttgcggtgggaggaggaagggagagagagaggtggagccatgggagggcgacacttgcaaccacgggagagcgacataagcaacaatcaaagcgcacgctgcagccatgacgaaatcgatgggagacaaatcgattttggctagggaagaggcggagagagcgaggaggatgagaaacgtcacagcacgggtgaagagagacgaggagggagaaagcgtcggtcagagagctgaaaaggagagaaggaggcgaggagacacgaacgtgagccgttggttggagatcgagcgagggggagtatttggctgacgtggacatcgcgagagaggctgttttggaccgcgtttcatatataggaagcatgcaagatatcacacatagatatgttagagaaaaataaaacccatggtcaaagccaaatagataaaagtaccacgccaattttattgttcaagttaatcaaag

SEQ ID NO: 108908 - DNA, 847 bp, Zea Mays
gagaggtggtgctggaggggctttcttcttccgctcagcctggcctccttggtttttggtcttcttttggatttcctttatgggggcgagcttctttagcttcttatcgtaatccatcttcagggttcggtaggcttcgtgggtgttggcctcctcgccttctgctatatcgagacactcttggagggatgtcttatccttcttaagttccttgacccgttgctctaagctttccacccgggagtttaggtgggtgcagtgggagaaaaggtcatcgtagtggttatcgagagtgtggaggtatccggccatgtagacaatggtgcggtcatcctcggtagggtctctccctgacagggcctgaagtcttttcctccaggtaggggtatttttgttgctaggtgggaagtaacgaaggggggtttcaaagatctctctgctgtagttttggcatagctgtttaagggctttttgggcaacactttggcaagtgtctaggaagcggtgcccgatgaaggtgacttggaagggagggtggtttgggtaacttcggctttctcccaggtagaccgccatagagcacttctccattccattttcgcattattccttccagacatattcgggcttcttgcggatccccatacgtagcatgcaactccgtaggaggtgaggaaatccttcctcctttgagcagtaggatgtcctaatgacccaagagccttccacctggtaggagaaaagaagggtccgttaatatcggggaagggagagaaggtttttcttaggggtaagaggtgttttcttgttaaggcaacttttaaggtcagggctgccgtctacggcc

SEQ ID NO: 108909 - DNA, 373 bp, Zea Mays
cgctgttgaagcatgtcagagggcttttagcactgtttgtgcctttattggcacaagggatttgattcaagagcatatatccttcagggtatggccacttgtggaaagctgggatatgccgaaggagacaaccaccaattctagtgatggtagtctggtccgactgaagtataccttcacatttagggagaagtttgataagccaaacgacgactagctgaagtgtattgaagctactagtgatgagctacttgaagcttactccaagaccgaagataatgctttttccacagccttcggaggccgggggaagaaaatactgaacaaggtctttgatgcgattggcttcatgtaccccgattatcgcttcccg

SEQ ID NO: 108910 - DNA, 360 bp, Zea Mays
attagttgtgcccaaggaccctgagctcagaaagaagatactggatgaagctcacctttccaagttctccatgcaccctggtagcaacaagatgtaccatgacctcagatctttatattggtggaccagaatgaagagggaaattgccaagtacatatctgagtgtgacacctgctagagaatcaaagccagtcatttgaagacagcaggtcctttgcaaccccttcccataccatcttggaaatgggaggacatttgcatggactttatagtggggattgcccaatacatccaggcaccatgattctatttgggttattgtggacagattgactaagactgctcatttcttaccagtgc

SEQ ID NO: 108911 - DNA, 688 bp, Zea Mays
aaaatcgggaggaaattgggtttcaaatcgctcggtcaggctaactgaataagggatgccatggtacagtatctgcataagatcaactgccagccattcaccgtcgccggtgactcgccgccgcgatgagcgatgatcgtcgcgattcgtgcaccatggtcagaagataagcacgggcaggtaaaaatcttggcgcccggattgagttgggtctccttacgactaagcttgccgtactcccccccagctcatccgtcgatcggataaccttcaccgccgtcgatctgtcaccgttgcgcgccacatgcttaagctttagccgcatcgtgatgaaccatggggtgcatgtccggtgaccgccagagtgattgccacggtgaaagccacctgttccaagcacagagctccttttcccctccagctgccagcacaacttgcccaaattgatcaccaccgctcgagcatcctataaattgaagcctcagcacgttccgctaggtaattgtgtgtctagtaaaccaactatcatctccgatcgttgcccacaactccccaatttgggattacccccaaatcggtcgaagaacgacgcaagaacacctcgtcgtggccagcgcgatacaggttagctcgtcccctctgctctctcatttgagtgatctcacatacccgtgatgctcgtcgaccc

SEQ ID NO: 108912 - DNA, 361 bp, Zea Mays
gttggctcggacaacagatcttcaggtaccacatcctcgagagcctgatcaaagttagctatggacaattcctgcagaccaacaagagcagacaaagctggagaaggaatatcgctacactccccactaactatgtaacaccgactgttcttccgaattaaggagatttcatcctcttcttcctcatcttcgtcaacaatacgaacaacacacccattggggtcagctctggccggatcacacccattgggatcagcatcatcaaggtcacacccattggggtcagcttcagtagggtcacacccattgggatcagcatcatcaagttcacacccattggggtcagccccagtaaaaagtt

SEQ ID NO: 108913 - DNA, 753 bp, Zea Mays
cgaattcgagcactcatttgctcagtttgaaggtccttctccaccaactcagtggatagatccgccaccagaacatcctggtcagcgatggtgatcttgacatactgagccaagcccattagctctgacacggcttcacgttgtaggtcctgcaggcggtagagtgcattcatgcaccgaataatcagtcaagtagtggccccagggaaaagtgcccacaccaccttggcgtggtccacccagtcttgccacatcagatcatcctcctttgcagcggggaataacccaagggggtgtgttgccatctccaaggggtgaaatgcgcagaaggtagtcagcgtgtgcatggctacgacctcggtggtgtcgtgggcgcggaaaccaagggtctcagaatccaacgaacgccactcgggctgcaaggggtggggctccaagactagccacaccttacagcgaggcactccatgctcctcaaacaactgcatcgtgtactgtggaggtgtgtggtatcctgcctcttgtagcacttcccacaagatgaggggaaagccctcctaagcaagactgtcagtgtggtaaggtgtgtctcctccctcgataggtgtgggtggggtcatctatgcaaaggtgagtgtaagtaaagtggaaaacaaaactcacaagtgaaaataaatgccaaaaactcctctattatcttacccaattatgatatgctttcatcggattttatcatgtaatgatgtatgcatg

SEQ ID NO: 108914 - DNA, 600 bp, Zea Mays
cccagccggcccaacaatcacagaaaaagggcgcgtgcccgcgcctgcgctggcaatcttgcaaaagggccctcggtgctttaactaactgggaacgggttcagttactatttctctgagtcattgacggtttacacataaacccttcacgttttattttcccccaagccgaggtcctcgacgacggtgagcgcgggggatgaactccggtgaggttgtgccggtggattcacacaacgaccggtgctcccgagcggccatcaccgaatcgaaccttccccgagtgtttcccctaacttaatttgaagattggtatcctaatttgccttggccacggcgaccgaaggccatgcggacaaaggaacatgttcccggtgataggtgatggtccagttcaattgaaggggtcgaagagctttaggaggacctagggatgctagaacaagccacgaagagacttgaactgacctgagctgagctggtcgtggcgaggtcgttttcacggtggcggaaaactaaattgggggaaatccggaattggtgctctgcagtgaacgattgctggtgattcttggtggctggatgcttaactatcctatg

SEQ ID NO: 108915 - DNA, 542 bp, Zea Mays
tcccatttgaattctggatcaaaaggatagaatcagtcgaaaaaggaccctcaagttctataaggtacaatggaaccaacacactgaagacgaagctacctgggaaactcaagatttcttagagaaaaattttcataggtttttagcttcatgtaacctgtaagatttgtgtaccctattgtaaagttggaacaagcccccctaccacccccctgctctgtaagataaataaggaaataaagttgcgaagtgtttccttttctattacttaccctaggaccttaaatctcgggacgaggttcttttatggggggaaggatgtaacacccctggtgttaccagaactaaaatttgagcatggcatcatatgcattgacatgtcattatgtttgttacacctagaatgcatccactaggttaaaacttcagaacaagtgtgatgtggtgacttgaagtgttcttaaccctagagtagggtacttaaccatgagattagggtatatgggtgtggtgaggccaaattgagtattacctcaaaaggt

SEQ ID NO: 108916 - DNA, 534 bp, Zea Mays
ggctagctggcgtacgaggcacctgcgtggaggagggcggcaaccaacatgggaaaggcacgaggagggcagcatatagagaggatagggcagcatgcgacatagggagggaaggcacatgcatggagggcaggctagcatgagatgcgcagctaattggcattggaggtgcctgtgtggaagagggcgacaagtgtcatggggaggggtggtgcctgcatggagggcaactggtattggagaaggcatagggatggcgatgacatcaaaggtggggagggtggagtccgacatggggagggcagtggccaatgtgggaggcgcctgagaaggacgatgattggcttagggaaggcacgagaagggttgtggccgacgtgggaagggtcatcgaccgacgtgggctctagatctatgggaagaaaggtcctttatcaatgttgaagggtagaagagtacaaagggagagaaaatataaataacagtttgcacccttaatcgatggcatctatcaaagtttgttggctctcaccg

SEQ ID NO: 108917 - DNA, 292 bp, Zea Mays
taactccttcactctctttccttgatataatgaagcacactcactacacaaactaagggtagtttcactatatttctacactctgcaaatgagaactcgagggggtataatacaaaatgagataggggtacatataggtgatctaagttggtaagggggtaaggtcggtggctgggcgaccacgtgtcatgctggctggacatagagtggatgggtggcaaaggcacgtctaacccctagatgcacaaccttgcttcatcaatgccttacaagtgctccaaaagtcagttga

SEQ ID NO: 108918 - DNA, 607 bp, Zea Mays
gacctcatgcatgtacgagtacgacatcgcaaggctccacacattgtgtgtccttattagcgtgtacaaaccggatgccccaaaccttaaacagatataaccaaacccctaaattgaatgaggggaaaagtcactacttctgtgttcgaatattattatctctttgacggtgtggtttatggtcagtacaatgagattagatttatgaagatcgatccataattatgtctggactgccacagatcggccccatatggccagttcaacgaatcactccgacatctcccctagcaacatcattgagccaactatggagaacctatcggctgaagagttacagaaactagagaactataggggaaaaactactgggagcaattaacaccaaaagctcgtctgacaaaaggagtgtgacctggcatctcttcgacccgctgcacccgcacccaatgtaagtaaatccgacgatgttcacactcttagggtttatgtagattagcagtgggagcaattacatcagttagttggggtatgcaaagtgattttaaaagaatgacacgcgtatttgagaaatcctttaatcccaatttcccatcacatgacattg

SEQ ID NO: 108919 - DNA, 288 bp, Zea Mays
tagtgcttctgagatgaatggaatatcgactaagatgagcttcatccaaaatttgctggcggacttcatcatttttaggcacaactatgcgatcattaaaccatattatgccttgatcatcctttctgaagcaatttgctttgccggcttctattttctcatgaatatgtttcatacccttatcatttctttgggcatcaataatcttttgcagaagaatcgactcaagcttcaattgggtcaaagttccatgttgtatcattcccaggtttaatttctccatttctt

SEQ ID NO: 108920 - DNA, 442 bp, Zea Mays
gtccttacttatttctaatctaacccacgatccaaacatctttatctttatatctcttccatactcttttaaagcacgagtttccaccgccatgcatcacgcccaaagcgcctaacaaccagataaaataatcaagcaacaatcatgggtgcttccttctcctctttcttaatactgtcatatattaatccctttctatccctttcctcgtctccgcctctttcaccaagattcttccggatcgccacagaggacctaaaggacatcgagcgaaccatcctactgggcctctgacttgtgagtcgccgtcgcatcgtaggtctatttttctccacacacgtctcacctaacaactagataagcaccacgagcgcttcctcctcctccttcttgttgttgtcgtatttaatccccaactttccatctctttcctcgtctccct

SEQ ID NO: 108921 - DNA, 401 bp, Zea Mays
aattcctcgaactttggtcgatgtttgactattttatccggatccgtactcgcaaatggaatactcagtatgtcgtcctttaataaattcttactcgactcagcatagtatctttgtgtctaaaccgaattcaaaacccactccgacagcgattttaaaatgtcacgattcgccttctccgactaaaaatccaaagccgatcaaaattctgagaggaacatttatttctaaaatagtgcgcgataaaatttcaaaacggaatctccaatgcgttgccctcaaataaattcttatccgactcggcttaatacctctacgttgatccgaaattcgaaaatcaacaccggtaatgatttttattaacccgacccgattgatctctatcacgaatccgaaaccat

SEQ ID NO: 108922 - DNA, 606 bp, Zea Mays
tgtattttgcttctttattcaattcctgtcatatacaaatttatgttgctgctatatatgatatgaatatatgttgtcttctatacattgtaggacgatgatgtcatagacagtgatggagatatagatggggctaaatgcagatgattagagctactttgacatgtagagttgggttctggtgttggctgctggatagtggatacttttggacttggcactttgtgttttggacttgccatatacttttgggcttttgcctgtggactgctagtttactaacactgatagtgcactagtgttgtagtggtactaatactaggctaccagcatactactctttgttgttgggcacttgggcgtactactctctgctgtttggcacatgactaaactgaatagttgatactgttagtctataagtaatagcgtgacatgttggcctcttgggcacttggtctgcaatttggttgacccgtgacatgctgtggaactaatatagtacattactacattttgatctttctactgggagaccgatcttacatcttacaatactataattttatgtgtgatgctcttgtttgcatatggattatgcatggc

SEQ ID NO: 108923 - DNA, 507 bp, Zea Mays
cagttcctttttgggcaggccccatgtctgaacccagcacgtgattctttcaagcgtttgcttcttctgagttctgactccacaatgattggtgtcggcccaccacaactgtcagtatccttggagatcccagaaaggacatcctccagagaggaatcattcggacattccttagggacgacaaaagggagggattttagtcccggctcctgcagagttgggggaatttctgacaacagaaaggtcttcgaccaattgaaggcatcaggttgaagcagatttgaaaggaaaaaaggtgcccacttcttagggatgtccaccgagtggtcagccaacccagcaggagcaaagtatttggcccagagcctggagaactgggcagatctttttctctcctcaaacatctagaaaacagggtcaggatgccattcctgagagaacatgaaattcatctctaaattctgaaagtgattattgtttggctcgccaacatgggcctgatgaggc

SEQ ID NO: 108924 - DNA, 337 bp, Zea Mays
gaatattgtctctctatataaagatagcatccacaacagagcagagaaagctaagagatgtgagatgagggtgatttttttccagtcatccattcaatgcaactggtatgcccacaaattgtcttttgatctacacgaatttctaatgtttcaggttgctcagctgggaacaaaaaaagcaaatattgtaatagtagtagatcagtaagtcgtacatcatatcgagcattccggagcaaaaggagtctggcaccatgggcagcgtcaacgtacaacacaggctttccatttctttagggagcaccaaaaaactgcattagcggtgagtctcacgaag

SEQ ID NO: 108925 - DNA, 412 bp, Zea Mays
cgttaacgaccgttggtgacaacgctgtctagtggctcttatgccgtcaagtgggccccaccaacttatgtctaatgactctaaagcaggctgttggacatggcagtattaattacgatagctactagggagccatcgaaaataacctggacaaacttcagatttaataacctatctccgacggcttggaaccatgccatcaaaattaacaaaaccgtcggaaataaaaaatagcaaggaggtaaaaatcctccctattttttgttaattcccataattcaatacattacaaatttaatatatattagatttaaccacaaattcaatacatatcagccacattcatatatacatcacattcaccagccacattcacattcacatagttcaacatcaatccaattaaattttc

SEQ ID NO: 108926 - DNA, 591 bp, Zea Mays
gccaggtcgctttagtgcataattcacggtatggaccttcataacagcttcgtaccatattcaatttggttttgcatcattagggagtcgagcactgcgcttaggatcgagttccagtggggattggccatggcgccgccgtgccgggctctgaccaccgcgatggatggggggaaagggtggtcgagcttcggtggccctttatctagcaagggatggccaggattagatcctggcgtgtcggttaggcaaatggtgtagttaccgtccatctcggatcggatggatctaggttgatagtcggtactttatatctgaaccgttgatctgctatcgaccagatctgggccgatctctggatatcgcagattgcagccgttaatcgtggatcagacggatcctgttacataccgtttcatttaaaccgtggatctaatccaaacccttgatctcagatctgacggcccacatcaatagataccccttcacccagaacttttagcatatgagccctcgggttttaacggaataaacccgcagtccaccgtagtttagctctgagccttaaaaaaatttataccgtgacccctg

SEQ ID NO: 108927 - DNA, 291 bp, Zea Mays
agaaggcggaagggagtgaacccggtcgccctgcactcagtcgtgtttagtgcccagactgcctcaggtaacaaatcggtccatctgcccttttttcatcaaggagcatcttcttgacagctgtgaagatttttccgttggcgcgttccacgaccccgttggactgcgggtgatagactgaggcgaaggcaagcttggtgccaatggagaaacaaaaatccttgaagtcttggttgtcgaactgcttgccgttgtcaactgttagttcggacggtactccgaagcgacaaa

SEQ ID NO: 108928 - DNA, 544 bp, Zea Mays
gctggtgtcgccgtggaaactctggtgacctcggttgtgccacgccgtggcttgttactgtgcggtagtgaccgtggcgcacttaagagtacaatcgtggagccattgcaccggtgaacgccacgaattctttgcgccattgctcttccccctctccggccgccgcgcctctccttcaaattagctgccaccgctcaagggccctataaattgagcacaccctcggctccgctaggtattcaagcacccagcacacccactcgtgcctccaattgttcacttgagtccccgaatagctcatttcccccaaatctggtttccgccaccgtaaaaaggtcctcgccgtggctagctcgtttcaggtccgatcttgtcctctgctctcttgtttcagcactcttacataccactgatgcccctcgacccattcaattaagctagaccgtgctagatcgccgggaacacttctgttcatccatagttcgcactgtctccatggacagggcgatttagggctcaaattgtgcaattgagcgaggggaaa

SEQ ID NO: 108929 - DNA, 642 bp, Zea Mays
cccagtgagctccgttaggttgttacgcgtccagtgcaccagccctcgcatctgattagccacggtagctcgcgaattccaaacttcccccaaatcgggtttccgcgccaccgtgaacacctcgtcgtggccatccctcctcaggttggttcatgcctctctgttagatgttctagcacctcttaggtctcatgttgcttgtaggctcggttgattgagttggacaatgatggattgccctgaacactatattttcttcttggttttcgcagtcgtcgtgaacaggcatgctccggtccggattagtgcaattagttggagaattagtgtcatcaggggtggaattaggtgtcaaacaaaggaggggcctagccgttgcttttctggccagtacgagttcgccggagatgtactcgccgccgtccaccgtcgtggacctggctctgcgaagaaatagaagtgcaggggcctaactgtgaacgtcagagacacagagaaatagtgttaaggaatctttatgggttttcaaatagccaagggcctctgcgcaagatcaccagcgcgggcgcgcgcgtgtttctctcgtctgcgggccgacttgggctgaattgagcccaacactattcattgtttctctttttc

SEQ ID NO: 108930 - DNA, 388 bp, Zea Mays
tccattatcatcgcaattcgagacacaatatgtatataacaatcacttaacgcaatcgactcctacttaacatgagttggctaacacagtataagacttaacaaaccattttagacattgtaactcaaaacatgggtgggagcagattaattaacttttcttaaccattcatcaacttaaacgggacaacaccatattttaggagatctaatatgaagatcattaacacatgacataaaactccataagactacattttgctgctgaaggacctaaggcgcttatgtgcatatcctatcggattgttcttcaattttaacaaggaccgacttatgaacgctacgtgcttccaataatttttgggttgcgatgacactcatactagacc

SEQ ID NO: 108931 - DNA, 840 bp, Zea Mays
ttcagattcagagaaaagttcgacaaaccgaatgatgactggctgaaaagtattgatgctactagcgacgaattacttggggcatatactaaagccgaagatgatgccttatcctcagccttcaggggtcgaagcaagaaaagattaaacaagatttttgatgcgattggttttatatatcctgacaattgctatcccctgcgaaagcagggaaaaaagaggaaagatgctgctttggccatttctgctgtgtcaaagggcaagcaaatcaaagttttgacccatagacccagatatattgaaacggccatagtgccgaaatttggtgaggagacatcttccgctgctgaggcagaaccggccgctcggagtgctgaagaatcgactgtagcaccgaaggtgcttgtagtcggctcagccgaagcaaaagacagtgtggccaaaaagccagaattagaaaagagcccaccggtaggggtagaactgccgaaggtgacaaaagctcccgccacaactcccaagagaaggagaatggccagtgtgctaaacgctgttatggagaccacaaaagcattgactcctgtccctgcgaagaaagttgccgaagctgtcacagcccaggccaaagccgaagctgggccttcagtgcccattgagacgaagcctgccgtgtctgaggataaggctgagcaaaaaactctagataccggcatggcagcggggcagggcatgacagaaaaagctaaatctcctgctcccgaagctccgtccgaagatgttgattacattattcgacatgcttcggggaaaagattatccgaagaagaaatcttagaagcc

SEQ ID NO: 108932 - DNA, 276 bp, Zea Mays
ggagagtttgcgcaactcttccttcccaaagatggcgaggaatagcccaaggcagaacgcaacccaaaagaagcaatgaatctcgtatgcaaagctgctgattacaatgcaaggaagaagaaaaagtagtaggagaggttgaggggaagatggcctagctgggaagtactagtacgtgtagatgaaaaaggttaagaaatgttaattttgccaactagttctgttcctgtacgacgtactaactgcaagtgtagtagtacaaagttgcattgcatt

SEQ ID NO: 108933 - DNA, 808 bp, Zea Mays
tgaaaccccaaccggtaactccgcctagtaataatggggtagtcacggtcgcggtgtgctcagatctcgtgggcctggacgcgggtggtgctagatttggttccattagtctgtggttaggttttgtgtcggaacttcagtgggtcgagttgcattagttgtagctaatggtggttttgccgattgaattctgtttctcttcgcgcatgcattgttagttcatagtgtagaactgtagctaatccaatacagtcggtggctattgatctttcttagagcagtgtttgtgctagtgattattttgtcgatcttgccgtgttctctatcgtgatatgtgatgttaacctcgggggagtattggtacttgacatgcccatactcaagcactgaactgtcaattccaccttctgccacttgacccatgaccagtgacccgctctttgcaaatgaacaggggtactcagattcaaactgtcctggtttttgcatctcataactttgcctgaacgtagcactatggcatctggtgggtttgatccctggttgataaattgtcttgactcttgacttactatttaccactgcatttttaaccacatcactataaggaacttattgtctgtgccctaagttgtacaacatgcactttcttgattatcctagagtggcaatggtaaaccttgctagcgtaccacttcatgcttcatgtcagtctggaagctgatagttctttaacatatcatacaataccgatggaaagcataaaactatttcttctctctgctagttgttacttggtagatcacac

SEQ ID NO: 108934 - DNA, 756 bp, Zea Mays
ccacaagctacattctgatggtactcttgatcgctacaaagctcgttgggtccttcgcggcttcacccaacagcccggggttgattttgatgagactttcagtccggtcgtgaagcctgccaccatccgcacggtcctcagcatcgccctctctcgccaatggtcagttcaccaactcgacgtcaagaacgccttcttgcactgtaccctctccgagacagtttactgctcccagccctcaggttttgtggatacagctcgccccgattatgtctgtcgtctccataaatctctctacgggctcaagcaggctcctcgtgcttggtacagctgttttgccactcacttgcagtccttgggatttctcgaagctaagtcagacacctctctgtttgtctaccgccatggctcgcacactgcatacctgctgctgtacgtggatgacattattctcactgcctcctccgatgacctgttgtgccggatcattgcttccatgcaggcttcctttcctatgaaagatatgggacctcttcagcatttcctcgggatcgccgtcactcgctcacctgctgggatgctgctctctcagcgacaatacatcatcgacattctcgaccgtgttgggatgactgattgtaagccgtgcaatacacctgttgacacacaggcaaaactctcctcggatggtgagcctgtcaaggatcccactctctaccgcagtcttgttggagctctgcagtatctgacgttcac

SEQ ID NO: 108935 - DNA, 1016 bp, Zea Mays
gctgaagttggactgctgaaggagaagggtctgactgctgaggctgttgttgctgattttgtcttcaagaatattcagccgttgaaagacagagcatacccggcttatctataccgaggcctagctgactcaactcgggttaccaacagaagaattccctctgtagacttggtgaaccgacttgagatgattcttagaggcaaggtatcaaatgttggtgccccagtggcatattcagcctggaacttgcctcctcccaaggccttcactctttttgtgtcgaatccacctgtcactgatggcagtttgggccttagagtgcgaccctctgctgaagaagttagcgccttggttgcctcactcggggaagttcctgatagtgaacggcaggtccactttgaggtgcccttggatcctagtgatgcagagataagtgctatgcttgatttgctggttgaggactcttctgatgctgctcctgctgggacgttggtggtggcacctcccccagaaactgatataaccttggatattcagaagcctgtcagtactcgcccgaggcgcccttcccgagccaatcaacttgatccttctgctgacgagccgaaaaagaaacagagacgtctccggcgagtatctagtttggatcaggatgttggtccttcggttcctgctgctgaagaagtgcctattcctgaatttacttacgctgaactcgatgggggtgctctacctgctgctgaccccaatgggtgtgctccttcctctgctgaccccaatgggggtgcttcacctgctgctgaccccaatgggtgtgttgtctgtgttgctgatgaagacgactgtgaggaagaagatgaggtccctttgactcggaagaacagtcggcagtatgtcgctagtggtgaaagtagtggagttccttctcctgctctgtctgctctcattggtctgcaaggattgtccctggcaaattttgatcagattcttgaggatatggttccagaggatctgtt

SEQ ID NO: 108936 - DNA, 1545 bp, Zea Mays
gtcatcgactcatcggcatcagtaagttcttgtatatatgtgttatagtcgtaatttattggctacatatttaaatatctaattacttatctgaaaccttgattgctgattttatgatgttgaagtgctgctacttttgtaatcagataacatcaaccatattaacaagatgataacacttcattagatcagtaacaggtaacccatatgcttgttgcatctaaaatatatagttccatcttgtaaactactttctattcctttctgccatcaaggtgaacctgaaataaaagagaacgaccaagcaagtctataagaggcaggtatatatctgaagtgatgtgtcctatcatatctactacaaaatagctagataagctcagtctttttggttatatttatacttaccatttgtatctgatatcaatatctgttagatggactgctcccaagagatgttgactgttcacaacattcacttaatcctgcagggcgtacttgggcaaatagattcccaaaaggtgcttcttcctcgtgacttgccacggactccaattatgacaacaacttgttttgagcaactcagatgttggttctcacttgtcgatgatttcactccttggaggaaaagagtgagatgtattaaaccactcagccattgatgggaagataagacatagatactcctcacatttatatttctccagcaatggtacctcctttgaacggacatgacaagacagttcagttaaatatttgcatggataatccaagacatctttgtcaggtttgtccctatcaacacgacttctccattgtttggtgtcataaaaaagttacagcacaaattgaacaatgtgaggagaattctccatatattaaaactggagatttctagcatggatgaaagaatgcatgctttaactgtacaacagatatcactattgcaaacactaagattttgcactacctgtaaaaattcttccagtaactacagtaaggtagtgccaacaccatctatagaaaaagactctgtcatgattagagaacttgaactttagtctgaacaagactgaaagactaccagcacatcttgctgcttccatggagatatatacctttcgcaagctgggcaaggtacccgtacccctaggctttgggaggcagggaaagcgacgaccaaccaacgatggataatcacatttaaaggtttgaatcaacaccgacatcatggttcaatcacttttgagtcttcagattccgagtcctagacttgaaatgcaactcatagcagttgctcacaaattaaaatacagaaaacaatatccagctaaatgtttacattgagtagcactaaaacaatatccatatgaacttctgttatatagagtggtagcatatttacaatatgataagaactagaaactactaaatgcgtcatttcttcttgccctataaatactacactttcctcatgcgtaaacaatccaacaaaaacatttaactgatattcatcatcccagcttgcattcatgcaatcatgct

SEQ ID NO: 108937 - DNA, 411 bp, Zea Mays
gacaaatattcgagaacggaggtagtgtcttacaaagccctaattcaaaaaatagaattgtttaatattgttgaaatgacaaacgacataaggtcaagtctcaagaggggtgtagcggggaggtgatggtaatggtcagtgtctcaacaggtctgagatagctagtggttcaattatgtcctcaactcctcatacagaaggaatagcagcggcggcttctagccttttgaacttttgaaacagggaactctgaacatttgaccaagccagtcgtgaggtttcatgcatctactgtgttctgtcatttgttttcggttaactgttagtatgagtgacttgtcgttgtccaactaagaaccctgagctcagactccatttcccatatcggtcgtgtccatggaatgtataagt

SEQ ID NO: 108938 - DNA, 749 bp, Zea Mays
aggaaggtgtacaaatatttataatttaagtagctatgaaaattcctaaacaagtgttcttattataggcggcgttggattctgctaaataatgggccatttaataaatcatctatatactacttattaagactgtaaaggtagtctgcctctgacatgttctgccaccggtctgttctgccgttctgccatccaaccatgcccacgtgcaataaaaaaaggtaacaaagacttgggatcgaacccatgaccactcacttagctcatcccttcaaaccactagaccacctttgtttctttgttagaagtaacactcggtctccctttaccattttcgtggttctactactcatctctactacaccactcgcttagacacggtgcattccctgcctccagactcccacgatctccactacacgcgaggacgactctgcccgcctagaaaccaccgcttgctccgaaccccaccatgatctccactacaccgcttgctctgaaccccaccacaatctccactacaccgctcagcctcgctctgtgccttttcgctcgccgcctagtcaatgtggattcggcctccatgtaagctctctacatctacctcttcaatttctaggccctgtgttgacctctccaaaacctagacctacgtcttaacctaacctcaaattgttccctacacatcttccaagggctcatgttgtcattcatggcgggacaacagccgcttgctacccccgttcttt

SEQ ID NO: 108939 - DNA, 537 bp, Zea Mays
tttgctttcaccggcccccattctatcattctcatcaactccgcagctgaaggaaaaacggtcttgaatgttttcggatcaatttgctcaatagcccatggagttccacccggtagaagcctttccaactccattgtaacattagcactgccaatttccccttcaatgacctgaattaaagccaccctggaatcactcttgctcttgatcagtttcttgttcgtcgggatatgaaaaaaaccaccattgtttattccaaatcccgccggaatagcatgtgtcttaggagcgttaaccaccggacatctagccttgatgtgggtgtttgtgccacaaacctcgcagaagagctccgtagtgcacccactgatcacatgcccttttgcaaaacatcggtggcaatgcgctttggcattagcctttgctcccagaccctgatcatcctgcccttccttcttcttggtaatttcaatcaacgacactggtttggatttgtcaccccctgacgatgcacctccggcctgaacctgctgaccg

SEQ ID NO: 108940 - DNA, 718 bp, Zea Mays
cgcccacaagtttatcatttcaatccataagtgtccatgtgaacagtgaaagcctataaccaaatagtaaaaggtggggggagaactctctagtctcgaaaaagggagagtaaaagatcagtaaaaccaaacgcacttgagaaatcatagctcaactgttaaacagcagtagacgacaagctgcccttctttacgaaaggcaaagggccaagactctgacactatgtttcgagattaataggagtgggataaggtaataggcaagagcctctgcttgaacagatttgccaattgcggtggtccaaaaccgtcggtttaatggtcaagaatgagtgaacttgtctggttcttactttttagtgtatacgtggggtactagggcatgattattggggtggttcaaaactgtcagtaattaccttttactgaatacattcttatatacatccaaacaggcatgtagtataatttcaaaacatcattagacctaaatctcacacaacacaaaaaaacatagactgatggcatattcacgtttctctatatctccggcagtctccctattccactcactatcacacttcgtatttcaaattctactatataaatagtgcagtctacgggactagcgagacgcaaaacatgcatgcaacaataaggagttgctcaacaattcgcttgtattttagatgctgcactgatgggtgatggcacagac

SEQ ID NO: 108941 - DNA, 413 bp, Zea Mays
ctggatcatcactggttgagttctgcttgaaggccttcttcgcgacccggtctagatgcttcttggggcattggcaaatgaagtgcccttcttccttgcagtagaaacgagcacctcttactttgacctctctgcgagtcagttttgcttgattgccagcagatgatggttgatcggttgcctgcatgctgaacaactgagcttgatttgattctcctgtttgggtattcattagctctggcgcttctgcttgcggttgaggcggtttaatcttgtacccaaacatttttctggtccccttgttgttcttcattccattcagcagatatctatgtgactcatccttccttttcaccactgtcgaggttggaatcttgtcgttgacctcatccattttatcttcattgggattc

SEQ ID NO: 108942 - DNA, 647 bp, Zea Mays
caaaacaaactaaaatggaaataataattaaaagttacaaatacttgcgatataaaatcttttatgtatgtgtagctccccctaaatatgtgcatgagttttgcgatattaacattgacttgatatgtcaatttgcaacatatttagagagagagaacaatcaacaccatacacaaaaatgatgagatatgaaacataattgaatataaagagtaaaagcacatacaagctcatcattgcatagcatatgatatgaaaaagttctacagctattacaataatgagagctcgtctcatcacaccatcaagtgtttatggcattcaagccatgcatgcagcaaatagttattacagaccaagtgttcattacaaaaataaagtactgaataataaacgttctccccctttttggcaccaagaaccaaaaagagagagaaagaagcgccaatccaaggatcaccagtggggagggggatgatgaggagcgaagaggtgttgcgccaggtcggaggcaaagtgttcctctccagactgggccggaggaggagcactgccagacgggtcctggggcggagggtaagaggacgattggcccggatccccgtgatatgggggtgggacaaactgctccggatcatcaaaataag

SEQ ID NO: 108943 - DNA, 495 bp, Zea Mays
gacccaacgtggacatccatggaggtatgagaaggagaacccgctcggacaccctcgggggctgggtcgcagctcgcattgcccatcggagccggatcaccaccggtagaaccctcgggggctgggtcgtagctcgcgctgcccacccgagctggatcattaccagcaacacccttgggggctgggtaaccgctggcgccatccttggggaccgtgttctctgcagcagccacctctaaggctgaaggattctcagtcacctccatgggaatggagcaacctagaccagcttcttgactctgaagaccgcactccaaggtcgatgaggcttgagacgctgctcgagataactctaaccccacatctagaatgttagtgcaaacgtccatcataccaccatctattggcttggacagcagatcttcaggaaccatatcctcgggagcctgatcaaaatttgctatggacaactcttgcagaccaacgagagcagac

SEQ ID NO: 108944 - DNA, 354 bp, Zea Mays
gtcaatcgagcagcgcacggttgataaccagaggagaagtggtgctgcgattgcggggttctagtcttgttgattggaagccagatcgtctgtatgacatctccaccaaatcgacagttaccttcacctgacggaagatcgggcacccccgttcctatcaagtggtattcaaagactcaggtattaccatcaggcttaccctagtttagtttatgtttttcatcctataactccagaaaattgccatacaaaaaaattccgctgtcctagaacccttgtttagcctttgcaatttcgttttcagtttggctttgttcagttagtgtccgtggttgagtcgtgttgctggtttag

SEQ ID NO: 108945 - DNA, 735 bp, Zea Mays
cggcccggaccgagcgcggcggcggccagtcgtgaatggcagccaccttggccgggtccatggctacccctgcggccgagatgatgtggccgaggtaggcgacagatggtgctccgaaagaacacttcgaacgcttgatgaacagctgatggcgttgtagctcctcgaggacggcccgtagatggcggaggtgatcggcccacgtgctgctgtaaatgaggatgtcatcaaaaaataccaggacgaaccgtcggaggaatggccggagcacgtcattcatcagtgcctggaacgtggcaggggcgttgcaaagcccgaacgccatcacgaggaactcgtataagccatcgtgtgtgcggaacgcggtcttgtgcacgtcttctggccgcatccggacctggtgatagcccgaccgtagatccagtttggtgaagaatttggcgccgtggagctcgtcgagaagctcctccacgaccgggatggggaacgcgtctttgatggtgagggcgttgagggccttgtagtcgacgcagaaacgccacgagccatcgggcttcttgaccaggagtacgggcgatgagaatggggagtcgctgcgacgcacgatcccctggtcaatcatggcgttgcactgccgctccagctcgtccttgtgtgcagccgggtagcggtacggccggacagccaccggtgacgcatcgggcttgaggagaatgcgatggtcgtgggcgcgct

SEQ ID NO: 108946 - DNA, 342 bp, Zea Mays
caaggccaatgttgtgacagatgccttaagtaggaaggccaagtgcaattgtatgaacatggatgcaagagtcaccaccctatgtgatgagttgtgcaagctaaacctagaagttgtttcctctggtgctttaaattatatttccgtggagcctaccttacaagagcaaatagtcatggcacagattggtgacaagggtgttcaggtcattaaggaaatgatcgagccgaaagcagaaaaatacaaatgcttccgtcaggacagcaaaggaatcctatggtttggagatcgattggttgttcccaagaaccctgagctcagaaagaagatattggatgaagc

SEQ ID NO: 108947 - DNA, 532 bp, Zea Mays
tgtcgcgtcgtcgtgactctttacagccgtcaaatcgtcgccggtgagctcgccacgactgaggacacgaactcactgcgccatgatccttccctgtttccggccgccagctctgcccgaccaaattgagcgccactgtcgatgccctctataaattgatggccgtggcagctgcgctacatcatcgcgaaaccagagcccccactcccacccttaatcggtctccagggttcaccaatttcgaattctccccaaattagtttccgccacctcgaagagtacctcaccgcggccagcccctttccggttagttcaacctcccctctccctcgtttgatgctcgccgacccacacaattgagctagaaaccttctggtcgccgggaacatgggtgtctcgccgcaacgctctcggtccccgtggccagagccaaccaggcacccaattgtgaaattaggttaggggaaatgatcggggagggtccaatttggcgttagttgctcgggaacgccagtacttgccccaatcggcc

SEQ ID NO: 108948 - DNA, 726 bp, Zea Mays
ttttggttaacattcctaggagtaggaacatgacatatggtgtaaggcctataatgtcaaggcttctgacgtgtgtgtgtgaagtcactcttttggttggtatttgtatgcgggcaaaaacatttggcttgtatgtgcattttatattatgaagtatgtgatgaaagtgttgtgtgtgcttggaatgtgattcttgcctttatgattttcacatgaaattttcttctatgagatcttacatggcatggttttcttctttcacataaagttgcgacatatctcaccacctacccataataacaatgtgcagatggtgactactcgccatatcaacctaggagccgctggaacttctggtggtggtaaccaggagggtaatcaagaagtacctcttcctccacctacaccatacacactcgagcagtttttcacccaatttctaggagctcaaaggaatatggagaatttgcaacgaaacatggaagtagagcttcgcaacattgctgataacactcgccatgggcaaccttaggacacacatggagtcaatcagtatagcagtttcaaggattttgtggacaccagatcacctatattcaagaaggcagcagaacctttagaggcagatgagtggattatcaatatggagcagaagtttcatttgctaagactgacgaaagatctcaagatagagtacgcaacacattagttgcaaggacccgtagg

SEQ ID NO: 108949 - DNA, 510 bp, Zea Mays
ctagcattgagccccagttgggcatgatggtcagtcagttcaagaggggaactggtggaccggggttaagctttgttgttaatgatgggagtgatgctcgctttggtacggctggtgagtgcagtggcttgacttcattatagaaacatctagcctccccaaagtttgtcaaaatcaccccacctaaatctgcaattgatgttatgagagatggggtttttgtggagcctgtgagagccccatctcagaaacatgtgtggtgtccaaaaccaaaccatcccaggaacacacttgatattctgccagacatctctagtgatcccctttttagagcaccacatccacccaaatcgacccactcccacaaatagactccacctaagagagaggtgagatttcattgtgagtattgcaaaagggatgggcatttgtaggcgttttgtattagaaggaagaaagatgagcgacggggttttgaggtcaatagtaaggacatgtacaatgtttttc

SEQ ID NO: 108950 - DNA, 1221 bp, Zea Mays
ggccattatagcttccctgttttgaaatttaagcatcgcatttgctatgtaggtggcgtatcttgcttcaaaattattctttatactatttatgcaatgctcaacttcttcgtccgtctttccctttaactcttcattgtctttgctgattctgaaagtgtggctttcctcacatatcagtattgggttcagatacccaacccttttaccggcattagcatcgggcttggtaccgtacatgatctcttgttggtcatgttgcattctacaagtcacacgtgcgtgtgtcagatattgaaaattaataacacatagatgtggaaatatgagcgacacttacggtgcaaacagagtcacaagttgcacgtcgagtttctgaaggttcatcattaaccacatatcctcgaatgcaagaaaggccttttggtccgaaccaataaaagcatggtctggtatatgcacactaatggcgtcaatgccaactcatgatgcacgcatgtaccagtcatgcaaccttttaataccagcagggaccttcctcagtttctcaagagttagtagaggtctggccggcacataatgtttaggcacatttttataatctttcttagttgggatctttatctttgcggccattgccttagccttttctacagactcctcgtgctcggccaaatcaacagtacgtgacgtgaggtcctatccaatccctttcaaaaatcgagctgtgccagcagtagtagctttactcttctttttctcgaatgtggacaccaattttggtagagggaatttagatttctttgatggtcgtgaatcccttgatggctgtggagaaggtggcagtgtcctaaatgttgatgcttgtggcggagacggtggattagaaagaggatgaggagcagcatgggaagattgtggaggttatgatggatgtaaaggtactaaagtttgaggaggcggagatggttggggatgagatgacgacggcgttggtggatcaaccaattcgacatcccttcgaggccaaaggatgaaattttttatggcttgtccaagtgtctcgattccttccggcccagggatgtctacatgtcatcctcagatccttggacgaccatcgtaacttctaccctgcaataatcatctggtatgtcgcttccatgaaacttacgtcctaggatcgcaatgcctgttcctactttcttcgtgcaattattg

SEQ ID NO: 108951 - DNA, 565 bp, Zea Mays
ttttttggctattagtggacagtaggtatataaaatctatcctaccaaaatcaagaacaatcctactgaggaaacggaggctttggtaccagatgatatgcacacgcctaggcagcacgtgtagcaagttgttgtggcccgatcttctcgtaggatctacgaacttgataaattgtcgctgcgtgacctggtgaagaggcagcgcaccgcgaggctgtccacgcgatgaactaccgagacaatcacccttccacgtatcgacaaaacagcccacgcaatcacgccctatagacgtgaaggcacgaacttggtgaactgcagttcgacgttctacaactccctaaggaatcgaaagaacaaatgttgcaagcctctcaagactcacgcataaacaaaactccacgagtttgtgtattctgaattcaaaaacataagatatctcctttcattgcctagtgcaagatatatatagagatagaggcgttcagctttgagtaaatggctgcatgcgcatgctctagtggatttagtgactggttcgcgcatcttttcagcttctggcagc

SEQ ID NO: 108952 - DNA, 581 bp, Zea Mays
gtcccaatagcttttgaaatctagctaggggtaaaacttcctgagatgctctatattccatgagttccctatttccgtgccatccatttgagtaagacgatatgatccaggccgtgtggcttctgctactatgaatggcccttcccatagtggcaacaatttgtgccatctctccccgttagaattcggcggaggacaagatctcccactgcgaaggaccgatgtcgtatggccttatcatgatagcgcctcagagtctgctggtatcttgctgactgaatcactgtattcaaccgttcttcttctagtatatcaacatccttcagtctagtagcttcagcttcagctatgttttcgaagatcaatcttggtgccccaaacttgagatcagcaggtagcactgcctccgaaccataaaccatgaagaagggagtgtttccatgcaaagctcggctgggttgagttcttaagctccagaccacatacggcaactctctgatccactttcctgcgaacttttcattcttgtcgaagactttctttctgagtgcttccaatatcatttcgttggctctttctac

SEQ ID NO: 108953 - DNA, 313 bp, Zea Mays
ggcataacaatccttttgatgttcaaggtgaaccccacagtaaaagaatacatgttaaagtcatgtggtacttccgtatactaccacgtttgaagcatttgtttcataacaaagagcacaccaaaatgatgcagtggcacaaagaggagcttaacgtggatgctatgttgagacacccagtgatggtttacaatgacataaaattgatagaatgtttctagagtttttagagtatgtgagagatgtaaggtttggtttaagcaccgatgacatgaaccctttcgatgagcagagaaacggtcatagcacttag

SEQ ID NO: 108954 - DNA, 770 bp, Zea Mays
ccttcatggccaggtcagcttcgtggttatatggctctggtggaggtgaaagttcagctacatcataaaaaatgtttgttagttccgaagctgaaaatgaactttgaagttgaacctcattaaaggtacctataagccttgcgcgctcggcaacttcttcagctcacttggtttcttcttgagcgtcatgagattctttttcatttttttctaattgcttcgtcaaccatctcacgtccgcccttcatccacacatcggagtagaatctcccacccagtgaagaagcttcagccgaggggtctttggtgtcatccactgagaaagcaaatcccggctgagctgcagccttaacatgttcacaaccgactctctctgagatcaccgcgaccccttgcgcgccagtgaacgcgcagaagtctcctcggtctcttaaaatttcgtcaaaggcttcgactccgctgatccactggacgactccatcgatattgaaagcctatgtaagtacacattgtattgaaagtcgtctagcatgcttgtttatcattcccaaggggcagtggctggcctcctagtgccgaagcgagaccatatagggcgttgaataatccctctcacatcctccctttgacttaggtcatttttcatgtaaacccattcctgcaaccaggagcccagccacctcttccaaaatgtgggaactggatagttcacttcagaccgaggcacaaaaccgtaacaaccaaagttgttgtgatattgctcctttccg

SEQ ID NO: 108955 - DNA, 1102 bp, Zea Mays
ttttgatcccgagtgacacaacaatattaagcccgtgtatcaaggcttcatattctgcagtgttgttggaggctagaaataggagttgtattgcatatttgagatgatctcctctaggtgcgatgaaaaggatgcctgtccctactccttgcagcctcaacgacccatcaaagtacatcttccatacctccactaacttaggttttcgaggatatgttgttcagtccactctgatatgaaatccactacagcctaggtcttgatcgtcgcgcggggtcggaattctatgtcgtgagctctgagttcacacgcccacttggccttccttcccactagttatatcttgcagagtatgtctcctatcgggaagcctgtaaccactacgactttgtgctcgttgaagtagtggcgcagttttcgcgcagtgaggaatactacgtataacaacttctagacttgagggtatctaatcttggagggcccaaggactttgatgatgaagtacattggctacttgagtgcttccaatgcttcttgagcctcgggagtccactggaatctatccaccttcttgagcagtttgtaaaatggcatgcctctctcgccgagctgtgagatgatgcaaattagtgttgccatgtagccagtaagcttctagaccttcttttgcgattgtggtggttccgtccttaggctggcttcgattttctccgggttggttttgattcctcggtgactgacaatgaacccaagtagattctcggtcgataccccaaacacgcacttgtccaagttaagcttctagcggtagcgcctcaagctattgaagacctgttggaggtcatcgatgaagttctctgggtctgttattttgattaccacatcatcaacataggcctccacccgctttccctagtggtcagctaagcatgtttgcatggcccgttgataagtcgctccagcatttttaggccaaacgacatggaggtatagtagaaggccctgaagggtgtaatgaatgccatttttcctggtcttcttttgccagactgatttggtgatatcccgagtaacaatttaggaaggagagcatggagcagca

SEQ ID NO: 108956 - DNA, 651 bp, Zea Mays
tttcaccactggcgatgaactgccgactgtttttccgagtcaaaggaatctcattttcctcttcctcttcatccacattggcaacacaagcagcacccccattgggatcagcaacagatggggcacccactatgggatcaacagcggattgggtatacccattggggtcagcgtcagctagtccagtcgcaggcatttcttcaatagcaggaactgaggtaccaacatcctgatcaaaactggatactcgccggaggcgtcttcttttcttcttctgctcatcaacagaaggatcaggctgattggttcggcaagggcgcctcgggcgagcactgacaggcttctgaacatccaaagtcgtatcaacctccgggaggggcgccactaccgacgtcccagcaggagcagcatcggatgaatcttcagctagcaaatcaagcatagcgcttatatctgcatcactagggttcagaggcacctcaaaatgaacctaccgttcgtcatcaggaatctccccaagcgaagcaaccaaagcactaacttcttcagcagagggtcgcactctaaggcccaaactgccatcagtaatgggcggattcgacacgaaaagggtgaaggccttgggaggaggcaagttccaggccgagtacg

SEQ ID NO: 108957 - DNA, 291 bp, Zea Mays
ctcaaagggttttcaccattacttaggtgatcaaaacgaagctctacattccctttggaatgactttggagccttttcaccattacttaggtgaataaatcagaactctgcaatcccttagtagcaacttcagagctttttcactgttacttaggtgaataaatcgaagctctgcattcccttaggacgactttagagctttttcgccattacttaggtgactaaatcatagctctgcattcccttagaaacaatttcagagctttttcacagttacttaggtgaataaat

SEQ ID NO: 108958 - DNA, 716 bp, Zea Mays
gggcaatcggttttaaccgacagttcggttcggttcttcggtgcagtagaacttcggtttgggaagaaataggaaccgatcggtggaaacaaatatgaacaaccgacgatttcggcttcggtttgatcggggtgttcggtttgtaccgaagttttgagtcttcgtacctctgctgcttgttgtcttcgttgttgttggttctgcgtcttgctcgggttctcaatacagggacaaacatggaagggataaggttggcttcgtgccatgagcttgtcgtgagggcataaggcctgagaatttgtgacttggaattgtttaatgggcctgtaagctatatgggctgctcagaagttaaacgcgcacaacagacaatagtcctaatcggttcctcggtatatcggttttcagcacatataaaccgaagtcaagctgaacccttcggttcgtaaaatttgagaaccgacaccgaaccgaacaactaaaaaaaccgatatttcggttcggttcggttcagttcagttcggtgatcggttttcggtctaaaagtgcccagccctataaaagcatgaccgaacttggacacttcaacttgtaaattgatgatgacactatattcaaaaaccaaaaaagtactagttgagtattatgtatttctgtcaaataatatggagtatttctgtcaaaaaacaacaattaattgagtatttctatcaaat

SEQ ID NO: 108959 - DNA, 760 bp, Zea Mays
agaaaatttaaaaacaggaaaaatatatttaaaataattgaaaccaataataaaatctaacagatgagcaaatgctttaaatcctccgcgaactccctttggtgaacagtagccctcattccttttctgtttgtactaggaagcaagcgaactcattgttgagtaagcccaaacatcacacgttgggggcatctcctgctcaatagtcccgtttggtagatgttgcatgcatctctaggtcgacatgtgtagcagataatacaagaacacatctcctacttgtttgttcagtttgataggtgttgctgctgcatgcatatttcggtcctcgatgggcgacagcaaccactgctgtcagcccgtcaccgtcgaggcggccatgtacacggcacacccgagttgtacagcctggcagtctgccctgactggcttgttgttgttgtgtcgatgtgtcaaacgagagcaggccacatgcgtgtggacttaggagtggtaggacgcggcctgtagagtggacgacccacctcattcgagcagcagtatgctagtatttccttgcaggcgctcatcttcatgtgcgtttagtaccaccttgcccagttaaataacatggagccataaattctttctatataaaggatgctcaggcggatgacctttgttgcaagctcgtgccggacaacggacaagttggctggagtgggagggtgcgccactggccgcctgtttgttttttgttttcgaaaaattctgagattta

SEQ ID NO: 108960 - DNA, 336 bp, Zea Mays
cctgttcaacacttagcaaactcattagacctttaaatgtgttgttatccaaatcaccaaaactcacaaaagggatgaatgcagtttcaaccgtcctacccaaaagcaccacaagggtaccccgggtgtacggtgggacactaaacaccgacatacccatcccaacccaaatgggtatgtgtctaggtaacctgtaagaggaagtcttatttgtccattcctaggcggccaaggttccaagttgttgccatggagcaatttaccagaacctaccggtggttgtatcactggaagagatacaagcctgctggatctagatgccaccatgttctcgtt

SEQ ID NO: 108961 - DNA, 344 bp, Zea Mays
ggagttactgcccttgagccattgtaccggtgggcgccacgacaaactcgtccagtggaatatcgcaccgccgtcgtgattgccttcgtctcaaattggcgaagcacgtagccggttcctttaaattgagcattaccctcactccgcctctctgttacacactcataccaaccttagttagtctctctctgcaccgtagcccctagtcatcggatttccctcaaatcgggtcactcacgccgccgcgagacaccctatcgtgatcagccgttcccaggtccgttcatacctctctatgccgtgttttagcattcttgaatgttaaagaagctcgttggctaaac

SEQ ID NO: 108962 - DNA, 488 bp, Zea Mays
gttcctcccactagcacagaagaaaataacacctctttctatattccgtggcaattttatatgtgcccaaaaaaattatacataagcacccaatgcgtgcattcacagaccacaaactctcggtccgcaatgattgcaacgttgcaattgcttatcgttcatctgtcttgcattcgccgtctacccaatgccaatgttctaagccagaggcctgaggtccatgataagaatggaagccattgacgggttgcttgcaagtcttctcttgcttgcgcgtaaacacaacacagcatacatgcgttccacaaacctactctttccataacacatcatccaccaaagaacttatatactctctccacaaggatccaatccatcttggttattcgtccccacgatggcgtccaagaaccaagttgatctcgagtcccagaagcccatgccgacgcacgccgtcgttgcatcggctcccgcagcttccgtgccgg

SEQ ID NO: 108963 - DNA, 701 bp, Zea Mays
atccttgggagtttgatattggtgctattctatgaatgcaagactcaaacatgatcgaagatcatccacctcggacccctccacgcttggctggtgtggatcgcagcgtcagggagccctcacgcaactccgacagtgtgaaggtcatccacctcaggggctcatcgcctagatgacaaagaccaccaggtgcaactacaatgacatcgaggtttcccctttgatgtggtcacgcttgatggaatacacgaagacctcggatttcgaagtcgacggcactgaaggcgaacggaagacaaaggcaaccggaggacaaagagggcctagtcgccaggtccacatgttaggctccctagatggtagtgttcccagtgcaattaggcattgtccggtactatactataattgcctcgttacataacatattccaggagtgtagtaggtgatcgggggcataaatgtatttagatccacgccctcacagtttccctataaataccctcgtcctatagctagatgggacacccttgacgagatgttttcacactatgtgacatccgttttgttgtgccacctaactcacctgctctcgagtgcttgcatccatgtgtcgagacccctaggcccacatgatagacctaacaacaggtacttaacgcattcctccacactagctctactgaccacaccccactacggtg

SEQ ID NO: 108964 - DNA, 331 bp, Zea Mays
cacaatggcaccgcccgaactcctcaccagcgaactcatcggagcaagtatctctaatgcttcagcactgccctctgactaccagctattagtgatccaaactatgccgaccatggaaatatgctctagtgagtaatttctccggttccagaacgcaccgagcgcgctcaaacacccgcggaggttctatgggttcgatgaagtcttcttgaccaccttcccaagctgagacaacgccgcagtggaggttcccgcgccgtggcttcacggtggtggtgatgctctgatgagaaattggtggcgactcgatcaccgttgcgcccgaggtctc

SEQ ID NO: 108965 - DNA, 313 bp, Zea Mays
gcgaagacaggcttggtgccgatgaaaaagcagaaatccctgaagtcttggctgtcgaactgtttgccattatcgactgtgagttcagacgggactccaaagcggcagacaatgttttgccaaaagaatttttgggtggtcttcgatgttactatggatactgccctggcctcaatccactttgtgaaatattcgacggcgacgaaggtgaacttgaggttcccttgagctgtaggcagtggtccaacgatgtccagcccccaacgttgaagtggccatgtatgggcgatgagtttggtgaattgcaaagggc

SEQ ID NO: 108966 - DNA, 322 bp, Zea Mays
aagacaactatcctaaatggagagttggatgaggagatctatatggatcagcccgaagggttcattgcggatggtcaagagaacaaggtgtgcaggttgataaaatcattgtatggcccaaaagaagcacctaagcaatggcatgaaaagtttgataatactcttacagcagctggctttgttgtaaatgaatctgacacatgtgtatactatcggtatggtgggggtgagtctgttatgttgtgcctttatgttgatgacatcttgatctttggatcaaatctcaatgtgattgaggaagttaaaagtcttctatcgagca

SEQ ID NO: 108967 - DNA, 878 bp, Zea Mays
ggccaggatatcacactcacaatatgatatagtgaaggatattgcctcatgagtggttggtctcccaaccacacatcctcccagaatcttatttgttctccattacctaaaatgaaagatcctaggttaaaaaacaaatctttcactttcataattcccgaccagaaatgagaatcacatggcctgaaggatacttttgacaaggtgtgcctcttaaggtatttatttcgcaacatactttgccaaattccatcctcattaactagcttgaaaagccacttactcatcaagcatttattttgtaaatctaagttcttaatacctaacccccccttgatccttaggttggcaaaggatattccatctagcaagcctgtatttcttcgtatgattttcaccttgccagaaaaatatagataaaaaataatccaatttctcgagtacacccctaggaacctcaaagaaagacaacataaacatagccaagctggtaagtaccgaattaattagaacaagacgaccccctacagacatcagctttcctttccaaccactgagtttcttttcaaacttttcctctatcatttttcaatcagtatttcttaacctcttgtagtgcatcgggatacctaggtatttaaacgggtaccccctttcttacagccaaaaaactgttgatattgatgttcctcctctactgccttaccgaaacaaaatagctcacttttatggtaaataattttcaaatcggagacttgctcaaaggctacaagaagcgactttaggtttgctgctttctctacatcattatcaaaaaacaacaaggtgtcatccgcgtattgcaaaatagagagccttccatctactaaatgtggcac

SEQ ID NO: 108968 - DNA, 465 bp, Zea Mays
aaagaatggcccagtcacaggctcaattaggacaataggcaagctctcagcaccagtcttcgcaaagcacattccgaccacttgctcctagaggaaggggaggataaagctctggtggcagatttggtgcgcctccaaggaagccattctatttgttttgtggagaggacaaaggccacactacaaggacatgtcatcacaccattaacaagcagaaatagcttgcttcgacagctgctcaaccttcacagatgaaagagatgttcaatacatcttcgtactattcaccctacatcccaaagtatgttcaaactcagccacaagagcaaaggccaagtctacctttggcttcaaacgcctcaagtgatccgatgatgagtgcatggtcaccagctgcctccttcgtcccaggaccgcctccctatgatcaagtccctgctaatcaacccaaattcccaaggcaag

SEQ ID NO: 108969 - DNA, 410 bp, Zea Mays
ctgatgtgcatcgaagctactagtgacgaaatacttggagcatactccaaggccgaagataatgctctgtccgcagcctttggaggtcggggcaagaaaagattaaatagggtatttgatgctattggcttcgtataccctgattaccattatccgataaaagggcaagagaaaaaagaggaagaccgccgcttcggccactgtagctgagccgaagggcaaaaagattaaggttctgacccaccggtcgtgctacattgaaccggtcgtagtgcctaaatttagcgcagggtctacttcagcatccaaagcaacacaaactgctttgattacacagagcgctgaagaaccaacggtaatgccgaagacgcatacaatcaatccagtcaaagataagtttgataaggctg

SEQ ID NO: 108970 - DNA, 466 bp, Zea Mays
caaaaaggttggaccttaagctagagaggtcgactataatgcttgatgatggtcatcctcggtgatcctaggtgtaagcgactagttagttgtttgttcagggggtgtgcttccgcttgactaaattgcctttgggattgaagaatatgctttgaacctagagtaggtacgagggcaaatcagtcttatgtaatatctatggtgtttataattttcctctaaggatcattgttagtatgatgaatgataatcctagtgttggacattgtgatgatgaagaatgatatcctattgttgtcattatccaccttcgtttttattatttcatcatccaattgtctctccttcatagtttctaacgttttgacaacccatagtgttcaaggactaaggttgagtcaggtcaaggacgcttattcctttccctaatggggcttttattcacgaaagggttcttagaaattat

SEQ ID NO: 108971 - DNA, 453 bp, Zea Mays
gtcgactatcaaacagagtcatattgacgccatgagggggaggtattttcgtgacatgtctattgtcagagttggaggagacagcactgcccctgctcctgaggaaaacgaagttgttatttatcgaagcttcctaaaagcaggtctccggttcccactgagcaaatttgtggttgaggtattaaagattttttagatttttcttcatcagattacccctaaagctataattaggatgggatatttgtctgggctgtaagaatccaggggctagagccgagtgcgaagtgcttttatagtatgcacgagcttttgtacgagacaaaggctattggcaaagaacaataccacaacaacttcgactgctatgggttcattacccgctctaatgcaagctacccggtgccaacataccgaaaaagatggcccggggcctggatggaggagtggttt

SEQ ID NO: 108972 - DNA, 655 bp, Zea Mays
aaaaaagtaactcaaaataaagatcacaacagattttggatccataaatcaaacgcaattgagtctctgcaggaggagtctttgaaggacagcaggttcatctcctttgacgaagtttctttgactgctgcaactgaaggttgttggctactaaaaataaaatcattgaaccatccctgttagtctgaactgctaggaaaccgttgaacctttcgtgtcaatcttagactatcaaggtttatcccgccaatacataccaagttgttaggacaccataacacctttcacatcggtctgaaaccgtcaggagatcttctatttccacatcaattttctactatttttattcatcgaaattagtactgcagcagctcaattaaccatacatccacaagcactacaaaagataaatccagttgtcatgatacgcacatattaatcacaccgctaaaagtcataaattccgtgactacaccaagctattgggctactttttcttagggatacctgaagctactgccttaactgcaaaacaaagtcgacaggaacctaaaagctggaatgcatcgttgcagggcttcagatgcaggccgtgcaatggtactgggcctgagatttctagccccacccatccccaaacccaataaaacatcag

SEQ ID NO: 108973 - DNA, 792 bp, Zea Mays
gtgacaggcccattgggtgaattgttagatgagttcaaggacatctttgagtcacccaaggctttgccacctgtcaggccatatgaccatcatatttctcttgtgccaggatcagtgccagtgaatgctcgaccctataggtactcacccttgcataaaacagaaatagaaaggcaggtggccgaactattgaaagctggacatatagtgccaagtgtgagtccttttgcatcacctgtgttgctggtacagaagaaggatggaacctggaggttctgtattgattacagaaagctcaatgaaatgacaatcaagaataggttcccaatgcctttagtggacgagatattggatgagttagtgggaactcaatatttctctagtctggatatgacagcaggataccatcagattaggatgggattggaggatgagtacaaaacggctttcaaaacccaccatgggcactaccagttcagagtaatgccttttgggcttactaatgcccctgcaagttttcagtgtgctatgaactccattttggagccctatttgagaaagtttgtgatggtgtttatagatgatattctgatatacagtgcagatttgactcaacatttggaacacttaagattggtgttctctactttgagggctcaacagttttacctcaaaagaaagaagtgtgtctttgccaaatctgagttgcagtatttgggtcatattatatccaaggatggggtgtctactgacccagcaaagactcaggcgatggtggattggccagttcct

SEQ ID NO: 108974 - DNA, 701 bp, Zea Mays
cctatttcttcccacttccatttgggtactgggcggggttacagtagacctgcaggcttctgatggtctgccttatttcgctggcaagtgtcacatcgggccacatactgagctatctcctttttcattcctctccaccagtatctggtcttgaggtctaggtacatcttggtggtccctgggtggatagagtaggctgagttgtgagcttcgttgagcaggacttctcgtgcctctccttttggtacacagacggtttctgaaccaaaggattccttcttcatctgtcttgaggcctgggagttgttctttgtgagttctctccgcaagacttgtcgtctcagtgtctaggtgctgagccttgcgtatgaggtcttctagcattggtttgacttccaggctgccattgtctcctagacaagtatttagttgagctgattctttcttccagtcttccaagaagttggtttctttctccctgaaaggttttcggctgagggcgtctactaccacgttggcctttccggggtggtagtggatctcaacgtcataatctttgatcaattccagccatcttcgctgacggagattgaggtctggctgagtgaaaatgtactttaggctcttgtgatctgtgaagttgtgacatttgtttccgattaggtaatgcctccatatttttaaggcatgcactatggctg

SEQ ID NO: 108975 - DNA, 274 bp, Zea Mays
gacacagctccgcaggcgtcggcgaaggtgcagaagtctctcctatcactgagaatctcctcaaaatcttcggcttcgccgctggtccaccgaaaaactccatcaggatcgccactaataaaattttgctctgtagagaatgcgccaactttggcaaagctatctttcaatttattacaacatttcatggcaacattgtagcattcctcttttgcttgatgaagctcctcgacatttttctgaactctcagtcgttgagtatcagatatttcac

SEQ ID NO: 108976 - DNA, 362 bp, Zea Mays
aacttaagccttcattgtcctcagcccattactaaaccagaagcagtacgaatgtgcatgaacaacttgagccctgacatggccatatatctgcaaggggtgcgtccaatcaccttcgaagagttagcatcaaaggcaacagatatagagaactatatgcaacatatctctaggcagacaagaccatacaataagcctgtgatggaaataaatggaccacgggataaagttcctagtaaacaaaaacagatgcaggccatagaggctacaatactccctcaaaaattgcaaactgggggcgccattgaaagaaatcaacacagaggtgatgcatcagctcctagaaggccaactttgagtga

SEQ ID NO: 108977 - DNA, 588 bp, Zea Mays
ctgagattgattttgtgtccttcgcttcctctcatagacccttaccacatactggtgctgccttagtttaacttcctttgcttacctacggttgggaatatttgcttttgatgccgatgtcacctgaatgcaggcttttggtgctgtatagttgtgctttgtctatttttgccctccttttgttggttctatccgtgttttctttttttacatctatgtgttcttattgtttatgtatttacttgttcttattatttacaattgttgcttcaggaatttgcagcgtgcttcgtcttctgcccacgtgctcgctccaccgaatacgctgctacgtatcaggtatgtcgcaggttttgcgtgctccatgttatttcctgtgctttggttaattgttatggtttacttgttacgtttgcacttgcttcatacatccatactctgatttatcctatatgcttctcctttttggcatcttggctttacctccctacttgttgttacctctggtggtattcagaactgattccaatgtgatacctgtgctcttgtcccatacctagagcctccatttgcgattctagaaactgc

SEQ ID NO: 108978 - DNA, 438 bp, Zea Mays
tttcttttcatatttatcacctagacaaaactgaaacgaacttaaagaacccatcatcatgctaattatgtgtggttggctcctctcacatttataagctctgcaatcacacgatgtacacaactacaagggcagaacaagaactaatagccctcccttgcctctgccaccgcaataccccaaagaaggtgatcaaccaaccataaacgaacttacgaacatgcccatgtgttctgaagcatggcgaaaagaaatcggcctggatcaggcaggattacaaactgaaatatatagcatgaacaactggtggtgatcgcgtgaggggggtcgtgcgtatggaaatccattggtagctatttatatctgaccagtatctcgatttcatccaaagcgtgaaccaccctatattccatagaataagagctcgggtgttaatcg

SEQ ID NO: 108979 - DNA, 497 bp, Zea Mays
cctgcaggcctattgcaacccctcgcagtgcctgaatggaagtgggaggaaataggcatggattttgtaaccggactgccccgaacgcaaaaagggaatgattctatctgggtaataatcgatcgtctcaccaaggtggcccacttcattccagtaaaaaccacttttggaggagccacccttgcccggatatatcttaaggagatagttaggctccatggtattccgcgaaagatagtgtcagatagagggacacaattcacctcaaaattttggaaaggccttcagcaagcgatgggcaccaagttagatttcagcaccgcttatcacccccagtcagatggtcaaacggaaagagtcaacaagatcctcgaagatttactaagagcctgtgtgttaacattcgagagggattgggagtccagtttgtcgtacgctgaattctcatacaacaacagccatcaggccagtatcaaaatgtcaccgttcgaagcatt

SEQ ID NO: 108980 - DNA, 493 bp, Zea Mays
ccggttaaacggcggccaccgtgccatcaccgggttccgccgcgcggagagctcgcctgcgcaatctaaagtccgcggtcctcatccaattccggccgttggcctataaattgtgcctgggttccacttctttatcacatcccgcacctccacgatcgagcactcggctcaatttcaccgaagaacccacaaatccctctctcctctgttcttgctccgccgtgaagaactccttcgtggccagcgctcctcgggtcagtaattatcaaattgttccctgtttcagttagtctttgatctcttattgctcttggatgcggcaaattgaagtttggccgaagcccatcaccggaacgcacccgtgcgctgtaaaacgccgccatgacaccctttccgtcgccccacctttctgctcatgcctagcccaaaacttagcgtgtgcgtcatctctggtgaacccaggaaccttttcccagcttcaatttggccagcc

SEQ ID NO: 108981 - DNA, 561 bp, Zea Mays
cgagcacggagaccatccaacattgtatcctcaatctcatagatcaaaaagtcaaccacgtcgaacaatgggtgagatactagagcacctaagagccagagctgaatatgattggttgtctctccatatcccatctgaggtagcaaggtgcgtctcatcagttcatataggaacttcacagatgtggtgaagtctacaggatatcaccgcgagccgtctatgaagggtggcctgaagagcgctgcgacgtgagcggtgccaggagcaactccaccatgaggacaatgaggagggtctaaagtaccataataaagactatggagcctcatcatcaacttagggaaaccaaaaactctctgatatgagcagtatgaatcatgacatcctcacgctcgaatcaaaacctcatccactgatggttggggtcaatccagacagtagcatagaaaactctgactctctcctcaatgtaacgacaactaaatgtcagcagagagtacagacctgatagataggtgatatggccttcaacctctgaaccgactatcgaacggaaagctg

SEQ ID NO: 108982 - DNA, 599 bp, Zea Mays
aaaattcttctaacaaaacattgtctgccgcttcggagtcccgtccgaactcatagtcgacaacgacaaacagttcgatagccaggacttcagggatttctacttttccatcggcaccaagcctgtcttcgcctcggtgtaccacccacagtccaacggtgttgttgagcgcgccaacggcaaaattttcacggccatcaagaaaaggattcttgacgacaaaagggcaaatgggccgaccaattacctgaagtggtatgggccctaaacacgacagagtgccgggcaaccggattcacacctttccgcctcttgtatggatctgaggccatgacaccgcaagaattaaaacacgggtcccctcaaaaaaacaaatcagtcgtccccgatgtcgacgaaccaacttccaaagacctcatcgatggagaccgcgtctttgccatgcacaaaccctcgacaaatatcaggttcaaaccaaggcctggcacgacaaagcagtcatcccaagggaattcaacgaaggggaccttgtactcacaagaaccacccggacagattcacggggcaagctacagccgaagtgggacggtccattcata

SEQ ID NO: 108983 - DNA, 584 bp, Zea Mays
caggattgtttcacccaactttatcgctatgcaccggaggaagttgacacagatgagaagcgctaagagcgattcttagaagttttgattggaccattgaactatcaactacaaagccatagtttccccaatttccagactctgcttaacaaggtgattggcctaaatagcaaaagatgggaattgtcagaccacaagaggaaattccaaggacagtctagcagaaacacccgacaaaacaattctcaaggttctcagtttcattctaggaattagagtggaaataataactatcaagtacaacgctctggagagcaaggccagagaaacaaccaataccagaaccaacagaggaacaattctcagaccggtcaaaggtctagtggttatcaacaaaatcgttaaggaaacgtcgtgaacacaccggctaggaataacaatacaactactctagtccaaaccagtggatgtttcaagtgtggtgaacttggtcattatgccaacaattgccctaagcagaacccacagacaccacagaggaacaacaatcaaagagttgatcagaatacacctgctcgtggaac

SEQ ID NO: 108984 - DNA, 513 bp, Zea Mays
ggaatatgtataggtctgccatgacgatgggtatatttatgtagatagggatgggcatagctttaaaaaaatgggtataaggtgtccaaacccgacaaataattccggattgatacctctaaccgcgcacgaggaaacctttggttttgctgctttgtggccaaggctaacgtgtgatctagggcggtaggtgaggaaacctttatttatttgttgaatttttttacacgttactccattcattataagttatatgttactttgactctttcggtaaatttattatataaacattatgtgtatatctagaacataataaatctgtttatacaagaaataaaacggtttataatttgaaacgaataaatattgggggaaaatacaaagcttattagatcaactctaacgaattcctcagtttttcttttgcccatctatatatcgtcagaaatgaatactgatccatactacctccatttttaagtagttgacgccgaatagttcattttttaa

SEQ ID NO: 108985 - DNA, 690 bp, Zea Mays
caaaacttgctaatttcattcctataaattcctttatcagtcttacctctttgaaattcaactgaattgtctcttctcttgtagatggttcgcactctccaaactacccgcgtcaacaccagctacgtcccttagccccggcagatcccggtctacccagtggtagtcgaggaagttccgacggatctccctcccatccgagtggagaatgtagtcatcctggaggatagctcggaggaacagctgccgacccccaccccgttggtagagtccctggccttcgcagctgggtcatcgacgtcagcaccgtctgcactagccttccaagcacctgcacccggaggagacgacctcgacaactccggagacgacgatgacgaggatgaagacgacgaagaaggtggagacgaacacgtccacgaggaagctgactacacccagcagggacaacttcatggggtttggtcctgttgtcgaacattacacatcaatgttcgagacggggcacttccccaacctgctacaagaagtgctgcacgcgctaggcacctacgtccgccccctgtacgaaacaaggcgagtgagcgagcctcctcgggcttgctattacatcactcgcatccacgtcagggtgatggatgcaggggacaggggattcaggactctgtctgctcacgagtccctgacacc

SEQ ID NO: 108986 - DNA, 560 bp, Zea Mays
cacacaatagcacaaattggcaagagaaacataaaccaacctttttctaacaactaataaacaaaaaatattaatcaccaaacctatcttgtatctccatacaaacacatgcgccattcattaaataactaaatatatcatggataaactgatttgaggactaaacatgaaaaggagagaggggagagacaatatctaaccattttaagcaacctcatttgaggaaatagagacaaaaaaacctagctactcttctctctaacacatggtgaaagactagttccaaaatatggctaaaattgaacaagaatgaataaaaattggcaagagaaacataaccaacctttcctagcaactaataaaaaatcctaattaccaaacctatcttcctctctctctctccatacaaacacatgtgccattcattaaacaactaaatatatcatggataaactgatttgagaactaaacatgaaaaggagagaggggagagacaatatctaaccattttaagcaacctcatttgaggaaatagagacaaaaaacctagctactcttct

SEQ ID NO: 108987 - DNA, 569 bp, Zea Mays
aaaagggttgttagcatcctaagcaggcaagctgcccgctcagtaaaagatgatgaaaatgccttgaagaaaagaaaaacagcgccagagccaaaggcaaaaatttctaagaagcgaaagcttgaccaaagaccctctactgaaccgaaggtcgacgaagcagtagagaaagcccctccatcgccaactgctaccaagtggttgaaattttgaaggtaatgactgattctccgccattcaagatgctaagtcctctaggattggaactgacaaaatttttacagaggaaggaaatgccatcagctacagaagagaagattgaggggcaaaagaagcgatgaattgtgaatataatgcaagcaattaaacaaacaccgccttcaactttggtgacaaaggcggtaattcctgcagatgccgaagatgctggcgaagccgaagctgaagaactagcagcgacaatgttagaaattgacaggcttgtattagatgtggttgcagatgtggctatagaggagacaagtgtagctgcagaggagaacatggccgcagtgccagatgaaggaaag

SEQ ID NO: 108988 - DNA, 558 bp, Zea Mays
ttgatacaacaaataagactagcctcagctttcattgaccacattctttgcattctaggttagcatcataggcatataccaacttgacagcttgaaaaatatacacaatttaccatcttgatagcttgacaaagatagtaacatggacaaagatagcaacatggacaacttgatagcttgattgaaggtgtcacaatttaccatcttaacagcttgacagagtaagcttgacagtagtaacagctactttctacacaatttacacttgtttcttttaaccaacaaataagattagcctcaactttcattgactaatatctctacatactaggttagcatcataggcatataccaaactcgtcaattatggtaagaacaagagtagaatatcagttcttaatcattaactagcatatttgttctcaaaccgatatcaacaaacagactagcaaaacaggtctacaaacagaccaataaataagctagcaaatagggaaacacatagaactcagggaaacatcattgatatatgcaagtgtagcatatttgttctcaaat

SEQ ID NO: 108989 - DNA, 390 bp, Zea Mays
cttcgtgccttgcgtggaacagcagccagcgggaggagagcggctagggctggaggagagtggcggcgccctcacctgctaaccgatttggatggcaagttggccgtgatgctcggaagttcggtgaagtgctcctcctctccggcccttaaaggatgggtgctctctccctccctgtatcgcactgtgagactcgttgctccacctttttctctctctgctcgttgatccagttgccgccgtcattgctggttgtgttgtggctgctgcagtgtggagtacttcattctctctattggatctggaggtggcactgtgctcggttgcgtactgtgttcctttctgttgttgttcttgggtacctgtgtggtgtcgtgcactctgtctggt

SEQ ID NO: 108990 - DNA, 484 bp, Zea Mays
cttatttggagaatggcatcggcggaatgcctgaatcgggtcgagaagcaagctcgcagatagaagtgcactttccaatgcagttagacagagaaggcatggttgtgatgttataatgctgaaggaccccaagaagagattaagtcctgtagtctaccacctcccatcatttgtgggcttcaccgatggctggaaacatttagtgatagcaaacgaccttcgggctgaagacgtctgcgagcttgttaaggggccagacgatggtgagccggtgtactatgtccggatgtgtggtcacaaaattgaaagctgccccggctgcatgtgtgtgcttctcttctcttaggtggggtgctaagtgatcttagtagccgacataagagaagagaagcgcacagatgaagccagggaggctttaaattttgtgaccacacatccggacagagtacaccggctcaccatcgtctggccccttaacaagctc

SEQ ID NO: 108991 - DNA, 653 bp, Zea Mays
gcaaatatcaaatggatcataaattgcataaaagtatcatgaattctccttttaacttagtgcacatcaagagagatattgattaatagaatatacgacactaagaagcatgattgttaattgaagtcattcaatgatcaaacaaataacagatatgatcaaaaagaacaacatacgcattagattatcaattaagcttagagtaggagaatctagcaaatatgctactttagagtgaaagataagaattggaaaatagtagcatacttcatgagaaactcattttcatgcaagagactatatgaaattactaagataaagtaatagtctcaacataatcaagatatagaaagaggctccccctaaagatatgcatcaagtatttgaataaattgagtggatgaatttactttaaagacaaatagggagaagcattatacatcttgatcaaggctcatgaaatttgcaataaacaacttaggcctggtattctcacaatgaaaaaggtttagaatgcttacaaccacaccattgattgttttgaggatcttgctatccaagtaggtgttgttgttcttgatgtcttcctctttcatttgagtgtcctccctttgtagttgtttctttttcctttcaaacttattgaaaatact

SEQ ID NO: 108992 - DNA, 544 bp, Zea Mays
cgaccaccaggcgtacaggaagccgaagccgtcgtacggggacgagaggcccagctccggccggaagaagaagaatgtgagcgtaggctgccgaatggccgatgggccttgaactcgtaatctgggctgttttaaacatggtgaaattacaggacgacgacgatgactctgatgacgacggcgcgaggaagccacgttacaaaaagaaagacgacgacgactcggatgacgatgacaggaagaagcgctacgagaagaacgaccgccgccgccgccacgactatgacgattgagctatatgcatgcagtctcgtatatacacatgtgctcgagtcacgcgttatgcaatgtatcatccccattgcatctcctactagcagtactgtagtaaataagcgaagctgagatgcagggggatgcatatggtggacacagttttgatttcaagtgacgccgctttacagcctacttcttccttgtttttgttcttcaccttttgtactgttctgatggtaacctgtatactcgcgcggttacttgcgac

SEQ ID NO: 108993 - DNA, 320 bp, Zea Mays
ccctctcgccaaagagccgatcgttgcctcgaagcgctagtctaaggtgctaatggacgggagaagcggcatcaacatcatgtatgttcaaaccctagacggcttggggatcacacgctctgtgttgtgccccagcttagcgtcgttccatgccatcatcctaggccaccaggcctacccgctcgagcaaatatctttgcccatcacattcggtgacccccgcaacttccgcaccgaacgaatgtagtttgaggtggtggacgtttcggggtcctacaacaccattcttggcaagccgtgctatgtcaagtttatggtcg

SEQ ID NO: 108994 - DNA, 346 bp, Zea Mays
gaaccacccgtctgggtggtcccggtttgtggggccgagtgccatgcctggccttcagcagctctggcacacttgtccgccagggcgaagagcgtggggacagtctccacatcatgtgtggccagtttctccaacattttcttatcacgtaccccctgtcggaaggccatgatgatggaggcatcggaaatatgaggtatcgtacctcgcaccttggtgaagcgggagatgaacttctggagggtctcccctggctcctgcctcacagcatggaggtgggcctccacaccgtgctgttgataagcactagcgaagttcgccacgaaccgcgcacagagctcttcct

SEQ ID NO: 108995 - DNA, 444 bp, Zea Mays
ggcctgcagggcgaagacacggtctccgtcaatgaggtctttggaagttggctcgtcgacgtcgggtactgctgaagcgcttgtccgtggggacccatgtttgatttcctgcggggtcatggcctccgattcgtatagcaggcgaaatggagtgaatccggtcgcccgacactcggtcgtgttcagtgcccagactgcttcaggtagcaggtcggcccatttgcccttcttgtcgtcgaggagcattttcttgatcaccatgaaaatcttgccgttggcgcgctccacgacgccgttggattgtgggtggtacactgaggcgaaggcaagcttggtgccaatggagaagcagaaatccctgaagtcttggctgtcaaattgcttgccattgtcaactgtgagctcaggcgggactccgaaccgacaaacaatgttttgccaaaa

SEQ ID NO: 108996 - DNA, 421 bp, Zea Mays
tgattacttttattcgatcgagggcctcctaagcatcgatcatccaagagaaatggtcgctttttattaagagcttgtagagggacattcctttttcccgagtctttacatgaaccagctgagtgcggtgatgcaccaaaccagtcgttatacccccttaaggctcttgatggggcccatgcgtcggttgggttctattatttcttagttttcctcgatcccttgatccaacaccatgaagccaagaagttttcccttagggacctcgaaaacttatttctcaaggtttagtttgatttggaacctttgaaggttggcgaacgtctcttctagatcagcaatgaggtcatcagactttttggaatttacgatgatgtcatccacgtagacctctaggttacgtctgacttggtcgacgaag

SEQ ID NO: 108997 - DNA, 529 bp, Zea Mays
gttccactgctagggttacacgcgacggagaagaagtcaaagctgctgaaactgctccgatttctgaagtgatgaaacggtcggggctagtagcgtcggagggtgtttctgacgaaggtgtacctgccgccgaagctgagcaggttggtgctgaggaaggtgaatctgaagatgattatagtgtcgtgccatctaaacccagccacctggagtttgggaggtccactgttgccgaagatgacatgcctaagttgatgaagttaggctatttcagtgaagccaaaaaggaactaattcgatttggcggagaggaaattactccgaagccagaaaaggatgaggtggtagtctttaaaagcttctttatagcaggattaagatttcctttaaatgagatgattgcggatgttttggggaagtttgggatttatctccatcagctaactcctaacgccatcgttaggcttagcgtttacatctgggctctccaaagccaaggggcagaactgcttgccgaaggcttctgccg

SEQ ID NO: 108998 - DNA, 303 bp, Zea Mays
caccaaaacgagtcacacccttcattggtgatactttcaggtacacataatctttgacttgaaagtacaagggtcggcgtcgtttgtctgcataactattttgtcgagcttgtgcctctttcaagttatgtatgattcgttgaaccttttctttcatctctttaaccacatcaggcctgaaaaaccacctttctcctggtttagaccaattcaaggggtacgacatcatcgtccatataatgcttcaaatggtgccattttgatgctctcttgatagctgttattataagaaaactctgccag

SEQ ID NO: 108999 - DNA, 502 bp, Zea Mays
gttttatttcccatagtaaataattagcaaaaattaataaaaaatgcaagtggaagctataatgcacatattcaaaccgttctaaatatttgtattgcattgagcttccggactcacgtcgagcgattaaattgtatagcgggtactcggacacgccgatcaggctgcgttattaatcgactgatttatgtcattggctgagcattggttgtgtcctggtaacacgacacaatatttgtgtcgtaaaacttggttgcgtcatgtaattgctatgtcgcactctcgcttaatcagaccgccctcgtcgggtcagaccaccatcgccgagtcgcttattttttgcatgacatgtaggcattgtttgtctgtcgtgatcatcgaaccacaattgcgcttgttccgcatgttgcatggacttaccttgtaactagactatcgagccacaactgcgcctgttgtgcttgttacgaagacttgttttgttgtcgtagccctgatggcc

SEQ ID NO: 109000 - DNA, 621 bp, Zea Mays
gccaggtttgcagtttaggacccctctacaaaggcagggggtccggcagcctgggggccagttctagagaatgggcgcccgctccctggggtggtccggagctgtgcaacctcttagcttggttccgtaccttaagccagcacgctccaccgctctaggacgggcaccctagtatttggaactatagtcctgtgggttcggcaacctagggtccggttctagagaatggacacacatctcctagggtggtccggagctgtgtagccgcttagcattgtctcgtaccctaagcctgcacgctccaccactctgcgaccgccgtcctagtatttggaactgtgatccaagggatccgagcatacggcttggcttcccagactaaatcgtgcaggtcctgttgcatgaatcaaaggatggcaaatatcacacgatgggtcctatgggtgtgctactaacgctccctacccgaagctgtgtacaggtccaggtcccagtcgaggatacctcgagggggccgttgccaactctttcttaggtatactggtatccagcctcgacacgtcgagcctacatcccaggggggccaagtaccagggaggagttggtaacgccacacacaac

SEQ ID NO: 109001 - DNA, 320 bp, Zea Mays
aaacaacatagaaggtgataccttctaaaacaaggtattcatgttaccctacattaggagtttatacaagaaacactaatagccctcatcgcaaaagacttagaagcactaaacattttctccatccaattactactagccaagcatatacaccatagtaaccaagatatttctataagtgcccaatattactaactccgttatgcaccatccgaacatgatacaccatttcacaaacacttcataaacataaaatccattcaaacatactcaataaaaacatcaaccgaagcaatccttgcaaccctagaaccttaaac

SEQ ID NO: 109002 - DNA, 479 bp, Zea Mays
caactgctggcattgtttgtttgttgcttgaggttgatggcagtttgaggcattatttttatactgttcatttgttgatacattccattgttagtatgtcaaggaatcatcttatttgctgaaaaaagttgtctggtctgttgaaaaaaggaccagatgtcaagtgttgcatgaagaagtttagtttcaaattttttgttgattttgagtaggctgaaatctcttgtagagaatttgagtgaacatcagtcccaggattgtgtatttcattttaaaatagtgatatttttcttatttgcatagaagcaatgtgtgttgtggacttgtttgaaagaacttttgtgctttgctcacctttcttctctcgtgttgacaagttgcaatggtttttcccgcttattttcttaattcttgcgttcatccccaaggaacttctatggcctctatctttttatagtctggtgggcaatctcttccca

SEQ ID NO: 109003 - DNA, 308 bp, Zea Mays
tagcctcctatatgtggcagcaataataaggcaagtttgtctgtgcctatatggcaggagtgcccgcgtctgtatggtagggaagcctgtgcctgtatggcaggagagcccatggcagatatatctgctaacaacccggaggagagtggtatcgatgttctataggccagaaatggatcccgccatggtctgttacagcccaacccaaccaaacgtgaattatcggtaacagattgcggtgcaagtcaattacgggccaaaaacacccaaccaaacagcaccttagttcatgtgtgacaattagttgc

SEQ ID NO: 109004 - DNA, 566 bp, Zea Mays
gagcttggtctagatgttggatgcctctgttaatgtttcaaactttactatatcagtcatatttgtttcattagggcataaaggaaggtaatactttccacagctgccccatctgagctggtcaattatatcatttttattgtgtttcaacaaaagtagggcattgccagagtggttatgacaaaaagaaaagttcggtaggacttgaaggttacttttgttcggactcttttcttccctggacacttttgccaggattcgcttggtctatagtactgtccctgtctctcaaatctcagtgccactgtgaaattcggcagtggatgtgcttgagaatgataataggttattaccaaaaaattgtcttgttttctgctatcataataaaaaagatagattgattttcagcttcgttagtctgagtatatatgctcacaaatccatccatccttctaatgtcgttttttcttgtcatatctcagtgggatatcagaggcaattctcatgggttattggcatctcatccaattgctcctttcatcagtatccaccatgtggagcttgtg

SEQ ID NO: 109005 - DNA, 533 bp, Zea Mays
ttcaattgtaaagacaaatatgtaagttgcggtacaaaacaaataccatatacactggtatgcaatatgtaccaagaaccccgcgagggtcaaaatagaatcctagagtcaatatgatatgtttggggatctaaatgaacatgccattttatgatgtctagtctcaaagactgcactcatcagtcatcactacgagaaaattggccaacccaacggactgagaaaactcgattcgaagttcactgaatatacaaggaagaagaaaagaaacttcaaactgcttggaatcacaattgatctcatgtgcattaatcgctgcaaaggaaatacaacactaacatgtaggaaacccctgcaatttctggataaaaccacaggttaacataacgctaagtgcctaagtcgctaacataaaacatgatatactcctttaacctcttttccggaaggtagatgagacacatatacaagtttcaatgggaatattcaaacaggtaaaagaagaaacgaaaagaaaaccatgtgcgccttct

SEQ ID NO: 109006 - DNA, 497 bp, Zea Mays
ctgcaatcatcacttcaacttagcctttacatcaaaatcgatacgtgcgtcgatatgcttttagctccatgacaaccctctcttttggagcatgaacaatctagcccattaggcaaacctaaggccaatatatagtattaccctatgtcgagcctcaacattgattcagacatagaaaaggaagatatgaattaagagcaaagcacgttcatgattaacttgatgggaaaaataccatgataggggttatgttcttgatcaagtacgaatgattgaattatgtgggcgatcagtttacaccatgatgacatagaatattgtggccgccaaatagctgatcaattgattcatccctttggtaccctataataaccaacaaaattgtgatgacttgcaccaacttaaatgtacgctaacctacacaaccatgtatgcagaagacctagtgccactcaagtaaagatatgattctagagcttccaatgtaccaactcggc

SEQ ID NO: 109007 - DNA, 474 bp, Zea Mays
gtctaatcgtgttttgtaaaagctcgagattgattatgttaaaaataggacctagacttaatacttttataacaggcacaaacgatgggttgatttgtcaaaaagtcgggggatatttggaaagatgtacacggctggcttgggtggagggcaccggagccgtccaggtcggatccaatggttccgatacaacgcgcgaaacagtatgagttaaatctaatcctggccctctgacgcgatttcctactccctccgccctattctatgctacgaagagtgctattccatgctacactttatgggaatcgaggcgaagggctatcacaacgacagggacatggaggacatgggatgagactcttaggctagccgcactcacgtactgcacagccgaacggtaaaggatagcgtagcaaattttgctgcactcgcatgcgttatgcgctactctatacactgtagctcacgagtgag

SEQ ID NO: 109008 - DNA, 487 bp, Zea Mays
cgcttcaatagtgatttgggaaaaatgttagcgcgtggtggagaaggggagaggagagtaagagatctgaggtaggagaagaagactgggaggcggtggcgaccaagacagccgaccgccagagagtaatctattatctcttctgttttccgatgccctccatgagttcgtttccaggtttatatcctcttcattacaatacggcccatcaggcctacatagtccactctggcccagataccctcacgttacggcgcttcactcgttgcggacgtgtagcttctccatcctcggactcgccatccgcttcgttgttcgcttctccgatgtcctgggcgccggagctgatattccctcattcttgaaatgccgcttgtccccaagccggcgtgtgtggaaacctgtcctgtagcgccttcaagtcttcccaagttgccaaggactcatccatgccagaccatatcactttgatttgcgccaccgtcgc

SEQ ID NO: 109009 - DNA, 437 bp, Zea Mays
gggaagtacaagtccaagggaggattcgataaggaggcgctcaagaagaagtaccttcaacatgcaaagatcaaggagcgtgtcttcctcgcctccctcagcgacatcgaccatgactccgatgatgccgtatcttccttgagcgacgaggagactgagaggcgggtcgaggacaagctaaatgggctatgcttcatcgccgacaccgtgggaggcctctccaaaatggcacttggtaaggacgcggtaggtgccagcgatgacactacttctgaggatggaggcctggagaacatgtggctcatggattccggatgtttgcaccacatgaccagaagctccaaatggttctctagcctcgaccccgtgattggtaaggaatacatcacattcggggataagtcaagaggtaaggttgtttctcgtggcaccattcg

SEQ ID NO: 109010 - DNA, 370 bp, Zea Mays
gatgaacttaagtgggatccaaatcctaagagtgcaagaaaccctaaataagaccctagaaagcctaaacttaaaccctaggggccaagtgtaaaattagtgcacatttggactaaagtgcaaaaactatgaagttaaggtgtcttaagtaatatggttcacaaatatgtgaatttgcaagtaaaaccttgaggtttggacttatttgcaaaagagccacacttgtgctcttttgactaagtctgaatttcagtatagtgggttcaactttggggccttgtaactttcaaattatgaaatttttgccctaggtcaccacatcaattttgtagaaccattataggagaataactttgatgcagacaatctc

SEQ ID NO: 109011 - DNA, 584 bp, Zea Mays
tcgcctgctcgtgaacccatctcctgtcctgcctggattctctctctctcacgtgaggtttccaggtagttgtccattcttttgtaatcctatatgagctgctctcttctcgtgcttagcttttctgtcttctatgcagtcttcattaggatggtgtggacgaagaatgtgtcagcgccaaggggaggagatgacgaggaccctcctcgccccttcaggtaggtcaaggggaagaccgtgtacctagagcagcatgaaggccgcaagaagcgacgtttggatagagcagcccgagcatctattgtagcggtagcagcaacagagcaggcagagagaggtggtcagcttcagatatcatcagatcagattgcctaccgggtccatcgtctcgcgtctcgacctcgctcctccgctccctctacacccgccacaactaccactccacctcccactacgccagctccagtcgctcccgagccctccaccacctcaaccatacctaccaccactcccgcttccacagttcctcctcccgctcccatctctacaccacctattccacctgcccgcttccgggagcgcga

SEQ ID NO: 109012 - DNA, 401 bp, Zea Mays
ggcaggcaaggtcactgaaatgataaaagaggtgagcacatattagtcacatagtcataagtatatgaaatgtgaataaatacatacacagagaaatatggcatagaaaacgagagatatggcgatcgagaggtcaaacgacgcgaaaacggcgtttgaacgagaaatagtgccataggagatttggaattcgaattgaggtatgaaattacgtggaattgagccgatacttcacgaataggtttgtattggtgaatatgagtgaagtgtgtgcttggtttgaatttaggcgaagaaaatggaatttgggcactcggctcggaaacgatcgctcaaaatggagaattgagtgaaattgaagcctggtatatcggattggcgtgaaattcggcgaatatgtt

SEQ ID NO: 109013 - DNA, 281 bp, Zea Mays
acaatgtcctcagaaaaggcaaactgcacacatagaaccttatgtgttctcatggcagacatcgtctctactgatggacatctctaatttagcttgtggcaatacatgctatatccgctagagaaaccccatcctgaggcactcgcctttgtttggaaatgtcttacgattatcgctgatatggacatgggttacatacttctctacccttagaagtctttcgctccgaatcttgggacaagattcttttaagggggagggctctaacacctcaggtgttt

SEQ ID NO: 109014 - DNA, 607 bp, Zea Mays
ttttcaaacacattacattacaaaaccttgaaaatgattcattgagtttctgctatatttgagttttatctttttccttggcaattgcagcctctatgtcaccatatgcctcaagtactaaacaagcgaacatttttatcctatgaagttgagatagagataatttcttttctttttcaaatttatttttcccacatcatgttgttgactgattacaaagttatgacacaacatttgggcatcgacataattcagaaaactagagaaaaaagtaaaataatcatcacgattaaaagtcctgccaactactgacaatacctagatgatgtgcaactacatctttgatgcgggacattactagctagatgatcagtggaataccattgttccagatcacagctgtcctgggggaaaaaattcctgagcgcttgactagttgttgggtctagaatgcgcgttgggttgaaaatgccacgcgtagatcgtcataccattttcgcgtggaagctgggtgccacatcgttgcataggattttctttcagtacctatcatgattagctacagatggttctatcaatgatgttgctacatgaatcctaccattcc

SEQ ID NO: 109015 - DNA, 590 bp, Zea Mays
gaaatgaacactagaacgagtggtcatggagcggcaggcaggcgcctacactggcgaagagaaggcaccggccgaccggcgcgccttttccctttggatgcaaggaagaagtaagcttcacagcgaatctgggcatcttcgtccgaaatttctgtaaaagccttgcattggtatcttctgtttcctgcttttatcttgtcctctcttccctacaattcaactttgcacctcccaaattcgaacaaaagttgaagctgaaagtaagctctgtagctgaattcatcgcaatgcaactgatgatgcgcagagtgtttctcaggaagccgagagtttgcgttggctgggtccatatatatgcagtcttgttttgatcctgacgtttgcttgatgtgttctcttcatcttctacgttgcacccttcttttgattttggttattacagcatcattagcgacgagaataggtctgtccgatatattgtatagttgatcgcacccataagcctccaaccatttccctcccaaatcccctattcggtactttctattaatatttaaataccccataaaccactcttccccctatttcac

SEQ ID NO: 109016 - DNA, 342 bp, Zea Mays
aattttaaccaggactgacttatgaatgctacttgcttccaataattattgggctgcgataacgctcatataagacctctaatcgatcaacgagacatttatttatccaatgggaatggaatgcgatacttgaccaagcaaggcatcaatccgccatacaacagaaaccatgccgacacagatggacttttactagactcatcatgcgcataaccttgtctcgcatacaaccatatggtggcgtgcactcgagacacttcaatcaatgtggcgcgaccactaatatatgaactctgatactcatgttttaataattcatcctctatgcaactagcattttct

SEQ ID NO: 109017 - DNA, 901 bp, Zea Mays
gagaagtactgcatccggagtggctagcaaagcccgttcttgtactaaaaaagaataaaattgattggtgcatgtgcgtcgactatactgatctcaggaagcattgcccgaaggatcccttcgaaatccctaggatagatcaagtagttgactggactgctggctgctctatgttgtccttcctggactactactccgggtatcatcagatcagtctggcgaaggaagacgaagagaagaatgcattcatcacaccattcggagccttttgttatacctccatgccgttcgacctcaagagggctggagcgacttaccaaagggccatacagacatgcttagccgactcgagtggaggcttatgttgattatgtggtcatcaagacaaaaaactcagaaaacttcatcaaggatttgcaacaggtcttcaacagcttgagatgctacttaggttcatcttcagtcattggggaatagaagcaaatctagagaagattgaggccattatgaggatgtagccaccacgatcatagaagaaggtacaaaggctcactggatgcatggcagcgctgagcagattcatatcaaggcttggcgagaaaggaatgccattctataaattgctcaaaaaggtggacaaattccagtggaccacagaagcacatgaagccttagatacactaaaaaagttcctgaccacaccacctgtactcaagccaacacatcgagctacgtccgatcagtcggcagaggatctgcctctatatatttcctgcacgactcacgtggtaagtacacgttggtagtcgagcgggcggaagaagggcacgcatacccagtgcaacaccgggtttactttatcagcgaagtccccggtccctcaaagataaggtaccctcaa

SEQ ID NO: 109018 - DNA, 754 bp, Zea Mays
aaaaattgtcgcaagatctatgcacgattaaacatatacttggaggggtagcttgtaattttagtgtcctcttctacctctcgactttggcgtgtaggggagcagggaacggtggtcgtggggctttgtcgatgtcgcgacacactagacgcagactccgacgagcagatctacgatgaacttcagcgcgggtaggtaatcggcaacaggtacaacacaggcggcgagagtcagcaacattatggcgtgaacagcaggacataacagagaagcaggagagcaatagggcgacataacagagaagcggcgcacgacgacgacgagtgagtagagctgcgtgcaacgaacagagaacaagggatgggaggcgagctgggagaaaggctagcgagtggagggaggagagggtgcggcgtcgcgacgacatgagctacggagaggatcgtggacttgtcgacgcaatgtagacgatgactaggcgaacgacagcgtggatagcgcacgacaacagagctgtagcgaggagaggcgtgctcaaggctgtctatttaaccattctcagttcgttagaaaaaaactgaaacaaacggactatatggctagccacatcgcaccggcagctacctgctcgcctggctcctcactgtgcgacgtcacctaacatctgcctccctccccgggtcctgttgactggctcctcgaacacggtttgggtaagggcccgtttggttactttagttcagggactaaagtt

SEQ ID NO: 109019 - DNA, 747 bp, Zea Mays
ctgccctgttctcctccctctcggttctgtgagcagaggctcccttatcctccccatttgcatcaattccaaattcttcaaattcttgtcaaatccaatgaatccagttggtggaatgtgttcaattgtccccattatgtatccctgcaggttcttggctccttcgggaaggttttcacttctcatatggccatttctccgaaaccctaatatctcgcccaccacgtgttcggtaaaatgcccaaaccagccaaaaatgctccaattaaacccaaatttttcaggcaccttcacaacacttccagtaacctacttgccaaatttcacgccaatccgagattccaggcttaaatttcactaaatttcccgttttgagtgatcgtttccgagccgagtgcccaaatccctttttcttcgcctaaattcaaaccaagcacacacttcactcatattgacctatataaacctattcgtggtgtatcggctcaattccatatcgtttcgtgcctcaattcgaattccaaacctcctatggcactatttatccttcaaacgtcgttttcatgtcgtttgacttctcgatcgtctcatcttgtgtttcctgtgccatatttctcttgtgtatgtatttattcacatttcatatacttatgactatgtgactaatacgtgctcacctcttctgtcatttcagtgaccttgattgcccgtgtgccgtctcccgtcctgcctggatcatcacctctc

SEQ ID NO: 109020 - DNA, 354 bp, Zea Mays
gtctggtagatggctcttggctggtcttcatttcgctttgtgcttcaatgcttctgttgattagacttgtacttcagcagctatatttggctttcctctaatctccatcgatatcttgcttctgtcttgatacattcattgcgtatactgtttggatgtgactgcttgggaaaatctattgaaaattcttggacgtccccccaatgggtgtgaccgagggacgttttggtacgccgagtgtttagtaaactgtccttgagtagtaacttgatatgaccgcggggtgtaatcatatcgtccaagcagttgaccttagtccaaatggtgtcgtgttacgtgaagcggcatctgctg

SEQ ID NO: 109021 - DNA, 673 bp, Zea Mays
cttagcatagtactcccaacagtagcacgcgtatcgagaaagacgagacaacacatcatagtgagcgtatgtatcgtataggatgggaggagacgcaaagcgtgcgacgggtgaagccacgccatgtacgaccacatccaaggacatactcatgggacctgccatgtactgccactaggacatcatcaacggactcgatataagaaccggcacggaggacggagccaagtcaggggtacatatatgcacaaaaatgggacccagttcgttgacccaggcggatagggctgcctttcttcttcttcttcttcttccctctctctctctttgactcttttgggctctccttctcttcagcaaggaagggaccccactataaggcttctctcttgagatataaaagagagtgctccatcctccaaagcaacacatgagcacatcagttgtaacacgctctagagcaatactacgatcaacactatactagactagggcgccagcctgaaccaatataaacccaccgcctcaatccatcgctcgagtcccctggactcaccattcggactgagtccacgctaacttcccctccaaacacaaatcttagtatccctgttttctgaaacaacgacaagtcgaatatttggcattcacaactttatcatatcaattttgg

SEQ ID NO: 109022 - DNA, 368 bp, Zea Mays
cgtcagcagtagaaaaggaaagccaagaaatcagtggctagaagaaggaaagaatcaaagggcatgcagccgccacctctatagaaggaagggcggctagaagaggaaataaattagtcgaaatcctaaatcatagagatcagtttccttttagtagagatcctaaatcagaggagattagtttcccctttctgttgcaccttaggctatgaagccttgtagctggctcctatgagagacaagcaataacacagtcatttcctccctcatccctaccactcttaagccttcggaagaggggtaaaacctcactggagaagacggaccgagggtacgacctacgtagccgagggcccccttccctagac

SEQ ID NO: 109023 - DNA, 904 bp, Zea Mays
ccctcgcggtgacttcgatgtggtcgaatgccgaagaccgttgatgcggtctttttcgacattggcttagttttttgcgggggatttttgcgtgtatattatatgtctccgcctcattaaaaacctcaccccccgggaggaaaagagttagggccggaataagactgtttggtgaattacaagggcgtgttggccctgagtattcaaacaaaaaatttacggagattgtcaatattccaggaatgctctaagtcttcgccggatggcgttatgagcctgtacacgctggggggtgcctttgtcttgacaatgaagggccctcccactttggctccagcttgccccatgactctgtctgagttgtccggacgaggacgaggtccccttcgttgaattctctcgggacgactgtgtggtcgtgccatgcttttgtttgagcttggtatttgttgagggcctgcagggcgaagacacggtctccgtcgatgaggtccttggaagttggttcatctacgtcggggatggctgaagagcttgtccgtggtgacccgtgtttgatttcctgcggggtcatggcctccgatccgtatagcaggcggaaaggagtgaacccagttgcgcgacactcagttgtgttcggcacccagactgcttcaggtagcaggttggcccatttgcccttcttgtcgtcgagaagcattttcttgatggccgtgaaaaattttccgttggcgcgctccatgacgccgttggattgtgggtgatatactgaggcgaaggcaagcttggtgccaattgagaagcagaagtctttgaagtcctggctgtcaaattgtttgccgttgtcaactgtgagctcggacgggactccgaatcggcaaacaatgttttgccagaagaattt

SEQ ID NO: 109024 - DNA, 472 bp, Zea Mays
ctttggcatgatcgatggaatgggcagcgaatatctgaaaaattcctggagctttggtcttttgcctctgtcaaggagattaacattagtcaagctcggctggcttccccgaatgaactgttccacattcccctttctgctgaagcgttcgagcagcttctctcacttcaggacacccttggtaatctacagttgcttgatcacaatgatatttggcgatgcagtgcctcttccaatcggttttcttctcagaaggtctatgctcacttgattggcacccatcagtcgctccctctcttctcttggttatggaaatctaaatgtcaacctaaacacaaagtattcttttggttattgctcaaaaatagattgaatacccgctcccttctcagacgacgtgcaatgcctttagactccttcacctgcgacaactgtatactccagattgaagagacgcctattcatctcttct

SEQ ID NO: 109025 - DNA, 469 bp, Zea Mays
gccacgttacctctaaaaatcttagtcgtcgaatcttctacgtgcggtttcatcgcttagcaacactcagctacggtttggaactcacccacgtaccacgccacacgacaagtctcgatgcttcgagggcttcttccccatcctccctgtaaaccttgttgttgtgccggtgctgcctatcgctcggagcgtcttcctctccccactccactcaaacgccgatgtcttctgcccattcgaaaacgactccaggtggagcacaaatccctcccaccagatgtcgtcggcatgacccacttccaggaactccatactctccctcattctctcaaacggtaacgccgctgtcgtgtccgcgcgggcaagagcaccatcccctcctttgtgtgctgattccaatcggagctccatccctccacagccgccctcaaacgccaacacattttgtccgtgtggtgtggatgattgc

SEQ ID NO: 109026 - DNA, 540 bp, Zea Mays
caatcgttcgccggagctcgggaatttcgcgttcgccccaaatcgggtttccgccaccatagaatcaagctcaccgcggccagccctttctaggtcagttcatccctccctttccttcgtttaagctttctcatgcgcctgcgatgcttactgacccgtccaattgggctatgggtctactgaccgtcgggaacgcatgggtcttgagttcatccgtgcgctctccgtggccagaccaaattagttcaccattcgtgcaattgggttggggaaaatactcgaggtagatccaatttggtgtctgatgctcggagaatccagccgtggccccagtcggccggttcaggtgctcgctggagtgctccccgcgctgccgtcgtcgtggacttgggtgtgtaaagaattagaaatctggggggctcggtgtaaagcatcagagacccgttggaatagtggttgaacccgttcacagttagataaaaacgcgaggacccctgtgcaattctgccatcgcgcgcgggcgcgggcgcgcgtttcctg

SEQ ID NO: 109027 - DNA, 496 bp, Zea Mays
gagatcgatgttcaaggattttaacaaacacgtttgagtaaagacacgtatgatattgagcatgcacttcaattgttcatgcgagcggttcaactacaatgaacaataccaaactactaaactcaaacaatgttcgagacaaaacaagacagtttaagtgttgcaagcacctaaactacatagtatccttgaaaagatacacaagataatcaagaatggtgtgagttcgagtaaaaacatgaggaaataaggcaatacctcgatctgacgattcaagcatagaaatcccaatgaaagtgagggagttgatggaggaggccaagaggaacaaatctcccacaaactcccaaggatttgatggcacaaatgggatttggagagtggtgtgagtgtgtgtgagagagaggaaaagtggaggcgacggcggctgtgagaaatgaatgtgtaacgagtgaaagaaggaaggggaggagaaaaaggaggaggcagcggctgg

SEQ ID NO: 109028 - DNA, 598 bp, Zea Mays
cttgtagaaccattcagtttccaagggcatgtgcaatcattccctttgcagtacactctatatctatttctatccgactttgttatgccaagctcaaactcctcatttatagcatattgcctcacagctagcctaaaatctttcatcgatggatagagagtacccaacttcagatcagggtggtcaacatcgtgcaatatattgaccatttctggattttcatcatcaactggcatggcaacatctacatcgcttggatcaaaactattactttccgatgtaaaatgagatgcaaagttgcttggttccggatgggttcgattcatctcctcatcctcatctccaagtcctaagaacgcatacatctcatcctcatcacagattctaaacatatcacccgtctcccaattatcctcattttcagcattctcaataataaagttattccagtcaatagacatggtgtcatcatcattatcatccatgatgcgagcacgaaattgtcaccacctatatctagtgttagcacaaattattacacataatggtcaaacatattttgaatatatggcgctgccgcggcggcgatagaacttgg

SEQ ID NO: 109029 - DNA, 618 bp, Zea Mays
ttccaatactaggaaatggggcgatgtgccaaggttaggagaagatcttagcgattgagcaagcttaggagggtacgtgaaggttactcgataacggtagcagtgatctcaatgatggcaacaatattgaaagagggtaggggtgaggcatgacttaaatagtccggtggggatgaaaacaagtacaacagatagctctggttttctctctgccatgaaggcgcgtgaacttctccttttggactaactgtgcagggatcacacatagatttttggtccctcggtactgatttcctatggaggaggaagggtctgacaagtgggaaccataggtcagtgacacaaagtctgtagattgataccttctcggtgttccctagcaagtttgctttttgcatagaggagggactcgatgttaaatccaattgccagccatgtggacaacagagaggccttgtacctttagctcctaaattatgttcatgatggttgagatgacatctatatgcatgggaaataaactttcatccattcatagcggggttcaggacactaacctaagaactgaggtaacttgggtgcatggttgttgttggtcactactgaagtccctataaa

SEQ ID NO: 109030 - DNA, 526 bp, Zea Mays
gcagccatatgaggcatatttagcctcatggggcacattgatgtcaccaaggccaccccgcctacaaatttgtcttggttataggtgaactaatgcatccatagctagctttatagatctgtctccaacatggtccttaataacactgccttcattgggtcctaggcatcttcaaccctctagacatggccacatcacttggggctagtcttagcttccccttaggtggaatcaacaagctccctccgctagataggaaccatatggtctggtgaatgccctgtaactaatacaactttatggatccaaccccaagatcctcaacacggacaccacctgtcacttgtcatcatcagacggtaaaatcctcttccacttctctcctttccactcttttattattgttggtaatggcaactcccttccccttctttcccaaggctactctcttcttctaacttcatgtcactcagatttaaggacaaatctagatgcacctcatatgcatgccaagatcaagttccac

SEQ ID NO: 109031 - DNA, 799 bp, Zea Mays
gctataacaagattgttattggatcatcagacaacaactttgttactggccaatcaactggttgccattgaaaatcggggggaaattgggtttcaaatcgctcggtcaggctaactgaataagggatgccatggtacagtatctggataagatcagatcagccgttcaccgtcgacgacctctccgccgcgattcgtgccaccgccttctcgattcgtgctcggggaggaatggataacactggggatgggtaaaaatatcgggcgagggatggattgtgattgctagctggtccggccatcctatccacttgccgcgcggccgaccgagtttatcctcaccggagctcgccgtttcactcaaccgtgccacgccgcaaagcattctccacgtcgtagggatcgtggaggatagtcagttacccctccggcactgttttctccacgcgcgccacgatacgcagagcacggtaaaatatccaagtcgccgtgagctgatctccaacccaaattcactggccgccgctcacgatcactataaattgagtgcacccgtggctccacagggtaatcacacatctattgcaccaatccttgccccggattatccactagggaccaagaattgctcactttccccaatcacggtttctgccaccgtaaaacgcacctcaccgtggccagccccttccaggtttgttcatgctctctgctaccttgtttcagcattagtgtgcttccctgatgctcctcaaccaacccaattacactgagtccctcttaatcaccgggaacgcgat

SEQ ID NO: 109032 - DNA, 285 bp, Zea Mays
ggggactacgctcatttttggacgacatgggtacgtgtacgtatggctgtgcaaattgcattagctgtattcgtcggctgattatctctattcttttttccccacttgattgaggcgtgtgtgtctcttctggatttgagaggaaattgaatctgtataacatgcaaaaactgctcgtgaaggcctaattgttcttgagtcaattactgctctgctgcacacgtacttccacacagacacaggcacaaaaatgtcgagaaatgtatttctcaatcaacaactagg

SEQ ID NO: 109033 - DNA, 392 bp, Zea Mays
tgccttatccacatccttcgggggccggggaaaaaagagattaaacagagtttttgatgccattggttttgtttaccccgactactgctacccgctgcgaggacggggaaagaagaggaaggttgctgcttcgtccaaaattgctgcttcggccgcccccgatgagcctgcgccgaagagcaaaaaactgaaagtccttacccaccggccacgttatattgagtcagccgaggtacctgagcatggcgtggagacttcttcagctactgaaccaaaggagcccattcctcctacgcagaagactgaagaactggctaccatgccgaaggcaccctcagccgagcaagttgaggcaaagactggtaaagataaggccgaagagccaaaaactg

SEQ ID NO: 109034 - DNA, 526 bp, Zea Mays
gtcagttgaagcttccttaattggtgttctagcctccctcatgtcccctgtagctcacagacccattcgattgaactagaccgcactggattgccctgaacaccatagtttcctctcgatttttgccgtcgtcgtgagcaggcgtgctttgggtcggtttagtgcaattggttgagggattagtgtcgtcgagggtggaattaggtgttgagcaacagaggggcctagtcgttgcgttttcaggcggcacaagctcgccgaagccactgcttcgccgttcctagttggggacctaaccttgcgaagaaacaaaaagggaggggcctcgatgtaaatgtcagagacacatgtaaatagtgcgcaggattcttaattagttattcaaacagtcagggtcctctgtggaaagcgaacaccacgggcacgacccaacggaccacgccgggagataaaactccagccgctctggccttcctccgttccactgctcattgggttcgtgaggaaacctaatttctagggccgc

SEQ ID NO: 109035 - DNA, 512 bp, Zea Mays
gttagataagcaatgggtttgtattctatccatttggtgaatttatcaatggcgaccaacacgtcagtataccctccctgagctttcttgaagggtccaatcatgtccagtccccagcacgcaaatggccatgttacgggtatggtctgcagttgttgtgctagtaaatgctattgctttgacaagaattggcaagcttcacatctctgaactaactcggctgcatcactctttgctgtcggcaagtagaaaccagacctaaagactttcccaaccagagttctggatgctgcgtgtattccacactgtccgctcgactactaacgcggtgctcaccacgtgagtcatgcaggagatgtacaacagcagatcttctactggctgatctagcatggctcggtgtggcagctttagcataggtggcgtggtcaagaacttcttcagtgcatcgagagcttcctgtgcttctgtggtccactagaatttgtccaccttcttgagcaatttgtaga

SEQ ID NO: 109036 - DNA, 423 bp, Zea Mays
aaaataacgtgtttgaaaaaggaattggcatgtgcatagtagtaatcctctcccctggcagatggcttcggataaaaccacgcctaccgcctcagggattggagcaaggtctcctttaggtgctgaaggagaagtcgttggagaagggagtgaaacccacctccccgcacctccagagttgccattagatttagcccaagttctggccaaccaaacccaactcattgaggtcctcacccgaagccttgagaaccagcgtctgaatggtggaaggcctcaggacataatgggagattttctaaggctcaagtctcccacatttgctagatccagcaatccgctcgatgctgatgactggctacgcacgataaaaaggaagttagaagccatcagatgccctgagaaccagcgtgttcatctagc

SEQ ID NO: 109037 - DNA, 392 bp, Zea Mays
gagagatcaagggcccttagagatgggatcatattgatcttttgaggccagtcgactatcagcgagagatcgatttggctcagggtaaggtattgcagcataggtagatttcgaaacaatgtgaggtcgtcgaccgtgtccacagtggcactaaggtcgagatactgcaatttagaaaggttgccaagttctggaggcacactaccagcaaactgtatgccagagaggtttagatatctcaagttttccatggatcccaagaaccgaggcatagggcttcctgtttcccctcttcctcctcccaagtagttcatgctgaggtctaggtactcaagatgctgcagggaaagcagagagggacttatctcaccagccagaatatatgactcagc

SEQ ID NO: 109038 - DNA, 331 bp, Zea Mays
ttcaaggctagggtcagctccactctagttccagcaccattgttgttgactttgctgccccggcctatacattgatcactccgctccactgttgacacctttcactggagctgaagtgcgtgttttgctatcaatggaatgaacaaacttagggccccaggacggacggcttcgaaccaagcttctaccgtgctacattgcacctggttgcacctgcggtcctctcgccatggaactagagttccaaaatggaggagctggcctggcccggattaaccattcttataccatcctcattattccgaaaaaaaaagctactgcttcagattac

SEQ ID NO: 109039 - DNA, 431 bp, Zea Mays
ctcatgttaagtggagatgccacggcgctaaccttttccaaaggtgacttaggaccaattacagcattattcatccaccggtcaaatgaagcacccaggccaggactcagtgccctaggccaccagatcaataactcgttgttcattagatgtagcagctgaagcttcgtcaggatgcgcgactacacttccctgctgaagacgcaccaaagcaggagcagcaggtgatccattgtctcagattatttggtcacaaggggcgcaactgtcatcatcctacacaccccatatgcttcttgatccctagaccgtttccatagcacgaaccagccttcagctgaatgttctccagcaagtcccaaataaaggtgtagttactcgcgcacccagcttcgattctgcagagctacgccaccgtccgcttcctccgc

SEQ ID NO: 109040 - DNA, 816 bp, Zea Mays
ctcgtttcccttgctcggacttcgctattggggtataaatcacgggcgtcgtggtctcctcgtcctcccaacccaatgtgccgagccctgcccctggaacccaagccatagcatgtcgccgtcgatagcttacgtagagaaagatcgttgccatcgtaatcgggtctgcgctgcacatcagccagtgagacctcttccctatgattcgctatggcctgagacttgtgtagaacgtttcggatcgaggagttgtgcatcggggccttggttcggctattcgccggcgtacctcgccgtgcggcagcaccgccatctctggggaaggcctgaaaatgggtgtgaggagggatagatcacggtgggcgtagatctgctgatgaacgagcgggattagggtttcagcatacctctttagctggctgattgtaaccgtatgattgtgattcgagggccgtgatcagatcgtggagctttaaaaccggggtcgtagatatctcatcctatggttgtgatcgcatataggttcagtatgtaacctgatctaatctggcacgcagagtgttgatccaatggctctggatgacccgtacaccccttcggtcgtgtaaaaagtgctaaagagcccctgtatttttcttaattcaacccgcagtccacacccagtgaagaaacaccgtagttaggtcctggtatttatattctagaccctgaacttctcctaaatggtgcccataacccataatttgggataaaagcagaattaaatataaaatgatttctaataaaaaaaagaaatccaaaaaacttagtaaatgc

SEQ ID NO: 109041 - DNA, 392 bp, Zea Mays
cgggggtctaactgcaaacgcgaccggccgaaggggtatcagcatatcagggccgcacgatcaaggtccgatgcaccagattaaacctttaatcggtacgcagcgcccatcgttagatcgggatctgacggccatgttttaatgaaacagggagctaatcatatccatcaatcgccgatccaacgacccaaagtagatcgcgaagcggtacacacaggtgtccaatggattacagatgaacgaccaagctttaatgtatctgagatttaatcctatccctctacaaccgatccaacggccccaaccaagccgcgacgcttgatctcatcccggccgttggctggcaatctacggccatagtgtgcctccccaacattccccctccaccaccg

SEQ ID NO: 109042 - DNA, 544 bp, Zea Mays
cgttaagtgaattcagagtttctgcaaaaccataaagttgattcacctctagctcaacttctgccacttttgttgctgcagcctcaagaaggtgctcgatgtcaacctgaacagattcaacagtttgttgaatatcagaaattgcaatttctttctctgctattagtgtataccgatctgctttctcttgattaaacatttccatgagctcctgctccctgcatgcaaatttctgctcaaagaatctaatccgttcttccagctccagaagttttttgtcggagacctcaacaatttcatagtacctgttcttcacttcatgaatagacttctcatactccatcttgataagacttcccaaatcaagtttctggaccatgttttcctcttctagcacaacgatgcgttgctgaagcttatcaaccatcattcctttatcattaatgataccacataactcctgcttttcttttgtatgacactcatcagcctccattttagcaatgagaacaacatccaaatctctcttcagtacacaattttc

SEQ ID NO: 109043 - DNA, 423 bp, Zea Mays
cttttctacagaaaacatgatttagttaattaaacaaatagcacgacgaaaacagtgcgtgcagtcctaactacgacaatatttcacttcattttccacctagcctttacaataccatccacttgctactctagctgtttttaacacttaattatagttatttaaccgatggcgtgatagctacgaagtcatgctatcacttcaccttacaattcaaattaactaaacaattccaatcgaactcgccaactagccaattgtgtgctagcctatttttcataccaccactacaccacataccgcatactcagaacaactcattcacatttcacagatatcattactaaaacctttctcgcatcgcttgtaacttaaaactaagctttactatgcaaacacatgactttcagtttaatcacgaat

SEQ ID NO: 109044 - DNA, 679 bp, Zea Mays
gcattgtttttcccttcccatgcatgtatctggggattcctctctctattaaggagcttcctagaagtgtttttcttgacctcatagacaaggtggctagtaaactcctagggtggaaggttgcatgtttgcattaggctcgtagagcaactttggtgaaggttgtccttactgctatccccatttagcaactcatagctcttcaatgtccaaaatgggtaattaaagaaatagataaaattcagagaggatttttgtggataggaaggacatatatcaaagggggccattgtattgttagatggacaagagtttgtcgacctatgtctcttcgaaggttgggtattcataatttggaggtgcttgggtggtctctaaattggagatggttatggctcaaaaaacatagtcaaataggccatgggtagaatttgagattaaaacacatcagtatgttgttgcgctcttctcagtttcgattcaatccattgttgtgaatggggcaaacactctttttttgccgtgagttttttgctcttcggctcctgcgaaaagaattccgaacgggtttggggtccttgctggaaagtaatcccttgtcatttctgaacgggttcaggcctttaccgaaaagctatcccttattgatcgtctagttccttaggtcggggcatttttc

SEQ ID NO: 109045 - DNA, 1040 bp, Zea Mays
ctttgatttcatacaaagtttggagaaaaacaagctcaaagttgtgttgtcagtcaacctgaaacctgaattatgatattcagtgacataggatgaactttgggagccatttcgaagatgatccagtaggtgtttgagcatggttactatagcaagattgtagctggattataggactagaactttgttacagagagattggcaagttgccacatagaatttcgagaaaatttgcccaaattatgctctgtcagttgttctgatgaacaatcccgatggtacagtgcacccaaatatctcagatacagagcatctcgccgtcggtgacccttcgccgcgattgacgtcgatcgtcgcgattcgtgcgccgtgacttgcggataatcgtggacaaggaaagatctcaactcgggaaagggatagaggcttatcgccggactgttcaccgtaacacttgccgcgtagtggacagaggtgtcctcgtcggagtttgccgtcgatcatagccacgccacgtgcttagaagatctaccacgtcgcagtagatatccgtaggaggtcagttcgtcgccgaagacattaccccagggagcgccatgatagttcacgccggtgactcacttctcctctaggccgccggtctcccctttcaaaattagacaccaccgcttagcgcccttatacattgacagcccggtctgttgcgcaatgttatcccgaagccagaacacccattcccaccttcaattagccaccatagccggagaatttccttcttcccccaaataggtcgactgcgccgctgtgaaccacctcttcgcggctagctgcttctaggtccgccctcactctttttgtccgtgttttagcacccacacgtgtttgtgatcgtcgtctgctcgacccattaagcttgacctcacttaatcaaccggaacatcttgatcggtgtgcggtgttcgccatcaccgtggttaggcaaatcctggtccggattaacccaattagaacttgttctagggtcgcctcgggtcggtaat

SEQ ID NO: 109046 - DNA, 468 bp, Zea Mays
gggtaacctctttgagggcttgtagtattttgtgttgtgtttttgccttgatatttgaaactcttcttgtctgtaggaggagatgtagaaacttcttgattctcgggatagtctagataaatcataccatgatgccaacgtctctctcaccaccttggagaggagtcaccatttcactatgtcagagctcgatctccatagagacaagttgaaaatctctcagaatgaggtatcacgacttaacaggttgttgtcttcaagagattccatcatcagagattccgtcttcaagaggttgctcatcgcgatgcagaggctgcccgttgagatatcaaggtcttagaggacgaccatgatattatgaaggcgtggtgcaacaaagcgatggacaaggccatccgtattggccggatcctaatgaagaggcctggcgttgtggtgcctgatgacattgtggctgacgtgctt

SEQ ID NO: 109047 - DNA, 582 bp, Zea Mays
ctgacattgagtcctcaagcgaatcttcttcaagtgaagaagagactttaagtgaagaagagaatgatgaaaaggttgccgccattgctagggatttctcttcaccatcaccttcatccacttcacacctatgcctcatggctaaaggtgaacggaaggtacaacctgaaaatgatattattgatgattgtgacagtgatagtgatgacgagtatgcttctcctacctatgatgaattagctgacttacttaaagaatatactcaaatcattaggaagtcaaaagctaaatgtgacaagttgaatgatgaaaatgagttcttaacagccaagtatgacatagttgttaaagctagtgaagaaatgaaggaagaaaataaaactatgtcatccaccaaaaatgagctcaaaacctcccttaaagatgccaaagataaatgtgaaaaattaagtgaagcaaataggaaactgaaagatagacttgtcaatgtaaaggaagattatacaaaaattaaaattgactatgataatcttcttattgcaaatgagcttttatcttgtaatacacatgaggctattaacc

SEQ ID NO: 109048 - DNA, 467 bp, Zea Mays
gtgaaagaaatttcttcaggcctgatatggtaaaggagacagaagagaaagttcaatgaataattcataatttgaagaaagctcaagctcgtcagaagagttatgcagacaaacgacgtaaacccttgtactttcaagttgaagattatgtctacctgaaagtttcaccaatgaagggtgtatcacgtttcggggtaaaagggaagcttgcaccccggtatattggtccttttcctatccttgaaagatatggaccagtggcataccgacttcagttacccgaaaccttgtctacagtacataatgtgttccatgtgtctcaattgaagaagtgtcttcgggttctcgatcgaaccattgaagtaatggatgttgccctagaaccagatttgacgtattcacagcaccctatccgagtcttggatcaaaaggacaggattacccgaaggaaagctctcaagttttac

SEQ ID NO: 109049 - DNA, 410 bp, Zea Mays
tcgggattgggttgtgtgcctaggattccatgtttttttatttgagctttacttcccagttgtacttctcattctttgggttttgtacctaatgacctgtatcgaaacatctatggttactaaattgttcttaatcggatcaggtacaaacttgtcattgtggctggggacgaaacgggtgaaactaagtttgctatgtttggccggataacacaacatgtcagcatctcgtgcggaaaatggctgcatcgatgtatgccctgtcaatagcatcagcggtaatagctgattggggaaggagaaagcgttttgggctggacatgtgagttttcttgtttgaattcagtattatcagatgcaatagtcttatcttaattttgattctcgcagaactctaaggtgggtggtgg

SEQ ID NO: 109050 - DNA, 520 bp, Zea Mays
ctagtagccttatgtgatagaccaaaccaagagatgaagccgcctagtggtggaaagacatggagaaggcctaatcccaattttgtcctaagcatggcccagaggaaggaagtattgcaatggatcaagatgttgatgttccctgatgggtatgcaacaacctgagtaggggggtgaacttatctactctacgagtgttagggatgaagagtcatgacttccacatatggattgaacggatttttccggcgatggttcgaggctatgtcccagagcatgtctggctagctcttacagagttgagctatttcttctgccaactttgtgcaaaagagttatctcaatccgtgattgctgacctagaaagattgacacccgtgttactgtgcaagcttgaaaagatatttccaccctgattcttcaatccaatgcagcatttgattcttcatcttgcatatgaggcacgaatggggtgcccgtgtagggacgttggggctatccaatcgagagatgtctaaac

SEQ ID NO: 109051 - DNA, 275 bp, Zea Mays
ctaaggtttgactctcttggctagctagtaaacctgatagtatacatgttgatttatgtagatgcatggcattgttattgtaagctcttctcatgacatcactaataaattgaccaagaatttgaacaaggatttgctataaaggatctaagccatcttaagtacttcctcagaattgaattcaaacaagaaataatgggctactactatcatagaagtgacgtatctgctaaagaatgttggtatggagaagtgtaaatcaatcacaataccag

SEQ ID NO: 109052 - DNA, 419 bp, Zea Mays
gttgtcgaggggatttgggtgatagaggggcttaaacagggaggtatgcagagggagcaccaggactgatggagtaaattcagagttggatttagtaaactgaagaagctttattcctccttgttgtgcccatctgatgctatggatcgtgatatggatggatataaggatgtatggtctaactcaggttctagagttttttcccactgaaatatccacttttggactgatttggagatagtagagagagtaattcggttaactgaaccttggatcagatttggcggtgaagaaaagatctctccctgctggtctccttgtgtgtttgggtggagataaggtcgaagtgcatagccaaggatccagtgtcctcagctctattgaaaaatatcaagttggactgttgtgagcaagtggat

SEQ ID NO: 109053 - DNA, 302 bp, Zea Mays
atttttgatagctttagaaagcttgggactagatggaaatgtcttcatggggttcaagtgagtctgtccagtccctgagtccctggatgggctcgagggttggtcgtgtgtgtgtccttgctacgcatgtgcccacccttttatagcttaagggggcatgtacaagggagttggaccctgacaagtggacccagtgaaataacaatatatatgtagtctagatcggtgaacatagattggtggaccaatgtattctcttgcaatgggcaagtatcttcccttggtcactgtgtggattctct

SEQ ID NO: 109054 - DNA, 406 bp, Zea Mays
cagcccgtctttgtcgttgttcgccactttggtttgggcacccaccgtcgtcatgggagcgtgtggtctgctcctgctgcccgccgccccgtagacattgtctgtgactccgtaagtccacgtttgctctgctagaccccctcatgtcgtctgcatctgcattagggtcggctccgttggtgcttgctgcattagggtgtttgctctttgcaagaactgtgttaccgtcggtcatccggtgcacaatccgtgtgtggttggtggattcttactctttggtgcgtgtgtctgtgttgggatgggttccagatacctggatttgtgagggacgggctatgcatgctgcatctttggttcacacagcttgttactttgtttcgatacttgggtgccacgtgcgtataga

SEQ ID NO: 109055 - DNA, 448 bp, Zea Mays
aattataaaagttgtagtacactaaataccctacaaaaactagaaagaaagtgaccccaaaaagatttcagaaaaaccccaaaaaggacaccaaagagtagagcataaaaggaaaatcaggatttgctcaagttcaaaaccgaccctctttcaaagatcaaacatgttcatcttgatcccaaactcaaaaccctatggcccaattgacaaaatgacgcccaaagatctctagcacaccctggaaaagtttgaacccaaccctaagccatttgacaggacttggcatggcttttgtctcggtgtggataactctgacagagccgacttctcacccctatatctctctacaccggccgtatctttgcttggaactcacatcaaaaaggtaggatttggtgcagggaagagaccgtacacggggggttttgccaagatctgcacgctaaag

SEQ ID NO: 109056 - DNA, 279 bp, Zea Mays
gtttgtttcggcatattatatttcttcaaatgctctttgcctcagatgtcgtctaagactagcgcacaggatggggcaggaacctcccgtgggagggaagcaaccccgaatccacccccagtacctccaacattagctgaggccatcgctgccttagttaatgccacagctgacaacactcgtttcctgcgggaaatggaagggcaacaaatgcagcaacaaggcgagcgggcatacccgcaaggaccccgggaaacatcatatctggatttctcagag

SEQ ID NO: 109057 - DNA, 561 bp, Zea Mays
agcgatccactaccacccatatagcatccctgcctcgaggagaacgaggtaagcccaccacaaaatccatggtgatatgctcccacttccactccggaatttccaatggcttcagtaaacctacaggcctcttatgctcggccttcacgcgctgacatacttcacaggcggccacatacttagaaacgtcaaccttcatccgcttccaccagaagttttgcttcaaatctctatacattttggtttcgctagggtgaacggtgtaaggcgttttatgagcttctctcaagatatccatcttcacctctgatttctgaggcacacaaagatggcccctgaaacaaaccaaatcattctcattaatggtgaactcctagggtttaccatcgccaaccctctttcgagcttccagcaataaacgatcctgctgctgagccacacgcactctctccatgagggaggattgaataagcattcgagtctcctcactagcggtgccaacataacacaaagcgatccccaaatggtccagatcaaggcaaggccacttttggaacccca

SEQ ID NO: 109058 - DNA, 389 bp, Zea Mays
acatggacggggaccctccgacctccatgtgtgtgtcatggttgccatgtagctttcggtgcgagctgaaatggcagcgacctagctgggacgacacgtgtggctccgctgatgtcgtcaagcacatatatacctctagctactaatgcatagtatgccccacccaatacccatggtcctaggaaggaggtgacactgacagtgatggcgcagccaatcgcagggttacacacggtgcatgggccatgcactggtagtactacgtatggtttgctctaggggggtccccttatatgttaggtctattatgaacactagtgcttgttcatcgaagggaacagtatggaccggcggcacgatcgatcacactcccggcatttggttctaga

SEQ ID NO: 109059 - DNA, 374 bp, Zea Mays
gtttgaagtttggctgagcaaaaataattttggcactcagctcgaaaaggatcaccaaaaagatgaataggttgtgtcacaagtgcctggagtattggatagaagtgaaacttggcatgtgaggtactggtagtagctgaattgtgctggaaaaaattggggtcgatttgagctcgtttggctagtttgggcatttcaccgagcacatggcgtgtgaggttttagaaaggcagaaatcaaatctttttatggtgcgaaacccctgaggggatgaagcacctgcaagggaaggtacactagtgcaccaagatcacatagagaacattggattcacatgatttcacagagttttgattggatttgaggggtggaag

SEQ ID NO: 109060 - DNA, 413 bp, Zea Mays
ccaatcctcactaatattattcactaccaagttagttttagcatgggggttgaacctatgccttgaccaatgcttactatcaatgcgagacgaccatttccagcctctagcgttctctttcttaatttcatcctttgtttgtttaaaatcaaactctttgtatgcatatgcatccatatccattagctccttaagttgaggacccttgaatctagcccttgagaaatttgcatacaagtgcttcaaacaagacttgtgctctccatgtgggaaaatagctttgacaccatattctaggccctgcataaagcaaaatcaaatgaactaggggaaatagaaactgaacataaagcaaatggaaataacaataaactacatattaataatactttttctatcactcataattgccc

SEQ ID NO: 109061 - DNA, 334 bp, Zea Mays
caacacgtgctttggtcctcccttacgcaccaataggtccgttgacttgaaggacctatactagactagcaaaattgaggaataccagcgctaattcttggtgacgttgtgccatttccaggaggtgacatcaacgctgaatgtatagatgttagtggtgggactcctggagccgttctggacggtcgtggagttggaatgtcctccaaatttatagcatgccatgaatttggagtgggccttcaagcggtaacttgccacggtgctaggtggtcaggccgcaatagcatcaacaccatggtccacgccactagtggaaacagtaatactagta

SEQ ID NO: 109062 - DNA, 475 bp, Zea Mays
agaaaaaatatcgccagggataagatcgccaccgtggttggggatggttctgtggccacggtaaagatcatctgcgacgtggcgctaaaacgttgcggtggcactgcccggttaatcagcggtcaccggactttcgtcgtggctctgtcgtgcggtgagctcgccagcgcgggtacagcttagtgaatctcatccatctccggccatcagcctataaattgagcccgggcacagcttcttcaccacatcgcacaccccatcgcttgagtaatcggctcaattccaccggagaactcagactgtccacaaatccccctcctccctgtctttagcgccgccgtgaagaatccctccgtggccagcactcctcaggtcagtacgtgccaaattgcttcttgttctagcttgactctggccttctattgctctcggagccggccaattaaactttaccaaagcccacactccggaacac

SEQ ID NO: 109063 - DNA, 779 bp, Zea Mays
gaaccataaacgcgggggatacacccaggatgcattcgcgaacttattggggaaagagccaaaaggccgtttgcacttctgcccggaaagaccaaatatttgtgaattttttcctgggagagaaaggtcccaaaaatgacgggggcccgtcgccgctgggtctgcagagccattaagaccggggacagaatcctgcccaaaattcctcgggcactgttccaaaatcttcttgggccgccaaatcaacttccgcggggcccaaggggaaacgcgagaggtcctcaatgatggccgaaatccggagctagcaacgcggccgattctataatttgaataattttgaaattgcggacgaacaacatatccttgatcaatggcggggcgaagtgggaaggaaatccgatcgaaaaccgagtgtcgctgcttcaatcttaaggaagaacgtccgggccttaccgccctacccaaaggaacgaagtttgcacctgtcagagctggctttcgaacaatattagcgaacgagaccggtgaagaacggcgatgagaaatcagtttccaagactttgattcttcctctgaataacgatgccattcaatgatccagtttggaccgccagaattccaaaggtgcagatacgctttgaacgcggagcaggagtaagagcgtaaccgataaactgcgaaaccaacgttcttgcaagaaagcgaaaaacgaaagacccgatccgaaaggtgcgagaccctaaataaatccgcctcgccaccaattaaagattgaa

SEQ ID NO: 109064 - DNA, 379 bp, Zea Mays
ggttcaggggtgaccgcaccatggtgcaggaccggcaggggaggtgttgtcgctggtggagtgccatggaacttcttgagaacgcccacgtggaacacgtcgtggatgtgggcacgggcgggcagctctaggcggacatcgacggtgttgacgatctccgtcacccggtatggcccgtagtactggggctttagtttgtcggcgacatcggtggccagcgacgatggggaacggtggcggagttggagcaacacccattcacccacctgatagatgatgtcgcggtgcgtcttatcatagtgcttcttctgtaccgcctgagtctgctccaggcgatgtcgaacgttagccaggaactcctctcgttcttccatcgtgc

SEQ ID NO: 109065 - DNA, 539 bp, Zea Mays
cacagcccgaggggctcgtaggtcatgagtgatctgcaccctaaagggttcgtaggtcatgagtgggaggtagatcggcgcctccgctgtggtgtggtgccatgcgcagttaatgcggtcggtcatttatgacggggcggtctcaggccaggcgtgggatccactcgagtggtttctctttggcacgcatgtcccccatgttcggtttcgccatgcatgacctcgggctcggtgccacatggtttgtccgagggaaggtacttctagggtagatgttacctatctcctctgactgaccagcgggctccagttgcaagaggctttttccttagtgtgctcgctgaccgatgggccctacggacaggggatcgtatcctcgatagtatccctcgagccctgagggattgtatccctttggggggctgatgaaatgttagatgtgttttgtcctttcaccttttgagtgatcgtggcatttactcccctaggatttgggctgctttcgacgcggcctgctgccttttggggtggagtcaggc

SEQ ID NO: 109066 - DNA, 507 bp, Zea Mays
ccgaagtcataattaggaggacaatcgcagcaacaacacacctccttactcgtagtgtattgtctactaggacaatctaccataggtttcctgtgatgataggtactcatggtggttatggaggaagccatggaggtcatgcaggggatcatggtataggctatggtgtcccttgggccaattggactaccatagaggagcttgggatccatctctcgctttgactggggaacaattgtagcaacaatagcaatggtaggagggcaaggtatgtgagacatcaaacaccacctcaactagccctagttataccaccattcactttggtaacttcatcaactatgcccgcttagacaaaggtactcaagcataggcacttgcatccacatatacacatgatatggatgggtcatagatcgaggagcatctaagggatacctaatttgtttaagacatacaatccatatacccactttgaaactaaatagttgatggtacgtcccaaac

SEQ ID NO: 109067 - DNA, 561 bp, Zea Mays
attagttctaatccacacagagaaagtgctatgataaggaactaaatgtttaagcatcaggaatgttgaattccacctaacatccatatctactccaaatttacgtggtctaacaccaacactcatgcagtactgtttataagaagcaattctttgatttgaagagtttaaaaatgttatagttgtcctaaagtcttcaagatatggttgcaaacgtttcaaacagcttttaacaatcagattaataatatggcaagcgcaacgctgatgcaaaaagatagtactcaaatcactctcattcctactaggtgcaggtatcaaatggccaatataactagaaaagacaggtttcagaacatcaattgcagttttgttagatgaggcattatcaagcacaatagcaaaaatcttatcagtaatgttatagtcatttgcaaccatttcaacacgctcagcaatgttaagacctgtatgagcaacctctataggtctaagaccaagcaatctcttttctaaacaccaatcagagttcacaaaatgagcaacaacactaatatagtc

SEQ ID NO: 109068 - DNA, 517 bp, Zea Mays
ttggttaaattttactataggttggacataaatcacaatcttgggtcttttgtagagaccataatggtcaaaaagccataggagttatccttcgatacatagggtttagggtttggcgtttagagtttcaagttaggggtttggggttcagtgttttgtccttagggttaaggatttagggtttgggcaattttttctgtctttatacatttttcgatctctagaattttactatgatttgcccttaattctttatgatctttggattttagtattacttggtttccattttaatatgggttggacacaaatcacattcttgggtttttagtggagaccatttaatggtaaaaaatccataggtgtaagcattcggaggttttagggtttgatgtttagggtttgggcgttacggtttagggttttcggtttggggtccggtgtttagtgtttagggttgagggttatggttaactctttagggttcgggaaaattttatctatcactagacattta

SEQ ID NO: 109069 - DNA, 393 bp, Zea Mays
aacagtttttctaagtggtggagggttactatcagtgcggcccataaaaatctgcgcaaagggttgaattccctcattatccttgtggcctgggaagtttcgaagcatcgcaacagctgtgtttttgatggtctggcacctcaggtggaagctgtccttcaaaaagtggccgatgagtgcactgtttggtgcatggctggagccattcatcttcagaagctcctagccatgttgttgccccttaatccttaggatttatggcggtttggttgggttccttccttttgggtgtggcttgtaattagattttcttgtgtttttgggttaggcttttttagccttcccttgttttctttttctatcttaatgaaatgacacgcagctctcttgcgt

SEQ ID NO: 109070 - DNA, 325 bp, Zea Mays
tggaatcgacggcacagattttatttaccccaaagtcacttgattcgcccgatcggatctgaacggatcagatttcttgacctaagcgttacaccccagggttccatcgtagccgatcagagggcatccaacggttgaaaactcttcttcctacccagctgtaacagcgcggcggcggcccaaggaccacggcggtccatcgtcggagtcccaacgatttccacgcagcagagcgcaaattcccaattcaagctaccctactagttgatcagtgaaacgcgaagaagatagtacactaattacctcgattcgaggtgaagactcc

SEQ ID NO: 109071 - DNA, 333 bp, Zea Mays
caactctcctaaagatcaagaatggtccaatatagcgaggggacaatttgcccttgactttaaacctcctcattccacgaagttgtgataccttgaggtacacataatctccttcctcaaattccagtggtctccttctattatcaacatagctcttttgcctggtttgagctatcctcaaattctctcgaattataaggacttgttcttctgcttcttgaatcagttcaggcccaaagaactgtctttctccagtctgatcccagtatagaggagtcctgcatttcctaccatataaagcttcaaaaggtgacatcttcagactggcctgat

SEQ ID NO: 109072 - DNA, 627 bp, Zea Mays
ctacgccaaaaaatccttccagtgtgcttgtctgtgttcatccattcatcacgtgtgcaagtgtgagtgagactgagtgcactagcgacagattgatccttagcagaaactaacaagtgccatcggagctgagattcttcgctggctttgtcgacaacaccaacgccgcaacagcatgccgccgcgacggagatcaagcacgccacggcgctggcgatcgccgtccacaactgacaaccttggtaatgtctatgaagcaaaaactatcgtgcgtaagtttctccaagatcttcccgagcgtttccatcagatagcagttggaatcgagaccttgctcgatctcgaggaggtgtctctagatgaattggtcgggcggctcaaagcaatggaggagcgcatggattgcacgaaggcgaagggaggcatcagaccgagcgccggtggcaaggagatcaacggcaagctgtacttcacccaggagcaggtgatcgctcgtctcacgtcccgcctcaacttcaacaccggtgggacggggacacgtggcagagcgcaagctggccctggaggacgccatcgcgggagaggccgtgacagggggcgcgacaaggacacacgctcggctaaggg

SEQ ID NO: 109073 - DNA, 315 bp, Zea Mays
tttattatttttgcagtggggttttggtggttacaagtccactgagtttttattatcaattttgggtctggttttgtaattctaataattgatttctagttggaataatgctaaataacacatttcactttaaaactgatctggactagaggtcccttaatttttcttaggttctctgttacttaagcaaactaggaaaaataatttcactctctgttcattaatttctaatgccattctgattttcctaagttttgggcagaaatggcttttaatggatatctacactatattttttaatactagggttcttac

SEQ ID NO: 109074 - DNA, 674 bp, Zea Mays
ttgagcataacatcataagcattggcattgcatatgtttgatacacttagagtgcattcactaggccaaaaatttcaagcaagttgtattgttatggcattttgcaaatagaaccctggaataggggacttaaccctaaatagggaccaggagggtaaaacatgacccaaattgagaaaaccctaaggtttaagtaaaacaatcataaaatgttaccaaagatggatctacattacattcatacccctgagataccaaaaaccctagttgaaaccctggaaaaccttaaatccaaaccctagggggttaagtgcaaaaaccatgacaacaaggtatcttgagtcacatggttcacatttatgaagatctacaagctaaaccctaggttttggactaatttgcaaaaagaccccatttgtgatttcactctaagtctgaaaatcagtgttatgagctcaattttggagctttataactttcaaattagtgagaatttgccctaggtcaccacatcaagtttgtagacctatcaaaggagaacaactttgcttaagggtgtaagcatagttgttgagaagaaattggggataattaagcccaaagttcgactgttaggctggtaaagtctgaatttcagactaacagtgacctagatccaagtttgagagccattt

SEQ ID NO: 109075 - DNA, 725 bp, Zea Mays
atccaagtcagtctcccggccctcgagatcgcgctctaaggtcgacgaggcacgggatgacctcaacccagcatcgggcacgtcagcgcaagcctccattgcaccatcgtccactggctctgataacaggtcctctgggaccatatcctccagagtctgatcaaagttggccagggacagttcttgcagaccaatgagggcagacaaagcaggagagggaactccactactttcaccactggcgatgaactgccgactgtttttccgagtcagaggaatctcattttcctcttcctcatcatccacatcggcaacagatggggcacccactatgggatcaacagcggattgggtacacccattggggtcagcgtcagcaaatccagtcacatgcacttcttcaatagcaggaactgaggtacccgcgtcctgatcaaaactggatactcgccggaggcgtcttctgttcttcttctgctcatcaacagaaggatcaggttgattggttcggcaagggcgcctcgggcgagcactgacaggcttctgaacatccaaagtcgtatcagcctctaggaggggcgccactaccaacgtcccagcaggagcagcatcggatgaatcctcagctagcaaatcaagcatagcgcttacctctgcatcactagggttcaggggcacctcaaaatgaacctgccgttcgtcatcaggaatctccccaagcgagg

SEQ ID NO: 109076 - DNA, 397 bp, Zea Mays
atcacaatacacatcaaacgatttggtgttgttaggctgtgctagtacgggtgtggttgtcagatgctgcctcaaggtgtgaaaggcatcttcacatttctgaccctaatcaaacatcactcccattttcaacaactcggtcattggcttagcaattctggagaagcccggaatgaatcgtcgatactatgctgccaaacccaaaaaactctgaatctatcaaacagtggtaggaggcttccaatccatctcctcttgcactttctcaggatcaactggtattccttcctgagaaattgtatgacccaagaacttgatctcccttagccagaaatcacatttggagaatttggcatacaggtgatgatcccacagtcgctggagtactatgtgcaag

SEQ ID NO: 109077 - DNA, 397 bp, Zea Mays
ctggcaggcacccaacgaccaactcgaaggaccagatcaggaaagggcaatagaatacagacccatggctccaccaaaaaactaagtcaaccccaagcaatcctcacgggttactcgagggctacatcacactgatgcgcttgcacgcattcaggctacaccccagcggacatcgcctccgggcaactccatatgggtcggtccctggaggctacgctcgctccggtgaagggccgaatcgaaagctacgacataaaatgggcgagtatctgatacgatcagaaggtcagaagaggtcggcaaaagacagacccatggctcggccgagaactaagtaaaccccaagcaatcctcactgattactcgagggctacatcatattaatgcgctcgcgcgc

SEQ ID NO: 109078 - DNA, 868 bp, Zea Mays
ccgagtgcatgagttacactaccagacgaaggctagagtggatggccttcataagaactttggttgctataactttgcgtatcgaaaggataccaaggccccggtgatcggctaccgcaccaagtggccgactgggtggacgagtgaatggttctatataaaagctgatgagaagaagagaaaaaaattgatgactatggtcatgagtccgatgaaattaagcttcggaatgacaaggcccttgtgccacatgcaacttggctccccgtgccagctagccgaagttgaatttagagtggtagctgtcgagattagcaccagggacttaatgcaagaatatttggcaaatagaacatttccaacttctagcggctgggggatgccgaagaaaaaggaagggggaaaaagtatgagcttgttcggctcccctatagcttcaaatttgagaaacagttcaagaaaccatgcaatgaatggctggaaatgatcgaaaccatgtgtaatgagatccttggcaactatatgaagaaggaggaccagcttatggctgctgccttcggtacccgaccaagacgaaggctgaaccgggtaatggatgcgttaaacttcgaatacctagattatgagaggtttgacagaggggctggggtgtgaaaagaaaaagggttgttagtatcctaagaaggtagaccgctcgctcagtaaaagaagatgagaaggccttgaagaaaacaaaaacagtgccagagccaaaggcaacaattaagaagcacaagcttgaccaaacaccctctgttgaaccgaaggtcgacgaagcagcagagaaaacccctccgtcgttaactgctgccgaagtggttgaaatttt

SEQ ID NO: 109079 - DNA, 375 bp, Zea Mays
gacatattcgcatggcaacctgcagatatgccaggagtcccgagagaactgaccgagcacaaattgaaggtttacccccaggcgaggctgatccgacaaaaattatgtcgtttcacgtccgacaagagagaagccatccgtacagagctggctcgcttggtcgcagcaggattcattagagaagtgttacatcccgagtggttagcaaatcctgttcttgtactcaaaaagaataaagtggattggcgcatgtgcgtcgactatacggatctcaacgaacactgtccgaaggatcccttcagactccccagaatagactaggtggtagacttgaccgctgggtgttctatgttgtctttcttagattgctattct

SEQ ID NO: 109080 - DNA, 439 bp, Zea Mays
ttaaaaacgaatttctaatgttatttcactatttttaatctactatggactgggcgccaatttctagaaaagtcaggggtctctgcgcaagataaccaagactcagggaatagttccactggactgcgggttctattttccaaaactgaagggttctttaataaaaatgtgtcgcgaagggggtatccgtagatttgggccgttggattaccagccgagggctcggattagatcgctacatcaaccgaagcggtacgtcatgaccaacgcacgatccgaattggacggcctagatctgcactacgacttagcttgccccgcgtagtcctagtcgtccgatgtaaatcactcggccaccctgatctctatgaatacttctaatcccatccgttccctgcttcatcaaaggtcaccagagaccccccctttcttccccaaa

SEQ ID NO: 109081 - DNA, 546 bp, Zea Mays
ccaattgcatatactggggaaaagaataacctcgctagctggtgttatttggattgtccatcaaacctgcattatgaatcctgcttgctagggagggctaattttgcccttcaatgttcatgaatctggccttctgtggaatccatgtcgggtaatgatttgggtggataaggagtaaaaaactactataattttttggttcaaatacaaatgccacagttttcacagatgcaagtatctttcaggtggaactaaaatatctgctgattaaagcctgcacaccataattcgcattatctcagtggattagaagatccggaaccattctcagcattagtagttacatatgccaaaagttacatgcactggtttcagttatcaggaaattttcttgtgcccgctttcctaataaaccacatcacacattggtttggagctttatatagtttattatggtccattgtatctatctaatgacacattgttgcctacttttaactagttgaatctttttgcaatcatggcatgtagaccaagattagattt

SEQ ID NO: 109082 - DNA, 557 bp, Zea Mays
aaggtgctatctgaggcttcatgggctcatagaatatctaagcacaacgctactaaagtgcccccgtttgagcttgtgtatggataggaagcaatttcctgaagcgtatatgcatatattttacactggtgatatccggtaatgcatatatgttacttactttgcaaggtaatgaactgcctaaaacattgaatggtcgtttccaaaagcgctatcatctgagtgtatgacaagatgcttaaagagccgttgttttcacatcaggttgctaatgtcttgtaccaggtgcttttggttcgctcagctttcccaaaaggcaggggcatgtgttaagcaccatatgtgtcacctgggagaggccggacagttcgggccgtggacggtccattctaagcgtggatggtccgcgattaggcgataagccccttttttagtgcttgtttatctatctaaatccacgtgttttgtttgggaacgcctaataacggtccagaccccccttatatatataccaacaatcgaaccaaatcaatatatcttccattctttaacttttt

SEQ ID NO: 109083 - DNA, 489 bp, Zea Mays
attcatattgctaacatgtttttcaacgagattgttcgtttgcatggtatgccttctactattgtttcagatcgtgatgtaaaattcttgagtcatttttggcgtactctatggaacaaattggggacaaaattgctgttttctactacttgtcatccccaaactaatggacaaacagaagttgtgaatagaacattgtctgcaatgctgcgagcaatattgaagaaaaacttgaaaatgtgggaagagtgtttgccgcatgtggagtttgcatataatcaggcggaacactccaccaccatggtaagtcattttcaggtagtgtatggttttaaccctcgtgctcctattgatcttttgcctctacctactaccgagcaagtacatagtgatgctaaggagcatgctgactttattttgaaacttcatgcttcagctaaagcaaacattgaaaagatgactgaaaatatagaattgctggtagtcaag

SEQ ID NO: 109084 - DNA, 383 bp, Zea Mays
tctaaagatttctccttcgattgatttaccatggcttctgcttctgctggcatactaacatcgacttccattctttctccttgcagacttgttaatgtaaccattctcttagcacaatatattactccatcatacttggttaagtaatctattccaagtatcacatcgattccacttgattccaacattattagctctactagaaagcttattcctctaatttcaagcttagtttgtgggcatgagtgagtggctctaatttcacctcctcgtgatctaattaataatttcctcttcaaaggatagtttgatatattatgcttttccacaaatgactttgttacgaaagagtgagatgctccagaatcaaataaaactgatgc

SEQ ID NO: 109085 - DNA, 606 bp, Zea Mays
cagaataaaattgttttgcgaattacaagggcgagctagccctgaggagtcaaacaaaaaatttgcggagattatcaatgttccaagaatgctccaagtcctcgccggatggcgttgtgagcctatacgcgctgggggacgccttcgtcttgacgatgaaagggccctcccacttgggctccagcttgccccgggactctgtctgagctgtccggacgagtacgaggtctccttcgctgaattccctccggatgactgtgtggtcgtgccatgcttttgtttgagcttggtatttgtttagagcctgtagggcgaagacgcggtctccgtcgatgaggtccttcgaagtgggctcgtccacatcggggacggctgatgggactgtccgtggtgacccatgttttatttcttgcgggtcatggcctctgatccatatagaaggcggaaaggggtgaacccagtcgccctgcactcagtcgtgtttagtgcctagaccgcttcaggtaacaggtcggcccacttgccctttttgtcgtcgaggagcatcttcttgacggctgtgaaaattttgccatttgcgcgttccacaactccgttggattgcgg

SEQ ID NO: 109086 - DNA, 454 bp, Zea Mays
ccggttgccagctcgcgtcgaacacgtggaagcttgcttctgccatggttcaatggcagattagagcaccatagcgtgcgtatcttggcaaagtcactgtgtacggtcgcttccctgctccatatcctacctttttgctgtgagttccaagtcaagatatggtcggggcagggagatagaggggaagaagttggctgtgtcagctaggtccaagccgagacaaaaatggtgtcaagtcgtgtctagcgccctagggtaggggtcacctctttccagggtattctagggttaatttggcaccactttgtcaattgggtcgaagggttttgaattttggattaaggtgaacatgtgggatctttgttcaagggttagtttttatacttaggcaaattctaaattctcccttgtgctgaaccttaggtgaaccttttgggacttttctgaaaacttt

SEQ ID NO: 109087 - DNA, 1305 bp, Zea Mays
cttgagtacttcatgatctaccaaattccagagttcatgtgggcatcttctgcttctttacacatggagggaagggctggtaggtggatgcaggtgtacaaaatgagacaggggttgggtgactggtctcattttgttcgagctgtacaggacaagtttggttctgaagagtattctcagtgtatgagggaattggttcatatgacacagagagctagcttggatgaatatattcaggagtttgaggacagtcgatatgcaacaatggtgcataatccaaggctggatgagactttctttgtgtcccagtttattaaagggttgaggggagaaactaagggatatgtgatgtctcagttgcctagaacagttgacagggccatagctctagcccagatccatcaagaggttttggagaagggaggatacaaatttcagaaaggtctacagtcaaacaaaggtctgggaggtactgtcaagttagatgtcaaaatgggtggaggatcgtcagatatgactaaggaaagacaattgagggacttcagaagattgaatggtttgtgctttggatgtggggagaaatatgaacctgggcatcaagccaagtgtcctaaaagggtgggtcctcagctgcatagtttgactgtggaagatatgggactgctgttatcagatgaagttctgcacaatttggatcaggaggaccaaacgttggaggaatcctacaagctctcactaaatgctatcagtgggacggatcaggaggggtgtatgagagtgagagcactgatcaagaatcaggtgatggtgattttggtggactctggtagttccacaacttttgtcagccagaagatggtgaacaagttgaatttgcaaactgaaagctgtcaagctattagggtgaaagtggctaatggggagatgatgcagagttcaaagaaggtgccatgtttgtcctggtgggctggtggacatacttatagtacagatatgagagtgcttgagttggaagcatatgatgctattctgggttatgattggttaaaggtccacagtcccatggagtgtgattggaacaataaggtattgacctttgtggacagaggggtgcaggtgcagttaaaaggggatgggaatgaacttagggaggtttcccaggtgacagcgctgcagttgacaaaatggatgaagggtaatgaggtatgggctctagtgatgctagagcaagttccagtggagaaagatgacaaggtgcaagaatctttggagttgttgctaaaagagttcgaagatgtgtttgca

SEQ ID NO: 109088 - DNA, 438 bp, Zea Mays
aaagctacacactatggttgatgaccgaggcaaggatctctggtttgctcctgctttcctttcccttccccggctggtctttatatagccagtgaaaatatcaagggggttggattcttgaacttgcagcatggataactgtgagcatgagattttagtcgtggcttactcaagaagatccatgcagattcatagagcacagtcatgcagggtgaagattatccacggcgagggggggtaaggataggagagcactgtagtggatatttctaccagtgatatttctgctgatggcctgattttgaatatctctgtcctcccttatctctaccatcacccatacctagaataggacacggcaaggaaagcaaaaagatcaaagttagatatttttgtatttggaatctacagctcttgactgatccacccatcttcagc

SEQ ID NO: 109089 - DNA, 338 bp, Zea Mays
agtctatccacgactgtttttctaaatttatccttgtatatcctaactataatattaactactctctgcagtgtggttgttcctatctcatttgctctgtatcccaccactgatataatattattttattttaactgccatcctttcctgtattttatttaattcagaatctccatcaatagtagacacctggagcctgcgccctcagctcttcttcttcgctccctcctagctcccctcgtcattcatcagtggagacgtggagtagtgcacattgcacaagcaccatccatatcgccttccacctctgcgagctcgccaccaccatgggacccgcg

SEQ ID NO: 109090 - DNA, 344 bp, Zea Mays
agtggctctgccaccttcctcgccactgtgtcgacaactgggacgacttttatgactggtttgtagctaatttccaatcactctctaacaggcctacacaaccatgggacctcaaatccatcaggcgcaagaatgatgagtccctccattcgttcctcaaaagttttcagtcgatgaggaatcgcatccccgacatcagcaagcggctgtgatcgaggacttctatcgggggtcacacaatgaggtctttgttcgagctatcattcaaaaggctctgaggaccaccgaacaactctttcacgaggctgacatctacatcactgctgatgtagcgggcccacgat

SEQ ID NO: 109091 - DNA, 456 bp, Zea Mays
gagagcgggtattaccactctataagttgctgcaaaagaccgactacttcgagtggacagcggaggcatagacgacccttgacagtctcaaggaactcttgatcaaaggtaccgttctcgtcccaccggagggtggagagctgctcttgctctacatagcgaccaccgcctaggtggtcaatttggtactcgtcatcaaaagacagggaaggatgcgcacgcccgctccagtgccccatctacttcataaacaaggtcttgacccgcgcaaaggtccgataccctcaaaggtctgataccctcagatgcaaaagcttttgtaagccatcctcatcaataagtggaagctaaaacactacttttaatcgcacctcatcaccatcgtaacaacgtttcccctaggggaggtgatccataacccagaggctgctgagagaatcgctaaatgggccctcg

SEQ ID NO: 109092 - DNA, 528 bp, Zea Mays
cgacgccctattcgaagaatggaacatggcgaatgtacagggggagaacttactagtgtataggttggcagaggggtggccacgacgttgagcggatgcatgacggagctcacacttggacgagcaatcccagtgcccccgctgctctttagcgcccaatcccggtacgtgcacatgcggtgtaccactgagatcatcttcgaccgatacgggcaggctcgacaacgatgaaggcgtggtccaacggaggcggctcggtctccttccttctcggttttgcccgacgttgttcctcaggtgcatggctaggtgatggctttgaattggtgtaggaagggaaggggtatggctccagttctatacgctcggcaagggaaccccatgccaacgatcgcgcacggtttctatggattttgttgccttctgcgagtccgttcgcgaggtagatgctgaacccgactagtgggtcccacatgtcattgaacacaggaaagacgggctggggaactgacggtcgggacccaccag

SEQ ID NO: 109093 - DNA, 604 bp, Zea Mays
ggacatgagagggttctctgggatggagggacacgagagagttctcaagggcggaggatgcatgcaaagatcccagacgagacgacgcccagaaggactgatgaacatgaggaggacccagaggccgaagccccaccgtcaagtcaagacttatctaggactctacattgtaaccacctccaccacgaataagagagtcgggagcatctccttactctctcacctaattgtaacccctagtatgagctttgatgaccaatatgccagtagcgcaagtcgccgatgacaggatgtacggacgttctgcccgaactagtataaatcttgcatccatcgtgcacaccgtccggagaccgaaacacgcacaataaatttaattgtcggagcgaggttcgaaacaccgacactataattacatcttattatcgtaatacttctagtatattacctcactccaccacgtctgtatacacatattagggcatgtttggaagatatatagataattgttagctgctaaaatttgttctagtggttccaaaaagtccaaccgagagtccctgtttggaacctctagagataatatgtgctactaaaattagtt

SEQ ID NO: 109094 - DNA, 423 bp, Zea Mays
gactgatggtgatatgatggatgtccgctctgacattccagatgtgggattataggtatcccgggcagcatctcgcgcatcgtcgaccttggaaggcagtcttcggtgtcaagaggttggtcaagattgcccgactcccatggaggtgattgaggatccttcagccttagaggtggttgttgcagaaaacccagccccaaaggtggtgttggcggttacctagcccccgagggtgttgccggtaatgatctggctcgggtgggtagcgcaagctgcaacccagcccccgagggtgttgccggtagtgatccggctccgatgagcagtgtgagctgtaacccagcccccgagggtgtccgagcgagctctccttcccatacctccatggatgtccacgtcgggtcgtctccaccatgttctgat

SEQ ID NO: 109095 - DNA, 781 bp, Zea Mays
caactgaaatcgtacctgtcaccacgtctccttgctccctgccatccgcagcgggtagcacataagctccagaaatacccgcaaaagaggaagctcccggagtgaaattaacagaagaaccccactgagccaccggatgaggcaggcgcggagctccaaactgagacagcataggagtagacagtgtaggagtaggcatggcctgatactaaggaaaaccctgcatcgacacgaactgagaagtcccaggcacatagagctgctgcggcgcaagaggaactgaaaactgctgctcaacacttgacatcatgctgatagtgccctaagaagaggaggaagtcaccggctcccatctgagcttcccattaggattcctcctacacaccacatccttatggtcctgactgcagatagaacacctgccactccactggcactccgcacggcgatgcgcatcaccacagcggaaacacaccagccccagcctgggcttaggaacagcccgaaacctctgagtacttcctcccgaagtacctgagtcagaagatttgccacggtaaggatggtggcgctggtgctgagacttgcccctcttgtgggctagacctcctgtgttgcccctcctcgcgtcctggctacgaggctgatcaagacccgaagacttctgcgactccatggtatactggtgttgcatctccacacccagtgccagctccaccgtggtacggaagtccaccaacggaaaggcccctagagcatgcctgatagaaggcttcagacc

SEQ ID NO: 109096 - DNA, 328 bp, Zea Mays
gctctcttggggctacaccgcctgtaccctaatgtagttgctaagctcttagttcgcctcttgcgatgtatgcttgctttgtagtgtatactcgataagtgctcttatctgtgcttctagcaagacaaataaaaaaggaaagccattacaatgatgtattgtgtgctacaggccaggtgcttcgtcaggcatacttcttggcgccactactctgcccagcgtcatgctttctcggttaattcaactgtcaaggctcctaccagctgatcctaatggacctaaaggtgtgtttctattttgttgtcttgatcgtgttggctattaaatg

SEQ ID NO: 109097 - DNA, 588 bp, Zea Mays
ggtttcattgcaagacttcaaggctctatcagagacaattcctcagctgcttggagtcaatgcatcactggtacttgaaaaaataaattcatataactaatcaattcggatgcaaatggatcaatgcttccgcagagtttaatctttgcctatcagacaatagaattgaaagctcaaaattgtatctttgtcacatgcaccatcaggcaatggtatgtggatgtttgcataactcaaacatgcatcgagctgaggttctagtaccaaatgcgacaatgatgaagtgttgagcctcgctagctagcatacttcacaaatttgatgttcacatccaagtcctgacttggttctgcacatatatgcagctgaagtgtttcttcctgtttcatctctattgccttgcgaagtccaagcctgcctccatacacttattgcagctgaggtgttgcttcttgtataatctctgctactcaaaggatgttttgacattcttagtctcatatgtggcagacaccaaatcttctcagcttggtgtctctcttatgttgcatggtttatatatgttcataatttattaggcaatggaag

SEQ ID NO: 109098 - DNA, 684 bp, Zea Mays
tgatgaggcgcaggacgctgcccgggatgaccccaacccggcgtcgaacacatcagcacaaacatccatcgcgtcaccatctgccggctctgataacagatcctctggaaccatatcttcaagagtctgatcaatgttcgccagagacaattcttgtagaccaatgagggcagacagagcaggagaaggaactccactactttccccactggctacatattgccgactgttcttctgagtcaaagggacctcatcttcttcctcccccttgttttcatcagcaacacagacaacacacccattgggatcagcgacagatggatcacacccattgggatcagcgacagatggatcacacctattgggatcagcgacagatggatcacacccattgggatcagcgacagatggatcacacctattgggatcagcgacagatgaatcacacccattggggtcagcgtcggtaaattcaggcacaggcacttcctcaacagcaggaaccaaagggaccagcatcccgatccaagctagatactcgctgaagacgtctctttttctttttctgctcatcagcaggagaatcaagttgattggctcggcaagggcgctttgggcgaacactgacaggcctctgaatatccaaggttttaccagcttccgggagaggcgccaccaccaatg

SEQ ID NO: 109099 - DNA, 504 bp, Zea Mays
ccgagatctccttgtatgccttgatagggatcaacgtcaccaacactatggagctccatgtcccgatcgatagccatactgtggtgtccctagtggacatggcatcaacccacacatttgttcaagaggccatcatccccaaactcgatctctaggtgatgccacaacctaggatgtccttgaaggtcgtcaatgaggagtaggtgttttgcatcaacatttgttccaaggtgccataaccaaacttcatcaccaactgttatgtgctacccttgaatagcttcgatgttatactgggtcacgttttgggacccatcttatggaactttgatgatatggcattggccttctagtgtcaagggcgcacaatatgatggataggtgtgggtaggatgccacctcgatgcacggtcatgtctacagtttaggagctcctcaaggcacgtatggactccttcactgacctctttgacaagccttaaggtctgcctccaccaaaccatc

SEQ ID NO: 109100 - DNA, 293 bp, Zea Mays
cctcgacctatgttcactgaaatatgcttaccgtatgggcaccatgtttctcaacgagaaatggtggtcccggaatccaggattagtccaatgctgatgctatgcagcttgcgcatagaaggtaacgggagtccatgggatgcttgttcttttaacgttggttcttgatatggagggagtagcctggttggttggtttgctgcatcgagcaggtcccttgaagaacttgttggttcgtacatcactatgttggcagctgttcgtactgacttgttaaaagagagtcgcattat

SEQ ID NO: 109101 - DNA, 1038 bp, Zea Mays
agccatcgggagagaagtggcatcaactggttcccagctcacatcagggccaaccatcatcgaccccgaggagacactttgaaggtgggggacaagtgcctccaactccacttccgggacagacgggggagaagagacatccactggtccaccggacgttgacgtcgaatgaatgcgcgggtccaaccgcgccgagacccatgtagatgccatcggggggtcctgtcgccgtgctcgccgtctacgatggtcttgatcgtgatcgttgtcaccgagctctagcggagaaggggagggtgatcacccccggaaacgccactcgagctgagaatcttcactgagacatggaacaccaatgtacgtgggagccaggccccatcttcatcactgaccatcgactcaacaacatgaacatccaaaatcttaggtagagattctagagaaaagcaccaaatcctcaagttgagagctgacatgtcttcgtcctccaaggaacccgggagcataccatcaaccaggcaatgagcaccgagcagagcacgtgatgtctcaatcccccagagatgagccgggatttcccagagtttgacatcaaggagcagaggcaaggcacctccaccagaagcaaacacatgtcgagaccaccgcttcacatgcaagcggagggggggggggcgaagagcgattgtccatgattgacgacacaattagccaagtccactgaagggaaaaagatgaggaatgagtttggcgcttgacaacagagttggagcgcatccgcttgaaggtcaaatctcgatgcgagcgcatccctgatctccgtggcgcaactagaatcctcccgatcgacgatggtaacgatcagcgcacgctagagctcctcctcagcccgatcaatctttccagaacgttcgatgacacacacgtgcccgatcaatctttccagaacgttcgatgacacacacgtgacgagaagagtccactgcactggaaggtgggtcctctcggggagccctggtgaccccctgacggtggcgc

SEQ ID NO: 109102 - DNA, 330 bp, Zea Mays
gaaaaaagcaaaaaaaaacacatagatctaaactcctttgcaactaccataaaatccacatatttaactctaccataagtaatttagcactcccaaacgttcaagcaggtggtacaaaggaaaaattatagaaatttatttatggacggatcaaatctaacacattagaccacataaacatcaacttttggagaaacaaagtgaaagcacaacgaatcgagctttactactcagggtcttcaaggtgagtccttgtaggtggtcacaaagctaagcgacagcacgagcagttgagcgaaaccaagaagggaccaagcacgactgctcctt

SEQ ID NO: 109103 - DNA, 522 bp, Zea Mays
ttattttcaactcttcttgtctgattcttcgtctatcagaaggttctaatgagaagcattgcaagatgatcaagctaggattgtggaacttgaagcgaagtttgccagaagaaaccctttcgaagctatcaatgatgccctattctctgtcttatccccactccgcaagaagttttgttatggatcccctagatctattatttgacttcttggctaggttgataggattgttctttagtattaagattttcgactagatcggtaatggcgatattatattatatcattatggttttctaatccctaatattgctatataacccttgacttcttatacttttgttttcttgccattgtattgccatccttgcgcaatatctaccttgatatactgaattctttgtatccctactcctacttgataatgcctctctaatttgtctccttgataatgctttctccctaactcacttcatatccttggttgtatcatttatcctcactttaatagttcatggttag

SEQ ID NO: 109104 - DNA, 560 bp, Zea Mays
ggcgcatggtcgcgctgttgtcagggaaagggttggtcaagcgttggagcatgtgaaggcctttttctggtcgggggtagaaaattgtgtttaaatttgagatctctaatgctttgttgttttcttaccgcatgagttgtgggacgaggagattgagaaccttgctggcttggagtgttccctggccacccaggacggtggtgttgccgagatgggtgcgaaggagcgatcgtcccgtgcagaagctaaccacgtcgatcccagtgcggcgaggacttcgctccctactactgatgagcggctgtaataggagtagactttttgagtgagtggcgcactacctcgtcagattctaccagtgtagacagctgaaggggtccttggcccttgtcgttttgaggatcaggagcttagggcgctctttgaaggcgaagagctcgagctcatgttgtttaattttcaggaggtcggtcttgttatgaaggaggatcttttgtaaccctaaagaatacgatatgtgtattgtcgttgcttggcaaatttttagagcggaacactgc

SEQ ID NO: 109105 - DNA, 886 bp, Zea Mays
aaagcgtaggaaatatttttatgaagctaacgcgacttgaacgaactaaatcggagttaaaacgagcaatatatggattaaatgagttttaagtcatttttaaaactaaaatcgagctctagggatttatttgcaattttcagggactgttgcataatcttcttaccgcacgggtggacagcgagtttatttgtaataacccaaggggctcttttgcaataatgtcggactggagtatcttaaggtcttagccgtccgatctaataccgaaggcacacattagattgtggatggaaccaagcgttacgcggctgaggccgtccgattcgagatcaatggcccacattttacctataggataacagcttagatccgatcgatgtcagatcaacggcccggatcacaccaccgaatcggtatagcactatcagatccagaccgctcgcatgggatccaacagcaagatttctatgcgacgaagggtatgtgctatcacatctgaatcgtatgctctagaatctacggttcacaactcattttcctccgatctaatcctaggcgctggatggaaatccaacggcggtcgtgcatcagctccaaaccgacgacgccgagcgacggagctgtgccccatacggcggaggccgtggccggagatggccatcccggtgcacaactccctaaactccgattagaacggagctacatgtgaagaacggtaagtcaaaattcatgggtacgaggctcatcggtggagaaggcgtgcccgagctggccacggcacacggatttcccgcgattgatcttcaacgccggcgagaaatcctggataggtcagaggcaatcaccgcacggaaaggccacgagcaggtgtggacggtctagg

SEQ ID NO: 109106 - DNA, 492 bp, Zea Mays
aaactaggatacgggttcaccttagtggacaaactagaagaagtcaatattggccctggggataagctacaacccacattcatcagtaagaggttatacctagtgttacaagagctaatgataagcctgctacaggaatattcggattgttttgcttgggattacatagagatgtcagggcttgataggagcattgttgaacatcggctcccattgaagaaggggtttcgaccttttcagcaatgagcaccgttgttgaaatatgaagtactacaagaggtcaagaaagaggtagggaagatgttggaggcagggttcatcaggccatgccgatactctgaatggatctccagtgtagtgcccgttcaaaagaaagatgggcactagcgggtatgtgtagattttagagacctcaacagggccacatcgaaggatgaataccccatgccggtcgtagaagtgttaatcaatgcagctactggccacaagaac

SEQ ID NO: 109107 - DNA, 933 bp, Zea Mays
ggaggatgaggctgctctgcgccagcgttttcccgcagcagccgcttggaacaactagcttctcatggaggggggattgtcagcatccccaagcagtcgtgcatcgagaagcagaagtcaacggcagatgctactgatctggtgctgggtcgccgcaacaggaagcccaatactaaattcataggagaagattgggtggcgtaatgggtcgtgggccttttaatagcttgtacttaaacattgtgaacagtgaacggtggaaattatactgagaaatatatcgacaactatcttctcttcttattccataggagaagattggatggcgtaatgggccgtgggtcttttaatagcttgtacttaaacattgtgaacagtgaacggtggaaaattatactgagaaatatatcgataactatcttctctttttattccatcttcttcttcctctagaacccttcttctgctgctttccctcgttctccagatccggtgcttgtgggagcataacacgtcgtcctcgtcgtcgttgttgctgctgtcaggaaccgagccatcgcactgctgtccgtccaccggttgcttgctccctcgaattgattgaagtctgcatttctctggtttgcttgctcgcttgcgttgattgaagtccacaacttctctggttgcttgccaacttgactggttgattgaattcacatcttctcccgctcgccggttgactggttgattaaagtccctaccttctcatgtcgcttactcacggtagaattaaaaggagttgttggggtatggtctttttttttaaggtactcaagatttttaaaaaggtcccaaatcatagatattaggagatatatttttaagagtggttggagatacttttagctaacttttacagtgtggtctcgaaagtgcttaggatggatcgag

SEQ ID NO: 109108 - DNA, 802 bp, Zea Mays
agcgtgagcatgtcacaccgccttaagtcgttgccgacttaagtcgattgctccgttagtagggtatagtggtcaccctaagttaagtaagcgtgagcatgtcacaccgccttaagtcgttgccgacttaagtcgattgctccgttagtagggtatagtggtcaccctgagttaagtaagcgtgagcatgtcacaccgccttaagtcgttactgacttaagtcgattgctccgttagtagggtatagtggtcaccctgagttaagtaagcatgcaggttgacagtaaacaatttgagcgcctttgagaatgaagtctttttattgatgatatatttcccagtttacagagtacaaggccgtcccaatagcttttgaaatatagctaggggtaaaacttcctgagatgttctatattccatgagttcccaattttcctgtcgtccatttgagtaagacgatatgatctaggccgagtgacttctgctactatgaatggcccttcccatagtggcgacagtttgtgccgtccctcccccgttagaactcggcggaggacgaggtctcccactgtgaaggatcgatgtcgtatggccttgtcatgatagcgcctcagagtttgctgataccgagctgactgaatcaccgtattcaatcgttcttcttctagtatatcaacatcctccagtctagtaggttcagcttttgctatgttttcaaaaattaacctcggtgccccgaacttgagatcagcgggtagcactgcctccgaaccatagaccataaagaaaggagtgtttccat

SEQ ID NO: 109109 - DNA, 965 bp, Zea Mays
cgagggcctaaaggttctcctggctcattaaggatcagtgctagtctgccatagggagcacaacagatgtcccaagtgtgagaaggataggccaagtgaggtagatgaggaacaagggaaccgaaagcaaggtggacaagacaggcagagcgatgcgattaaataattgttgtcctacgaaaccctacagctttgtgccagcggagatgacacgacagaggaggaagcaagcctgacccaccaacatgccaggcctcatgctatcccaggtagagacatgtgtaagttattcccctgtgcacaataaatgagggaacacaaaggtaaaagccattaaggcgggagtttcctcggattacatcgtgtaaggatttggtatgcatagagtgggggtgaataggttacctgtaaattttcaggacaagaaactattaaattccatagtggtagtgccactcttagcctgacactgtcacagtctggcactttcagacaatagtaaatgatccaaacactacgaaactttcacggtagccgatagataagatttcttgtaactagaatatgagactaaaatgagtaatgtagagtaatcaggaataatagggtagagaagtactcaaatgaagtcaactcaaaccctaactactcagatcatcaaatcaaatcaacaaacatggacacaacatttatcccatggttcagctcgccacaaaggcttgcctacctccacgttgttgaggacagccacaaaagccaagggtcacacacccttcctcgatctcaagacaagagctcttgctcttagtatgagagggatttcattatgaataagggtaacttacaatagttccaaggccataacaagcttgtagctcaagggaaatgtcacatgtcggctaggagcaagctccaagaatcaatgagtgaatgccaaccttgaggtgttccaatgcgcaatggga

SEQ ID NO: 109110 - DNA, 440 bp, Zea Mays
tgcagagttctcgtataacaacagccatcaggccagtatcaagatgtcaccattcgaagcattgtatggacgaaagtgccagacccctctcatgtggtccaacgtaggggaaaagacactggaaggacctgcctttgttaaagaggccgaagagaaagttgccctgatccgcaaaagattacttgaagctcagagtcggcagaaaagttatgcggacaataggcggagagaactcagatttgaggaaggagacttcgtctacctcaaggtctccccgatgtgtggtgtcaaaaggttccaagtgaaaggaaagctagcaccacaattcgtcggcccctatcccatcattggcagagtgggacctgcagcataccatcttgaattaccagaatccatgtctgatatccacaatgtgtttcatgtgtcccagctccgcaaat

SEQ ID NO: 109111 - DNA, 367 bp, Zea Mays
gtgaagatgacacagtgctagcgacggtggtactgacccctcccctccttgccctagaagacccaaaggggaaagggaaggggaagtatgtagaaggacccatgccctcagcacctagggcgttggtgatggagacgggtacgtgtacggggggtagtggcgtagacctagtgttgactgcttcatgtcgacgggatccccattggggcctggccatagccaacgacaatatcgccccgagcaagggtgattaggggactaggacccaacttgggtgtggagccgcgacgacgacacaacaattgatgattgaatgccttgaacaagttcctgtgaagaatatcaagttatccaaataaatggaact

SEQ ID NO: 109112 - DNA, 290 bp, Zea Mays
aacacttgtggaactgtacaattgccctttttcaccggtctgtagtccaaaatttcagaggcagcacaacctgagcagactgaggcaaatccaaacgtatgcaacttctcccacacgctccacaatcttgtaaggccaaaaacaatagaaggcaagcattggacatggtcgagtgaccacggtatgttgcgcagacagttggagtttgagcaacaccatgtcacccacttgaaactggcgttcagttcggtgacgatcatccttcaacttcattctgttttgagttgttg

SEQ ID NO: 109113 - DNA, 448 bp, Zea Mays
gaaatattttctaggaggtcaatttttaggtcggctcaaaaatcatctctaaccatgtctctagaaatcaccgtttcacaggggaaatgataacccctgcaatggcaatttgcatgtgattcttgagcagttgatggctacttgtgtatttgagtgtaggacaaaggaagagtatggaaaaatcaatggatgtgggcttttactttcccccagcaaaacgatgttggtttcatgagtttttggctttagaagcttgtgatgggacatgcgctgggtggcgcttatgaataagccaatgcaaaagccgtgttgcgttggccacagatgggttcaatccctatggaatgagtgctgccccgtacacatgttggcccgtgtttgttatcccaatcaatctcccccctagtgtgtgctttcaaaggcagaatatattcgtgtcgttgataat

SEQ ID NO: 109114 - DNA, 485 bp, Zea Mays
ttagctgtgatgagaggactatgagattagtgtccttgtcaggagaagaagtgttagtggagttgatcttgtttagaccaaagaaaggaagttgtcaccagatcactacccatattgaggaagtcaacccaccgaaagccatcaaagtagtatcagactttccggatgtgtttcccgaggatttaccagacatgccacctgaaataaaagttcaatttgctataaagcttatccctggcaccacccctatttctaagagagcttatagagtgtccagaccagaattggtggaactcaagaagtagatagacgagttattggagaagggttacatcagacccagcacctcgccttgggcctccccggtgttgtttgtggagaagaaagatggtacgaagaggatgtgcaaagattatcgagttctgaatgaagtcactatcaagaacaagtaccctctacccagaattgaagatctattcgatcag

SEQ ID NO: 109115 - DNA, 291 bp, Zea Mays
ccagggtgcagtgagtactgtaaagagtgaagccattggagctgggactgaagttgatatgcttccaacacatgaagacttattggtggtcagtgacggtgacaggtgtgataaatcaagtagcatgggacatgaggtgcatctggaatctcatatgtcgggagcaaaaatgtcctttataagagagcgaaacgaaggtaccgagctggttgatgcaagaaacgacgaggaagacagccaagttctgaaggaagcgacaaaacaaggcaattttggtgataccgttaaatt

SEQ ID NO: 109116 - DNA, 993 bp, Zea Mays
ggttattatgcgtcccatatggtcccgctttgaccttcgaaagctgaaggttgaaatcgatgaagccgccgaagcatgccagaaggcctttggtactgtatgcttcttcattggtacaagagatctaatccaagagcatatagccttcagagtatggccgcttgtagagaactaggaaatgccgaaggagactgtcaccgattctagcgaaggtgacctggttcgactgaaatatacattcagatatggagataaatttgatttacgaaatgactactagctgaaatgtatcgaagctacaagtgatgaactgcttgggccatattccaaagtagaagataatgcattatccacatccttcgggggccggggaaaaaggagattgaacagagtttttgatgccattggttttgtttatcccgactactgctacccgctgcgaaggacggggaaagaagaggaaaactgctgctttggccaaaactgctgcttcggccactctagatgagcctgcgccgaagagcaaaaagttgaaagtccttacccaccggccacgttatattgagtcggctgtggtacctaagtttggcggggggagacttcttcagctgctgaaccaaaagagcccattcttcctacgcagaaggctgaaggaccggccataatgccgaaggtaccctcagctgagctagctaagtcgaagactgataaagataagaccgaagagccaaaaattgaaggatcaaaaatgttagaaattttaagcccttcggcagaagtaacagcgccgaaggcacaaaaaagttttgcggcaactcccaagagaagaaggatggctaatgtactagatgtgctagaaacagtaaagactttgaacttgactcctttaaagaaaattgccgaagcctcgaaggcgcaaactgaagttgaaacagagcaggccgaaattgaaactgcagtaattcaagctggtgccaaagctgggccttcaga

SEQ ID NO: 109117 - DNA, 739 bp, Zea Mays
ctttggtatatccgaaggccagatcctgagctgatggtaacctgaccttagatctatcttcgagaacacactggctcctcttagctggtcgaacaggtcttcaattcttggcagttggtacttgttcttgacagtgactttgttcaaagatctgtaatcaatgcacatcctctttgtctcatctttcttctccacgaacaaaactggagcggcccaagatgaggtactataatgaatgcacatcgtttctctaacagttctcgatctgcttcttgagttccaccaattctagtatggacactcgataggatctcttggaaatggggcaatgcctgggaaaagctctatggcaaactcaactttacgctcgggtggcatgcctggtaactcctcagggaacacatcggggaattccgacacaattctaatatcctcaatcaggttggcctccttgccatcttcagacaaatggtgacaggctccttcttctaggtcaggcatgaacggttcagttactacttcctttccggatggggacactaactttactgtcctcttgtcacaactaatagtggcttggtttttgtgcagccaattcatccctaggatgacatctaacccttgagcacccattactactaggttagcggggaaatctatcccgcttatttcaatccttagattcggacacatcttatcggactaaacttttcccccaactcaattaactcttagaagt

SEQ ID NO: 109118 - DNA, 416 bp, Zea Mays
gcgaaggtgatttggttcggctgaagtatacattcaggtttggggataagtttgatgaaccaaaagatgactggctgaagtgtatcgaagctacaagtgatgaactgcttgaagcgtactccaaaaaggaagacaatgccttgtccgcaaccttcgggggtcggaataagaaaaggttgaacagagtatttggtgctattggctttgtgtaccttgactattgttacccgctgcgagggcaaggggtaaaaaggaagattgctgctgctggaaaagctgctgcttcggccatcatggctgagccgaagaggaagaagatgaaggttctgactcaccggccgcgttacatcgaaccggctgtgatacctgaatttggcgaaggggcctcctcggccgccaaaacaaaagaaaccgct

SEQ ID NO: 109119 - DNA, 592 bp, Zea Mays
gcgcgggacgctgcccgggatgaccccaacccggcgtcgagcacatcagcacaaacatccgtcgcaccatcatccgctggttctgataacagatcctctggaaccatatcttcaagagtctgatcaaagttcactagggacaattcttgtagaccaatgagggcagacagagcaggagaaggaactccactactttccccactggcgacatactgctgactgttcttccgagtcaaagggacctcatcctcttcctccccgtcgttttcatcagcaacacaaacaacacccccattgggatcagcagcagatggagcacacccattgggatcagcagcagatggagcacacccattggggtcagcgtcagtaaattcaggcacatgcacttcctcagcagtaggaaccgaaggaccaacgtcccgatccaaactagatactcgccgaagacgtctctttttctttttttgctcatcagcaggagaatcaagttgattggctcggcaagggcgtctcgggcgaacactgacaggtctctgaatatccaaggttgtatcagcttctgggagaggcaccaccaccaatgtcccag

SEQ ID NO: 109120 - DNA, 516 bp, Zea Mays
ccatgaatatcgaaaagggcaatgaccacacaataggcccagatccccacgaacgggtcctaggcctccacatgtaataaccagaccctgcgggcgggtctagaccccttagccttgcaaccggacctcttgcaggtggggcccttgtcttcgtggcagcttgcgcccttgactcccactctccgttataagggggtccggtgccaccatgtggctcggtggcaggtagtaggagccatcgtccggaatcaatctcactgctcgcatttaatgcggacgatagaagtgtgtcgcgccgcatgtcaggcgtccacagacctttgtcaggcatgtgtcagacagcttaggctagaatgactgccccgtgtgttaccgaggcagacaattgtctgatagtaccgcacatagggtttacacacgacgcctcctaacaccaagacaaacagttatgtctttgaagctatctacgaggatggtgccaccataagcaatcattggcttaggcagcacacgctc

SEQ ID NO: 109121 - DNA, 514 bp, Zea Mays
cgaagctcgaaacctacttaacaaagtatagaaaatctctttacctttatgcctctattttatattcttccttaccatattcttcaatacccttgcctttgtcatttttcagggtgatactgccgaaagctagtgaactgaagcttgttctggagcgatgaaggagacttcggaagcttctcttgttaatatctatagaaacacttttggaggttctttgtacataacatttggcaaagaattgtaattgaatgtgaatggatttttgtaaatatttgtgaatgcttcgtaatgctactttaccttttattcgactgttgtctgctttgctgtggacgaaaccaatgctcgcagctttttgagccgaaggcaaaaaacatcttccctacttttcgttcacatcgaagcacctttggaccaaaatcaaagaatggcctcctcatatataacaaaatgttttcctttctttttctgaaaaacaacttcatttgaaacaaagcatcttcgttcacaa

SEQ ID NO: 109122 - DNA, 390 bp, Zea Mays
gcggtactgaaatctagcttggtgcccatagctttctgaaggcttgtccagaatttggatgtgaactgggttcctctgtctgatactatcttccttggaatgccatggagtctgactatctccttgaggtaaattcgggcaagggtggctcctccaaaggtagttttcactggaatgaaatgggctaccttagtgaggcgatctattattacccagatggagtcattccctttctgcgtccgaggtagtccggttatgaagtccatgcctatttcttcccacttccatttaggtatcgggaggggttgtaataggccagcaggtttttggtgttcggccttcgtccgttggcagatgtcacatcgggccacatactgagctatttctttc

SEQ ID NO: 109123 - DNA, 361 bp, Zea Mays
cattttaatcacttggctctggccggttaggaaggcagaaggctcggtagttggcgcagcaagagtcaagaccccaagagcgaactttcctttcctgcgatggcaattcgcatgtggagtaccggtgctgtggtacgttgctccagtaactgcgctgctctgaactgtcattctatgaaaggaagaattgtactgtaattcagttcggtattcactgtcattcggcgggggttgtttttcagtttcagatgaagagcttgtcctgttgcctgttggactatacatgtgcaattatgcagtatccggatccaattgtagaggttgactagtctggaggctctgagctactggttttttaaga

SEQ ID NO: 109124 - DNA, 689 bp, Zea Mays
aaaatttaagattcaaaccccctcaatctctctcaatctatatggactggaatagaaccgaaccagctctgaaggagaatttacccctattccgtttggaaacagggggccagtgtcccatcccgtgcaaaccccaatagcctaatttgtatgcaaggattgtaaaaacagcctcataaagctcaaaataatgctcacaataatacaacggcaaatataaaatagcctcataaacctcaaaacaatggaaaacttcatatccgttcacacattcaaatagcctcataaagctcaaattaatggaaaacttcatatccatttacacatttaaatgtcctcataaagctcaaaattatgggaaaaaattcatatccattcacacatccaggtagatatcatgtcaaaataaaatgaatacaagcctttttttcccatatgcttcacaaagaaccttcactccggagaatatggaatacaaatcgttttggcattagaataaattatgactttatctcctttttgcaagatacacatagtttccaattgtgagctcacatattgctttattttcaaaccatgtattgcatccactgagtactctacatgtaataagaaaagaaatagtgaaggttgctgaatatagtttgatgagcttgctcctcccatgtccagagaaataaaaaagatag

SEQ ID NO: 109125 - DNA, 365 bp, Zea Mays
tctgggaggaaatcagtaccaacgccagaacaaccatgcaactcaccttcttgccccagcaatcaaccagaatggccaagcagccccaacacaagtatgaggtcgtgcatgcttctactatggagagcaaaatcactgggcgaagaactgtccaaggaaagcagcccagcaaccgccagcagtcaatgtcccagcaagacaaggagcaccacagcaagcaccaggagtccgtggtcagacctacaaccgtggaaaggtgaaccacctgaaggccgaagcaatctaggatgctcaggacgtggtagtaggtatgtttccagtcgaatcctacccagcaaaagtactatttgatactagtgccatgc

SEQ ID NO: 109126 - DNA, 673 bp, Zea Mays
ttggtaaagtattcgacggtgacgaaggtgaattttaggttcccttgtgcagtaggtagtggtccgacgatgtctagcccccatcgctgaagcggccaggtgtgggcgatgagcttggtaagttgcgaaggggcggctgatcaatgagagaatttctggcaagcttcacatgatctggtgactcagttggctatacatattattgcgggccaatagaatccataacgaattaccttggttgcgagggcccgtggtcctgagtgtgatctgtaagttccgtcatggacttcgaggaggatctctaggccttcgatttcagttatgcatttcagcataggctggctgattccctttttgtaaagctggccctcgactattgcaaagtctctgctcctgtgttgaagccttttggccttgttgcgatcagatggatggtaatggccctagaggtatagtgttattagggctcgccagtcttcggccattataaggttgacgatccggtggccgtcggtgtcttgcgttatttgcaagcctttgggattgcggacggctggtgtgccgatgacatggtagaacacgtcggagggcagggcctcgcctttggctactactttggccaatgtatcggcctcatcgtttttgtttctctcaacgtgttgtagagtgaaac

SEQ ID NO: 109127 - DNA, 489 bp, Zea Mays
gctagctcggctgagggtgccttcggcatgatagccggatcttcagccttctgtgtaggaggaatgggctcctttggttcagcagctgaagaagtctccccgccaaactcaggcaccacgaccggttcaatataacgtggccggtgggtaaggactttcaactttttgctcttcggcgcaggctcatctggagtggccgaagcagcagtcttggcggaagcagcagttttcctcttctttccccgcccccgcagtgggtagcagtagtcggggtaaacaaaaccaatggcatcaaaaactatattcaacctcttttttccccggcccccgaaggatgtggataatgcattatcttctgctttggaatacggcccaagcagttcatcacttgtagcttcgatacatttcaaccagtcgtcatttggttcatcaaatttatctccatatctgaaggtgtatttcagtcgaaccagctcaccttagctagac

SEQ ID NO: 109128 - DNA, 385 bp, Zea Mays
caccgctttccagacacttgccaaaatgctgcccaaagagccctccgccagctatgccaaaactacaacagggaagtctttgagacaccccttcgctacttcccacccagcaacaaaaacacccctaccttgaggaaaagacttcaggccttgtcagggagagattctaatgaggatgaccccaccatagtctacatggccagatatctccacacccttaacaaccactatgacgacattttctcccactgcacccacctaaattcccgggtggaaagcctctagagcaacaaatcaaggaattaaaagaagaaaaggcgtccctccaagagagtctcgaaatagcagagggcgaagaggccaacactcgcgaggcctaccaaac

SEQ ID NO: 109129 - DNA, 679 bp, Zea Mays
ttctgttttaaattttagagtttggaattaaatacagaaactgaccaaaccttattaaattaaagaaaattagttatgcttctgtgctgaacctaaaaaattttgtagatgttcaaaccccatttaaacactgtttaaaaatagtgagaaccccagtattgaaaattttagtagggatatctattaaaagccatttttgcccaaaacttaggaaaatcagaaaggcattagaaaataatgaacagtgagtgcaattatttttcctagcctacttaagtaacaaaaaacctaggaaaaataaagggacctctagtccagaacagaatcaaagtgaaatgttttattagacattaatcaaaccagaaaaacaattattagaattataaagacaatttcaaaattaattataaaaattcagtgaacttgtaaccactagaactccactacaaaaatgataaacaccccagcccatcattttaggtagggtaaacaaatagaacttgataatgggtcatatttcaattaaatcatgaataacccaaaaatagtgcactaatgggcaaataaaattttgctagatcaataatgagataggccaccagagaaaaatgcaaaacccaattggaagctgcaaaataatacccattgccatactttatgaaaaaggccatttaatcca

SEQ ID NO: 109130 - DNA, 312 bp, Zea Mays
aggccttaacaactaactaccagccgttgcttgaaatgataaatccccctcagattgattctattttttaaaggacaacaagaagagggtaaaattactctgatatttatttgatctagaagaaaatactctagcttcaactagcaacctatcatttacctaaagatcaaatccttaaaagttttatagaatggaccagaggagaatagttctactggtagccaagaaaatgttaggatggcattggactttaggaccaatgttgtgcatcttgggaactggaaattgagataacactggtttcacatttcg

SEQ ID NO: 109131 - DNA, 404 bp, Zea Mays
ggagatagctgatcaaactgaggatgaaggctagaataactttgaagaactgagtgcataggagaaggtcaataagatagaggtacctaaagccagatgtgaagatggcttgttaaatgtcaatgttggtcaagctgaaaagagtcatgttgcattgaagacgacaatatatggacgtgacttacaacctttaaggtaatgaatatggttaactggtttaagtcgtacgactcaagatcctgctcaagtagagacttggtacaagaacgagctaagtatcaaagtcaaaacctggtagggcctaaagagctaagtatactttgacttgtagtttgggtcattcttgtgattggactcgttcttgttaaccattccatgtgttggagctcattaatggctataat

SEQ ID NO: 109132 - DNA, 440 bp, Zea Mays
gtggcgttgcttatgagcttttgttatgttgatttgtgcaataaaatgtgtgtcaaaaataagtggtggacttctgtatcgttcttagggctgtccaaattcccggtgaaggcaagtaaaacagtgttggtttataccgttggtcgatttatgtgtcctatacttgattcatatccatgtcaaatatgttcattctcatattccattttgagaattgttgcttgaagttattcatgttctactatctacatatgttgaaggcgttgttcgagcttgttacacgtgttgattattattttgaagacgtggaattatatgtttaacacatgttagatggggtggtctcatgttggtgtcatgcatagtgcatccatcattctttgcatggaagtttcgttgtgaacatatggtcggaccgtaccgaaacaataagcatcatg

SEQ ID NO: 109133 - DNA, 288 bp, Zea Mays
ccttgaggtacacatgatcaccttcctcaaattccagtggtcttcttctattatctgcgtagctcttttgcctggtttgagctagctaccctcaaattctcccgaattatcaaattctccctaattatatggacttgttcttctgtctcttgaataagttcaggcccaaagaattgtcttcctctagtctggtcccaatatagaggagtcctgcacttcttgccatatagagtctcgaacggtgacgtcttcagactggcctggtaactattattatatgagaactca

SEQ ID NO: 109134 - DNA, 1007 bp, Zea Mays
tgcagtgatctcttcttcaccttggctttaggtaccttagtcctcttgactttctcccttgcttagtccatcgaagtcttcattgcctttgtccttggatcacaaaattgactctaagtcatgtccattgattcccgacttatcattgtccatccatcatctttacaaccttcttgtcttgtgatatccataatccataatccataacaaaaggtactagggcattacaaaggctcaatgctaggacacatccaggcaatcccgcgatcgtggtgacccatggtcgcgccctaactagggggaaccattgattatatcctccagtagaaggatgtcaaccatggcctcgacagccatgccaaaatcttcctccatatcctccagagtgccaccagccatgtcctctgataagtcaccgatgccgagctcatagcccgatcagaactaaacgaaggctagagtgctaatagcaccacgacaagtgccacaacgaatagcatggcaaacctggttcacgacatcgaaaaggcgctcttatcgatcaacgccttgggcatggatgagggaaatcaccttattgtcaccctcacgaagactcaacgcctctagttctagttttggggaaaaacatagaaagcgaggagggttcaggatagccaaaagaaacctcagcagaggaaaaagacctctaacctgcgacgcgacggtccacctcttccaagtgggcgcgaagactggccaccacaccgtcagtggcctagagagtcgtgtcagtggtatccaaactctcctaaagatccgagggggtctgcatagaaagaattgaaatcctgtcttgatagaaaggcatctcgaaatccttcctttggcccatcaagaacatctagctgcacaagatggaggagatgaaagaacaacatgatctcgaggactcggtagcgaaaagtgaaaggccaaaccccgaataaatcatccgcttcctaaggggccttgacaccgaaggacga

SEQ ID NO: 109135 - DNA, 455 bp, Zea Mays
agagagtccaggggtcactgcgcaaaataacctagacacagcgcacagccgaacgggacggcaggttgattttctgatgtcataaggtctcttatgcaaaaacggcagggcgaaggggtatggagcgtcgctggccgtccgatctaaagtggatgaccacgattagactcttccctgcgcgaaccggtaagcaaatcccaccgttggatccaggatcaaaggtgtacaccgagtataacgcggaatcatcctgatccgcccgataccgaatctatgcgccagatttaacatcacgaagagttaacctatgacctaatcacagccgtcgaacaccagatccacggctggtgaccttcccgcaacctgatcgacgcgcccaatggcgccacccacccccacggcggcggccatggtcggcgatggccaggccacgattgcgggaccaaagcctcgat

SEQ ID NO: 109136 - DNA, 378 bp, Zea Mays
gccgggagtccctagagaactggccaagcacaaactaaaggtctacccccaggcgaggccgatccgacaaaaattacgtcgtttcacgcccgacaagagagaagccattcgtgcagagctggctcgcttggtcgcggcaggattcattagagaagtattacatcccgagtggttagcaaatcatgttcttgtactcaaaaagaataaagtggattggtgcatgtgcgtcgactatacggatctcaacaaacactgtccgaaggatcccttcagacttcccagaatagaccaggtggtagactcgaccgctgggtgttctgtgttgtctttcttagattgttattccgggtatcatcaaatcagcttggtaaaagaaga

SEQ ID NO: 109137 - DNA, 280 bp, Zea Mays
caaaatggcaacctttgaagccttatatggacgacggtgtcgtactccattaaactggtctgaactaggtgaaagaaatttcttcaggcctgatatggtaaaggagacagaagagagagttcaacgaataattcataatttgaaagaagctcaagctcgtcagaagagttacacagacaaacgccagatacccttgtactttctagttggagattatgtctacctaaaagtttcaccaatgaagggtgtatcatgtttcagggtaaaagggaagcttgca

SEQ ID NO: 109138 - DNA, 648 bp, Zea Mays
atcaggacctcaccggcgataagaatgccacggcggtcgggatgggtcggcggcggccacggtaaaggttctcggcgacgtggcagtgaatcactgaggtggcgttacccggttaatcggtggccaccgtactttcgccgtggctcgccagcgtagcctggaatccgcaatcctcatccaattccgaacgacggcctataaattgcgcccggattctgcttcttcaccacatcccgcacctcagtgcttgagcaatcggctcaatttcaccggagcactcacgcagcccccaaattccctcctcctctgttcttagctccgccgtgaagaactccaccgtggtcagcgttttgcgggttagtaatttcccaattgctccctgttttaactcgtttgtagcctcctattgctctcagtaccaaccaatttaagttcggccgaagcctttcaccggaacacacaattgctttgtagaacgtcgctgtgacaccctctctgtcgccctatgtttctgttcgtgcccactccaaattttagtatgtgcgtcatctctggtaaacctgtgaagctttcccaagcttcaatttggtcagtcacgtcgtcggttggtcggaacgtgttcatcccttcgatcatccgccctgtcac

SEQ ID NO: 109139 - DNA, 1100 bp, Zea Mays
caaaacgacagctaataggacaccggagggagtagtcataagcagggataggtaatgtgccgtgaactgggctgctgagatgatgggccaccaaactaggctgctgagacgatatgcttcattttgaggggctatgggctgcgatgtatcaggtgaagtattggatgagtatcgatgaaatatcaggattaaatttatttatttttgtcggtgatatcctcaatattttcctgataccatattggaggcacatcggagtatccgatatgtatcggcgtatcgcgatagcgatagcgataggcaacctgtgtgaaatatcggggtaacctaggttatcagtctggcagtctgctaaaactgtgtgtgcttttctgcgttatacagatgcagctgtgtgaactggcctgagagagcataacaattttctaaatactcaaacactactgttaggcattgcatgtgctgttaaggttaagcatgtcactcccgctgtcataggttacatagtgtgaaaatgttgatcctaggctgccgtcacttgtcagcctgtggtctctagaaacagcctgctaattttttgtttttcgtagtcctaccgatgcagaaatcagtgttgtggattcaaccaaaacaatggtctcatggtcacattggtggaccgtggaatacaaaatatgatttactaaatactaagagtgtttttattgcatgtcatgaggtgttgaagttagcaagttatgcatggtgttcttgtttttctgaggactggttgggtctgtaaatggtggacataatttactaaataacattctttcctgcatgtggctggtgttatggccttgtagccataggtgtagtgtgtggcaccacataatacataattgccactagattttgtgttgttcttggcttgttcgacactggaagttgtactgtctggataaagtccacatgatgcaaatgattttccttgaaatcacattggaacaatgttagaaatatgatgaaaaagtaatatttttcagatagctcgtgaattgatgctataaaatcatctacacgtcaatatccttccaaggtcaataccaaatgcatttttt

SEQ ID NO: 109140 - DNA, 628 bp, Zea Mays
gaagcggtaggggggctcgagccccgcccgccccaccgctggatccgtccctgtgtggggagcgtgttgtggctagctagattaccatcatctgttgtttctttgactggattgaattgatcaaccttgatcggtgttaagttgaagaagtccccttaaatatttctctattccttccttttatagtcaagaaaatggttgagcttatgtgtatattctacctacggaccgtacttatcatcggacccactgcccccatcctatcggagccttgtgcaattgtaagctctctaccttgtagtcatatagtgcaccaccaatagtgcgttggtgtaatcatacttgttgaagtgactttctaggactctactcaaagtgatgacagatgcattaacgacgctggtacgccataatagaatattagtattgttccttgtacttctaatacctataagtacaatcatactatttaagcatgggtataatgattttactactccttgaaaataggcatgattgtctaatcggtatgatattatatgtggggaatgcctgcacagtggcatcagataatcctgccctccaagagcatgccaaggtgatggtgtgactatatggtcatctatca

SEQ ID NO: 109141 - DNA, 343 bp, Zea Mays
acaatctatcctacaatagtgccttaaaatttaaaatattaacacattcaaaaggtttatggctcgtaaaacaatttgttctccaacaataagcctttagttaaggtaattagccgaaagtgagctctgtttcctgccggcatgcctgacgcgggccgtgttgggcttcgaactattgcttcctcgtcctcagcaagggtgtacatttgacgcggcagattaaatctatttattaaggggtggacgcgggccgttttgggactctcctttccttccgggtcctggacgatgctgccgttattttttcaactttttttatgtttgactccctgacgtaatctta

SEQ ID NO: 109142 - DNA, 488 bp, Zea Mays
cgactgagattagaatcaacttacccctacgtttatttaaatctgagccatccaatctagatccaatggctttgtgtgcacgataccccttcggcaggctactttactaattagacccttaacttattagtaaacaacccgtcgtccagtatcactgttggctgagtctcgggttacttacaaggaagcccctgcactctctgtttattacgcgtgcagtccagaagtcaatgaaatgaataaataaatatggaacttgatttctagtatgaaattaattggagaaacttgtataattcatagaaaattcatactagctcctttttaatctattctagttcctataattcggtaataatattgtctatcactgagtaacactgttatagcatgaaaactatattaaaatttatcacgcaattatgtttgtaccaaacacataaggacttcataaattcataactcgcaatccgtaactccaaattgat

SEQ ID NO: 109143 - DNA, 345 bp, Zea Mays
ttttatgatcagtctgacacatattaacctttactttaaagctttgacttactttgcatgcaagtttttaaagctagcaaaaactgtacgacttactgtcatggttagttgcacaaataggaagcctgttttagccattgtgtttttcgagaccttttttgttaacattatatagtcttggcactatatagtgtggctatttcaaattttcacttctcattacagaaatatggaataaaaatttaaatcccattctaatgcacaaagaaatctcatcatcaacaacaacaaagcattttagtcccaagcaagctagggtaagctagaggtgaaacccaagcgaaa

SEQ ID NO: 109144 - DNA, 491 bp, Zea Mays
ccaaaatgtacctagacctcaagaccagatactggtggagaggaatgaaaaaggagatagcacagtatgtggcccggtgtgacacttgctagcgaactaaggcagagcatcaaaagcctgcaggtctacttcaacccctcctagtacccaaatggaagtgggaagaaataggcatggatttcgtaatcagactacctcggacacaaaaagggaacgattctatctgggttataatcgaccgtcttaccaaggtagctcatttcatcctagtaaaaactaccttcggaggagccacccttgcccgaatatattttaaagaaataggcagactccatggtattccatggaagatagtgtcagataggggaacacagttcacctcaaaattctagatgagctttcaacaagctatgggcaccaagctagacttcagtaccgcctatcaccctcagtcagatggtcagatagaaagggtcaacaaggtcctcgag

SEQ ID NO: 109145 - DNA, 296 bp, Zea Mays
catacaccaggtacactagcagccaaaagaaccatctcgtgcaggataccggatctacagtgcatctccacatttagcggctgaagaccacactctaaaatttagagactcgtttgcagtctcttgctggattggatagagtgtgttgtatcctctaaatttaaggtagagggccctttagaggacctattggagccagtctaagtgcctgttgcctatgctgaccgtggaacgtctgttctggactatggcctatgggcgtgtggctgtgtgattgcctagttgcctgcttttgc

SEQ ID NO: 109146 - DNA, 678 bp, Zea Mays
ttccagtcagtaacaagcggtcataccttataagcaatgtgctcctgaaccaaatctctggtgccaatgtaagtacacattgtgctgaaggtcaacaagcatgcttgtacttcatttccacttgcgatcggaggcctcctgatgccgaagcgtgatcgtatagggtgctagattacgcccctcacatcctccctcttactcagatcattcttgacataaaaccattgcttcatccaagagcccggccatttcttctgaaacgttggcacaggacacctcacatcagaccgatacacaaagctgtagcatcctaagttattatgatactgctcttttccaactgccttcgtatggtaggacaattcgtgaatgttgtagaagcacttggcatctggctccagcccttggctcctcatagaccaaataaaaactccaactttaattaaagcttcgggagtaagttgatgaaggtatatctcaaatgtctttagcacttcgaccagcatcttatgcaagggaaaacgaagcccagctttaataaaacttttaaataccaccacttcatctactttaggaagaggaacggtgctttctcctctagccctcactatggatatatcatgaaaatatttgcccttcatcgcttcaatttgcccttgcttaacagtggatttcccg

SEQ ID NO: 109147 - DNA, 285 bp, Zea Mays
tcctagaagctctcggaacgatgatgtattctgtaaatcgagaaaaatatcatcaataaaaaggtttcaaaggcactcagattgttcactgtcaattggcactcttacttaactcggggtgaccactatgccctactaacggagcaatcggcttaagtcggcaatgacttaaggcggtgcgacatgctcacgcttacttaactcgaggtgaccactatgccctactaacggagcaatcggcttaagtcggcaatgacttaaggtggtgcgacatgctcacgctta

SEQ ID NO: 109148 - DNA, 450 bp, Zea Mays
gttaccatcaccacctccaacgctagggcaggtgcaagcaagggaccaggcacatacacttattttgcgcatcgcggacggtccgacgcatagacgtggacggtccgagacaccgccggaaagtccagaccattccagtggacgattcggcagcacctaggaaacacgacgaccacgtaccttcaaaccacgacgactagaaataggtacgtggaaaactaacacggtaaaggcagctggtcgactggtaagatctagcccgacctttaaccaattattgtctaaatatgtaaaaaagaaggccaacccaagtgatcggccaacaaatcaacctcgctcgcccattcaggagcaacagcaggtaagaccgattagactacctcaccaatcggaaaaaaacggaaggtcatactgtccagttgagacttaacgtgcctgcatggacacctc

SEQ ID NO: 109149 - DNA, 342 bp, Zea Mays
cagattcggaataccaaacaacattataactgatctggggtccaatttcacaagttcggaattcttcgatttctgcgagcaaaaaggcattcagatcaagtacgcttcggtagcgcacccgagggccaacgggcaggttgagcgagccaacggaatgatactagaggcactcaggaaaagggtcttcgaaaaaaatgagaagttcgcagggaaatggataagggaattaccctacgtcgtttggagcctaagaactcagccaagccgggctctacatggaaatactcctttcttcatggtctatgggtcagaggcagtattacccgctgatctcaagttcgg

SEQ ID NO: 109150 - DNA, 1004 bp, Zea Mays
cacggtcacacccattggggtcagtttctacacggttacacccattggggtcagcttcaacaaggtcacaccctttaggttcagctggtgcacggttacacccattgcggtcagctggtgctcggtcacacccattgggatcggtttcaataggtacactaccattgggatcaacctcagtaaagacctctgttggtacttcttcacaaacaggagcagaagggccagcatcctggtccaagcatgatagtcgccatagtcgtctctttttcttcttcttctcctcagcaggcgcagttgggcgactgacttggcgaggacgctttggatgaataccctcaggctttcgggtgtccactgttttgtcaagctctggtatagccgtaacagccattgtttcagtgggggccgagtcagaggattctccagccaacatattgagtaaagcatctatttctacatcatctggactcactggcatctaacgtgcctctcatcattgggaagatcacaaagagaagcatccagggcctcaatatcttcaggagagggtcgcactctaagacccagaccactatcaccagcaggagggtcagacacgaaattgaaaaaggacttaggagatggcagattccaagcagagtaggcaacaggagcaccaacatttgatactttgcctctcaagatcatgtctagccggctcaccagatcctcagcaggaattctcctattggtaacccgagtcgagtcagtaacgccactatacaaataagctgggtatgctctgtccttcaagggctgaatattcttaaaaacaaagtcagcaaccacagcctcagcggtcagacctctctcttttagcagacaaatttcagcaagcagaaccctagcttctgttacctccaaggtagtaggagactcaacccaactcagagtgcgcacatctagctatctccccgaccgagggaggagggactttccgtggttttccacaataaaccact

SEQ ID NO: 109151 - DNA, 465 bp, Zea Mays
tgtaacctttatcaagcagcgtctgcacctggtgctggatctccttcgtctcatctggatttatacagtacggggcgcggttcggaagagaagcaccggggatgagatcgatctgatgctcaatggcacggagcggaggaagacccggttgtaagtccgtaggaaaaacatcagcatactgctacaaaaggttaacaacagcagggggtatatccaaagacggtgcatcatcaagcggaacaagcatgcgcgagcatacaagtgcataacagggcatatgagcttcatggagatcatcaaaatcagcatgtgtagcaagtaaaacaggagagtgtaatttgatttcagatttaataggtgcggctgatgtcaatttgacttgttgtgcaattttagcagccctagtaattattttctggcctttaaacatgaaagaataatgatttgaacgaccatgatgtaaac

SEQ ID NO: 109152 - DNA, 583 bp, Zea Mays
aggtacagaagcttctgtacgttgtactcattactaagcgaaatctcaaaaattatttcgaggtggttagttcggtggtcgtggtcgaaaggtaggaggggtgcatacgtcctctctagcgtcccgtatacttcataagtgaggtcctaacaagcgcaaagactcgctacccctaggcctcaagtacagaagctcgtgtatgccatcctcattactaagtgaaagctcaaattttatttcaaatggcaccccatcaccgttgtaacaacgttccccctcggggaggcaatccataatatagagatcgtcgggaggattgccaagtgggcccttgagttcatgggatacgggatatcctacattccgcgaacaacaagtaaatcacaagtcctcgcttactttgtcacagaatggacccaaaccaaagtggatcccacaccgacggaggggaagtattgggtcatgtacttcgatggttcaccggtgaaagagggggctaacgaacacctcatcttcatttcacctttgggagagcagctgcgatacactattcaacttcatttccaagcctccaacaaaatga

SEQ ID NO: 109153 - DNA, 356 bp, Zea Mays
gttctctgatttttgtataataccctagcaagccaactgcatcaaagttactccactacaaaccagctttaactttgttacagaggttttagttaaacacccatcaaatcgagctccacatggtcccaaagtcggccctatacaactgatcttctgaaaactacagaaccttagtctgatagctcaactttgaggaggtttttcattaaattcctctaggttttagggttgagtcttttaatcaaacttattctcctatcatggctctatcatcatgatatactgatctaggacagaatcctcatggattaaaagatataaggctccaaagatgctccaagttcactgaatttcag

SEQ ID NO: 109154 - DNA, 553 bp, Zea Mays
caccccccctctaggcaactttcacttagcgacatagctattcctttaaagtaccttgatgtcaccctagtctttagagcgccccgggcatagtggcctttagttctcttggtggatcttcaagagacttagcgacatagctattcctttaaagtaccttgatgtcaagtttactcgagacttagcgacatagctattcctttaaagtaccttgatgtcaccctagtctttagagcgccccgggcctagtggcctttagttctcttggtggatcttcaagagacttagcgacgtagctattcctttaaagtaccttgatgtcaagtttactcggtgttgaacctagtctctatctaggactaggagagatcccaaaacatcaggcccgggagtggtggtcctatcacaatggacgaccctatatatagtagtctcctgcatcaggatctatggttgagtacttattggcggcaacaggaagtataaccttttagggctggtttgatggatagagatcacgttctggtgatcaaggatcaaaaggagattcctt

SEQ ID NO: 109155 - DNA, 369 bp, Zea Mays
tggatataattcctttatactttctaatccaagaattttagcatcaagttgcgtcaacaaagcatgtcgtcgagacaaagcatctgctacagcattatcttttcctttcttgtatttgacaatataaggaaatgtttcaataaattcacaccattttgcatgccttctatttagttttagttgtcctttaagatgttttaatgattcatggtctgaatgtatcacaaattccttaggaaaaagatattgttgccaagtttccaaactccgaacaagagcatataattctttatcgtaaactgaataatttagagtcggaccgcttagcttttcactgaagtaggcaattggtcttcgttcttgcatgag

SEQ ID NO: 109156 - DNA, 476 bp, Zea Mays
taacattttgcggagtcgctgtttcttgcggcgagcggaggggttgatatgcagtctgcgttcaatgatactctggctgactcccactaggtcagatgacgaccaggcgaagacgtctttgttcctacataggtagttgagcaagctggcctcttccagcggagctaggcctttgccaatcaatactgcatgattgggagagcagttttgagttgtactttcttggccccctcatcactttggatagggttctgatgcttgtcagtcttagctggtagctctataccatgtgtctgcatactggcacccaagtagtgaacatttcgttgtccgagaatgaagccctttctaagttgtgggccacctgctgatctccaaagactgtggtgaatccgctcgggcaagggattttcatgcacaagtataaatcatgaattgctgcttcaaaagcattgatgatcccctgcctaagattg

SEQ ID NO: 109157 - DNA, 584 bp, Zea Mays
gtgcctccaacattttcgtaggagtattatttaagattttggcaaggagtatagttgtcgtcccatggttgacgaccttagacgacttttagctaaggggaggagagaggttttcctagtatcatggggagcataaattgcatgcattagaagtggcggaattatcctgctcgatggaaaggacaatctacaagaagggataatggattcttgatcatcatgctcgaggcggttgatttgtatgacctatggatttgacatatttttggggtttagggtttagggttttgacctatggatttgacatgcttccgtgagcggggttgaacaatggtgaaccaatcgttgttgttcattgacgtgctcaaggaagaaacactaaatgtgagcttcaaggtgaatggacatgggtataaccaagggcactacctctctgatggcatctacccacggtagccggtgttcatgaatatcattgttgtcgcacagagtctgaaatagcgaatgtttgttgcatgacaggaaggcacgcagaagaacacagagagaaaatttggagttcttaaggctcgcttagattgttt

SEQ ID NO: 109158 - DNA, 350 bp, Zea Mays
ccagtccccagcacgcgaacaaccaagttacaggtatggtttgcagttgctgtgctggtaaatgctgctgttttgataagtactgacaagcctcgcatctctggactaactcggctgcatcactctttgccgttggccagtagaaaccagacctgaagaccttcccaactagagtcctggatgctgcgtgtatcccgcattgcccagcatggaccttgtctagcagttgcttcccagtagccgaaagaatgcatttcatgaggactcctgtcgtgccccttctgtatagtgtttccccaatgagagtgtagtgagctgactgccttgcaatacactccactgcatttttg

SEQ ID NO: 109159 - DNA, 505 bp, Zea Mays
attccttacatgacaccttattcttttaagaacatggaatctttttctatatctagatcatggcaataataggataattaaagtaaaatatgccattggaacttgctacaatttaagcatgtagattgtcataatatagcaatgatgaatgcacaatctaccatatgagaggaatttcttcaaagaatggtgacataattttaaaaacatcttaagtgcttcatttttctatgtgactacacaggacatataagaaatgataatttagtatacttgcactttaaagcataagtgttaccatcctttgacattccttcatgttgtaggccttgattttccgcacatgatgattctttatttcctacaacattaatatcttcccgagatgatatgagttttgaatataacaaattaaaataactttgggtcaatcttgaaaatgtagatcatttgaagattgatagcttgagttaataagaattgaatttcctccctcaagcatccc

SEQ ID NO: 109160 - DNA, 758 bp, Zea Mays
tgaatctcctaaaaagcacacactacccttagaactattacatgtttgtatcataactttcaccgaccacactaagggcttcagctaagcctaagctttcgagatttttggctctagctagcacccaacacaccaactcatctaaaaaacccctatgcacctttctgatggagggagaatcaccctaaaaaatcatccggttacgctgcagccataagcaccaagcacctaggataatggcactattaaggcctttcttcttgtctttatgcattctattacatactcttctccaccaatcagcaaaattgacctcatctacaccaggggacagatgactaagcccgaaaggagataagagggcgtgtcaaagttgccgagcaaagacacacgtagtcaagaggtgatgaacaatttcttgctcttgaccacagagagggcatgcttccggatgtgggaggcctctttttgccaaggcattagctgtccaacattattcctcatggccagccataggaaggtcttacatttaggaggggcccaacttttccatagcctcttccagggctcaaaggggatggatcctgtgaacaggacactgtagcaagatttagaggagaaccgaccaaaagcctcgtgcctccacacatgttgatcatcatcttgggtcaacactacctctctcaaagtatcccaaagcagaaggtattgttgcaaccccactaaagaaagggaggaaataatgtccctcacccaca

SEQ ID NO: 109161 - DNA, 518 bp, Zea Mays
aagcctatctcagaattctgccgcattctggcttgtggaagtacctataccattgtcggcctggaatggccggaggcagcaccagcttgtgggtggcgcgagtttggagatgcgccgtgggaggaagacagagtacctcgacatcccactcaagtatagcatcaaaggatggcgcttggagtgatttattgtggagaatcatggcaagtctctgccccctcggtcagggagacagccggatgttcgtgctccgagttggactgaatcccccacagacttggagatagctgaggccagggttctgcttgctgaagttggtttgttgaaggagagaggtttgactgctgaagctgtagttgcagactttgtttttaagaacattcagccactgaaagacaaagcatacccgacttatttgtatagtggtgtcactgactcaacccgggttaccaacaggaggattcctgctatggatttggtaagccggctggagatgatccttagaggcaaagtgtcga

SEQ ID NO: 109162 - DNA, 715 bp, Zea Mays
tggaacatctggttttgtccttagaaccgggtgtgacatacttcacaggcggccacatacttagaaacgtcaaccttcatccgcttccaccagaagttttgcttcagatctcggtacattttggtttcgccagggtgaacggtgtaaggcgttttatgagcttctctcaagatatccatcttcacctatgatttctgaggcacacaaaggcggcccctaaaacgaaccaaatcattctcatcaatggagaactcccggggttaaccatcgcgaaccctctttcgagcttcgtgcaataaatgatcctgctgctgagccgcacgcactctttccatgtgggaagattgaataagcatacgagtctcctcactagcggtgccgacatagcacaaagcgatccccaaacggtccagatcagcgatcaacgacaaggccacttttggaaccccggacctgctaagggcatcagccaccatatttgccttccccaggtgataatgaatggacaaatcataatctttaatcaattcgagccatctacgctgcctcaaatttagctccttctgagtgaaaatatacttgagacttttatgatcggtgtaaatgtcacaagcctcgccataaagataatgcctccacgactttagagcaaaaaccatcgcgaccaattcaagatcatgagttggataattcccctcatgcttcctcaactaac

SEQ ID NO: 109163 - DNA, 712 bp, Zea Mays
gtaagcatcaacctcggtcagggttgaaccagtcggtacatccatgatgggacaccatgacctagaagtgacataaaaagtgtatttaagacatgctgacctttaagcgtacacccctaacatagggtatacacgacataaaggagtgggtactatacaaaggactcaccatccaactggctcagcttagaagcatggacaaggagccacaaaccaaagaagtccctgacttgggtgcaaggaagtcaaaagacacaaacaagacatgagcagaataagggaactctgaggtgaacagctcctatggcatctagagacttacctcacattaagcccttggacacctacgtgacctagctaccccccatagtcctattagctaaagaatgatgaggcaaacatgctcaccatggcagatctttggggagcactataaggaacttgtatccaaaggcaatgagatacttcatcaaaatccgcatataacaatggccacccatttcttcggctatataaagggatgggggccttactgtagaagctggcgaactcagtatgtatacttctcacacaagaatgagagccttgtgcttcgccctacaacaccagagaaccagtatcaaagactttagcatcatattggacactgattctctccaaacatgtctaaaaaccttcttcatgcttgctttgggcaaggccctcaggatag

SEQ ID NO: 109164 - DNA, 455 bp, Zea Mays
catggatgtatatatgtatgtccactttattatgtagggtagaagatgcctttaaagcatagataggtttgggcaagaaaggatagggtaaggaagtactccatccaagattgtggatcttgattcctttgaagatctggcttgaatcttatccttccttgatttgatgaggtcgatcatcttcaatcttcgttcttgaagttgttatccagatttgggacatgtagtgaaggtagattcttaggtaaacaaaataggttaataggtggttatgagttaaataagtttaagcagagtctgtcttgttgttttgcttctagattggttggataagttatataacctgttatatcggtcaagtttggtgttatcatcaaggataatgggtattggtgttaccataactagggacatagttgggataagtgtgggtacatggggcaggtaggttaaac

SEQ ID NO: 109165 - DNA, 549 bp, Zea Mays
gccaagccatctgacaggtcggctaactggagcaacgacatagcccgctaaataacatacacgtcggcttgcctgttactacatacattacaacattttttataaatatacatattcacacatatattcgcacatcgaccaatttatacgaaccgtaaaccaatgatccccaaatcgcaatcaccatgcatttacttcccaaatcatgaacgcatacatgtttatcatacgaactgagtatttcagtaattatcctaaaacaactaactccattacacacttgtatcacaaacctacttgacttacttgaagcgtctactcgaaatcgtgagcacaatcatacactatatgcgaagcataatttaacgaacacataatacgcatcgtcacgactcgacttataaatatagagaagcgatgactactttggcatgtcaccacctctctatttaagccaagacaacttctacctacaacgaccaaacattcatgtcgagcacactttattttaccatgtctcgcaaacaacaatattgtggcgtgcactcg

SEQ ID NO: 109166 - DNA, 543 bp, Zea Mays
gtcccaagcctgagtgggtggtggaatcttggaatctagagtcttggcgagaactgaaagtgcttcacgcgacaagcccctacctagcgcgccaactattggtgttcggaccatgggtccttaaccaactagtaaattgtgccgcgtggccagactctagatggtgtgcgagaagacagaagcaattatcctgatttgggaaacataaggccctacttctagcagaggggataaggcttatattcatcgcactgaggtgcctgtagtaggggttacaagcaccgagggagaggggaagtccccaagtccctagaaatgattgaggcaagtgccaatatctaagaccgagtggagaactgagtgttcgtcggtgtgttgctcgtttggttgtctggattgttcaccgagtgtcccttggagggattctactttcctatttatacatgaaggggggcgtccgtagttaagctgggtgttgtatccgaaggagcaatgtcttagcgcccgacaagctgatgtgacggtacactgtgttgttgactt

SEQ ID NO: 109167 - DNA, 287 bp, Zea Mays
accttgccagatgaaaaaggtgttcagtacatgttcataccattcaccctacgtcccatagtacatgcaagctcagccacaagaacaaaggccaagtctgccttcagcttcaaatgcctcaagtaacccactactgagtgcatggtcaccggctgcctcattcatcctaggaccgcctccctatgatcaagtccctgccaaccagcccaaattcccaaggcaagacatgcaacaaagggacataagggaggggtccgaaacctgcattgtcaatagtatggtcccgg

SEQ ID NO: 109168 - DNA, 587 bp, Zea Mays
tgccttgggtttcattttatattgttttttattgttgttaatgtgttgtttggttttgggggcattttaaattagttggaggctgaatcaggcttcacttgtctagaatgttttgtagtatgttttttatctttccataggatgcttaatcacccggtttggtccaaacatttgagagttatgggtttcctaaaacatccttattggtgtctctggcagaatgagtctttaattttgaacggaagagtagacattgaagacagtataatttggtctttgttggattatgaaagttttagtaatttcatgatctttccaaagagtattggtttgtaattctcattgcatataattggagttaggctgctctgaagttgttgcaccgttgtgtctgaactttagttgtcgttataaccaccaataaatcgaccacgttttgatagttttagaacccaaagttgggaattctcattaagcaaaacttttagttcttctcagtaccttttaaatgggtatttacttgtaattgtctgttaaatagattgggagaggtggttgtcggactataagtcgaatctctaatgtgc

SEQ ID NO: 109169 - DNA, 937 bp, Zea Mays
cagaaaacatatatatgctgaaatgtcatgagctctattattaaccttggtatttggtttaaaaatgtctcggtccataatttggggctatttgggacagcttcaccagtaaaataacgaatctgaatctaagattcaccatagagcactgctctccaggtcaatagataccaattttataaagcaacaaatatctaaaaataaattagatggcacttcgcacaatgcagccatttataatataagttcttccataacacattgacttttgaaatagacaaaaaatcaaataactcatctacttagaaagctcacaaatatgcctaaaacgaagctgtagcagatgtcaaacggttattcctgaagagatggtgctctagatttccatggggcataaattcatatactaactgtgtttggttatcctcaaaataataaccaattagtctgaacaggttcggatgtttcagatttcctagaaagctaacctctgcctgagaaactaaacaaaaggtccacttaggatttggtgaaacaaatctgatgtgagatgatactgtcaaatgacatggattcagcgaaaaatgacaatttgaaggatatgaaagatttggaaggtgccagagagtggcgtacagaatcctttgtttctcgtccgtaaactgcttgacatatacaaacatcagcacctggcttgagaacacaagaaaaataatcactttagattcgatttggctagtaaagcaatgtcgatgcagtgaccagacaacagaaaaaaaaaattgcgaactgagacagagcgcagcagagcacaacctgcggggcacggggaagaacatggcggtgttggggggcggggtagcggcggcgtggggaggaagagggcgaggcgacgccgcacgtggtggagagcgaggaggattctttggggtccgtc

SEQ ID NO: 109170 - DNA, 617 bp, Zea Mays
agcacagagcgtgggctgaccctcggggagaaactccgatattggcacttgcctcaatcaacctcagggacttgggatccttacctctcccaaccaacttgtactccctactgcaagcacttaggtacaagtaatataagacgcatccccctctattggaagtaggactttgtctagcccaaaccaggataaacaacttgtgccaccttgcatcacacatctgggccagggcacgcaacatcatttcactagttggtgagatgcttgggtcaaaacaccgacaattggcgtgccaagtaggggctcactgcgtgaagacatcatgtttccatcaaggctctagatggccaacctacagcaccctttgtggctaggcacggtgatcggttcgggggcctcgagttcatatcgcttggcatcgactacgacatggtgctcctcccacctggacacctagctaacgctcaggagcaaccagacttccgcctctgtcctcctgtgtaggtatctaggacacgagctagatggggtgaatagaaggttttaactaaaatcaaagacactagagaaatttaataaaaacaacaagagatataaatttcctagctatgataggc

SEQ ID NO: 109171 - DNA, 431 bp, Zea Mays
ctctgggaggggcgccaccactaatgccccagcaggagcagcgtcagaagagtcctcagccagcaaatcaagcatggcacctatctccgcatcactagggttcaggggcacctcaaaataaacctgccgttcatcatcaggaattcccccgagtgtggcaaccaaggcactaacttcttctgcagagggccgcactctaaggcccaaactgccgtcagtatcaggaggattcgacacaaaaagagtgaaagctttgggaggaggcaagttccaagctgagaatgccacgggagcaccaacatttgacactttgcctctaaggatcatctcaagtcggctcaccaggtccgtagagggaattcttctgttagtgacccgagttgagtcggctaggcctcgatacagataagctgggtatgccctgtctttta

SEQ ID NO: 109172 - DNA, 299 bp, Zea Mays
gactcatcccgccttgtgaattcacaagactatctcccctacaaggaaggaactagtgggcccatgccaacccccgaccacaagaggtctaatcaaggccaaaaatttggagttcgaaggccagccagcgaaaggttcgcggctactccaaaaactatagagcaacatgcgatcaggaggtggccacctagcggctaggaccctagcacacgagtgcaaagggcacttctaaatcattttcgagttttgtaaatgtctgactcatgatttatcgtagagagaggcagcgagccatgaga

SEQ ID NO: 109173 - DNA, 494 bp, Zea Mays
gaatgtactcagttctggcactgctcgccgtaccgttcgctcgggcgctgcgtggagccacacccatgcctgccatttcgcgtcatgctggaccatctgcctgctcgtggcctcgcactatgcagtggaacgccaccttcccgacgactcttccccttcttccccactcaagcaatgtgacggtttcctctctctccctccattaatagctccctccattaatagctgtcgccgtttcttctgggtccgtggtcgcctcatcggctcgtcttctgctggttcatctccccgcgagtggactagtctccaacgcctgtccgtttctctcctctctcccttaatccgtcattttctcctcaccattaaccgatctgtattttctccgccattaatggctgccgccgtgattctacttcaccggacgtcccttccccctttctaggctataaataatgtgcccatgacccctgagtccgtgctcgacctccttcttc

SEQ ID NO: 109174 - DNA, 482 bp, Zea Mays
cagtgaggcaagttacaaccccagccaggagtacctcgcagcaaacacaacaggggaccgcctccccctcacggaaagagcggagatgactttcgctagtatcacaatacacgccatgacatccaccccacctcagctcaacccacctccccagaaatcgccagctggcccagacccttcatagagtagccaacatcccacgacaggagaaagggaataccatgatggcggacggggcgaccacgccgggtcacaaggcagatgcacaccacgatagtttaacatccgctgccgcctaaactttggtggggtgggccaccttgtttcccttgagtgagccaaaatttcgtgctcaccgcgacacttctaaacaaactccctaatagtggcggaggacgctccaaaaacaaggtgttgctaaaaccccaaaatcataatgccattacactggaatttagcttcccattttccttctacaaaat

SEQ ID NO: 109175 - DNA, 671 bp, Zea Mays
tactcgcccaacggcctccgtgcctggcgcacctgcgcgcggcctactgaccttaaagactgggcgtatcgttgacccgtgagaaggagggagagggaaactcatgccaaagccgctgcggtgcttgccggggctggtcgtcctcatcagacatcgcaggcggccatcatcctggtcaccatctcgatcttcggtacgtcaccttcatgtgagtcttgtacccgtgtaacatgcgtctttgctactgcagtggttggtcacctattcgccgtgggccgtgatcgccggtgtgctcatcgccgtggggggctatcggcgtcaggcggccatgaagagagagaaaggacgataggagggtgtaaggaggaagaaatgtaggggtcgttggatcgtgggcatgtggccacgattaaaatgtgataacgattcagccagattcaatctggatcgtcgatcgatgttcacgttggagattagatcatgccatagtatatgttgggcccgtaccgtttcgggcgagtgttttagggacattgatatctgatcggacagatccagatcaatctcggtgtcttaaaatcctaagcactgaattggaatccgacggatagcgttgcgtaccggttcgataaggtgaagatttaatctaggtcgcgtgtttcggatctaat

SEQ ID NO: 109176 - DNA, 449 bp, Zea Mays
tgatatagtgggtactcagacacatcgatcagactacattattatcggctgagttatggcattagcttaatattgactgcgctttggcaacacgaagtaatatttgtgtcgttcgaacttggctgcgtcatgtgattgctatgtcgcgctctcgcttaatcggatcgctcccgttgagtcgtaccgccatcgctgagtcacacatttttcatgggccctaaaggcattgcatgtgtgtcgcaactattgagtcacaattgcgcttgttgcgcctgttgcgtgtacttaacgtataccccaactaccaaaccacaattgcgcctgttgcgcttattacaaaggcttgctatactgtcgtagccctgatggccgcacaagcgctgatgccagatatgctagagcttgtactcgcgtggattgtggtgggttgttcaaggacctgaagtcac

SEQ ID NO: 109177 - DNA, 442 bp, Zea Mays
caagcgtaaaacacgcaaggcttcgaaaaacactaacacaagcatgtgataaatttttgaagattttacttgctaaacttgaggttgtatagaggggggtctttttatgaacaaaacaaacaacatttttttgtaaaaagggttgaacaattacaataccgcctagatagcaagacaagataaacacatagcacgacctaacaagacttaccaatctgacacgaggtaaggcatttctaacatagcagtacatcacattatttacaagttcttattattggaataagggtgagggaagcatgttggtgcacaagagacaatgaaaatgcgacaatcatgatgcatgctcgttctagccgtcttctcagacctaactaatttttcgggtgcttctgcagcatccctattaatagtattagtagcctttatggcctatataaat

SEQ ID NO: 109178 - DNA, 413 bp, Zea Mays
atgaaaatcaagtgaaggtaataaaaacagttttagaaagaatataatgtcgactgcctaagaagatcttaagacaaaaccacctttttacattttttaggaaaaaggaaaaaatgatgtgaaaatattaacatgaaaatgcagtataaatggccgactaagtaaggtaagggaaaaattaaatatgcgattaaaaagattgtggatcttagaaatgaagaacgtgtgtgtatggggaggggttagggagaggaaatctggtacattctgcaatcaaatccagagtaaataagttataaggatgcaagctgaaccctaaaaagaggggaaaataaagctgcacaggaagcacacgttcgtatgttggagaaggacagttaaaatggagtatcagacaaaagaaatatagtgat

SEQ ID NO: 109179 - DNA, 297 bp, Zea Mays
acaccatggagtcacagaagtcttcgggtgattatcagcctcgtggccaggacgcgaggaggggcaacactgggggtccagcccacaagaggggcaagtcacaacaccagcgccaccacccctaccatggcaaaccctctgaatcgggtacttcaggaggaagtactcagaggtatcgggttgttcctaagcccaggctggggctggtgtgtttccattgtggtgatgcgcatcgccgtgccgagtgtcagtggagtggcaggtgctctatctgcagccaagatcacaaggatgtgg

SEQ ID NO: 109180 - DNA, 345 bp, Zea Mays
atcgtgctcagacgaaacctcgcttgtgaatctgcttcggcacaagagtaagagcttcggaaaagacaaaaaagccaacaccaaaaatttcaagtaagtcataatcaaatggccagagttcgctctactgcaagggtcgatcgtgagggagatgagaccgaagctgttgagactgttcctatttcggaagcaatgaagcgatctaggttggtaacaccggaagacgtccctgctgctgaagcagagcaagctggtattgaagagaccgattctgaagatgattacagcagcgcaatgccgagcaagcctagccacctggacttcggaaagtccaccatcttcgaa

SEQ ID NO: 109181 - DNA, 618 bp, Zea Mays
ccaagccgtcccttgcctacacccattggggggggggacgtccaggaattttcaatagattttcccaagcagtcacatccatacagtatacgcaatgaatgtatcaagacagaaggaagatatcgacggagatcagagaaaagccaaaaatagccgatgaggtacaagtctaatcaacagaagcattgaagcaagaagtgatatgaagactagccaagagccatctaccgaacgtccaatctgtcgcagatcaaataaatttcaaacctaacaggacatgggcagattgcatgctcgatctcaaaggcaaaactgtatgctgacctctaaagcataaagttgatgatataatgctgatttcaaaggcattcagcgaagatgaaaggatgattcctaaaaatagcacaagatgaagacctttgagtagattattttcagtaatccactcaaagatcgggggctacacccaaccctaaaaagacagaatgctgatttctaaagcatgagatgaaaataaaacaatgctgacttctaaagcatgagttgaagataaaaatgatttctgaaaagacttgagatgaagaccttcgagtgggttattttcagtaatccactcga

SEQ ID NO: 109182 - DNA, 749 bp, Zea Mays
ccgtccgggaggaacttttctatgctcaacacacgggtgaaaccttagcgtctgaatttcgcggacagatcgtatgtccgattcgctctgattacacaaaaggaggagccgatttatgcaggcaccgcatgagtgttgcccgtttgtcgaggttgaattgggcggattattacttaaatcctatatggtcacatcgatgcagttcttgaaaaattgtcttcgtcttttttattatggggaaaagctagctagagtaaattgtcatgttcgtagactgagcagctaagcaactataaaccgaatcagatacatcctatcctacaacaaagatttaaagacgaggagggcaccacgtacctcgattagattcttcatgttacgccgtggaactgaaacgtggtgactaaaacatattcatatgcttacttatcactgaaacaaggacattttcatatgcttatcacctctcacgtttaaacaacgctgaagaattttcactgttaattcgacagaaacaggcagcaccgccggccggcttaaatactacgattaaatactacgaaatagcacaatcatcaaaaactaatttagcaaagaaccagaacatcttttttttcggaaactaccgccagatgttcaaaaaaagaaaagaggaggaggagctagaggaaaggcggaagctacgagcatcacattgtccacgcctaaagacactcatcagaagctgaagccctcccctactcgagcag

SEQ ID NO: 109183 - DNA, 299 bp, Zea Mays
gagatttttcctgaagccaccgtcgtctagcctggagatttttctcactgctcgatgccactccttatcccttcatacaccgtactccatcatactcatccactcacagccgctagcttcgtcaaatttcttggcaccgtggcattccctgatgaatccaccgcttatttctccatgttcatttatcctctcctcgcgcagccaagaccaggacgatcgtcctcaccctctcggctctctgcccgtgtccgtcattgcctgggcaaccagctctgttgcagcaagcgctctctcctgcc

SEQ ID NO: 109184 - DNA, 602 bp, Zea Mays
cgctttgttcctcatgtggcttacaatgagttggagaaggcgagccagttccgtcatggcctgaaaccttctatcaggcatgccctaggagcctttccattgggggatttccgtagtacattggagcaggaattgggtgtggagatgcaacaccagtacaccatggagtcacagaagtcttcaggtgttgatcagcctcgtggccaggacgcgaggaggggcaacactggaggtccaacccacaagaggggcaagtcttagcaccaccaccaccacccctaccatggcaaatcctttgaatcgggtacttcgggaggaagtactcagaggtttcgggctgtccctaagcccgggctggggctggtgtgtttccgttgtggtgatgcgcatcgccgtgcagagtgccagtggagtggcaggtgttctatctgcattcaagaccacaaggatgtggtgtgtaggaggaatcccaatgggaagctcagatgggagccagtgacttcctcctcttttcagggcacagtcaacatgatgtcaagcgctgagcagcaattttcggttccacttcctccgtagcagttttatgtgcctgggacttctca

SEQ ID NO: 109185 - DNA, 457 bp, Zea Mays
ggacttttagggcacgtacgtccgactaggaaactcctaggatctccaaagctatcgacagaagcatgatgaaagccttcgtgagtacatttgttggtttttgaagccgcacactgagatccccaacgtcactgactctgacgtcatcggggcattccttgccgaaacctcttgtcaagacatggtcagcaagctaggtcgcaagaccccgaacaaggccaacgagttgatggacatcaccacgaagtttgctttgaggcaggaggtggtcgaagccctcttccacaaggacaagggcgacgagaagcgaaaggagggcacccccgagacatccacccaatgcaacccaaagaagggtaagaagaagaagatacagcagggctcacccaaggccctcgccaccaaacttgtcgccacggccaagaaacgcaacccttgagcccctcaaggggggccg

SEQ ID NO: 109186 - DNA, 615 bp, Zea Mays
aatcggcttcaacctccaactgggattacggatcttgttccacgactgtgaaccttgaggattctctttctgattccatcgatcccagttagggttacttcccttcggatccatcttatgcgacgacaccgctcgcgacagcgccggccactcctcgtccaccagcgggggacgaaacggagattcaatccacccaccgcgaaagctagcacgaaacgacgacggaagcgaccaaagacgcgagagcgaagaagcaaggtgcgggaaggagtgcgaaccgataaaatccgaaggaaaccctaaaacagaataagaggccctcacctcgtcacgggaaggagaccggggagagaactgggccgcagcacgcgacgcttgatttccgtcagcgagagcaccacgcggaggaacggagatgcgcggagaaaacggcccaggaaggccctggtccacgcagctacaggaagaagacgatcgccattttttctttttccgtggagacattttccgaaagacagaccagaggagtactatgttagctcgacttcccgaaatcttaacgaccagaattcgtttggattggattgtgaaacgagcaccgtttttgttgattag

SEQ ID NO: 109187 - DNA, 662 bp, Zea Mays
agattagattagattttttagatgagtcttagtatttttattctcgtttctaagaccaaccgcatggaaaacctatgcggcaggttcagcaaagagctatgagtaatatttataacctactttactaaggtcaagattttgtagaccatagttgtttacaattatatgtttgtgttcaatccatcaacatcgaaacactagaatcttaatatgtgtaccatagtccattttcatacgtcaacaatgaaaccataacatgtaatatttttgttggtttcatctaaggcctcatatagaacaccactattctgtgccatactctttttgtcccttgaattggtacaaaacatgtagccattgatgtcttatgtctaccaagttatggcctagcatgatggtccatatgtcaacatattgatggtttattccttagccaattccccatttggaatgttttcctcccttagccatgtggtgaaagcttgtgctccttcatgacccaatcatttgtggccattattttgtttgtgaagctcattcatgtgttaatcaaaggatccattttcaagagctaatgtagcatgatgtgatgtgcatgtagtactattttgtaatctaacaagatgaatgatttttatctcatcctcccgcttccatacaac

SEQ ID NO: 109188 - DNA, 403 bp, Zea Mays
tgcattatcatctcctctccaaactagcggtgatatgtttctggtggccttcaagtgaagctttgggacatagttccagaatactggttccctgtcattctgtgtaggtgagtagataaccttctatcattgctagcttattcccaaacacacggttactgcgatgtccggtgctgttccaacatttcatgaactacgcaaaattgtaagcacaatgcttggacctcttgcttttgtagttttttagatctcagttgtcaaaccaatttggattcctgagtgtggtaatggacctaacatagaccaagcatgatagatgatcaattgtccttgtattgtgttggtggtctagacgctacctaattctcggcctcagactgaggttgtcatatttcgtttcctg

SEQ ID NO: 109189 - DNA, 498 bp, Zea Mays
atgctggaaccaacactatggaaggtagcatcggagttgatgctatggtaggcggcgctagggttgacgctgcgagaggcagcaccaaaaccgacacgacagttgttgcttaggggtgcggacccatggttcgtcatgtggatgttggagcagcatgcgaagaagaccccaacctagcgcaccattgtcactagttcatagtcagagaacaaggacaataccaccataaagatttgataaagaatcttagtgtgctactctactgcctaccacgatgcaggggcccagcttgattaacagaagatgaccatgacaaaaaatccccgacaccactaaggagagagattttatggaggttaggcccacctaggtgtaacactctatgttctccttgagtggaatggttaataaaaaagaggctaagtcattttacatgggcttgctatagcttgagagtgaaaatgcgtggagttatataaacaaacatcacccgagggt

SEQ ID NO: 109190 - DNA, 817 bp, Zea Mays
attttctcacagcactggactgcgtgcacaataacagaaaatagcagacctctgtgcaaggtttcctagactcaagctaattccgcagtggaccgcatgttcatttgtgaaaagggaaggggctcatatgcgaaagaccatggccaaaagggtaaggactgcattgggccgccagattagaagtctatggttcagattagactataccattttatgaattcatatgcatccaggccataggatcaaggatccacggcccgaaaccaaccacgtctgcatttcatccctggtcctcgatcccccgatcgacgattcagatacaatgcgctgaaaggttactgctatgctcaatctgagccgtccaactgggtgtcaacggccaagagaccctcttccacccacgttagtagaccaggaggcgccaccggtacgacggcgatgaacgccggtgagccctcctgactcacgcactcgccctaatcccataatcgaacgcggatacactatgtgtacaccaatgcgaattacatggagaagtccttaccgtgcgccacacaagcaggagcactgaccacggcggagggcggaattgcggtggttcctctacttcggcgagaaattgctgcgcaactgcccaagttctggggggtaaggtcatgacaccattgggacacctctatgaccctcctaagccatctatcgaggatagagcgactctggacgcaagccgtcgacggcgctcctccgcttttctctcttcttgccgctcctgagctccgactgcgtcactcctctcccgatctctctctcacgctcg

SEQ ID NO: 109191 - DNA, 430 bp, Zea Mays
aacagacccttcttttcctattccagatggaagactctctggccattaggacatcctactgctcagaggtggaagggttcccacatctgttgcgaagttgtgcgcttcgcatgggaatccgcaagaagccggaatacgtctggaaggagtatctcgagagcggaatggagaaatgctctatggcagtctacctgggagaaagccgaaactatccgaatcatccttctttccaagtcaattttaccggataccgctttccagatacttgccagaatgttgcccgaacagccctccgacaactatgccagaactacaacaagatgatctttgaaactccccttcgctactttccacccagcaacaagaatacccccacctggaggaaaagacttcaggccctgtcaggaggagatcctatcgaggatgatcc

SEQ ID NO: 109192 - DNA, 442 bp, Zea Mays
gctactttggagaaaatgaagatggattgattcgctttgctagggaagaagtaattcgagagccaaaggaagatgaggttgttgtgttcaagagcttcttcggggcagggcttcggttccccctgtatgatatgatataggaagttttgaaaagatttgatatatatctccatcagctgaccccgaatgttattgttaggctcatcatttacatatgggctctctgaagccaaggaaaaagttccaatgctgaagggttctaccgagtgcacgaacttcactatgagaggaaggccagagccgatggtctgcacaaaaacttcgggtgctataattttgcatatcagaaggataccaaggccccggtgattggctatcgcactaaatgtccgaccgggtggactaatgaatggttttacatgaaggccgatgagaagaaaag

SEQ ID NO: 109193 - DNA, 1703 bp, Zea Mays
gtttatacatactgcaaaagagttttggttgcgagaagccaaattttgttgttctcgtaagtagaaccacaaccgatctatttccattgaacaatagatgcaaggtctcaaaagagtagctatgtagaaggtatctaattgttcttcatctttggtctttttgcaaagactgaaagttggtcagcaccatgtgtttcttcctgtaaaagaaggagcaatataggttaattaaaaatattaagtacatatattgatatctatatgggtattatcggatgtgttgaaaagtagttaccttgtcggagtcatcaattgcattgaaatttctcttgtatgatactctgacgttgtcaaagcaactataacatatcagattaaaagatgttataacaaaacattgtatattttctggatgatatgaaaagaaagatataaaaagtagacccactaacctagtctgatcaatctccataagttgtaattcatgtggtgatgctgcttctgaaccagaggtcttacatagcaatgtacatgttagttttgtttttgcggattaagatttataattgagatgttttgatagaaagcagtacctgtatatcttgtgtctttggctctattggtactaggggtggtagctttggaagttgagatgagctagcgctgtggagaacaacaggctcttcttttttgaatacgaaaaggagtaggtcttttccatgcctctttttgatactaagaatatcaaatgttggatctttgttgaccttgttaggtcctctctttttaatactttttcctggaaaaaacttggccacaacagtcaatttctcacccacaattgctttaatctcttccggcaattcagatttgttgctttgtctcagtaatttctctgcggttttcccaataagtgatgtcgctctctcatcaaagagcacgaattctagctcataggtgccatcagtggcatatagagatattttatacctatttagagtataggttatagacattgataaaatacaagaagttttgtgtataaaaatgattgtacagagagtatacctgtggaccatctgagaggagatgtggccttgtttacaaatgtgtttttccttcatattttgttgatgtattgcattttgtgcatccttgatagaaccagggctcattgtcagcaattcttgttacaatcatggtgcattcgaaacgtttgctctgtaaatgtaacgattattaagtaattatataagttttgtaacaataattttaaatatacattttattggtgtagtgtgtcttaccatgtcatcaaatgggtcgactaatttcatttctaaaaatgtcttttgctcaatcttgttctgcatctcgttcattgtctgaatatgaagcttttggattgattggtattgttcaccgatactataaatatgaaagcattgtaattagtcttgatcagtttattaaatgaattgcaaatttacattgtactatattcaagcttaacagtgattgaatgttgtataattagatttcatcttcgtgttaaaccttagtatgtacaactcaacttccccatggcattatatcaaacacttttgttgctgctgctatatttattctataaataaatctcaaactaactcattgtagggttgtattttaaatactttataaggaaatgcaataaaggaggc

SEQ ID NO: 109194 - DNA, 478 bp, Zea Mays
gtttggggcgccgaggttgatcttcgaaagcatagcagaagccgaagctactaggctggaggacattgatgtactcgaagaagaacggctgaacacagtaattcaatcaacacgataccagcagactctaagacgctatcacgacaaggtcgtacgacaacgatccttttcagtgggagatctcgtcctccgccgaattctaatgggggagggacggcacaagttgtcgccctcatgggaaggaccattcatagtagcagaagtcactcgaccgggatcatatcgtctcactcaaatggacggcacagaaattgggaactcctggaatatagagcacctcaggaagttttacccctagctgtatttcaaaagctatcgggacgataatgtactctgtaaagtgggaaatatgtcatcaataaagaaaggcttcaagaatactcagtttgttcatgattgaccgacattcttatttaac

SEQ ID NO: 109195 - DNA, 290 bp, Zea Mays
tggggctacacgatcgcaaaggactatggtttcaccgtgcactaccaattttgggagaggtggagaggattctgtgaatttgtgcttcaaccgagctcactggtgaagatgtgaatacctcgccgtgggtggcggggctatttaaaggcgcgatggtccggctagcgatccacggccgcggattacatcgttcgtgcatggttaccacgtaaagaagggacacagtgagggaggagcgaggcatgggtgacacggcggcggaaatgaccgagccatggtggccgccggtg

SEQ ID NO: 109196 - DNA, 643 bp, Zea Mays
gcccttcggcaatatctaagggggtgggcaaagaattctgtagggtcaataaaaaaagagaagcaacaactttcagagctgattaatgatctcgataaaaaagcggaatttacttgcttatcgcctaatgagttgaatactaaagcttttgctaatgatagacttgccagtattttgagagaggaagaaattcgtcacttccagcgggctaaagtcaaacacctccttgaaggggacgataacacaaaatatttccatttagtggctaacggcaagcaccggagacaaaggatttattctttggagaatgatgacggcacatgtattgttgatgaggaagagcttaaaaatcacataacaaattactacaaaagtctctttgggaagccaaatgcatcatcaatcgaacttgatgaatctattatccatgacatacctcaagtttcggattcagagaatgaaattttaactgctaattttactatggatgaagttaaaatggcagtattcaatatggaacataataaggctcctggccctgatggctttccagctgaattttatcaagttttctgggaagttattaagtatgatttgtttgcgttgtttgaggactttcataaaaattctttaccggttcaca

SEQ ID NO: 109197 - DNA, 403 bp, Zea Mays
gtgagttgggagctcacgacattgaatttcgacctcgcactgcaatcaagactcaagcactagttgacttcgtatcagaatggaccgagcaacaagtgccggataacccggagactgcagaagtatggcggatgtattttgatggctcgttgaagctgcagggggcaggcgcaggaatcctcttcattgcacccggaggtgaacaactcaaatatgctcttctgttactattctcagcatccaataatgcggcagagtatgaagctttgattcatggactgaacattgccatatcactgggcatcaagaggctgatggtatatggggattcactggtggtgataagtcagataaacaaagagtgggattgctcgaatgactccatagggaaatactaacccac

SEQ ID NO: 109198 - DNA, 557 bp, Zea Mays
cttagagtttttcgatttttgagaacagcggagcatcctcatcaagtatgtgtcggtggcacaccctagagccaacggataggtagaaagagccaacgagatgatacttgatgcactcaggaagaaagtgttcgacaagagcgcaaagtttgcagggaaatggatcagacaattaccatatgtagtttggagtctgcgaacccaaccaagccgggcgtggcatagaaacactccattcttcatggtatatggatcagaagtagtgttgccagcggatttgatctttggagcacccaggctaacatttgaaagtttagctaaagcggaagcaaccagactagaggacgtcgatatattagaggaagaacgtctgaatgttgccatccaattggctaggtaccagcaaactttgaggcgctaccacgacaaggcagtgcgacaccgatccttcgcaatagggtacctagtgctctgtggggtgctaacgggagatagcgacacaaattgtcacctccataggaagtaccattcatcattgcagaggtcactcggccagg

SEQ ID NO: 109199 - DNA, 450 bp, Zea Mays
gtccggtagatggctcttggctggtcttcatttcacttcgtgctttaatgcttctgttgattagacttgtacttcagcagctatttttggctttcctttgatctctatcgatatcttccttctgtcttgatacattcattatgtatactgtatggatgtaaccaagggacggcttggtgcgctgagcgtttagcaaactgcccttgagtagtaacttgacgtgactgtggggcgtaatcatatcatccaagcagttgaccttagtcccaatggtgtcatgttacgtgagacgacgtctgcggcctgacttgtttctaggcggtttgaatggattattgaatacttgcgactgttcagtgaccgtggtaggagatcagcggttgcctcccacccctataaatagactgcctgcttcactggtgtcttcacacatctcctggccgtttgttg

SEQ ID NO: 109200 - DNA, 480 bp, Zea Mays
cggtgtccaagaagtcggtctgggatcggctgggctcggcgatggcgcatcgtgatcggttagaccttctgtcttcgtcttctgcgggtgcggcgcctgagagaatcccagtctggaggagaatcacccctgtcagtgatgcttcgcagcgtgcggaacctgctgtgctgactgggtcttctgatggtggcccgactattggtggagaggctcgtccggctaagaggcgtcgtcgccgacaacagaaacgatcattggcacccattattcatgaggatgcccagttggcgccggtttcttccccgacccacgagtctgcttcacctgtgctggaggactcttccccaccttctttcccttgtatcattggttggaatccgagtatgtcgcgggcggaggatgatctcgctacggcggttgtcatcactgtttttggtaatatggaagttgtgtctgccaatgatattgcggcacccctgg

SEQ ID NO: 109201 - DNA, 588 bp, Zea Mays
caaggatgtaaacttgttgctttctttagtgaaaaattgcatggtccaactctgaattattcaacatatgacaaagaactatatgctttaatacgagttttacaaacttggcaacagtatctatggtctaaagaatttgtcatgcattcggatcatgaatctttgaagtatcttaagggacaatcttatataaacaatcgtcatgctaaatgaattgaattaatagaatcttttccttacattattaagcataaaaaaggaaaggataatgtgattgttgatgctttgtctagacgttatactatattatcccaacttaatcataaaatctttagtttggagactataaagggattatatgctgatgattttgacttcaaagatgcttttgaaaattgcagaggggaaaaaacgtggcaaaaatttatgttgcgtgaaggccttctctaccgtgctaacaagctgtgtgtgccagctacgccttctactcttgcaggaagcgcatggggatggcttgatgggacattttggtgttaaaaaactgaggatgtgttgtccactcacttctattgacctcggatgcaccat

SEQ ID NO: 109202 - DNA, 594 bp, Zea Mays
atgtctaggcagaatggatggtcagcagggagaaattgtcgatgtttatcgaaggacgaatatttgccaccctttttcaaccaaatgaacctgagagcttccttgcaaactaggcatgggaacttaccgtgaacacaccaggcgcagaatagcccatacgccggtaagtcatgcatggagtactggtaccaaacatgcattctgaagtttgtcttcgtagctcggtcatacgtccataccccttgctcccaggcacgtaccaattcatcgatcaaaggctctatgtacacatccattttattccccgggtgtctgggaattatcaacgacacgaatatattctacctttgaaagcacacaccaggggggagattgattgggataacaaacacgggccaacatgtgtacggggcagtgctcattccatagggattgaacccatctgtggccaacacaacacgtacattacgagcctcttcggctttctcacagtgaatggcatcaaagtgtttccatgcttcaccatcggatgcgtgcaccatcttgtcaggattgtatcgttttccatttttgtgccatgtcatctgtttcacg

SEQ ID NO: 109203 - DNA, 458 bp, Zea Mays
catgaccccgcaggaaatcaagcatgggtcaccaaggacaagcgcttcggcctcacccgatgtagacgagctaacctccaaagatctcatcgatgcagaccgtgtcttcgctctgtaggccctcaataaatatcaagcccaaacgaagacctggcatgaccaagcagtcgtcccgagggaattcaacgaaggggacctcgtactcgtccgaacaacccggaccgagtcacgaggtaagctggagccgaagtgggaaggaccattcatcgtcaagacgaagtcgtctcccagcacgtacaagctaacaacgcaatctggcgaagacctggagcattcctggaacatagataatctccgcaaattttttgtttgactcctcagggccatcacgcccttgtaattaaccaaacattatcattctggcccgtactcttttccttccggggggtgaggttttt

SEQ ID NO: 109204 - DNA, 616 bp, Zea Mays
ccctgaatcctagtgatgcagagataagcgctatgcttgatttgctggctgaggattcttctgatgctgctcctgctggggcactggtagtggcgcccctcctagaggctgatacaactttggatactcagaaacctgccagtactcgcccgaggcgcccttgccgagccaatcagcctgatccttctgctgatgagcagaagaagaaaagaagacgcctccggcgagtattcagtttggatcgggacgctggtacttcggttcctgctgccgaagaaatgcctgtgactgaatttactgatactgacaccaatgggtgtacccaatccgctgctgatcccaatgtgggtgctccatctgttgctgatcccaatgggggtgctccatctgttgctgatcccaatgggggtgctgcttgtgttgccaacgtggacgacgaggaggaggaagatgaagttcctttgactcgaaaaaacagtcggcagttcatcgccagcggtgaaagtagtggagttccctctcctgctttgtctgctctcattggtctgcaagaactgtccctggccaactttgatcagactcttgaggatatggttccagaggacttgttatcaga

SEQ ID NO: 109205 - DNA, 837 bp, Zea Mays
caagagcatattgcttacagagtatggccccttgcgagtggatgggaaatgccaaaggaagctgccgctggctccagccaaagtggcctgatctatctgaagtacacattttgatttagggatcggtttgatgaactgaatgatgattggttggatgttatagaagcaacaagtgatgaactacttggagcctactcgaggaccgaagacgaagctatgacagtggccttcggcgctcgagggaaaaagagactggatagggtttttgatattatcgggtttatctaccctgactattgttttcctgatcagaaacaaaggggaaaagtaaaactgctgcttcggcgtcttctagtgcactgaagatgaagaaggtgaatgtcttgacccatagaccgcgacgtattgagacggccgatgtgctagagcttatcgaacgtgcaggggttgctcctgccacagatcaggtcatgttgtgccagtcgagactagtacaaatctggctgaagagtcgaaattagaaaagacagcagaacagttgaaggtgttgagtccatcatgtgcaataggactgtcgaagccatcaagcattcccgtagtgactccaaggaaaaggagaatggctagcatgctagatgatgttctggagtccgtaaatacatcagctcctgcctttgtcgaagctcttagcacgcaggctaaagattcaaggaaaattgttgatgccagcatggcccacactcctgccgaagctggaccttcagaagctcctgccaaagctagaccttcggaaactgcaccgatagttctggagaaagagggtgttcctgagaaatc

SEQ ID NO: 109206 - DNA, 273 bp, Zea Mays
cataaaataataaaataaagaaatagatatatttatgatagtgtttctagaatttttgaaagccttggggaaaatttactaggacctttcctaataaaataataatgttgattttgtagccactagataaataatgaggagacgcatccttgcttataatttgtggtgatacatcctattaaaatgaggtatcataatttaaatttgacctcaaaattttaaattgaaaacataaaagagaaaatgaggaaagaaattgtggttgaatcattt

SEQ ID NO: 109207 - DNA, 760 bp, Zea Mays
atctgatcaaacttatcctacatttggcaagtataacagaaaattttcatgtttatattatggaaaagtcattttacaaagaagataggttaattgcatttatatttcaaaattcaagatttgctgcgggtcatagcaaaaactattccagattacctgttggcggcttccgcatgagtggagtctgaggaaggaataatcaaggcaagccttatccttgcatttttgtggcaaaacaaacagaagatatatttttatttatagtttgtggcccttagatgtgcgaagatttttggcctctgctttctccagaagcaatttttttctcgaagatgtaggaggactgcgtctcattatattaagaaggaagaaaggttatggggccagaaaaacagcccagttacaagagcctccttacggaggacgaaacataaaaacataaaaggactcataaggaacctatggacatcatcctcacaacaagaaaagcggggagagaaactagactgcaaggtgcctggcaataaaaaaggaaatgcctttggccccagccatcacccatctcaatctttcctgcccagctgaactcagaaccagagataaattaggagtgcagccgtcaaaaaaacaacggtttctatgattctaaagagtccaagctcccagggcaatcagatagttgaggcccttcaaagcaaggccgttcacggcttcagttttgtcctcccaccagctcataaaggatatgcgtccaggctgt

SEQ ID NO: 109208 - DNA, 388 bp, Zea Mays
tcgcggcgtgataggattccggcgaggaattctgctcgtcccgggctccaattcacatcggggcggtgacgatttcacaccagggaacacttcgaaggtctctgggctagcctcgcgcttcaatctgctacacaggcgaagagcagatgtggcgactctccttctctctcttcgcagtgctggcacggtagtttggataggcgcggtcaagggtgtccagccctactgtaaccctctgaatttggggtataaaatttcttctttaaatacctagaaaatttaagtgttacttctttttctcacttctatagtgtttcttttctacttttttaatagaattttgggttaattatgtgggagatgtattattttcttgagaatatcaaaa

SEQ ID NO: 109209 - DNA, 786 bp, Zea Mays
ttaaatgatgactcaatcggtcgtacccctccatatatataaggggaaggtctggacccgttcttatgcgcttctcaatagattcccatgtgattagctagataaatacgcttgggataaggactcttgcctggattaatctaatcgtggatcgttcaagctatacccgcgaaccgtctaggccacatggccagatcgttcggccggaccgaggtgccaaatctggtgctcaacacatgccctctaccttttagggaagctaagcgaagcaaaagcatatggtacaagttgtaaacaactcaatgtgaaaccatttgttctctaaacatcttaccatacactaggatgatattgcttcaggaaatgaccattcaatgccttgggtagctcatacattgcaatgtttgcaacatatacgcattatcagagatcatatatgttactctataaggccattcctagcttggggaccacttgccaaacttctgatccctgctcattaatggcaagactatcttccaaactagatctcaacctagaatgacttagcctttaccttcctgttgtaggctctagcaactatgatcttatctttattaatctcccttatagccagggtctcttgtcgatcacctcatcaatattgtccatcatcggatcatgacagtcattaacagctaaatcattttgtctagcaaacctgctagcatccatacttatctacacaggcaaaacaacttcttgtccatacacaagctcaaaaggagatactttagtagtacattg

SEQ ID NO: 109210 - DNA, 503 bp, Zea Mays
gtggcaaatgctgctgtggggctgcttcctctggggtgcctgctattcaggctgagcatgcctcgcacctctgcgcctgttctcagacatctgtagaaatcacacacatatatcaaatctgactctacagtctttcagcataagaaaagatgtatataaaatcttcatagtactgaacaattgaccatcttcactgacatcttctcagataaagaggaaagtggaaataaatggattacccaactaaataaccgactttattaataactacaccaagttgcaggggatacccacaccttggtgacaatcattaaaaagatccaactttagtacatgtccatcataacaagcatccaacataaaataagcaaactaactctaactaagactgactagactaagacactgaactaagcattattacagactccgactctgtcgatctagggatccaaatctattcgggtcctgcagtctggggtaccatagtcgaagcgaccaca

SEQ ID NO: 109211 - DNA, 503 bp, Zea Mays
actagggtttgaatttgtataattgactcaaaggtgaagctcataacaagattgaaattcaaatttgagattcaaatgaaaaagggaaaaagaaaaatttaaaagagaaaggaaaatgggaaagcatcgcatgagctcatttctcttggcgcggcccactatcaccctcgctcggccacctgaatatcccttgcgcagcccaactggtgatttggcgccgactggtgggtccactcggttagtggccgcccacacgtgccgtcctgctacactggctcgcggggcccttcgtaagtgaatccgtgtgcgttctcttgcctgtttcgctgccaggtggggccaactgtgcagaagcttcacctacctcccctcaacagactacgcgcattttgtgatgttggcgcaacaaccgcgtgcatcccgttgaggatttgtcgtagccctggccgaccgagtccggccttggattccctcgcccctgggtattaatccatggtcgtgac

SEQ ID NO: 109212 - DNA, 621 bp, Zea Mays
cttgaacatgatggcctttgtgaagatcctcaagaaatttgacaaggtttctgctcctatctcttgctctcctttgatggtgccctatctcataagagcaacaatcctgatgacagaagctatatatttttccgtgtttcaggttacaggaaaggaagtgcagcaaatttacctcaaagcagtggagagctcctactacaacagctctgacaaggtattttgaaacaatattggagcaattctgatttcattcaacctcagctccaaaactcctgactgcgcgcggttttcatcttaacaggcagtcaggctaatggacgatgtggaggagctgttcttgagacatttcacagaaggtgacagacggaaagcaatggtgtatctgaagccaaatcagcgggaagagtcacactgtactacgtttttcattggtaataacttttgacaaggtttccattccttcatcaccataggtttttccgatctttaaacaggcatgtaaattttccaggagtatccactggcggcttcatagcattgttcataggttactgtatcatggcacgcgttgctggaatgtacactcagcagtcaaacaaggtgtacatgtcaacttcttat

SEQ ID NO: 109213 - DNA, 504 bp, Zea Mays
gtgaggcctagacccctctagtgagtcacatggcccaccttgaacagttctgtgagttgcacgccaagctcagagaggaacaacaacaattacaacaaattcgacgggtcctcgagatggaagcagctggcaaagttcttgacgagggtgcacgcgccaaggcacacgacgttcatcgtcgcatcatggaagatgccgaggctgaagccccccatggcctttcacagggctagtaaaaaccttgctgcaccagcgatcttgctctacaccatgccggagccatccaccaccgagggacaccgaatccacggagaaatttagggactcctggagtgtgttgcggtccaacaggccgagagcttggcctctctactttgggagcctgcctcgaagcaccgagtgggaacctatcgctttgagagggatgcctcagtccaccctaaacccaccagagagaaagcccccatggtgcaagactgcatcctcgataaccgcaaaaaccga

SEQ ID NO: 109214 - DNA, 639 bp, Zea Mays
atttgcatctatggagtggtcatctgttgaacagacatcgcactcgccaattgctgcatcaattctagaggaggattcgatagcatttcagacatcaggcctttgaactctttcttggcctcctccttaaaataattcgccatctcttccttgtatcgatcatgtttcttgtacagaccttcgcattgtggttcgaatccttccttccatccttccttagatgagattcctcgtacacgaccaggatgctcagggttattgagaccagccgttagaatgtctctctccctttgtggcttaaatgttccttggctctgcttagctacaattgcatatatgttttttgccgcttcttcgatagtgggatcatcaaaagatacaccagactcagtttcccttggttttctagcacggatccaattagctgtcctttcaccaagttgctcggacagcgtcggcaaccctgcagccttcttctcggtgtcttcttgtctccatttaggaacctgacgcttgtaaccacctgtgccaaggtggtggtggtatttgttcttcttagatagttccgaatttgcctcacttagcgatatgaaatcagggctgctcctctgctctagaaatactgcccactgacctgct

SEQ ID NO: 109215 - DNA, 502 bp, Zea Mays
aatggctccgacatctgcctcaacactgcatcgacgattggggagatttcagtcatcggtttatcgtgaacttccagtccctctccgataaactggcgcagccgtgggatctcaaatccattaggtgacacaatgatgaaactctttgttcgttcctcaagaggtttcaaacaatgaggaactgtatccccaaggtcgctgaggcggctgtgatcgaagacttctataggggatccaacgatctggctttcgtccaagccataattcaaaaagcacccaccacctctaaacaactgttcagggaggcagacttctacatcaccacagatgagcgggctcaatacctcattggaggcgcaaagcccataccaccagcaccgcgaagggacatgaaccagcaaccagacaaacgctgggagaagagaccccgggaggaggaacacaccaccgggccacatggagaggtaaggacactggatgagatcctcgactcccaatgcct

SEQ ID NO: 109216 - DNA, 304 bp, Zea Mays
cagcggtttacttgtggaacaagtgctagatgcaagtacatatttgaagacaaacattgcatatatatagacgagagaaatttggcttcagggagaagctactggcttacgtcggaaggcaaacttggcttacaacgtaagtcaaacgtggctttcggtcgaagacaagcgtggcttcctgtgtacgactaaacgagtatcattcaatcattagcgtggttaagtcatattgcgtacaaatatttgtgaaattgttatgacggagtagtatggagaagtaaagtttgtcattacgaaattattt

SEQ ID NO: 109217 - DNA, 469 bp, Zea Mays
tatgaagtccctggtacttagaccaatatgattagcacacaaaacaattcctaagtgtccagagcttaccttttcacttggtccatccagatttgcattatatcctctttggagttcaatttgcttcatatacctttgcttaaacactatgttagttcaaacataatgtgttgtagatctaatcaccaaaacaatatacaaatggtccacgggcacatttccctttcagacccgcgggtgggaggtccggtgtggctggtattgctcgctccatggcatgggaatcgatgcttcccataccagatgaggtggtactaggaaagttgacataggtgccgccagcgacgccccagctgcaatgctggtgttggctaggtccctcaaaacggagtctacgccatcgaccatttcgggagcttcgctaggacatggggtgccatgagtggcacggctacggtagttctgtctc

SEQ ID NO: 109218 - DNA, 668 bp, Zea Mays
ggacatggcttcagggcaaggggggctgacccctggggttcactggagcatacaacctgctgcggatccgcctatcaacgtggaccaggccctcttcgccaccctgttcggtaaggtattccccatattcttcgccatcctctcgaatttgcgtagagccttgcggggttgttcaagggcattgagatgtcgtatccccatgttgatgccatggcgccgccgcatcggtgctattgtcaccgcgacggggcgttgtgaggagggcgacgatgtgagggccgttgatcaggccatatacgggtaagattagaagaatgggtaagggagatttcgaccgcagattgatgatcttgcggctaggattaaatgggcgataccggttcagtggggtggatttgcaccgttcgatctggatcgagcacaccgaaataaatccgagtgttttaaatcccaagcgttggtcattgatccgacgacacacactgcataccatttcagatgtgaggacttctaatctgaaccttggattcgcgatctgacggcctagaagtgagcataccccttcgaccagcgtgttttacaaataaggccccgtagaaccctataaacaacccgcagtccacctctgagttgtctgagtctgggaaaacttctgaatttgccctcgg

SEQ ID NO: 109219 - DNA, 308 bp, Zea Mays
cattttcgtttctcttgtaaaatgtgaaaatggcacaggaaccggaataagtctgtccaagaaaggacgcaaaattaggtagggctggtgtttcccacccgaatttacagtatcatgtattctactggaaaattcccattttaccccattatacattatctaggagatggttttggcctaggccttcttgtcccactaaaaaccataatttgactacctgagtccgctggctgcctaggtgaaacactaagccacacgcctaacgaatgttgcatgttgctgcattccaacgttcgcgactcatcctc

SEQ ID NO: 109220 - DNA, 814 bp, Zea Mays
gagcaaatggcacaacactggggtaagtaaactgtgaagaataccagtgctacgacatttgcccctgaaaagtgttaggaaaaacaccaaacatccccggtcccgaagggaagcgatcaccacaagaaggaaattgtggtccgctagggaagtatgaaccaaagcctctatcacatggtccttggccatatggcacacgaccagcatcccgtcgggcacggccaccacgtggtctcactacctgaggcctagcgacaagaggcaaaacacctctaggcctctcaggacgtctctgaataggctgagcatgaacactatgagaggggtggttcatgtcctttctgctcgactcagaaacccgtcgctcgtctctcttcctcctaaagcaaaatgaagctagatgcccatccctctcacaatattcacaatggtacctcacctctctcttaggtggattttgtttgtgggagggggctttctttttagatggctaaggggctctaggaaggggattgctagagatgtcgggaaaggtgtcaagtgtgttcctaagatgattaggttttggaagccacacttgtttctgaggaggagctctcataggttcatcaatcacaccatctctcacaggggtgactggattagcagagatggttttgataagctttagagtgggtgaaggtttctctgaaggtgccaaaccactgcactcgccaaccttcctaaagcgagcgacactcccatccttagtagcaaagcctaaccccggtccgccagttcccctcttgaactgactgaccatcatgcccaactg

SEQ ID NO: 109221 - DNA, 408 bp, Zea Mays
aagcgacgaggaagaagaaaaggtgataaacatcaaggtaagatatagaggcgataagggaaaaggtgataatgatgaaaagcataattcatggatagcgttaaggcaagactcgcaaagtaacgatgtggagaaaacaatcaaggataagataagtgaggttctgacagaagagttgaagtaaaaattcattatcgaaggaagttacaaggaattaacgagatcaccatgggtgtgcaaaaaaatgaccgctcagggatcattaagaaacaagggtggtcaagggcacgttaactgaaatgtcttaaacagatgttgagatataaaggtaagcatatataaaaataagagtatgcaagattttaatggtacgagcatactaagaccaagagagtacaaatagccaaa

SEQ ID NO: 109222 - DNA, 1907 bp, Zea Mays
gcgagatatcgaggacgaaccggagacaggatggtcaccgtcgggcgccggcgcgggtttgtcaccttcgccgctgcggcgatcgctctgatgcaggtgagtcccaagctcacgattctcgacgggttttgtagtgtgctattggcgccgtggcgcatgagtgtcgtcgggtccctccgcagcggccgtggctgcggccgccgctccgagtggccggtgttttgggacgaggttttggtcatgctttgggttctgagcccacataaccctctattgggttgccaatctcgcattccttcctattttttgcatggctgcatgagttagatgcaattttggttggaacattgcattgtgtttgccttttctgacagtgtcaaaggttggcgaattgaatgtcaattatcaaaatctctcgagttggaacatccgaacttggaagagtatctgatgagatgggaatgccttgtacaagtatagtcagaccagtttatactaccagtaactgacatgtatgtatgggggttttagtttcggggatcgatgtcgtataatttttgcctcattggtgttggagttattttcctcggttgggtcaacaatttagttcgattttagttgaagccgacggaatttagttcggcatagttggttaattttttttgtttcactgtttgggttatagtaagctatgcttgcctccttcgtcataactctccgtttttgttttatttttgctttgaaatgcatgctatcaggatatatcttacgggtttgttgtaatttttcttcttctgattttcccccttttatcacatattgatttgaagggaatctgcttctttaaagttggatggtcaacttcgattcttgttatgagatgtaatgtaatttgttgctgtaattgtccttgtacaggattggaacctcgacactttgcaattcgtgtcgtgatgttccttagttgaactatctcttttgcaggtttcacatggaacttccattgtataattaatctgtttccacatgttttccgcatttcgaccttgagaattaattgcattcatgtggccaataagccaacaactgtattccaattgcaagctattcagaatttgctaggttatagtttctgctgacttggcggtgtctgcattgaccttttaattttagctatgcaaattgatttctagactatatttctgaagtatgtggattaaattatgatcatactcccccctgaggatttgaaaccataacaatatcacccaatcacatcccatgtattttcctgcaaacactgctagtagtttctatttatttacaggggtgaaagagagagtatgcagttaataagggtaaactatgctgatacctaagatatcactttacttttccgttatgtgtatatggagcgaaaacaatatttaatttggatcatgtatagtgtgtaagtaggctatcatatagataaaagtacattgtacaagcgtgttgatatggtcgaacttcactgtgattcgggtggtctaaataacatctaacttatttttactatggtgcagatcagttatctactgttcccgatcagtgcgcagcaatccaatggctcaaggtaacttgtcagtgacctgtgttatactgattgtaggtcagaagtctaacatatgcttgattgcttctagaatatgctgctgtattttactattttacatgcctatacttggtgttccatattcctggagcccttggtggtcatctatcttaccattttgcttttgtagggttgtaccagcagaaggttactgttccatgtacggcatttgtgcacaacgaagtgacgggaaggtcttaaactgtgcaaatgcaaccaaagctgttaaggtgacaaactgacaatatgatcc

SEQ ID NO: 109223 - DNA, 307 bp, Zea Mays
gcaggggcggtgctgtcccctccaaccctcacaatagacatgtcacgaaagtatcttcccttcatggcatcaatttgactttgtttaatggtcgactttccgaagatggtatggcttggctgccagggccggtcttcagaatcttcatccccacattccatatcatagtcatcgctatcatcagaatcttcagacaaattcgccattatttcctttgtgatcttctctatatttgtttttgccatagattcgtaaaacccagcaagaaaagggtccacaattttattctcctcaaacatcttctcct

SEQ ID NO: 109224 - DNA, 430 bp, Zea Mays
cggcctcgcactacgcagtcaacgcagcgctagtccaagagcaggacagggatggcaaaaatcagcagtgtccggtatactacgtctttgaagtccgcacaacttccaaatgcaacatgactgagctcgagaagatttcaggaacccggaggcatccaccagaattgcaaaatgggtagcggaactgtcagggtacaacatcattttcgagcccagaacagcaatcaagtcgcaagtcttggcagacttcatcgtagactggataggacccgtggggccgcagcaagagcacttagaaacagtctaaactatacactgcgatgacgcatggtgtcgcgcgagggaaggcgccacggcgatcatcacatcacccgccggagtcaaatacagatacgttgtgcgcctcagcttcgctctagagtccgacagg

SEQ ID NO: 109225 - DNA, 536 bp, Zea Mays
tgagcacacaacatactcaacaagtgtcttgtttggctaaggtggactagcttttatgtggggttaggctataacaatagttgctattagtttattaggtatttattattggtataattaagccaagttttagcattgttccaagattatcaacccataaaacatatcctcatcgaggaacatcattaccattatcataactgatccataaccagaatcataatatctctaatcaatgaggctcccaagacagctcataactgtgagcatgccgatatactagttttgattaatcctctacagaggttgcacactttacccataatctgtggtccttgttgcctcgggttgtatagacccttaaacacttccaaggtgagtcggcaaggttttactataaagcctttacaaagattctctagaaatatagctggccattaagtttccccagttccgtagtatagtactcctctccaaggtggtgactaacaaaaaccaaacaattaaacctcatcatcgactcttagtagagtgag

SEQ ID NO: 109226 - DNA, 411 bp, Zea Mays
attatgagcggtttgacaaaggggccgagggtgtgaaaagaaaaagggttgttagcatcctaagcaggcaagatgcccagtcaataaaagaagatgaaaaaactttgaagaaaacaaaaacaatgctagagccaaaggcaacaatttcttagaagcaaaagcttgaccaagcaccttctactgaaccgaaggtcgataaagcagtagagaaaacccctccgtcgccaattgctgccgaagtgattgaaatttcgaaggtaatgaccgattctccgcccttcaagctgctaagtcctctgggattggaactgacaaaacttttacagaggaacgaaacgccctcggctacagaagagaagactgaagggcagaagaaacgatgaattgtgaacatactgcaagccattgaac

SEQ ID NO: 109227 - DNA, 365 bp, Zea Mays
ctcttaacgaaatcgactcctacttaacagaagttggccaacacagtataaaacttagcaaatattttagacatcgcaactcaaaaacatgggttggagcagattaatcagcttttcctaatcattgctcaacttaaatttgttaacacacaagtcaccaaaaatagcacatttttgggggtctaacatagaggcattaacacagggcataaaactccataagactatatttgctactgaaggacctaaagcacttatgtgcatatcttatcggattgttcttcaattttaacaaggaccaacttatgaacgctactcgcctccaataattattgggctgcgataacgctcatataagacctcta

SEQ ID NO: 109228 - DNA, 370 bp, Zea Mays
gttggcgacaaaaaaataggccctaattctataaacatatcttaccctaaattaatcccttggactaactcgtccgtaaacaacaacataacctacatcataggttgcctaacccatttgttcaaaaagcaaagtaaaactctgttcaaacctacctacctcgtgtaacccggctatcctaactacttgtccctaattcggataaagacttcaagaacgaagatcgaagatgatcgacctcatcaaatcgaggaaggaaaagattcaagccagatcttcaaaaggaatcaagatccacaatcttggatagaatctttcctcaccctaccctttcttaaccaaacctatctatgctctaaagacatcttct

SEQ ID NO: 109229 - DNA, 397 bp, Zea Mays
gtgaatagtgcactgtccggtgcaccgaacatctgctccaatggctctctcgcgtgccaacggctagctgacgtggtagctattcggtggggcactagactgtccggtgctacgcctgaaaaggaagtcggtcaatcagatcatcggccgactgttgctgaccagatctccagtggtgcatcggactgttcggtggtgcactggactgtcgtgtgcaagcacagacagggcaacttttcggcttccttatagagaagcaacgactcataggccccttggggctataaaagtagcccattgatgccttgatgcagtacccaagcatctcaagagcacaccaacactccaactaagactgggcatattacccgctacccgttacccgaacccgaaaaac

SEQ ID NO: 109230 - DNA, 698 bp, Zea Mays
gttaatgggtgaggactagagagagttttgtaggggtaccctagcagccttatatagaagactggagagatatcactttacaagtcatgaagcttatctaatcacttcgaagtctatcttctaccgtattgagtgctcccgatcttctggagttcggtcacttccttctaagtatcgcgccattcggttgggcgtgagacatgtcatcagatcataagcgatctttcggctatgggtgcattcggataacgaccttgcgccccattcttcgggatagcttctatcttcagccattatcttcttttggtgaagtctgttctgcctaggtacggcccaacaatataccatgttggacgacttatcaggggcccaccaggcagcccatgggacatgtccatgctatgaggacctaggggatatctatctcccacaagcccctgaggttgaagccaattttttagagtaattggctcgagactctaagaatgaatcacactatttgatcatacttcattgagtgcaactttgagatgtttggatccattgagtgcactgggtgtgacccctgagctttgagttgacttggatatcaatcgactaggtccctatgatcttatttccgtaggatttgcttgacttttctggatcttattttggtctatctgtgccttgctgattgactttggctcgagatcgat

SEQ ID NO: 109231 - DNA, 581 bp, Zea Mays
ataaatatcctgttctgtagcgggataggacacgcataacaagaagctacaatttcctgtcatttgtcttgtcgtgcacatgagctctatcccaccatctttgagtgtttgggtccacctgacagagtgttgtgtgtgtcagtgcccaacatttgacgcccatcgttcatgtgacgaagactattcccacaatgcctcccaaaaagaccactcggtctagctcaccattgaacgagccagagcagccctcaccgtcaagaagggcaagcttaccctcgctactgaccaacccctaccacaaaacccgaaggccaccaacgattcacatgccgagggccatgccataaaacaaaaacaaataaccacctccaccgaacaagaaggcgaggtccacaccactagttcagaaaactgtggagaccccctcccaaacccaaaaagtctaccctacaaagctaaagtttggccgaatctgacaaggaactttccttcgctccccaggttttaacaccgcagtaggccaccagcaccaaccatttggaatgcctccgaaagacaatgataaagacctccaggatggc

SEQ ID NO: 109232 - DNA, 742 bp, Zea Mays
gtgacattcaaggtcactacgagtatcagtaatgcatcagatatacgatgctcacctaggcttgtccggaggagctacgggttggccgatcgacgtggacagtgccttcggtgacgttcaccgaacgacatgacggtgttctagttaatgttgtgcagtagagttcaagcgggcaagcgcatgagcatcatcatgatctatagactgtaaaacatgagttaaacaactacgactgaccttaggaaaagctggccatgcggttgcactgctcggcggcgctggtgaccactgatggggaaaaatcggtgttccttggctatcgatggtggaagggcggaaacaaatggtggcttgggtgcgtaacggagaggcaggactgagcgcaggctcaatttaaaggaagtcaccccaatggtcggcaatttggtcgctgactcatggcggtggcgacaacccgagaagctccacgttagcctcaacggtgtccacaggctagtaacgtggtggatttaccacgaaccctttacgatggttcaatacacgagtccccaaccagctgcgtggacggctggagcgtacggtggcttgctacggcggcggtggatgattcacggtgaggacacgtggtgtccgtggctagagtggtaatttgagcatcaaatttgagccgaagatctttttacccctcattgatccacgtcttggcggcaccaatcgtggcccgagctcgaatcaccgcggc

SEQ ID NO: 109233 - DNA, 811 bp, Zea Mays
caaatccaatcagagatcaatagacgacgatcgagaaggggacttggtggccatggcgcaccatgtcaaggtaaagggcagcaccgccagcagccgcctcctgccggcggtagcagctcttgtggtcgccatggccatgttcttatcatcttgcaacgcatcaggccagtagtatatatattgcatattattgtatgtagttcagcagaaaacagcacgcacgcacgcatgcaagtaatgctttgatatttcctggcctgattctgcttcaatgcatgcatatgtacagactactgccacgcgatcgtgccgtgctcagacgagacgtgcttctactactgccagaagaacaactacaagaacttccagacctactgcacgccgggacagtactaccccacctgctgctgccgggtgctcgatgcatgatgaccgcctacctgcatgttgtgtgagtgtgtgtgttctttctctgagcgatgcgtgcagattcagtagaatgaatgaatatcacactgtcgtacgctgtttgaatgtcaagtcatggaaatctatcccctgaaaaaactagcagcttttttttgtttcatttggatgttcggtatagatggtcatccaaggaaacaaacagtgtgtcaaatcttttacggagcaagtatacttgggccaggcctattaaaaagcgagcttattcagtttctctcaagcgaaacaaggcctgctataaatcaaagcgtaacttcggcatgtcatagtgtgatgatgtatggaacaataaagcagtcgtgaataaaaacccagcaccagagcc

SEQ ID NO: 109234 - DNA, 1160 bp, Zea Mays
tgcgccctagtctagtgttgtgctaatcgtagtattgttgagggtgtgttacaactggtgggctggtgtgttcagaaaagaggggccttttatagttcaagggctggactttacaatggggacttgtattctgctgggggagctcgtccggtggcccttgggtagtgtgttcctctaatgttatccgtagggttgtgctgagccattcccccctcgatgagcaccttggagaggcgctttgagcccacgatgggctcgacgatgaaggggtaggtccttgggtgtgggatcctgtccgggtgatcgcggcagtcgaatacaatggggaactccaaccactgcagataccgcgggatggcaagctcagctgcgtgcaactcgcagtgggccgccttgagacggcgattgtcgccatacgccttggccccgccgaagatcatgaggcattgtgttggctcagagaaatcctaggtgggagcctcctacttcactggtttggcagctcctctcggctttgctttcttggagatgaagcacttcatgagctcgcaatcctggagcttgtggcggacggggaagtcgtggttctgttacgacgagtccatcagcttctggaagtgattgccactgctcttcgttggtggccgatccacggtgaaaacttcttcaccacaccgagggtggtggttcctccagcgcctgtcggggtgctcccaacgctctctcttctcgtcgcttggttcattggcgtcgcgtggctctttcccttccagaaaattgcccctactgcttcctcttcgtcgacgaacttggccactatgtcgaggaggtcgacagttgtttttggtctcccccgcccgagttcttagacgagtaccttgttggttgtgccgtaggtgaagacacttaccacgttgacgtcaatggcgtcggggagtacattcctttttctaggaaaacctctggatgtaatctcgaaagctttccccacttctctcggtgcacctcttgaggtcccaggagctcctagagcacttgtaggtaccgtggaagtttccgacaaaggcctttcggaggtcaacccaatcgtggatggtgttggctggcagatgttcgagctaggccctcgctccttccgcgaggtggatggggaggaattg

SEQ ID NO: 109235 - DNA, 310 bp, Zea Mays
aagaaaaaatccaactcaaacattgcaaacaacaccatcacatgattgttactattataagcataatattataaagatgttcatcgtctaacgcaaaatctaacttattacaatataaatgaaaatttatagcagcctggtgatggatcctggttctccatagcggatcctcttacggggaggggataacgccatggcagggacttgaacttcacggggattccttccatctagctgagcttctagggctacgatccttgcatgtgcatcctccagctccaagtgtaccctagagaggtctagggtagca

SEQ ID NO: 109236 - DNA, 341 bp, Zea Mays
attcgttttagcccctgcattctttggaattaataaccacagtccatagccctggttttaagtaaataaaaatctagaaaatgagtttattttgcacatccttggtgatttttttgtttccttgtaacttccctcggtaatgaatttttacttcaactctttcgttacccttgattgctttctccacttcgccacttcacgagacttgccttaactctatccttggttatgtttttcacggttttcatccttacccttgtcacatctatatcttaccctgaagcttatattatacatgtcgtctaaaacattctctcttccatctcaactttaaagttata

SEQ ID NO: 109237 - DNA, 436 bp, Zea Mays
ctaaaggaaaggcagccgagaagccagaccgagaggaaacggcaggaacaccagagccagaattgccgaaggtggcaaaaactcctacaataactcccaagaggaggaggatggcaagtgtgctgggcgctgtcatggagacaacaagggcattaactcctactcctgtgaagaaggttgccgagtctgttacagctcgcgccgaacccgaagttggaccctcaatgccccatgaggcagagcctactggaactgaggaaagaactgaaggaccttcggacattggtttggttctgatgaaaaaagacgtgtccaaaagagttaaatctcctacccctgaagcaccctccgaagatcttgactttattatacgacatgctttgggtaaacggttgtctgaagaagaaattgtggaagccaaacactacacccggga

SEQ ID NO: 109238 - DNA, 744 bp, Zea Mays
aaatgatccaaatagcgccccaagaatcagtttccaaattaaagtaaattgtttcttcttgtttctagcataaaacacgatgactcttagattgtttccaaggtaaataagtacatttttcattttgccgacatcatcatctacgtttttgtttccccttgtgcacacttactagctacattttgttattattgaggagctcaagaattttaaaaatatactctaacaaatataagacttaaagtagctagatggaaactaccaatacatcattgcttgaagaagaaaattcactttgttatattaattattcgtgccacagatcgtgttgcattccttttttttttacttccacccagtgttatatatacaagttttgaacccttaccaatccataggtttggtgtataattgaaacaccaacaaaccaaatggtaaactaaatgcacttatagagtaagctcaaagagtcatggatattagtagacatgaaatcttgacatatggaagtgtcactacaacacatttaaattagtataaaaatttacccttgatccattcatggcttcatgcatgatgctgaatctccctttttattttagctttatgattttaatttaagtaagtgtactagttaaaaatctaaagctataacttgacatgaaaaacttttccttttgggagctagttagaatcatagatataaaacatatagtcttgcatttaaagccaagaaatttgcaa

SEQ ID NO: 109239 - DNA, 573 bp, Zea Mays
tttcgagaagttcggcaaggacaacacaggtgcttgactcagactagttttgaggcactgaaatgctgtgtcatggtcagaggtccaccaaaatgcagaattctttttgagtaaattggtcagtggtttggagatgatgccaaagtgaggcacaaactttcggtagtaacctgctaagccaaggaagctccgtaactcctttgcattagacggtttaggccaattgaccaccgcagtaattttactcggatcggtttgcacaccttctttgctgatgacatggccaaggtatgagatggagcgagttgcaaatgtgcatttggatagtttgacttgccatttatccttctgtaacagggacaacaccactgacaattgctgcaggtgatcctcaagggaagagctgtacaccaagatgtcatcgaaaaagacaagagcaaacttgcgaagaactggagataaagtggtgttcattgcgctttggaatgttgcaggagctccagtcaacccgaatgccataactttgaattcatagtgtccactatgggtctggaaggctgttttaaattcttc

SEQ ID NO: 109240 - DNA, 523 bp, Zea Mays
ctacgatctactcttaggggctccttcgtctctccttttatagtccaaggagggggacaataggtgaatacgagtaggttacatgaaagatcttatctggtaacctagtcgtatgagaatacaactatctataattacaagtgtgccttcctcatatgctagggtcttggcctatctgtttaggactctaccttatctctcctatttcaataagattgttggggatatgatccccggtccctagggtccatctgtcagggagcacgctaagggaaagcctctggtcactgggacccattggccagacagaggacatggataacgtctaccctggaggcacccgcctcccatacaaaccccacggcaccgagcctgggtcgggtgtggcagaacctaacaaggggaccgggcgtgtcgaatggaaaccactcgagtggatcctacttccggaccaggactgacctatcatatatgatcggcagcattaactacgctagacaccaagtcgcagtagaggcaccaa

SEQ ID NO: 109241 - DNA, 617 bp, Zea Mays
gttcagtaaacaatctttattaatggagatcaccttgttcttaacacaaatcaaaagaaaaggagggtgaaagggggtctgttcagaaaagtgctgaagatcaggacaccgaaatatctgaaaaagcgaggataaagatcagggacactgtagaatcggatgtgtttgagtgatttggggtaagaatcgaccgcagggagatgtcttcggacgtgtcgctatcccgcggacctagcccgagcctagccggagataattcaccgacggtcaccgtggctcggtcatttccaccgccgtgtcacccatgcctcgctcctccctcactatgtctcttctttacatggtaaccatgcacgaacgatttaatccacggctgtggatcactagccggaccaccgcgcctataaatagcctcgccacccacggcgaggtattcgcctcttcaccagcgagctcggttgaagcacaaattcacgaaattctctccatctctcccaaaattggtgttgcgcagtgcatccgtagttctttgcgaccgtgtagccccaacctcacctcctaattccaccagaacccgacgcaacaccgtttccccccttctcagtcactggcgagtg

SEQ ID NO: 109242 - DNA, 681 bp, Zea Mays
agatgtgtccactagatggaattcaacctacttgatgctagctgatgctcttcactacaaaagagttttccaaaggattattctactccatccagaaaaatatagtaagcatgccccttcaagcttagaatgggacaatactgctgtcttgtgcaattgtttggaaattttttatgagtccactaaacttctctcggggtcttattatccaacagcaaacttgttcttttctgaattttgtgaaatcaacatcaagattattgagtggctgaaaagcagtgatggtttcattgcttccatggcacagtcgatgaaagataaatttgacaagtattgggagaagagcaatactgctctagctgttgcatgtttcttagatccaaggtacaagatgaaagtggttgaattttattacactgagatgtcagatgactatggattcgatgctatgtatgaattcaaaaaagttctgcaaaagctatatgattcttatgcctccatgtatcgttcttctacaagtcgccctatgcaacaaactaaagttgtaactgctagatctgttagaacatctcagtgctatatggacttgaatgaggagccaaagagaaaaagattaagttcatttttaagggacaatgctgatattggtcaagagcagcaatctgaaatagatcaatacaa

SEQ ID NO: 109243 - DNA, 1089 bp, Zea Mays
caccaagcgtacggggctcgcacgagatcaaccggagacaatgccaattgtctggtcgacggtgagcctgttccagacgatgttcaccggcggcgagccgtcgttccaacaaaaccagagcagtagagttagaaggaaaagatcggtgagcatcactgccaccaggtgatcagggaacacgtacatagggaacgagggacaccttgaggtgtgctggccacagtgggatggagaggcggccggcgtggtcaccaaaaccagggagatggcgcgcgatgaactggaaccaagcacagacgtgactgaggagggtttgacaccaacgcgagcacgagaatcaccacgctcactggctagacccgaagatagaggtagggctttaccgaaccaagcttatggcaatatggaataagatcagatgctggccgagctcgatcagaccatggcaaggaaaggactctgagggcgttagtggctgcatggccatggttacgtggctttacttacaggccccacgccgattcacagcataggagatcagtgcacctggtcgacccaccccagccaaaatatcagacttgtccacgacactaacagaagaaggaacatataagaacttcagtgtggacaggccttaatgggaccaaaactagatattttcagcaggggggtgaagcctctagacccctttgccgtccattcaatacttatctctattagtgcacatcggtggaatacagcagggtgaagagatcttttctacaacttcaagctgattctagattcagtgaactgaatcactctcacctttaccccactgcacccccctcctgtttacacccttggatctcacaaattctcacagcaacagaccaagttcacatgacaaaagtcattccccaagcatatccctacaagtttgatgcaacatcctaagaccaaatgtccatggatcaggagttatggtgctcccaagatgaaccaaactcactgttttactgaactgaacattattcagcatccacctgacctgacagagaaagtttagatgcattttacttacaaacttgtatagcactaagcccatct

SEQ ID NO: 109244 - DNA, 1207 bp, Zea Mays
gccaagggagaccaagtaggagacaaagcgactgtacccgggctacgacgcctgcttgaggccatacaaagagtagttaagcttacacaccatactcaggccagttgagttcacgaagctggtgggttggctacaatacaccatctcgatctgagtgtcgtgaaggaagacattcttaacatccagctggtggaccgcctagttagggatagagtcgaggccaggaggtgtggaggagcctgcaagggaaaaggcgttttcatcgaaaacaacatgtcgagacttaagagatgatgatgcaataggtgagaagatcaaggcactagtaccccttgtgatcagagcactcgaggaaaaggcagcgagtggatatgggcccaagtttgtggggagcggtggtggaggtgcgaataggaaggggtggtgccaaaaaggcgaagaaaggagtggatgactgatcaccttggaggggaggtggttcaggaaataggtggcgatgtggataccctcaacccagtaatgagtaggaaggaggcctggaattggagggtgcgaatgaggttggtgatggcgccaatcatgggctcggccttaccgttctgaggggaggtgtacccgcaattgcacgccgcgcgagagaaagaaggcatgagatgtggagttatcaaacttctgcccgttttcacattgcacaacctggatggtgcaaccgaactgagtcaacacccatgcgaataaatgagatagggcggtgatggtgccagaattacgaaggagggggaaaatccataggtagtgagagaaatcatctaggatgaccagatagtactggtaaccggaaatgctcggtatcggggatctccaaaggtcacaatggacgacatcaatggggtgagcggttcaggacatggaagagaagggtaagcaagtctgacgccaagctgacaagcatggcaacgcagtgttgccatagggtaggggattgtcgagccatagagatgcccgagagtctggataggacgtcgtgaccaaggtggccaagccaatggtgccacgtggaggtataggcagtggctgcgagagcatagggtgtggcaacacaggatgagggaggtggggcagagaaccgaatatgatataggggtccagaactgtcacatcgggcaaccacgacacgagtagtaagatcccatatggtgagccccca

SEQ ID NO: 109245 - DNA, 492 bp, Zea Mays
catcgaatttatccccgtatctgaatgtgtacttcagccggaccagttcaccttcactagattcggtgatggtctccttcggcatttccagctctctataagcggccatactctgtatgctatgtgctcttgaaccaaatctctcgtaccaataaagaagcagacaataccaaatgccttctgacatgcttcggcggcttcgccaatttcaaccttcggccttcagaggccgaagcgggaccaaatggggcgcataataacttccttaatatcttttcttgccttcaagtcattcttcacgtaaaaccattcctccataaaggccccggaccaccttttccggtatgttggcaccggatagcttgcgttggggtgggcgataaatccataacagccaaaattgttatgatattgttctttgcccatggccttcgtctcgtatacaagctcgtgcatactgcaaaagcattttgcgcttggctctagtccctg

SEQ ID NO: 109246 - DNA, 510 bp, Zea Mays
taaactaacctcgccatcaatgctggcagagtgctgtggagaatccatcatttgcaagatatcatcaacacttcggaatgccccacgtaaatcaggaggtgctgccagggggaagaataaaaaatataaatgaaaaaatggaaataatcaagatgagagaaaacattttttaagcatggaagacataggtaggcttacttctattcaaatttccctcttgcagatcaatgtcatgaccacacaatggggttctcataaaatctctgctgtcatcaagatctccaccactgagatccaactggatttcttcactatcacctcctccaaattggtcttccggtacatttgaagtagttcctgatcctgcatacaaatttaaaaaagtgattgaaagcacagagtgatgtgtatgggcaaaattgcaacttgtatggtgggtggttgcaacaataatattatactgtatgcaataaaaaatacctgctcctgctctagtgttaattgcaacgg

SEQ ID NO: 109247 - DNA, 473 bp, Zea Mays
ggatggagtagactatgttagtctcagtgaaactaaaaatgtttaatgctgatattggagggctatttggttccctagcgaaggccatctccaacggttcccgaaccgtctctctccccctcataaatgggcactatagctccccgaaagcatccaattgttcacaccattttctccccctccctccgtgagctacgtaaacgcctcgtatgtgaggtgaccctatgctcccatcgcagtcgagtcggtgctcttctcgccaacataaagttcctctcgtgacgcacgttcgctagccctggcttcttccacatacattgacgcttcggtgcgatgccgagcagcattgaagaaccctatgtccgtggaggtgccttcgcccgacggtggtccgacagttcaaatagagacgaccgacgaggcacaacgagtagatctagtggagtgaagtggatccagagcttccacaccgt

SEQ ID NO: 109248 - DNA, 437 bp, Zea Mays
gttggattatgcacttgtaatgtttttcacttttatgttcatcaatcgaggagtagtaagaggatgtagagttttatacatactacaacccaaacctctctaactgctcgtacgttggctcttagtggttccaaggttcaccacaatgcccgtgtatgccccctcctctctctccaatctattattgtggtactttatgtatctaggtgtttgtccatgacgacatctagcatgctagataggagtagggcacttctgctcgagattcttgtgttttgccatgcaacacaactatggcaatgccaacatgatcgctagagatggcaatgagtaaatactcaccggctattattatcccatacccatacccacgacaaaaaataaccccatcgggtcacccatattcactggtgggtatggatttatccccataccca

SEQ ID NO: 109249 - DNA, 800 bp, Zea Mays
ggcaagcaggggtgcatctctcgggtgagacagggcgggggcacggtgcacacatgtggacgcccatagtccagtcttatggagtagtagtagatttggtttttatgcacattaaggtattgcgtcttgatccaaatcgtagattgctgccccctcccatggccaccaccaccatcgattgtggactctggccggtgttggggcgaagacacgacgctaccctcaactatctctaagactatcgaaacagagggagaaaaggcgaagaccaaagggactaccaacaatgcgggaataactgtttcacggtcgcgacgaagtctaccaaacatgctaggccgcgaaggggataacttctgccaaaggcctgaagatttggagggcaacagagaagacccacgacgcctaaactggtagacttcgctccaagaggcgtctatgtaacagagattaccatcggcagggcccacctataagtggcttgggagggtatcaactgtagtgtaaccgagaaatatatggtcctgtaattaccctgttatactatgtatggcgggaatatagttggtagctaggggcattacggtacttagtttaccaacccatggctaccccgatcctgtaactgtctggacacgcttagtaatacaatctcgccagcagtttgtcacttgattgtgctactcactccccttgttcccgagtgttgggttacgaattcccgtgctaatagctggttttatcatgtggggagatagatggtggatcagaataaccaagaacatgctgtgatgcgagga

SEQ ID NO: 109250 - DNA, 785 bp, Zea Mays
caacttatcagttttaagacagaatgcaaatggtgaaatttcagagaagaattgtaattttcttttcatagagggtcaatatctttgaatccattggaaactattgaaactttttatgcgttataatggataggcacaaccaaaactagtagaagagctcagcagcaggcaactcagacacgtgcatataggtatgtcggttattttgcttggccagcaagatagagaaaacaaagtggtcaactgtagactgaatgattgtgaagataacatttttctttgggaaaaaaatagacctacaaatttgctgatgtatggtctgatgcaacacctataaatatgcacacccgatggaccaatctggttatacccaccccacccacaaggagcagcaaacattgaccccacaaactgtctgtagctagccacaacaggaacaaccttcatggcttctgctgctcctaaacctcatgtcatggtgctacccttgcccgcacaaggtcatgtcattccactcatggagttgtcccataggactaacgcaaggtgaacatacagagggtcattaggactaaccgattgatagcgcttgcagaggccatcatctgcaacacgtttagagaagtagaacctgaagcgttgtgggctctcctacccaacgcattacctgtaggtccactggtagtgccgatgtcaaagccgactactggtcattttttctctgaagatctgacctgcctcacctggcttgatacgcaagcccctggctccgtcatatacgtggc

SEQ ID NO: 109251 - DNA, 273 bp, Zea Mays
cgacggtcttttggtcaagaaattctttcacgatgtgtgtcaagggaagaagccaatcagatattacaagaaatgcataagggtgtgtgtggtggacaccaaagtggagctaaaatgtatcacaacatcaggctgataggttacttttggcctggaattatggcagactgtctcaagatcgccaagtcttgtcatagttgtcaagtgcatgataattttaaacatctgccgccagtacctcttcatcctacagttccttcatggccatttgac

SEQ ID NO: 109252 - DNA, 695 bp, Zea Mays
ggagagtgctagttgaccggtagcggggcgcagggcgatacttgatgaccgagagaggggaaaggaagggaaggaatcgatcggagttgatccggttggatcctctcgtccatggtggtcacaacggcgttcacgcggaaggaagaagagcggcgataaatagaaggagagctcgacaaaaaggaaaggagctttgtccaagtaaggaagaggatcatgtggtcggttgttcatgcacgcgcgatagcaagacagggtgacgatggcgttggagcagaaaaggagagggggaagaagaacagagaaaggggaggagggagactgacagtcaagctccacctgtcagcgagacaggtgcgtggaaacgcggcgcggtcgtaggtttgggccggggagagggaaaagatttcatttttattttactccgaattttgaaacatgaccaaatacacataaaatatgttttgaaaatctccctagaattcatgagacatttagaaatagaatacttcaaagaaaaaaatagttgtaacatcaaaataatccttgcaattatttatgaagcaaaaaaccaagcacgaaaaataaatgcatcaattaatgaattcagctctcatttgtttgaaaaactatctcttctccaaaggtttcatactcaactcactattcataaaagagatggattgaggtgttac

SEQ ID NO: 109253 - DNA, 311 bp, Zea Mays
aacaaattcaaccatctatcccagtatgccattgaccaagtgaatacagatctgaagaaaaagaattgttttatgagagggcttaatgacaggcttcagcggaaaatggcaacctgcttggaccttacttacagtaggcctatcagtacgacactggcagtggaagccaaaaatgcaggacatggaaaatcaaaggggtttggaggtgaaaggtcaaatcaagggcctgaaaagagaaccaggttggtgatccaaccttttaatcaaaatcgttcttcgcctcgcccaccttcctatcccttcaagcagcc

SEQ ID NO: 109254 - DNA, 376 bp, Zea Mays
gcaaatctttatcaccttatttcttgtaactcaagtcaatgtatccaaaatcttgatcgggtactccgtgtaagtcaaatcaccctgaacactgagctcttccattagtaactgttgctcggggacacgaagacacttcttaagttgggatacgtggaacacattatgcacatccgatagattgtcaggtagctcgagttgatatgccatctccccaactcgcctaaaatcatgaatggtctaataaagcgaggggataatttgcccttgactttaaatctcctcattccatggaggggtgacaccttgaggtacacatgatcaccttcctcaaactccagtagtctccttctattatccgcatagctcttttgtc

SEQ ID NO: 109255 - DNA, 331 bp, Zea Mays
gtcgggtctaccgtctaatcgttgggcgatctctcgcctgccgtcaaagtccagtccaaggtgctcactcgtgctcgtgctcgtttcgtgtttgggttgtagggggcatgtgctgcaagtatatatgagcatgtcccatttaagaagttagtctattttcttaggttatttataccctatcatgtgagccctcctcccctgcgaccctataactctaattcatttcccctacactcacctcaaccacaactcctcattttctcgtctctcgtcttcaccttctctcttctgtctcgaaacttgctcgtcttggtgagatggacgtcagtga

SEQ ID NO: 109256 - DNA, 604 bp, Zea Mays
tgagcaaggtctctatagtcgaattgtagttgatatataacaacaactttgttacggaaggattatcaggttgtcacacaaaaattggagaaccaaggcctttaatctactctgtcaagcgatctgataacggttccaatggtacagtgactggatagaatcagattccatgaacttcgccgccaacgacctccatgcaaggattcacgctgatcgcactgattcgtgtagaacccaggcaggatagtaccgggaggatgaaaagattagaaagggagtggatttgatcgcggattgaagcttatcaaccgcacctatagccacgcaacatggacggatcaccggtatcaccgtggtacgctgtcgaccccaaatatgccatgacgtagtcctttaccatgctgtagtaatcgtggcgcatctggatttaccacctcaagagcaattgcaccggcaagcgccacgactgagcaaccagaaactcttccccctctccggccgccgcgcgtcttctccaaattagccgccaccgctcatgaatcctataaattgagtgtgctctcagctccgataggtattcaagcacctagcgcacccactcatg

SEQ ID NO: 109257 - DNA, 524 bp, Zea Mays
agttttacaaaatttctggatttattttatgcttggaaatcaatttatgaatttagtttgcatattacaacaagttgtggacttcggccatcattttttaataatccagggtttaaaccgttaaagttaggacccaatggcaacattctttactcagagcgggacgacgggttgtttatgaagatgtcagggggctcttttagaaatacaccatgactgaagggcacaaacaaacctcagccgtccgatcaacattcacaggctaggattagatccaagcacaatcgaaccggtatccggtgtcagtagttggatcccgatcaaacgctgtccatttaaaataccgccgtgagtatctcggttgctggatacaagatcaatgacccataataggccaccgaccgcaatgtgctttggtccaccagatctacgattgacggttgaaatctaacaccgaaccggtatggcctcgcacaaatcccctccgctaatcacatatcggacggttaggatcccctcttccc

SEQ ID NO: 109258 - DNA, 600 bp, Zea Mays
attgtctcatttacatattgcaaatcatttttaaatatgtattaataaatatttttaagaactacaaataccaaacaaattcacaggtcattctcctcctcatccccacataatgcagcggaaaatcttgcttttattccagtcataggttccgcgtgatagcttgctagtggtcgcactcttcgtcggcattcacgagcgggtagagacatcgacactagatttacctgacctccactgttatagaggaccatgtagtgttccttgctagatagataaaggaggggagactctagcgtagccaacgcttaggctatctacactcatactactctaaattagtactttaaaacaaatattctaggggtatctgctagtcatatagtgtaaatgtgcagcgaatcttctaggggatgcaaacgaggcctctctcgtccatatattattgtatattttaggccggtagttaggagacttcacaaaaaaaatggaggagtgatctaactgaggctatctacactcatactactctaaattagtactttaaaacaaatattctaggggtatctgctagtcatatagtgtaaatgtgcagcgaat

SEQ ID NO: 109259 - DNA, 330 bp, Zea Mays
cccaagtctctggtgagtgcttggtgtgattacaagtgtgctgactttgtgctagctacgagttcaagtggttgtctgtctctagaccatgatccttcccttccttttatagtccaatttgagaaaagattcagttacacaagtttgagttgggaggaaagagtagggatcgggccccatcgtgtagcttcttgtcctccaaggttctcgttggccaaatgtctatgaacgagcatatattcttctattatggcacagtagcggtgccatcatttatcccgaatcatgttgttatgcatcgccttgtcccgcaatggtttatccggcgtc

SEQ ID NO: 109260 - DNA, 286 bp, Zea Mays
ttccaatttcgcctcgcctttcacaattggtaccaacaggataaattcaattcataatttttaaatttaaaaccatccatcattcatctttcccaaaagaagtttccaagggttacatcaggttcgaaggactcaactttctagcctagtacatctgatttgcaaaagctaagctatttttcggggagtgctacttcctaacacttctaccctagtcctgaaatctaacgagcaaaagaggcaacgctagactcgggggaaggtggtcctccagggtgagttgagc

SEQ ID NO: 109261 - DNA, 455 bp, Zea Mays
cgagacgggacgttcaagaagtcaaacgacgtgaaagcgacgtttgacagacaaatagtgacataggatgattggaattcgaattgaggcacgaaatgatgtgggattgagccgatacttcacgaataggtttatataggtcaatatgagtgaagtgtgtgcttggtttgaatttaggcgaagaaataaggttttgggcactcggctcggaaacgatcgcgcaaaacgggaattttggtgaaatttaagcctgggatctcggattggcgtgaaatttggcaaggatgttgctgaaagtgttgtgaaggtgtctgaaaaatttgggttcaattggagcaagtttggctggtttgggcatttcaccgagcacgtggtgtgcggggatttagggtttcggtgaaaagcttatttggggtggaaaacccctcccgaaggagccaaggacctgcagggac

SEQ ID NO: 109262 - DNA, 1186 bp, Zea Mays
cagaaaatagaaatgaaaataatacagaaaagaagattgaaaagaaacaaaaaaagcaaagagaaaagcacattcccttcccacaactcatcctaaggcgtgtcccacttcttacactcggccgacctagtcccccacccgcacgtttcctcgcatccacaccgcacttgaatgtcgctgacaacagggaccccttgttaggcgttctcttacctcgcgtcagagatgggccagcagcaaaccgaacaccggattctcatgccgttcgttctttcttcagttaggactttgggagactatatatacgcactgcactgcacccccttgacccataagcatcgtagtagatgagctacgagcccattgaagcgagcgacgagagaacagagaggtagagagagctgtcggcatcaccctgtgcacgccatcgttcggaggctacaaagcaatcgaaggagttcgcgagggcgcggggatcgcgtgcgagaaaattgacggtcgcaaagttcctctaatctaaaccacttgtgtctaatctaacaacgcacggtcgttcttctcctttcaccaacaaaacgggacgacgcctcctcgccatggtggatgctcgtaggcgtaaccccgatctagccatccgagcacctccacgcacaacgttcggtaacgaatgtagccaagacaatcgtcaactatctgatgcactccttacccggatcgttggcggcgaggtaatttcgatcgctccggtccctccccatgctccaatgtgtcgggaacacgtttgaggtactccagcaaccactcgggcgccctccaatatccctacgacaaggcgattttgggtttggtgacttctctctcccttcctctctctctctctctacgttcgccactgggttgagttcctcggctcatggctggcagcaactctagcggttatggcgacagttgcaaaccgtaacaaccctaggtggaagacggttctagcaccatggccccacatgccagtgattctagtgtgtgcatgtgaaatcttgtggtgcggctaacatcgcggcccatcagtagcggtgtgcgcgcgtgaagatgacgtctggtgaaatgggagactgacgagtgggcatgtggtgtcggtgactggtctcgagggcgtggacggcttcagcggctcgacgtttgcccagcg

SEQ ID NO: 109263 - DNA, 604 bp, Zea Mays
cagtccattctgatacgaagtcgactagcgtctgagtctttattgtcgtgcggggccggaactctatgtcgtcagctcccaactcgcatgcccacttggctatccttccaatagcttctttgttgtggagaatgtctcctatcggaaatcttatgactactatgactttgtggtcatcaaagtagtgacagagcttgcgagcggttaggagtaccgcgtacaacagcttttggacttgaggataccttatctttgaggacccgaggacttcactgatgaagtagactggatgttgcaccgggtatgcatgtccttcctccacccgctcgactactaatgcggtgcttaccacatgagtcgtgcaggagatgtataacggcatatcttccgccgactaactcggcgtagctcggtgcggcggcttgagtactggtggtgtggtcaagaacttcttcagtgcctctagagcttcctgcgcctctgtggtccactgaaacttgtccacttttttgagcaatttgcaaaatggcatgcctttctcgcctagccttgatatgaacctgctcaggtttgccatgcatccagtaagcctgtgcaccttttc

SEQ ID NO: 109264 - DNA, 426 bp, Zea Mays
gtgaccagctcggagtttacctatcgccctataagtcagttgctggtgtcctccttcgaccagagactagggctagaccaccaccacataacatcggcgagatccggggggaaatcgacctcattacgggagggagaccatgccctcttcctccaccatggattcctgcctatgtggccaattgggcaccggggatagctatggcgcttcaccggccaacatggatcatgcccaggccccgtggggtgatgcggggttgtctggagggacgaattcctcgctggggcgagaatctcgccgctgggccactgtacaacgtagccaacagtgctttgtctgctatcaactctagtaagtagcccatgttgttcacctttctcctgtcgtctattacgcgcgctagtggtcggtttgggtatcgaggtg

SEQ ID NO: 109265 - DNA, 410 bp, Zea Mays
gtgctactgttagaggagctcggcctccaacctcagcacttcacgctccgcttcatcctccaggcatccatcttcgcctacctctacgagatgttcgtgggggcaacgcttcttccgccagcattcagacgaaagggtgttgtgcagcgaccttccgggggtggaaagcgagctgagctgcggctccatctttcgcgtgagcttcaccagcatcccatggtacacctctatgaactagtctagctccaactccatgaggtgggaagcgacctgagctgcagctccatctttcgcgcctccatctctttggctttaatggcctcgacatcgcctccaatggtgaccgttggtccggttgctgatactgaagatgccgcctggaaggttgtacaagatgccatggagacggc

SEQ ID NO: 109266 - DNA, 976 bp, Zea Mays
atgatctacgcgaagctacgagatcgtgggatagataactactaagatcggagttaaaataaattagttatggattttctaatatcttaggcatttttatttatttattctacacttgaagacaattattttgaaaactttcttaaatttctttgatttatttttatttaattaatcaagaatggacggcgggttctcatttctgaaagtataggatttaacctgctaattctaggacctacttgccctttttttttgtgtaattcctgctgatcagatgtcgtcacttttaattagatgagccataaccaaatccaattccaacacgtaatccctatctaaaacaatgcgaactaatcacgttagcctttttgctagctgctatagttaagatggaggacgcaatacacacctcccgtacgacaaagcgacgccctgctccacatccctggtgatgatgatatcaacgacctcatcgacggatacgcgtaatcaaaatagctattttcttgaagtcgatggaggcagaggctgatcgagttgggagcagtggcggcgtagtgctggggcaatggtgactgctagataggatggtcgacggcgattgcaggctctgggcgtggtgtctgtgtctctctcctacatgtacgctctctcgcggctacctcatcctttctctgaatccactcgacaatggtgcaccctgttcaatctacggggtggggaagggtgctcttctatacttatacatcgggaggaaaacctggccatacgaggcacaaagttcggctacaggtggttacagggattcgaggagatcctaataatcttggctgagtctgttacgtctgtacgggtttgttacgccgcgacaagagtttgttatgcatccgatggagtttgttacgatccacgacattcacgggagaaaacagctcctagagtccagcgtctgcatggctgtggcataaggacg

SEQ ID NO: 109267 - DNA, 549 bp, Zea Mays
gtcggcgttttagaagtaacagtcgaatcccttgaagctatgtcatcgcttcaggaataacagccgagtgactgttggcgacgtcggcgttttagaagtaacagccgagtgactactggtgacgtcggcgttttagaagtaacaaccgagtgataacgggccacgtcggccgctttggaaatagcgaccgagtgaagtctggtaacgccagtgttttttagaaataacagctgagttaaattgggccgcatcggccgttttggaaacaacggccgagtgatgacatggcacgccagcgttttagaaataacagctgggtgatgacatggcatgccagcgcttttagaaataacggctgggtgatgactgggcgctttttagaaatggcgtgtggcccgggaaaaccccatatgtactgcactgtcccatgcctctgcattatgtgccctagttttgcttttctgcatcccggccttctctgctctcttgcaatactgcttccgctctgttcgccagcaaggttgagatggcacccaagcggaaatccca

SEQ ID NO: 109268 - DNA, 298 bp, Zea Mays
attaagttacttcacaatctgttatgcacattattgtttagcttcataacaatcaacacatcgtgatggtttgttatccttaaaagatgctaagttgctaacctctcctcttgtatggagagaatagtcaagtgttactattctcactagagttaatttatgtatggctaggatcacaaatggattatgaaacctttttagtgactgctttacttgcatcaactagattcgtttggaatgcctttgtctgattatactattttaacttctctacgacgcttgatcagcttgggctaga

SEQ ID NO: 109269 - DNA, 375 bp, Zea Mays
atcatttcctatagatggaggggcatgacgtttttatcccaagtcctcgtctatagaatgttaatgttcgacgactgctatttctaatgtccatgaatcaactgttggacatatgtaatgtggggctcactggatgttgtcagagtcattagtcggtgtcatcaccaacgatcgttagtggccatttgaaatacgctaacaccaatggtatccatcggaaataaggctattttcgacctcttaagaccgacatacgaccatgattggagataagatctaaaccatcaaaaataggttatttctgatgataagtagcttacatctgatggtttaagccgtccgaatttatgtagtttcccgttgtgttggacgttc

SEQ ID NO: 109270 - DNA, 439 bp, Zea Mays
acacgatatcaaaatcgtgatagacaaagatgattaaaatttagtgtccattttattcaccgctatcacgtgttaaattccgcactcgtgatcgagcagacgataaacacctagggtgttacaggaactctccgggtacaacatcacctttgagcctagaacagcaatcaaatcgcaggtcttagccgatttcatcgtagactggactggccttcggaaccaccgcaatctcacgtagaaatcgtctggaccatccactgtgatgaggcatggtgtcacgcaggcgccggcagtgcggcaatcattacatcacccgcggactcaaatacagatacgtcgctcgtcccagctttgcactcgagtcagataagtgcataaacaacatcgccgagtacgaagtagtcatcctaggactttgaaaattatgagcccttggagt

SEQ ID NO: 109271 - DNA, 364 bp, Zea Mays
ctctattgatgttcacgagctggccaggcggcagcgggagacggatgacaatctctgtcgtcagtctatctccaagggaatcctttttgctccccgctctcctgacgtgcctctccatgcacctcctccagaaataaatgaatggcatcaacaaacttatggagttccattcatgtcggctgaagatgaagatgcagaagaagaattctttgatgacagggatcagtttgtcccgcctccccaccagggtgatccaggtccctcttcatcttatcctcccccccaggatccttcaggaagcactcctccccctgctaaccctgggaaggaaaactttgcagtcaatttggagtctcgattcttt

SEQ ID NO: 109272 - DNA, 639 bp, Zea Mays
caaacaggtgcatatatctggtagtgggtttgaacaagtctatcctatgtcttatgaaatcgtagttttggggcaaaacatgaagctgtactgtactgttcatcactccatcgtctcaatacacacgagaccagaatccaggaatgggctgcagacttgcgtgttactttatttagtagtttaggacttctgatgttggtttctaggggattatgtaatagggttgtttgctctattctaagaattttaatctgcatgacccaacaatcaccctagaaattagtgattcgggacagttgaggttctcgatatttggcctacttgccaattaatttatttttcttgtggtccttgtaggggtttgtgctagaggatgctaaaggtctatcacttaatggggacctcaatgtgcatccagtgattgcaaggtcttttcccctacacatccaatctttttggtaagatggtgaaatggatttgcccactttaagattgagcatactgaggtgtatgtgtgtatttatgtttgtgtttacctcctaatttttgtcctatatatttttatttttttgcatgataactgggaattgtatgttgtgtcacgaccatccaacagtttatgaactatactcatcaagt

SEQ ID NO: 109273 - DNA, 532 bp, Zea Mays
ttttttaagtgaaacacataaatgatacattataataggcacttatacagtgataagggggcctaatgtttctaagggagaaagtaaaaaaacgggaagaaaaaatgggtcgtatagttgaatgcatgtttcaagcaatgtaaagtcctcactaatttgccaatgcagcagcagtgtcactcctccgagcgttcagagccttcgtcgctgtcgttgcaagggacggtgtagtggatcacgacacaggctccggacgacagcctgcacgaagggttcaaagcacagccctcaataccagccctcgatgccactgcgtcaagacgacgacggggcaaaaaacaagaaagcatcgatcgagtgcattaccgagcactgacaaagagttcacagtaggttcaggtaaagaaaagccacgggcggcacttaactttccttgatcttgacgagcttctcctccttcctgaacgactcggcccctatggtcgcggacgcgacggaggcatcggcgaacctcttgctcccgtcctcggag

SEQ ID NO: 109274 - DNA, 437 bp, Zea Mays
tcggagtaggcgtgttgattgtttcatcaatttggtagttcctttagtgcggttcttgccctttgcggggaaaaagatcttgggatagtgtctattggctgaagtatgaagattctcctcataactggcgcttatgataatttttcggtggttggtatcgtgccgtgtactgttgacacttaagccttattcgttctgatgaacaaacaaatttaggaaatttagtacttataaactgttatgtggttatggaagatgcaatatttccacaagcacctaacatagaattcttttcataataggaatgtaaagagttgaccccatactaatactgagtatcactatttatggcttttactccctcattgccaaattgtaagtcgttttgagtagcacaaactatgcacctagatcctagaaaaaccaaaacaaattac

SEQ ID NO: 109275 - DNA, 519 bp, Zea Mays
ctcaaagtgaacttgcttctcatcattgggaaggccaccaagtgaagcaaccagggcttcaacttcttcgggagagggtcgcactctaagacccaaaccactgtcaccagcaggaggtttagacacaaaactgaaaaagggcttagaagatggcaaattccaagcagaatatgcaacaggagcaccaatattcgataccttgcccctcaatatcatctccagtcggctcaccagatcaacagtgggaatcctcttgtcagtaacctgggttgagtcagtggcaccactgtacaagtaagccgggtacgccctatcctttaggggctgaatattcttaaaaacaaagtctgcaaccacagctttagcggttagacctctctccttcagtagatgaatttcatcaagcagaactctggcctctgttatctccaaggtggtgggggactcaatccaactaggagtgcgtacgtcaggctgtctccctgaccgaggagggagggacttgccatgattttcaac

SEQ ID NO: 109276 - DNA, 543 bp, Zea Mays
ccggcactcttggacagaatgtcgattatcttcgccctggcgcggtcacgaatacatcctaaaatttcttcatcaaccccaccgaagagtaaagatctcggctggtaaccgcaagatattgcatattctttcaactcctccttgtcttccttggatagctcctgaccgcccaggtgccgaagatcaaaatccgcctcgtctgagggagtattattagtttctttccctttatctggcactatggccatggtttattctgcagctacatttgtctccgcggtcacatcttcaaatatatctgccacaatcctatcaatttttgacattgtcgttccagcttcaccagcatcttcagcttcggcagaaccttcacctttagctttggcacccccaggaatcgctattttaaccaccaatgttgagggcggtgtttgttcaattgcttgcatcacatttacaattcaccgtttcttttggtctctaactttctccttcgtagctgaaggttgttctttcctctgtaaaaatttcgtcagttctgtt

SEQ ID NO: 109277 - DNA, 418 bp, Zea Mays
tagcagggcatagtggtcaccccgagttaaataagaatgccggtcaatcatgaacaaactgagtaatcttgaaacccttttttattgatgacatatttccccttatacagagtacattatcatcccgatagcttttgaaatgcagctaggggtaaaacttcctgaggtgttctatattccaggagttcccaatttctgtgccgtccatttgagtgagacggtatgatcccggtcgagtgacttctgctactatgaatggtccttcccatgagggcgacaacttgtgtcgtccctcccccgttagaattcggcggaggacgagatctcccactgaaaaggattgttgtcgcacgaccttgtcgtgatagcgtcttagagtctgctggtatcgtgctgattgaattactgcattcagtcg

SEQ ID NO: 109278 - DNA, 386 bp, Zea Mays
tgctggctaggctacctgttgcggtgactatttgtgcgtcgaatgccgaagaccggtgttgcggtcgttttcgacacccgcggccgtggtcccagtttgaacttgttttcttttggggggctttcgtggtagtttattacatggctccgcctcgttaaaaaactcaccccctaggaggaaaagagtgcgggcctgaattgcattgtttgcaagaattacaaaggcactcaggccttgagactagacaaagaatttgcgtaggttatccacattccacaagtgctctaagtcttcgccggatggtgaggtgagcctgtaggcattcggggatgttttggtcttgacgatgtagggcccctcccacttgggttcaagcttgccccgag

SEQ ID NO: 109279 - DNA, 493 bp, Zea Mays
tcctgcacccgcaaggcagcctcaccctccaccaccatggagaaaaagatccccgacttccttgaccggcgatcaggaagcaattgcgccaacaaggataacgtgaacttcggggaacttcccaggaataccacctccttacccgacggcgcctgcaataacactgtcttccagaagcaggatataactgcgcgatactgggataaccaatccatacccaagataacatcgaatgccccccaaggaaatcaccaccagattggccgaaaaaacctcatcagcaagaatgacggaacacccctaacaaactgaacagctactaatggagccattagcagatctaaccaaaattgggtgacccaacctctgcaccgaaagaccagcccgcgacacaaaatcctccgaaacaaacgaatagctagcgccagagtcaaaaagagcatggcctgcaaacgaatcaactaaaatcgtacctgtcaccacgtcaccttgc

SEQ ID NO: 109280 - DNA, 694 bp, Zea Mays
agggggagagaagtaggggtttgtcatgcatgtcgagctactacgccgcctgcccatcaccgagctcatccaccaggcttaccggagctcatccaccagcaccaagccatgcggcggagctcgtaacccttgtctcccctcgtgatagaactagagtgcctgacctttcggtgaggtggataatttcgatttggtggaggaggtgaatctcgtgatccaactatgaacgaacaggtcgtggcaccttagcaatcgcagaactaactctaaatggttattgaccttgctggtggcaaaatcaacctgaacacgaagttctattcatgtgagcaatcgaagaaacaagcaagaacaagatgtaagtaaaactaaatatcaatcactcatgagttggggttcactaggctgtccacaggtgcccgttgagcacaactgcagtacaggaagtttgcacaatggctaaaactatcaaagaaaacccaactctaggagggggcatagcccctggttaaatagagaagaggaggtgggcgcctagcctccccacaaggcagaacattagccgcataatcagtcaatcagtctcctgcccacaaggcagggaataggcacccaatcaaccatggcgtctccttgatccccattccttatttaggtggcacaacaccttcttgattatttctttccaaactaa

SEQ ID NO: 109281 - DNA, 283 bp, Zea Mays
gtgacacttgcagacgtgtcaaggccatacacatgaagattgccggtccattacaatctttacctatcccaacatggaaatgggaagatataagtatggacttttattgtgggattgcccaggaccgcaaaaggggtatgactctatctgggttattgttgatcggctcacaaaaattgctcactttctgccagtcaagaaatattacccggttcttacctatgcggaattatacattgctcgcattctcagtttgcacggtgttccaaagactatagtgtcg

SEQ ID NO: 109282 - DNA, 452 bp, Zea Mays
cggcaatgctttgggctttatggcttagcaggaatgaggtggtttttgatcgtgataatccgaaaacttacatgcaggtaatctacaggggaacctactggtgccgttcctgggcgctgcttcaaaggcatgaagttgcaaaggagaagctagtccaggcttgcagacatctggagaaagtggtgatgatggtgtttgcgcattatggatggcgtttctccaatcgcattactctgtagtttttttatgtctttgaagccctgcgtggttttccctttttacagtttcctgtgtgtttgactctgtggtcgcgtggatgctgtttatgtagatgttggctcggaccctctacggaggagaaggccggaactctttttctattatctaaaaaaaatatctctcatggataccgtgagttcgtgagatggtctttgaaaagcttttgaataagc

SEQ ID NO: 109283 - DNA, 2685 bp, Zea Mays
gcctttggctccggttgtttcaggctgttggaaatatgaacatagatgcacaatctctgatgcttgcaactgttgcgaaaagtcttgtgagtctgggctacgaggttgaggtgagtttacacgcaacactattttccacaggttgcaaaatgcctactagtttggtgggtttgccattcggttgtgatattgtacccttgagcttgtgaaacttgttttcattggtgaccattcttgattttttcgatgttgacaatactttataccccatgccactcatggtgttgccatggatcaggttttagcatttacagatgggaaagctcgtgatatttgggaaaatatttgtcttgtaaatgttgtgaacactggggctttgaaatctgttgactggtcacagtgagttgctaatactttaaaattcgaatattttcactgctattcttattccatgtcttattcatctattacccttcttttttctctgttcctaattttgtaggtacaatgctgtgctagtaagctctctcgaagggaaaggggttgtttcaatgtgagaattcttctataacatgtcttatgctccagggttggcatgtaataaaacacaatttgctaatgaaaaaacggcttagatgtttgcattccattgtgtgtgtgtgggggggggggggggagaacagctgatgtactcattgttttgtgaatttatttattccattatatgacctttcattttgttcatgtaaaattcgtttcttggaattcatttccattttttctgtagcagttctttgtttggcacttagcacattcatattgttttcagtcttatgcaggaaccttttcggcttctaccagtgatttggcttatacatgaagacactcttggacaatatcttagaagttatgcaaagttacatgattctattcaaaatgtcattgaagattggaggactcattttaatgcatgcgcttatgttgtttttccagatagctaccatcctgtatgtaccaccatcaactcaatactgtataataatttatgaaatgcaatttatgtctgacataaagctatttgatttcagttgttgtactcgcctcttgattctggtaactttttagtgatttctggttctccagttgatatctggtctgctaaaagatttggctcatcacattctgacgaaactacaagaaagcagcatgggattgaaaaagatgatgttgttattttggttgttggaagctacttattttttgatgatttaccatgggattatgtcacagtcatgcgtgcatcagctacacaaattttggatatagcaaaaactaaaaatctgagggtgcagtttgtttttttctgtggaaatggctctgatgcctacaactctgctttccaggtaatgaatattccacaaattagacagtggcctttgggagaaataccttgctattgaaaaattccaagaaataccatttgtacttcagtgatgggttttctttatgtcatctgcttgaggagacaatatcattaccatattgtgcccatggaagcatccttttaaagtcaaaagtaactggcagaacttggccagaccttcatatttttcctttactacatgatttttttggcatttaaagtaactatgcattgcatttgtgaacttcactaaagcaagatcttgaatttcttaagccttcaagcttgtatgttttgttggacatgcttttagctggctaacctttttatttctaatgaatatttatcctctagttaattacttgggcactttactttgcggtaacctcatatgtttttttgtcaaacaatgcagaaagcttgacatgacacacacaccagccttttcacaagattacatggtgaccacacatattagatgaaataaacacccttcttgtccctgctctctccctctatgttatttttttcttcaaaaacattttagaatgggctcttgttcgtctgtttagtaattcattcttcccgtgtttacaaattcacgtgctaatataatcctaatgtctgttttacaggaacttacctcacacatggggttacctgatgtctccataaagcgattttctgtgactcatgatattagaaacctgttaatgtttgtggatgttgttctctatggatctttaagacaagaacctgtcttccctcctttgttattgctgtccatgtcctccgaaattccagttgttgcaccaaatcttactgttataacaaaatatgtatgccactcgatcgaattcttaataattcacttgtaaatctttgccactacttttgacaatttgttgttccaggtcagtgatggtgtccatggattccttttcgattctgctgacccaagcacgatttcttcagctttcatacaaattttaggagaaaaaaagcttttggatactgcctattctgttgctctggaagggaagctactttccaagaacatgttagcacatgattgtatcaaagctcatgttaagcttcttgaaagtgttattcattttccttcttatgcaaaattgccatcttctgtttctaaagttcaagaacgaacatggttgtgggatcctttcgagttgaaagctgcactagaaaatagtttgttggaagatgaaagccatgccagcacaaaggctgttgatattctt

SEQ ID NO: 109284 - DNA, 445 bp, Zea Mays
ggttctagtcgtgttgattggaagccggatcgtctgtgtgacatctccaccaaatcgatagttaccttcacctgacagaagatcgggcacccccgttcctatcaaacagtgttctctccaccaggtctcactatagatacatcatgaaaatatttacctttcatagactcaatatgcccctttttcatagttgatttcccaaaattagtatggcttggtctccatggtcaatcttcggcatcatcagcatcacccccgaagtcagaaatcgtctcaacattacttttctccatggccttgtaaaacccaactagcgcaagatcttcactcttccttccccagccatcttaactcaatctaacagcagccgaagctcaaaaacaagtgcaactctcaatggctcaaagcaacaaagtagctgaatagcacgataaatgttttatag

SEQ ID NO: 109285 - DNA, 530 bp, Zea Mays
tagaaacattggacttttcgatcagatgtaaaaagcttaaacacaagccatgaagcttcggtgctcaattgttcctctactacgttcgatcagatgtaaatgcttgaatacaatccatgaaacatcagcgctcaattgttcctctactacctgtgacaactatatatatagtgtcttcgtggaggcgtaacatgctacgttcgctattgaacctttatcctaactatcttaggatgtatctatacttttgaacctgtcagtacctattttatgtttatatctttggaccttcattttattagtaagtatgtttctatttcgtatgttggtgcagataattatccgtggtaccagcctgcgtgcaggggcgcgcttaatcattagtctggctggttttacaggcgctagcttttgcgtttttccgtccgaagatcagacgtgaaggtggtctcttgcacctcaagattaggcgattagcccatccagcaaggtaactctgggccatgatcccacagcccatacaccaaatc

SEQ ID NO: 109286 - DNA, 1354 bp, Zea Mays
tcaaactttttagaataaactagataaaatccttgaactaacccaattggatccaccttaatcaaaggtatagaacccaagatataaaataatcattcttattgtgtcagacaattatgacaattgattaaactctaatcaaacaattaagcgagtgaaaggttaattatctaaaaattgttaattaggaaatcaaaacttgaaaaataagaaatcaacctaaaactaaaagcaaggtggtaaaacaaagagcaaagttaaggaacaagattaccaacacattgacatgagagaattgatctttattactctcatgatatattcataagatgcttcacatgggcatcctgcaataattcaccatgaattcataaaaccttagagcagttctctcttttgcctctatctaggaaaagcaacctctaactttgcctctagttctataggtcaccctttgttcttttactcttcgatgttctcgtgatgcacggaccatgagcacatggcctccttttcattacttgccaagtacaatgctcacttataagaatgttgtggttcatcttgaaaatcaaccaactacaaacaccaacttctaatacctacccatcattcgtccatggtgcccctcagcacgcatgcatgtagaaaggttctaggggaacaccacatactgttagttttaggtaacttatatatatagtccaagggtatgcgttatagatatatacaaaactaggatatgtgcatacacaatttgttataatgcataagcatgctaaaacaattcatgcaccacatcagtcatcaaatcatgtccaactaaggtactacatcttgcttggcacaatgcacacatctgagtagtatgcacaccacaacactattttaacaacaccaactaagacaaatttcatgctaaaatccgcatatcacacatgtacatatcatgaagtgaccaccttcattcagtctcatctagtttcagtccatcatcgaccacattcttcctcaagcaacatctgcacatgaatcaacatgcaagtgagtactagaacaagttggatgagtaaccctaagctctacccaaagtagagaaaaatgagaaaacccaaaggttttgtgaaaatatctagcaattaatgttcaatatctatatgatgaagcatgtcattccctttatcccatgaacttgaggaagtgaaattttatatcaatatgcttattttaaatgttgcactaggttcttagcaatacatataccactagtgttattataaaaaagtgcaacaatattgaaattgtcccataccatactcttttaagtgtagctatcgtccaaagaatttgggac

SEQ ID NO: 109287 - DNA, 401 bp, Zea Mays
ctcatacttccatcctttttggtgacgaacaggactggtgctccccaaggagatgagctaggcaaatgtaccatttctattgaagttctatgatctggagttttagttctgccaattcggtaggagccatgcggtacggtcttttttcgattggtgcggtgccgagaattagatcaatgtagaactccacttctctttctagcatcattcctgagaattcttttgggaatacatccatgaattcttctactatagatatgctttctgctgctagattaaacaccattggatcctgggtgggtggctgagccttacatgaaactgactttccttggtggtaagtgagaaggatggtcttatctgcgcatcttacgacgacattatgcttggttaactagtcc

SEQ ID NO: 109288 - DNA, 496 bp, Zea Mays
caccctcctgtcagtgctccactccgcactgcaccacctccaccccatctcccatggcctcccggttcttgatttctttcccctttagtatggtagcttagctcctccgagcagatcaatcgatgactttaccgatagggtgtatccctggacaacatctattccgtgccagttatgattctgtgacaaaagtttgctagaaaattggtggctccaatctgatcccggacaactcttgtttaccagtaagtaaatctggtttttcttgcaaacagggagattgcaggagttatagcttttttagatgcagactgtggacatgtgggctcgttgcattgtagtagcgtgagtgtttctttgcctgttttgacaaaagatattttctgatggagcttttagttcacaaatcatagatgacttgacctcctcgaaaatgaccttattacttatacgagatgattgaagataggaatcaaaatatgcttgtagttcgatg

SEQ ID NO: 109289 - DNA, 360 bp, Zea Mays
cactacgtaggtgtcgctggcaggttaaagcgttttccagtgctatcgctctggtcgtttgcatgtacgcctgctcactagcgcgacaagcggctgctggatatttgaatcacagtcggtccccctggtcactataaagtccaagccgagcactgctttctcgttgtcgtgcacgccgtagaagctagcaaccggttaagctccctggcaatttttgagaagaatcatttttctcctctatcgttcctggctccgcggtgatgagtgcctccatggtcagttgagtcatcggaacaacccttcgatgccgaagcaccccgccgtcaaatatctccatgtgggtcattctctctattcttc

SEQ ID NO: 109290 - DNA, 359 bp, Zea Mays
ttcactcgtctagtcgataaatgttgtcataaataattgcgctaaaatttggtcataagagtgcagtgggcacgtggtgttggttggatgtgataagtagattggaagtgtgggtttgttgagcactgtgttgttgaacgtgtatgtcgaagtacattgaagtaataattgtgttaagttaatcggtagtgtctcaggtgcacgccacgacatggttgtatgcgagacaaggtaatataaggtgcgcttgacacgaatgttcggtcgatataagtagaaattgttttggcttaattagagaggtggtgacatgccaaattagtcgttgctttctctatatttataagtcgagtcgtgtc

SEQ ID NO: 109291 - DNA, 415 bp, Zea Mays
tgggaacccagggtcatgatctagtcctacggcatgtaccaaaccaagaagggctctgcaactctcccccagctgggaaggacccttcaaggtaacgggaatacgctgacccgagggtgactatctagctatgactgaaggagtgcctccccctagtgctggagcatctcgtaagttctatccataggagcaagtctgaggggtcaaatttgtttcccttttgtaactaggtaacgcatacgtgtacgccaacccggtgaggtccgtccccataaacccggcctgttggtctgcacacatgcatgataagttataaagaaaagaattaccccctcagatgtgcccctatgatagtttcatcttactgctccatggtcttaccttgcagttttttagatattattttatctaaccc

SEQ ID NO: 109292 - DNA, 273 bp, Zea Mays
cctatcggaggagaaatcctctgcccgggtggtggaacgcacctgccctgatcataatatgtggaggggggctaaaggtttacttgaacgaatgattgaacacaagaacataggggtttagagtggttctggtcgccggagcataatatcttacatccactgtgagttgtattgcttttaatgccatgggtctgagcgtatgagttggagtcgttctcctgtatcgcttgtggtctccttttatagtctaagaggagcgcgcacaagggaggt

SEQ ID NO: 109293 - DNA, 635 bp, Zea Mays
tgtgtcatcctttgttgtgcctgtagcaggtgctgcctaatagcatgattcatcagctgccgttgggataaccaagacttaatatcgcccatgggtactgtatgtgtagaataaataccaatattgtgtggtggtcggccatacaacacctctaagggtgaggtacctagggaagaatgcagagatgtatggtaccataattcggctagtggaagccaccgtttccactgatggggatgtgaaatcacaaaacacctgaggaaggtttccatatattgattaactcactctgttttcccatccgtttgtggatggtaagaagtgctcatacgtaacgtggcactagacaacttgaatagctcctggcatagggcactggtgaaaatccagtcgcgatccaacaccatagcttccgaaaggccgtgcaaacaataaactgaatccatgaatagccgcgccacttttaaggctgtgaaggggtgagccaaagccacggagtgagaaggttttgagaattttgtcaactataactagaatgcaatcgtacttccctgattttggtaagaggcatgggtatttcgatcgatccagtttggcacgggcacagatgtcacataaactcacaaattgccgga

SEQ ID NO: 109294 - DNA, 352 bp, Zea Mays
gaatttttgctttcttcggcgtcggtgcaacagaagaattttttggtccacttttcctttaaccccctctttcgagcagggaagcagtaatcagggtaaatgaatccaatagaatcaaaaaccctgttcaatctttgttttcctcaggcaccgaaggcaacattcatggcttcgtcctcagccttcgtataggcccctaacaattcatcacttgttgcttcgatggcatcaagccagtcatcgtctggctcaccaaattgattcctaaatcgataagtatacttcaggtgaaccagatggctttttccggtatttgcatcagcttcagcatccttcaacatttcccatttgg

SEQ ID NO: 109295 - DNA, 358 bp, Zea Mays
cgcggtggttgcggtacaggtacagctagctactaggctggggagccgccacggctagtcgatagctgtggttcctgtgtcgtgtctggtctggcagactgggccagtggcattgcctgattacagaacagctttatgcttcattcaatcagtttgattgaaataatctattgcctggatgtgcatctgtatgttctgtagcatagcatgcgggcggtgggcagtggatgcagacgtgcagggaacaagacaaagcgatgggatattgcgtcaagtgggagggaggaggaggagactgcaggggaggccgcccgtcagccgagaaaaaagagccccctcctgtcctgtattgtacacc

SEQ ID NO: 109296 - DNA, 448 bp, Zea Mays
gtaaacctgcaggccgcttatgctcggccttcacgcgttgacatacttcacaggcggccacatacttagaaacgtcaaccttcatccgcttccaccaaaagttttgcttcaaatctcggtacatcttggtttcgccagggtgaacggtgtaaggcgttttatgagcttctctcaagatatccatcttcacctctgatttctgaggcacacaaagacagcccctgaaacgaaccaaatcattctcatcaatggtgaactcccgtggtttaccatcaccaaccctctttcgagcttcctgcaatagacgatcctgctgctgagccgcacgcactctctccatgagggaggattgaataagcatccgagtctcctcgctagtggtgccgacataacacaaagcgatccccaaacggtccagatcagcgatcaacggcaaggccactcttgg

SEQ ID NO: 109297 - DNA, 3147 bp, Zea Mays
aaaacaccgcggaataacaacacaacaaaaaaatgcaacaatattcaatgcagaaatgccatacaaacgacttccattagttcgaaccaaaaggagaaaaaaaggaaaactagatcaaatgacctttgattgagctaaaattgtgtatacaccttctctagaatgtttctagaatgtttctacgaagtccacaaaatttaaactccagaagatcaaacaaactccaacaatcaagaacaattcaggttagggttttctcaaacttgctcgaaaaacaattttttgtgctcgagttaaatatgttgtaaccactttgcgggaatgattctcagatgtcattgcacatttcattccaacacaaaagtttccgagagcttagatatgaaagattcaacaaaagggctaagatgagacaccgagagggtaagaaccaagtactacaaatcaaatcaaaggcaagaacatgagccacaaagttcagagaaaatgattgctttgattcaaccatcataggccaataactttgtcagagttttatagatgataggattataaatttcagatctggatctaggaatctcactcaacagaaaaactagaggaaatgaaaaaacctaaactagaatgaagaaaactcaaatgttgaattattacacattcataacatgctaggggaaaaatggtccatcctgagattggtgcatctgagggtcatgggctcttcttgatttacctcttctcgtgcaagatttgggatgacaccatgtgccaccaccagtttttgctagaactccaatcatgttttgaggctcaaaccactaaacctcttataagtagcatatcctatacgctcgctccacaatatcaacatgtgttaccaccaatcctaaacctttcgatcaccaagtatttcattgcttttgcttgacttagtaaattgtcatcttaacttggtcaacatagtatattgctccatatacccttgcacttgtcgatatccctaagtgtgagccattatagttagtctttgttggcgccaatctgggcgtcaatcactgaagagttgtttctcttagcaggctctctgcggcggcgcagaccgtccgggacggtccacagcttagggctggacggtccgcgacctagcgacaggagcgggtctttcctgtgtccgcgaccgtccgacctttcccaggtagcacatatggtgttcaaaagtcttctaactattttagccccatagttcaagcatcatcattagttctttaccatccccaatccatcatcacgtatgaaccctcttaacattaaccttatgtcgaccatctccgaactccacattgtgcaccataagcaaagaaacatattgcacatatcacattcatgataaggttactcaacactatgggcactcatcatacttgaacaccttaggcgtaacttaaccatgtgtacgcaatctttcctcgatgagtgcattgtcagcaccaacataaagggatgaatcaaaacaaaagaaaaatacagaactcactcaaatgaccaaaagtcagagaaaagccaaaacaaggtcaattgaaatgagtaaagtttggtccctaaagacatgggcaataactcaacacaaccaaccaaaaatagctagtcctcaagaagaggccaaaaatactcaccaccgctaggaaaagatcagagagccaagaaatgttgctagtcccttagacgaggcaaagactcaatacaactagcaaaagtagctcagacacaaccccttgaacaagtgcaacttctcaaaaaatgcatgctttcaataagtactctcccttttggaaattaattgtttgtatgcaacattctcgcctttgttggcacatccacacatcaatctatcaaaaactacaaccccctcaaactatgctatgaaatgtaagggatacataaaatgcaagagatttagaaatatatcaattacaatgaaaagatactctaagtggtcctatcatgtgcgttaagcaacaaatccatgtgttagcaaatgctcaaactgatggtaagatacaaattgtgattatttaatgatttgagcaattttcacatttacataaggtgttcagtactaaaacatcacttaacgagtataagcaggaaaccaacctagtgctaacaagtgtattcaagttggatatcccaagtagcagtcacacaacattccaaagagaaatctaatacttgtgttcgattaaatttcatcaaattttctaatttttagcttaacacaagaattagtcaaccaagtgttgcgagaggttataagcactatcttgtcttacttttcagccaagcgaagcttatgcaagaatagcaatcagaagcttaaagccacagtttcggtactacactaaattgctctagctagtttgtctcaagtgcaattagaagcagtcccgatgcggtggtgtgttgtagtggaatatgcaaacccatctctatcttttcatttcacttaacatggattcaaacttttagcacaagtttatcagagtgtatccaagaaagtgaatcactcgaaaaaagacatagccacctagcatatacatgatagcataaagtatctcaacacatcctacacatgctagttgctaatcttatcagttaacatgttttcaagtttctacaattattagtcatgttcataagttatatacaagcttagctcatcaaaattatgtcaaatgagaaagtgatcctaagcttgcccaagcaccatcgtgtactacacaagacatatcactaacaacataatctcattctaagtgatatacatatgaagcttagaaatgctctatagtacaagataagttgcaatgcagatatgatctctcaggaaatggaagcatacattggtatgtttggtattgtagtgaagtacagaattctttgccacacgaattgcacccattatgtcagaaagcaaaggcactctcataagcaaaaatctctcaaggtggttatcatccataggagctatgagcaacagctagtgacaacaacatattctatttttgtggtggattgtattacactaaactacatgtaagaggtacaagacacctaagacaaacataagaactaacagatactcaaagc

SEQ ID NO: 109298 - DNA, 494 bp, Zea Mays
ggctaccactcatatctagctctggctacttggagccctgatctcgcattccgagtttgatgttgttgacttccttatatgtgagatcgaggacacggtattggatggtcttcgtgcccggcaacagctgccatatgctcactatctctgctacatcttcgcgcagctgatccagccaccatagttctagggcactcttgaggcctcaagcctccattttggctccgatcgtccagcccctgaggacccagcaccagccccaaatccagtgatagacactcaggcagaggatacaacattccatcagttcgagactcaggtcacaactattcttgatgatgatgatgacaatgatcatgaggctaggagttccagtgctgctcctgctggccctcctgctctggctgcaatcctttagactcttacgcagcagcaggctcttatggcgtccgagcaggcacgactggcagctgagctggctcatcaggcagcgg

SEQ ID NO: 109299 - DNA, 1187 bp, Zea Mays
ggttggtagagtggggtttgtatgggtgccaaaggatgttagaatctttacgcagaaaatcagaagcactttcaggattgaaatgttaagaagttcgaaataacatgttcactaacataggtttcctggtaggatggtcataataaggaatacgtggcttcgtcactttgttaacaaaagtgtgttttaggtaaactcccatccatccaatgagataatgaacaggccaaagtcttttcatataagaagggccaaccgggtctgtactgattaatctcagggagtaatataaggaacacaaagctggttgtgccaaagcaaaacgtcgccccaaagctatccatgaagccatcaccaataacccgcgacgaatttgtggtccccctccgataatagcaaagctgcaaagccatatcgctatgaaagctgctttgtaaataagcgaaagttccatatcatcagagtgtgaaagtccccttggtccgttatgaaaacagtcacaccattcttgcagcgatacttctccccccacttgtaattcatcccaaacctccaaaagttgtgataagcacttgggatataataacatggatggttcacgctcatgatgtgaagggacatactcctcataaaattccccatccattggtaaacccataatataatgcaaatataagagtattacagtacgctcgccatcgtggaataaaaaagtgtttgaatctggattccatcattccagcaaagatttcagtagcgaaggtgagatggaatattgcccaaataaagaacaataaatggccccatagataaaatccataccttctccatctcctcttaaattaaaagaatgttttgcaagaattattgtaccccattccgcataaccagaaggaataggaatatactcaatatcataattctcccatcctaaaccgtgcgatatcattctgttccccaaagtgaatgcttgctcaggttgtttcgagggcgcatatggataaaaacaaattccagaaatggttggctgagatctccatccacgagtactattatccagttctccaatttttagttcacgatttattatcactgggttggctgcatcactatttcttggagcataaatttgactttgtgccacgtaagaaagtggtttcttcccaagtattatatgtgacatattt

SEQ ID NO: 109300 - DNA, 413 bp, Zea Mays
cacgcctctcgccagtagcatcatggcttgcgcttgcttggccctggcggctgcaccacacgccggtaggaagctggatccaatagccgtatccaccaagccagttgccgaaaagcgcactcctcgacgataatgctagggccgacggagatggagactggcttggaggcttgccgcggtcaagggtcgacgtcatgctcctattgaatctggaggcccggtcatcctcgcgctcaagcctcaaggtaattttcaagcggttgttttcattggcatttgagttcgattattattatcgtaaccaccagcctccagttttctcttatcaagacagaaatccgtggtttttttggtattatgttttgtgactctggatctgaattcaatgttcttgatgtcaacgatgaagatgc

SEQ ID NO: 109301 - DNA, 318 bp, Zea Mays
gcagaagttgaacccaatgggtgtgaccgtgcagaagctaaacccaatgggtgtgtccgtgcaccggctattgtccgtattttttatgaggacgaagaagaggaagaagaagttccgctaattcgtaagaataaccggcgttacagaggtagtaggggggatactgatattccttctccagctctatctgctcttgtcagccttcaagagttgtccatagcagtttttgatcgggcccttgaggatgtcgttcctgaagatatgctgtcggagccgactgttggcgatatgatggatgtttgctctgaaattccagac

SEQ ID NO: 109302 - DNA, 436 bp, Zea Mays
aggacattgttaagacaaaagttatgagaaagttgagtggtgccagtggaagtgacaggaagaaggttgccattgccaacaacaatgttagagggtagatgatgagaagaagagaggtgggaaagtataccagcgtcgaaagtcatgtgactggaggcacctgtgtcgaagaaccactcttgctgctggggatgttgaagagtggtggtttggaaattggtggcgagttgttggatatcccaaccaggagggggtggagcagcgccagtgtagtcaggggccggcccatatgcttgaggggggggggccaggagcctgcccactggctgggaggaccagcaagaaaggcctaaggcggttgagttggagcaggaggccctaaggtcggtggacgaggtgttggcggtcgtgaccctagccacatgtaaatggatcc

SEQ ID NO: 109303 - DNA, 682 bp, Zea Mays
ctcaggtggcatacctagtaaatctttagggaacacatccgggaactctgacacaaccttgattgcctcaaggggatcgacctccttgctatcaatagtcatttagtgacaacctccttttcttgactcgggtgagactagctcagtcaccacttttctcctagtggggacaccaacttcacaatcctcttatcacaactgataactgcttcgtacttatctagccaatttatccctaggataacatctattccctaagtacccatcactatcaggttagaggggaactctatcccccttatttacacacttacattcaggcatattctatcagttcaaactttcccaccggccgaatcaatttgaattggtgttgtcatggtggttattggaagattatgcgcttctacccatgatgcagtaatgaatgaatgcattgctctagtatcaaataacacttctgcaagatgggattcgactgagaacttacctactatcatgcctagtgtttcctagacagcttcggcctccagatggttcagcctcccatggttgtagcatgtctgaacacaattgtctgctccttgctaaggtacattctgccttgttggggcgttgggggccggctgctattgagccatcttcttcgggcaatgcatcgcccaatggccttgctccccac

SEQ ID NO: 109304 - DNA, 870 bp, Zea Mays
tcttagtcccatctttcttctccacaaatagaattggagcagcccaaggcgaagtacttggtctgatgtaacttttctctaacagctcgtcgatctgcttcttgggttccaccaattctggtccagacactcaataggctctcttagaaataggggcggtgccaggttcaagatctataacaaactttccgctcatgtggcatgcctattagctcctcaggaaacatgtcgagaaactccaatacaactatgatggcctcaagcaggttggcctctttaccatctacagacatctggtgacaggctccttcctctagatcaggcatgattagttcaattactatctcttccccggatggggacactaatctcactgtcgtcttgtcacaactgatagttgcttggttcttgtgtagccatttcatccctaggatgacatctatcccttgagtacccgttactactaggttagcggggaaatctatcccccttatttcaatccttagatttgagcacatcttatctgactaaacttttcccccaactgaattaacccttagaggtggaatcattggttctataggaatgttatgtgcttctatgcatgatgtagtaacaaaagaatgcatggtacccgtatcaaataatacttttgctggatgggattcgactgaaaacatacatattgccacatctggtgcatcctggattgcttctgcctccatgtggttcacttttccacgattgtaggcctggccacatcctcctgatgcctgctgtggtgctccttgtcttgtcggggtgttgaaaactgactgttggtgagctgctttcttcaggcattgcatcgcccaatgaccttgctctcca

SEQ ID NO: 109305 - DNA, 354 bp, Zea Mays
gttcaattggacggttcggtgagcatcaagaacacgagagggtggtggaacaataacacagagggcgagatcggacctgagttgagctagccgcggcgaggtgttcttcgcggtggcggaaatcgatttggggagaattcaaaattcgtgagctctcgcgaacgattgagggtgggattgggggctttggtttcgtgatgatatagcgcagctgccccggccttcaatttatagagggcttaggcgatggcacgcaattcgaccgagcaatgctggcggccggagatagggaagaacactggtgcagcggattcgtgtctaccgtcgtggcaacttcaccggcgacgattagac

SEQ ID NO: 109306 - DNA, 296 bp, Zea Mays
aatcgcgtgtctcttgtgttgcttttctgtgattgttttgttcacaagaactcgcttcatagctacttggtcacactaacactttaataatcaagtttgtggctatttagtgtttgattttataggatcacctattcaccccctctaggtgctctcatattgcagtataagtcgtttcatggtgcttagtaaccgaataaaacaaatacaaattttgtgtcatctcctgcttgtttcattttggtgtgttaaatgttcattgagatcctgtgaacatcgggcgggcttgatgctct

SEQ ID NO: 109307 - DNA, 435 bp, Zea Mays
cttcgggggtctctttagaaaatgttacaccgcgaaggggtatctgttgatatgggtcgtcagattagaaacggacgtcccagattaaatacgatcaacccgaaccggtatgtatcacgggcgctctgatccatattcatcggcttggattttaaacattcgagatataatcgtgaccgtcaatcgcagaacggacgatcacagattgaatccacctaaacgctacccctgatctaatccctaccgtccagctcggatagacggcagggaggtcgtcttctccctcctctgtgcccaggtggcggcggcgccatcccacccggtggagttgtgccagagaaggccgagccggtgcccaggtatcccaatgcgtcgcggctaaagctagaggcagctgaggatacggtgaaacagaagaggagattactcacccgc

SEQ ID NO: 109308 - DNA, 341 bp, Zea Mays
tctcaggctcagtggttgcatcaacttgaggctcaaatgaagacatcctacacaaagcatgtgcacgtactaattaaacatccaagccaaagtgtccatgttaaacattgcatagaacataacagaagaggtggaggagcagcagaagaatagcaaaggagggagagggaaagaacacctggaatactggatgattgggggaagagaagggttatgctgacctggacgattggggaagagccaaagaggacaaactggcaggcgacaacaacagacctggaggctggggaacagggcctgaccgacggcgccaccagcagcttccacttttttccctcctc

SEQ ID NO: 109309 - DNA, 437 bp, Zea Mays
ccaaaacagggtaaatgtgtacgaattttagcataaattgtagatctgtttcataatgacgaatgtggcccaaaaattacggtgtaaaaatcgtgcgtgtccgatcgtgcgcgggttctggctcgagcagatttttgcgtaaaacgtaaaccaaaacagcgtaaataaatgtgaattttagcataaatcgtcgcgcagacctttaatagttctcaatgtattagctaggcaagagaagccaaacaacatacaaatatgtatcctaaagtaatgaaccaaggatctattatgcatcctttagtcaaggcacaacatactgccaactctaactataaaagattaattcacgaattcagataaattattgaatgcaacacttgagggctacatttacacgccacatgttacctacaataagacaaaactataggaaaaga

SEQ ID NO: 109310 - DNA, 340 bp, Zea Mays
gtttgccaccaatcacgtgcgccagtaaactcccctcctccgaccgccacgcgtctcgccccaaattcatcagccaccgcttaacaaccctataaattgatggctaggtctgttgcaccatgtaatcacgaagccgaagcacccgctcccacccttaatcgatcaccagagctcacgaatttctgatttcccccaattcggtttccgccaccgtgaaacacaccccgtcgtggtcagcccaattcaggtcagctcctcccctctgcttccttgtttaagcactcttatacgtatgtgatactcgccaacccacctaattgaactggaaaaccactggtca

SEQ ID NO: 109311 - DNA, 484 bp, Zea Mays
aaaatatgaaggagaataagcatttgaattataccatccccaagatggataagtatgaaagtacgaaggagctggactgtgttgcattggcattggcggcccaaaaggaggatatgttgcagatgcatgaaaccgtccccttgccaatcttggtctctagacttgcgcttcagtggtgattttgttgtcttcaaaggtgctctagatgacttagcactgccagtttgatcaacaccctttgtcttgatttggttgtgatatttagccagaagttggtcaaaattaaccgtcaaccttttacccttttgtttatcacgaccttcgcctgcaaaacttttacatttggacataccttgtataccatgccccccagcgccttcggtcttattagcctttcttctgtccagagccttccgagtaaccactctgtgtgatagatttggcgcgcgagggtcaccaatgataatatttttttctttatcgg

SEQ ID NO: 109312 - DNA, 486 bp, Zea Mays
gtaacaccccaggtgttacccaaggccctggccaaaggagcacacttgtgtcctgcttaccctatatgctaaattggaaagtgaaggcactaaaagctttagaatcatggttaagctaagtattgatcataacaagaaagaaaccctagccttcatccattctcactcatgaaaaatattctaaaccctaattcccctcttaagccattaaaccctaaacatggggttaatggggaaagagtgggcaaatggccaaatcatggaaggaaacctttaccaaagatgaagtatattagaaaatctacaaaatgtattaaggaagatattacaaaaaggcccaacaaaaaccctaaatcagttcactaagtggagagcacaatagagccatcaaaatttctctaagtcccaaaaccaaccctagcctaaagatcatatgtgttcacctttgtgctggcgccaaaaccacttggaccaaataacaaaaag

SEQ ID NO: 109313 - DNA, 470 bp, Zea Mays
gctctgtggaccgcctgaaaggcccctaatggaccggacgcatggctcccctagggacttcagtcgggcgcaactggaagtgagcgaagacgaaggttgtgtgagcatgaagacttcggggccaccttccgtgcatgcaaaggacctgaggactcactgaccactaaaaaacttggtacaactctagcagaggatcgtgtatcaggtcgtgcgttgtaactcctctcttagttggcaataaggctgaggagcccccacaaaatcacacacaccctagtagtatactcatcttccatgtctagaactctatatactctccaatcaccaagcaataagcactcacaaactcacatgacgtagggtattacacgctcgagcggcccaaacctgtataatccattgtgttatggcgtgccccgcacaaactatcaagctgcgattgacctcatcgtcctcccaaaacactacat

SEQ ID NO: 109314 - DNA, 377 bp, Zea Mays
gaagactggtgggccccaataacactatacctccagggccattaccatccaaccgaccgaaatgaggccaaacgactgaaacacaggagcagggattttgcaatagtcgagggtcagctttacaaaaagggcatcagccagcctatgctgaaatgcataaccgaaaccgaaggccttcaaatacttcgcgaagtccacagcggaacctgtggttcacatttaggtcccagggccctcgcagccaaggtgattcatcagggattttactggcccgcgataatatgcacgacaaaccaagtcaccaggtcatgcgaagcatgccaaaaattctcccctcactcaggcgccccttcgcaattcaccaagctcatcaccca

SEQ ID NO: 109315 - DNA, 391 bp, Zea Mays
ggcagattctaggcagaatatgaaaggggagcaccagcatttgaaaccttgcctctcaccatcaaatcaactccacacgtcctcctcagatattctcttattggtaattcgagtggggtcattaacaccagtgtacgggtaagcagggtagactctatctttcaaaggctgaatattcttgaaaacaaagtcgacaacaacagcttcagcagtcaagcctctgtccttcaatacacatatctctacaagtagcaccaccctggactcagcaagccctaaatatgtggggatttctgtccagctaggcgttcggacgtcgggctatctccctgatcgagcaggaagtgacttgttctgattttccatagtaaaccactcgaagcgccatccc

SEQ ID NO: 109316 - DNA, 440 bp, Zea Mays
gttaggtataataggatcttccacataatcactagtcaatagatgcttaagaatcagggcttgtgcctgtagagttggacggcgataccagcataatgatgtagtttgtttgactctgagacgacaaagtagaatgatgttggctttccctttactaatcatgtagagagatagatcggatctcacaattactgtgagagaggcaatttcaatgaatgttgatttatgtgcgagctgtctctttgttaatatacatgatgtaaaaggggaccacaccctgatcaggatggattctctaactagaccaaatgaaatcaacataacgcagtcattcaagcagcaaattttagcttggaccgaaaaatatctctgtttgtattttacggaggattttggctgattaccggccttccaaacaaatctttgttgggatgttctcc

SEQ ID NO: 109317 - DNA, 397 bp, Zea Mays
gcccgcctgcatgaaatttttaactcggttggggcagtatcagaggaaaagaattattctaacaaagacattttgaaggccctcgacttcgtggaggagattaacgaatttgacgaagtaataaaagggcatggagacttatgcgcgttggtggcctctcgtggcacaactactgtttttaaggcttgatgtaaccatataagaactgttaataggcccttaataggcccaactttagtctctcaccgtctgacctgatgaatattccggctgaagccagcaacataggcaacaagttcattacatagatctgggctaaaggcggccgagagattgctgggaacgaagcacgtgccttacttaacaaagtatacgaaatatcttaccttgttgcttt

SEQ ID NO: 109318 - DNA, 443 bp, Zea Mays
accaaattattatataccacagcaacagtatgttcctccctatacatatcagagccatggcgcaccatgcaatcacacgccaagcgtcgttcccaatcagccatggtaggaaagtcggcatagcaatgcccgaccaaatgagcccctccaaaggatcggtggcttgccaccaggcgctacagaaaaaattagggaagaaatggttgaagtacttcgagaaagacttggcttaagtgtagctatatcagggaagtcatattggaaatcttataatcaccgatttgacatcgtgccttatctgcaagggactaggatatcagatttctctaaattttccggtgaaagcgagaaaaacacacacaagcacgcaagccaatttttagcacacctaggataattggctgatagggaagcctaccgtgtccgtttattctcgtttcact

SEQ ID NO: 109319 - DNA, 428 bp, Zea Mays
cttatttccagcaaatgtaatctcgattatatttttttatcatcccataatagcaggctttgtgtctttccatgccggatgccatagtaatgactccgctattttgagtggtatccattagatgactttattcaaataggcttgaacgaaagcggtgtccattgacgtcataacgttcaaagcttttgacagattcacttccaatagatagctaacgtaagtcatcattcatattcatttcctccccaaactgtcaattattccacaaagcattagcaaattgtgtaatgcagttagctaaaataatgaaattaggtctccgagccacataaataagacttacatggtcccgaagccatatgttgaaattacgtcgcacatgcattccatcatgtcgcaatttgtctaggtctctcgctgttagccta

SEQ ID NO: 109320 - DNA, 442 bp, Zea Mays
ccactgggagccgtctgcccacgatcatggcagacaccgagttcgtgagcacgcgttcccgccaaaccatggtcgacttgagtaaacaggtgccacagtgagattcacaagcgtgcagagccatgaaaacaatatgtgaattggacggtgtcttacccgagcgagctggccacgggcgagctgttcttggcggcacgacggaccgaattggggaaaattggtgattccctagctagggcagctaatcgggggtggaagcaggtgctattgcttggcaaatttagagacgaaggatggagctcggttgatttgaacggagagggtgaggatgtggtgaatttataggcgcagtgagccactgtcatggccatggtgataaccatcgccggtctttgctagcgatcaacggtggcgtcaagcgatatccattcttacgggcttg

SEQ ID NO: 109321 - DNA, 659 bp, Zea Mays
ctagaggctcttttgccatttcaaagtgtgtagcatggaatgaacatgaacatatgtacatatcagttcaatgcaaggagcaaggtggtgcaagtttatatattccagaacaggatggcagcagctcatatgaagctacgaagcatgagagaggccaccagatgggcggcatgcactggcctgtcgtgtacatgtgtcactcgagccgtcacggcgggaaaagggcctaatttgctcggacgcgcgtgttgtgtcgtacgtacgtcgcgcacttaacaaaagcggcatgcatgattacccccgtccctttgccgagtttggaacaccacgaatccacgattagcagcaaaagcaaaatacgagagcgcagggtagtagtacctggagggatcggagatgcatgcacgttgcacgagacatttgaggccagatatttgggtcatttgatgaacagttcgcggacggattggggattggggatttggctcctccgtccgcgtcgctgttgggccgaggcgcgcgccaggcggagcgagagagttcacgttgcgaagatcgaagaagcgggtgaagacccaaacaaaccgtgaaaaaatttctacatccccaatacaaacacactcttttgtatcccctcacagccaccacctaaaagcgat

SEQ ID NO: 109322 - DNA, 396 bp, Zea Mays
atttcaacatgggttggcttattcctttcttgtagagatggccgttgactatagcgaagtatctgcttctgtgttttagccttttggcttcactgtgatcggatgggtggtagtgaccttgaaggtatagggtgattggagcccgccagtctttggccattatcagattgactattcgatgtccattgatgtgctgcgttatttgcagaccctcagggtttcttatggctagtgtgcagactatgtgataaaatacatcgaaaggcaagggttcgcccttcactgctgctttggctattgtgtcagcctcttcgttcttgtttctctcgatatgttgtatggtgaaacctttgaattgtttctcgaggttgtgaatggtggcaagatactacatta

SEQ ID NO: 109323 - DNA, 378 bp, Zea Mays
tcccgagtaggatctcttgaactgtgatggtttcggaggcctgcttactcagtgtcttgtgcacacaggaacacggagccgggaaaacagaacacaatgtagcagtgcatgagagtgtgctaggaaattctcgtcggcgaccagatcaaagaatcgtccaatcttatatagatgcacacaggaatgtaaggaggtgccatcatgtataacgacagtcataaacttgccatcacaatgaccattactagtaactccaaaacataaaaatgtccattactagtaaactattgggggtcttcttcttctcgttggcttttcattgcacggtttgctgaatcttttctagaacttaaaccggtagggaagccgaacaagttc

SEQ ID NO: 109324 - DNA, 426 bp, Zea Mays
ggcatagtggtcaccccgagttaagtaagcgcgagcatgttgcaccatcttaagtcgttgccgacttaagccgattgctccgttagcagggcatagtggtcacccgagttaagtaagcgcgagcatgttgcaccgtcttaagtcgttgccgacttaagccgattgctccgttagcagggcatagtggtcaccctgagttaagtaagaatgcagattgaccatgaacaatttgagtattcttgaggcctttttattgatgatatatttcccagtttacagagtacattgtcgccctgatagcttttgaagtgcagctaggggtaaaacttcttgaggtgttctatgttccatgagttcccaatttctgtgccgtccatctgagtgagacgatatgatctcggccgagtgacttctgctactatgaat

SEQ ID NO: 109325 - DNA, 478 bp, Zea Mays
ctttcatttgcattgatttggtgacaaggaattccatagtactcacaacaacaacatgttccagggtcacttgtctattggtttggttgtgcatccttttgtgtcttgaatgtctgttcatcaactgttttatttatagtgttgttttgacttgtcaacacaccacattctttgcatttagtgacatcacttgtagttgacattccaaggtctgacatctgtatgggtatggaagaatggaagggacgaaagggttgagcaaagacagattatagagagcagagaaaaccccatctatctaaggttttacctagctaactgatgtcattgtggacaaaagtcacacaatacaccaacaatcatttcaaagaagcaatcaaacatgaacacaaaggacattgaactcaagcataccagcacaacacaatccaattctactcattcaaccaaaacaaaaggtgagacaaggtttggaata

SEQ ID NO: 109326 - DNA, 413 bp, Zea Mays
agatatcttttttggacaaagctgacagaagatatagctcaactctgcaagtgctagccagacatgctcaagggcatagcctcaaaccatcgctggaagaattcgttcaatccatatgtggaagtcatgactcttcatccctaagactcgcggagtagataagttcaccccctacttaggttagctgcatacccattagggatcatcaacattttgatccactgtagtacttccttcctctgggccctattgaggacgaaatcgtccttaggccttctccatgtctttccaccactagctagcttcatctcttggtttggtctatcacataacgctgccagatccactcttgcctttacgttatcatttgacttattaggaatgtccataattgttgcccaaagtacctcaac

SEQ ID NO: 109327 - DNA, 842 bp, Zea Mays
agaaaaatttcaaaatctatgtttgttactagtactacatgcatgacttaccagcatatgggctattctattcctggtgtgttcaatgataagttcctaagtcagtttgcaaggaagctcttagcttcatttggttgaagaaggatggcaattattcgtcgtccgataaacatctacaatttctttctcctaactatgcattccgactagacatcaagaactttacgaaaggtgtcgtagtgatagaccgcccacctgcaatgatgactggtgcaaaagttcgttaacagatagataatctcgtggtcaatccagaaggtgcttttgtggggtatggtgagcacatattgaacccataagtcatgcttgactcggctcccctattgtgatgaccttctttcacacaacattgatgtgatgcacactgaaaagaatgtcgctgaggcactttgggtaacaattatatatggacattcctgataagtcaaaggataacgtaaaggcaagagtggatctggcatcgttatgtgatagaaaaaccaagagatgaagccacctacaggtggaaagacatggagaaggcctaaggccaatttcgtcctgagcagggcccaaaggaaggaagtactacagtggataaagatgtgatgttctctaatgggtatgcaactaacctgagtagggggtgaacatttctactttgcgagtcttatggataaagagtcatgatttccacatatggattgaacgaattcttctggcgatggttcgacactaggtccctgagcatgtctggctagcgtttgcagagttgagttatttcttccgccaactttgtgcaa

SEQ ID NO: 109328 - DNA, 969 bp, Zea Mays
acatcacacatagtgtatgattgtgtttatgactttgaatggatgtcttcgagtgaactaataggttcctaatgcaattatgtgtaaggtgtttatagtgaggctttatcccgaaacatgttaagtctgcgcataattaagagataagtgtattttgtgtagtaaggaatgattgtgggtgagtgtgtcgcaaggaatgaattagcgagcatataggagatgaacgggtgtgatgaagtggtgagatgctcctttggattttattcacggctcttgttagatgttgtagtgagatggtcgtcggttttgtcgttgtgcataggtttgtaagtagatatgtgcacgagtatttttttggctagattaaaggtacgtggaggaaaaagtggtacgcatgtgtatggtagtcgtgattgcgttaacttgaacaaagagtctcaagtgcatgtcgtgctatggttgtaattgagatagtaaattataagagttgcgcgatataaggttcgatcgaggtagttaatattgattggactgtagagaggtggtgacctgccgaagtagtcatcgctccctctgcggttaagtcgaggtcatgtgtgatgatgctatttacgtggtgaatgtgtttgttaaatgtatgtggtaattttagtgcactaaatgacttcagtaaaaattgtaagtcgacttgttcatcctaatttgattgttttaactctaacaaacggtaaagtgttagagtaattccagtcgctagaacatggtaatttttgaagtaaatagaagctgaaaattattagttgctgttttggactgcacgcagtgatttcctcgtgttgtatgtttgatgaactaaatcgtgttttctgtagaaacgccatatagaaaagttgtagataactttattatcttacttgtgttaaaatttgacagccataagtctgatcgtttagaagttgtgcttttcac

SEQ ID NO: 109329 - DNA, 388 bp, Zea Mays
taagcacaagcagaaaacaacgtgtgatggcccgtggccgccggcgagttgtggatcgccgcgacgtgagcgtggacgccgtcagaagcaggacacgagtctcaggtagtatttctttctcaattattttcttaacccctcctcaagtccgagacaacctatatagttcccttacatgggccggcccacaacgcaactcacgcactcacccaatacaacccagaatggcgcacgacaaccttcgcttcaaacctcatctccttctgattccactccattgctctctgcattctccgctatggcatccaccggtgtgacatctgccccccctgcaacgcttgcttggccccaagcaagagcatccggatagcgctgacgcagaacatag

SEQ ID NO: 109330 - DNA, 498 bp, Zea Mays
tgtacttccatgatgtatgtggccttatccaaaatgccaaagaaataatatcatttggatttgaccttgacatcatttatatcctttcaagagccaccttgcctcatggtgtcccgtgaagtaccccatgagtgccaagagaacatgtttttgtgttctagtaacttaagtgttttggggccctagtgtctcaagagttgagtccttttggtccatgggccctaatacaaaacccctaggggtgggtacatagcctaagttaaggtagtgttctagggtatgagggccataagcacatttgccccaatgattatcaaacaaagataggtagtcaaaaaacactaaaaatagacttgttgccccaatcactatggagattttctaccaaggaaggggtcttagtgtcccatacacatctagtagttgcatcaactatccatgacaagatcaaacaactgacatcgatggagggacacaaaattcttcattcgaaggata

SEQ ID NO: 109331 - DNA, 407 bp, Zea Mays
agccattggagaaaagttgcaaaactacacaattgggtggtggacgggaccgtgatcagagcctatctgatgcgccaccggacagtgaatagtgcatgacaggtgaccattctaaacttgcaccgctagtcccttgtcagacggttcatcgcgccacttgatgtatatcacttgcaggtagccattggtcccttgtcggatggtctagtccgattttggagtagagacgtagcatgtctcggtcctactatggaactgatggcgaggaagataaataaatattagtgtgtgcatacctattagctacaccatgagtttatcatgttgccaaaaaatgccactgacttaccccacaatgaccaaaaggttcccctggttgacggggcctcatcttatcaactctgggc

SEQ ID NO: 109332 - DNA, 534 bp, Zea Mays
tggggtttgctggagcaaagcacgcaaactactggcagctttagtgcagtcaactgtagtggtgtgaacatcgaggtgtatttagtatgttttattttttcttgcaagagcatattaggttaaatatctaagtagtgttgtcttgtttctcttttcgtctgatctgaaatttgtgctgcataccttagtgtttgttcttccgcggttccacgtaaacaccatacactgtccttgagttgtatttcccgttgttgagaacccacatgttgtacagaagatctatctatgggacttgtactatttaaacctagggatcgcagataaattacagtaggaataacaaaacacgtcccctttgcaaagcttcgactgtgatattgggtgcattaacaccatgtatgactggaagttcttcaactgatgctgacgaggtagttctcgtcatggaagggacatgactcttctgttaacaccaaatgaattgctgaagcctttgcttttgttgtgtgcaacttctgcagatctgaggtagtg

SEQ ID NO: 109333 - DNA, 700 bp, Zea Mays
tccatgcaaaagtcgcctatgggtgcagccggactagcataataagtacgcaaaatcgaagtattttccaaaaggttccccatgcacaagtcgtctacgggcacgaccggatcaacgaaggcacgcagcttcatataaattacggttacatacatacagcgagggcatcacactttacattggctcaaccttcgggatgatacccatctccctatagttgaacagcattatcctcagctcctcaccctcaaaaagatttcacaactccccctcacctacactcgccccagccggcgaggacaacaattcccgtttgctagccccgtccacacgaagacgaccaccctccacctcacttaccctccgtttcgccaccgcccttcgccgcctacgcccagcactcacaccaggaagaacttcagcacctatcacacgtggagaagcttccgccgcagccacatctagtgccgcaaaataatccaagtcctcatccgaagactcttccgtccacacaaccgaacccccagaatcatcagactcaaaaaacttagacacagaatcatccgaaacatcttcagcaaccacagtcgaagccgccacaaaattagcattgtcagtagcggttgcgtgcgcaggcccaaaaccgtgaactgcgcagcaaccgaggttcagtaacacgcagacaaaatttacacacccc

SEQ ID NO: 109334 - DNA, 864 bp, Zea Mays
tttcccgaagcatgtcgaataataaaatcaagatcttcggacggtgcttcgggaataggagatgtagttttttcaggcgcatccttcttctctagagccatgccaatatctggagatcttgctcagctctctcctcagtcgcaccaggctctgcttcggcggtcactgagggcccagctttggtttcagcacgagccgtaacagtttcggcaaccttttttgcaggagcaggagtaaatgcccttgtcgtctccatgacagcgactagcacgctagccattcttctcctcttgggagttgctgcgggagcctttgcaaccttcgtcaactctgcctctcctggcgggctcaagatctttggcagctctggctctagctctttggttgccttctctttggtttcggcatcgtgttttggcgtttcggctggaccggctacaggaacctttggcaatttagtcagcttttccccaaggatggtgggagcaggttgatctgcttcgacagtgagagatgtcccttcaccaagcttcggcactgtggccgtctcaatgtatctcggcctgtgtgttaagaccttaatctttttacccttcggcacaacagagatggccgaagtggtaattttccttttctttccctgctttcgcgagggatagaaataatcagggtatacgaaaccaatgacgtcaaaaactctactcaatcttttcttgcctctgccttcgaaggccaatgccattgcatcatctttggcccttgtgtaggccccaagcaattcatcactggttgcctcaatactacttaaccattcatcatttggctcatcaaactcgcctctatatctaaaagtatattttaaat

SEQ ID NO: 109335 - DNA, 663 bp, Zea Mays
gatcgcttccacgccttgcgtcgctattccgcaggcccccctggcagtcaccacacctcacctgcatgtgtatggattaactacggacttcctctattgtgtgggcccgggactccacgcgttgttcatcttctagccggagagtattcgaccggatggcgcggaggttgttacaaccgcctctagccccgcctcggccgcagcttggggcattaataccagggggagcccttgttgtcttgaccccccatctataccgagtccacgaccagatcgagctaattcgggcacaaacccgtcgaggagagagagagtgagtgagtgagtcatgcgtcgccgggagtgccctagaccgtgtattggttgttcaagcgggggagccgcacaggaactcccacgtcgcattggacaagctattcgtggcatcatcagtcgagggacggtgatcgagcggtgggatttctcgccgggcagtggtggttggcgcggggttcccctcattggaggcagtagagtctacgcatccgatctaggtgaggactcctccctctaattcgttacggcctcctccatgaatagtgcgcatctagcgaatgttaggaagcgaggatgatcactggggcatcgctagtaatgtcgcagttgtgggtgaaagggccggca

SEQ ID NO: 109336 - DNA, 654 bp, Zea Mays
ggattatgttagaaactagtatgcggcatgtaattgtgttcgtgttgtgaataatagatcagtaggtattgttggtgtcattagcaaatgggatgatttcagttgtgcgataaattttgaagggcgaagaacatgtgtagtgtgtcgatcaagttaaccgataggttccgtaaaatatgcttgtgatgcttttatgtgcatgataagatcgatgtcttgtcgtcgtagtctcaggaaattttctgaaatgtgctagtgctctactgatggggttgaatgaacttgagatgtattacaatagctgtgtgtcgtgcaggttatccaaaaatggtgaaaggtggtgtatgttggtaattgggaaatagtcacgttattatccaattcatgttaagtaggagtcgattgcgttaagtgattgttatatacatattgtgtctcggattgcgataataatgggttagccgacttgttagatggctttagttaagctcgtaatcacgatgaattgcttattgtggtctaaatgtgtatgattatggtcacggatgaaatgtagtagtgttcatatgatgtctaagttaaaatgcgaattattgtgtgaagaacgcatcgatatccatatataccgagtttgagtattgtgctgaatgcgtt

SEQ ID NO: 109337 - DNA, 722 bp, Zea Mays
caaaattgttttggtattgtgctttcccagtcgccttcgtctgatatgataatttgtgaatattgcagaaacacctagcgtctggctctaacccttggctcctcatggcccatataaaaacccctactttgataaaagcttcgggggtaagttgatgaagataaatttcaaaagtttttagaacttcgaccaacatcttgtccagggggaactgaagtcttgctttcatgaagcttctaaaaaccaccacttcatcagcttcgggaagaggaacggtactctcccctccagccctcacgatggaaatatcacgaaagtatctccctttcatcgcttcaatttgcccttgcttaataatcgactttccaaaaacaacatggctcggcctccatggccggtcgtcggcatcttcatttccactttctatatcaaaactctcgctatcgctggagttttcggataacccaaccaacatttcattggtgattttctccatgttggttttctccatagcttcgtaaaatccggccagtatggggttagtgatcttcttctcctcatccaatcatacgatggttgctaaaatgccaaagctcaaaatttaatcaaactcgacaaagcaaggaaggttaaaatggcaaacacagtgcaagtagctagatagcacaaaaaatactcacgacacaggtctctatatatacacccaaaacccctcaacatag

SEQ ID NO: 109338 - DNA, 444 bp, Zea Mays
gagtagtaccaccggtccgggagtggacgaggtgttacaatgatagatgcttgaaggcaggattaggctagtgtgtaatatatggtttgttcttatgatggtgttggtactgaggtttgcttgtgatcaggtggtgtaccttctaatcatgtttagctctcacttttaatcatcagtgaaggcaagttaatgtgacactatggtccacgtgctttaactttgttgtttgaattgtcttcatcagatttaagttctcacactagtcagttaatctaaagatcaagttatttatttactttgcaatgtggtattttttatagcgtatgatattgctatctaaattatgaaatatggaatatgtgaagtacataattgtatttgtacttttttgttggaatgtatttgaagaaaccgtagctggattggtacattaaaccatggttg

SEQ ID NO: 109339 - DNA, 622 bp, Zea Mays
caggaatgtttaaagttataatatggaatgttcttataaaaattgtaaatattccatatttcatttcagaaatatttgacattttattacggaatattcttataacccatacaccctaaaaaaccctaaacctaaaaaaccctaaacccataccctgaacccaaaacccttccgatacaaacaccaaacgacgtggtgcttgtatgatagactcaaacaccaaccgaaatggtttttgacttataggtagcaaaacccccgtcacctgtgtttagaacccacctaaagaggttcatcgcggtctagaggccattttggagaagggtttacctggatccgctcttaacgtagttgtcacaccgcgtacatggcagtaggaggaattaaatatagcacatcgtgcatctaggaataacagatgggtcgtcgatcgtgggctgccacgacatataactagcacgtccaggtttacgtaatagcacatccagagtaaaattgtgctttcctctctttcattctgaaaaatgtaactctcatttggtttcattctctagctattccatcaaatattttgtatatatggagtgtttttactgccatagcacaagctggacatatggac

SEQ ID NO: 109340 - DNA, 924 bp, Zea Mays
ggcactggctccttcacgcaggcaggagagcagctaccatgccgattgcggcgacccagtgcaccatgccaagcagtgctaggaacgaatgcgctacagtgctgaagacttgggttgcggtgagttagattcagctagggtggaatagcactagggtacctttatgctatcctactgttaatcaatctccattgatgttttcgttggttgactatttttcacctccacagtcagcaccatctttctctcgctagcagccttgtcagatttgtttcatcgccttcatgccttggagatcgactatattggtgcaagtggccatgacaaggcccctgcttgtggagccatcgatatgctcctgtcgctcttgattttgtcaggattatttgggttgttgtaaaacctatcctaagcatggttgcatcaaaattcactcgtgcggtgttagagcaggcaaagtcaacaatcatgtttgcttttctgtctataatccttgtttcgactaatcacagattcttttgcgagcaccattgcaagtcaatgtggaacaaaagctggatctcaggagaatactctgtgtaatgttctttttggttgcccaggcgctactacacaaggggtatgtatgaccacttcccttgttttgagcagtagcatgtaatttacatccaataacaaattgttgtttattgagagctactacctactgacatgttatgcatcctttgtacatcaacctttcatgtaggaccacttagtgaagcagcattcattcacattatgcaaaatagactacatcagttttgtgtaggtatttgatcgataaagtgaatgtagcatgcacgcagtgctatctcttccttaactgcgccgcttaatgcctgtctgaatgtagtcattccatctacctcatttgaaactttt

SEQ ID NO: 109341 - DNA, 501 bp, Zea Mays
cttgggacagggaagagggttacaccagctgtagcatcaggaatccacactcaagcagtgagctttagctagaacttgagggcagagaggaggtttcactgaaccaagtttgtagtcactgaacatatacgcacagcaaacgggaggaaaccatcgagcttagctacaactagatgaagaagggtcccaggggtgccagcgcagcaggaagtcacaaacgtggctcccaagcagcagccctacacaggttcacatgcaaggtcccaagacacataatttggtctacctctcatggccaaaatatcatctttgtctcatactacagacaggagaaggacaactgcgaacaccactggtggataaacactaaagggtccaaggtttgatattttgcagggggtagccaccagaacctttgtcgtgtagcttacttcaccaaggaaccagtagataagactttaatgctcccacaatagttcaaacttggatattttcagtaga

SEQ ID NO: 109342 - DNA, 498 bp, Zea Mays
gactttgcacttttcaaacaagcttttgaaaggatttttaactcatgaaatttgaagcgctgttagtcccggacggtccgcgtatcccaacacgttgcacttttcaaacaagcttttgaaaggatttttaactcatgaaatttgaagcgttgttagtcctcatgcaaatgcaaccactagatgctctatgaggcactaagttttacacagattaaagtcattgacccctcttaatagtacggctatctaacctactaatccggtcaagtatcttctctaaactcctgaagaccggcaaaaacaaaacctatgttatatctttgccttcacttgatccacaaccaatgcttatgaatctccaagatttcctgttctatgtggtccaaccctgcattcttatttcttcaagaaccgttagtccacaagcagttgtcattaattaccaaaacatcactaaggggcctagataattcacaatctccccctttttggtaattg

SEQ ID NO: 109343 - DNA, 632 bp, Zea Mays
gtggggtcccaaggttttttcttcgtagagttaatcagatgctgccccttttaaagaaggaggacgttcctccaggtaggtaatcgtgctagctcttcacacctcgtgggctttcttattagcccatgccttccattgaccaccctccgttcatgaattggggtggactttctaggagaggtcactcagggagatggtatgacttacctgtccttctcacaaggtctttgctgcccctcttaccttccttagtcatcctcagtttctctaagggtggcggttcgccctcccggggtgcgagagtgtcatagttctgcgcttgggttgcccattctgctgacctccacaggatggttggtggaagacctccaaagggacctaggcgcagctatgtggccttggaggcggctaacactgaagtccagcgccttttggcgtacctggtggctcttaacgactcaggggcgggtaagtctccgtggtctggttcctaggctcatgacttcttgggttactaaatatctatagattccttgcatagttgaaactcgaagctttgagtcttgtgtgtagatcaggtcacaaggttcgttcgcactcgtggcaggaatcgcaatctacgcctccttgac

SEQ ID NO: 109344 - DNA, 327 bp, Zea Mays
tggacctcgcgcttgctggtttctaaagccatggagaggaccaatgttgagaaaatcactgatgaaatgttagctaggctgtctggggattcaagtaatagcgagagttttgatgttgagagtgagaatgaagatgccgaatatcggccatggtggccaagtcattttgtttttgggaaatccattattaagcaagggcatattgaagcaatgaagggcaaatattttcatgatatattcgtagtgaggactggaggagagaatattgttcctcttcctgaggcacacaaagtggtggtattcaaaagttttatgaaagctgggctt

SEQ ID NO: 109345 - DNA, 381 bp, Zea Mays
aaagcctctgggctacactgcccctacatttattgcggataagacgagcgcttgtccattccagtggcaggaggcgtgctcatcattactcgcacgttaccgaggaaacggtcatcgcttatcaatactgtgtggacttcggacatcatgacacccggtgattactcaggtattattagtattaattatccacataatgtgatccatccattatgctcctgggcccacatgtcgaggctcgatatctttgtatgtgcctcccttaacctataaaagggaaggcacacaacgttacagggacaagttctctaggctcacacgctcacaagctctcagacattctcaatactacttacacacagtggaggtagggttttacgc

SEQ ID NO: 109346 - DNA, 502 bp, Zea Mays
ggctggtgcattcgttagaccaaaagacataacagtgaactcatacaacccatacttggtaatgaatgtcgtcttcggaatgtctgagggtcggatcctgagctgatgataacctgacctcaaatttatctttgagaacacgctggctcctctcaactagtcgaacagatcttctattctgggcaaggggtacttgttcttaatcgtgacctcattcagagcttgataatcgatgcacttccttctggtgccatctttcttctccacgaacaggataggggtggcccaaggcgaggtgcttggccttatataacctttctctcacagctcatcattctgcttcttgagttcaaccaaatctggtccagataccctttaggctcttttagagatgggggcggtgccaggaagaagctgtatggcaaactcaactttccgctcaggtggcatacctggtaagtcttccgggaacacatctgggaattcgtacaccactttgata

SEQ ID NO: 109347 - DNA, 357 bp, Zea Mays
gagttctgttacaacataggtaattaggtatgcatgatagtacatgaaatgtgtgacctatgcatgtaatcagtaatcctgtcttcttccaatttgtattttattaagagtctgccactgccaaggttgtagttcagcaatccctccaaatttctgtgaggttgaaggatggttaatgtgaagatgttatgcgatttcaagttacttttgcatgcaaataggttttctgctcttaatttttttccagaataaggggcctttatctgtttgacacaaacttctgcaaatagtaatgtcgtttgtgaaatgaaatgcatgatgactcatgagttttggagaaaatagctggaaactgac

SEQ ID NO: 109348 - DNA, 522 bp, Zea Mays
cgatgaacaggctagccgagcccgtcagcccgctaggcggtaccgtaccgcggtatcccctgacctttgtccgctcgacaagctcttcttgatatccactccaaccggtcagccgctagcgagcttgctgctatcaccgtctcacgcttgctgcggtggtggtaaaatcgttccccatctcatgcttgagctgaatgctgcagtggtgcaaaaaatcaagtagaggtagttgatgctgaaaatataacgtcaggatattctgatccgcctcgacatccatcaaaacttaaccatagcgcaaagcaacttgcgctgtggttataaaagatctggctatgatttaggaaatacgaacaatacttgtttcgtttcccatgcgttttcagacgatagacctgcttgtttatgctctactagaaacgtactatagaatatagagccaattgagcctggtgcagtgctgaagaagaccgatcagatggtagcactacattccatttcgtcgacgtgcacgtgtccgtg

SEQ ID NO: 109349 - DNA, 812 bp, Zea Mays
ggacctcaactttgtttggtaatgaagttcatcaactgtgcagaagccttcgacatttgcactcaaaccttggcttcaaagggcccatatgtaaatgttgattctaacaattgtatttggtgttaactaatgaaggtatatttcaaatctgttcagtacttcaacaattatttcatacatcaggaaacgaagcccagcccaaaagaagctcctaaagacaacaacctcatcatcgtttggttcagggatgaactccctaccagcaaatctgatcatatcgttgtccttttgaccaatttacccaagtctatttagcacttctagatcttcggcctttatagtagacttgccaaactcaatatggctagttttgtttagatgaagaacgctagaatcttcttcgtcgctatcagcttcaactttttcggaggcgcttctccctacaacacccacttcctctctagccttcggctcaacaatacctaacaccctcatcacctccaaaataggaactgtctcaactatattcgtcgtctcaccctcaatggccaatctagcggtcgaacagactctagccattgccagaatgctgaatctctataggaaggctcgtgtgcaacaaaaaaagcttcagaggcagagaaatttgtggcagcaggttggtgcaaaagcaataaatgttgttaaaatctacacccgacagattggcttatattgctcgctaagcggtgaaggtgagcggtcgcatcgctcgcactctctgatcggtggactaacacaggacattttttaccatgttttttaataacgcg

SEQ ID NO: 109350 - DNA, 299 bp, Zea Mays
tacttagcaatctctctcttcatcctggtccaccaatataaggatctgaggtcatgatacatcttgttacttccggggtgcatggaaaatttggaaagatgagcttcgtccaaaattttcttcctgagttctggatttttgggaacaaccagtcgatcttcgaaccataaaatacccttgctgtcctgacgaaagcatttatacttatccacattttgattgagcatttccttaatgacttgaacacctttgtcaccaagctgtgccatgattatctgctcttgtaaggttggctcaac

SEQ ID NO: 109351 - DNA, 326 bp, Zea Mays
gtctattttgccttccccaacatcgagcatccacttgctaaattgtgatagttcttgtcgttcttcttgtgacaatgatggcattagaagtctcatattctgtgtaagatgcaggatgtgtacatgagaccaaagagaagaattgattattgctgaattaacaatttgtgagcgggtgcctccttcaatcacaggcaatgtttgtctgagatcaccacctagaacaacaacctttccaccaaagggtaagttcttagccataggtgatgaagatgccaagatatcacggaaggacctgtctagagcttcaaaagcaaatctatctg

SEQ ID NO: 109352 - DNA, 345 bp, Zea Mays
catattgtgagatccatccggcataatgataattgcccgttgtacctaggacgtgcgcttagtttccccactttcctttggcctcccatttccatcgcatcatgcatgagcctttctttttaattctactattcatccatttatcctcttccttttgggacattgttgggctagagatacaaatggagactactactatatttatattgacctggaggtaattatttgtatttttcttgtcactactatataaattgccaatcgctggtaggtgctaccatgtaagttgctttgcatttattttcatctaaatgctcgtatcttgcaatgaaggattgttcgtct

SEQ ID NO: 109353 - DNA, 275 bp, Zea Mays
aaaacaaacaagtttgctctcagcctccccaaagtatcccaatttcttcaacataaccatgttgtctgccgtcacagtagatttaccaaattcaatgtgactgagtttcgttgggctcagaatagtgtaatcctcttcatcttcgttatcactccctccttcaactgcgatttgtttagcttcagcagtcaaggtaccttcggcaacaggctcctctggcacaacaagacctgattgcctcatcacttttgatattggtgtcgtctcagttactt

SEQ ID NO: 109354 - DNA, 557 bp, Zea Mays
gattgaacaacaagacccttctttgattcaacactaggtatgcaatgcttctcaacaaaagtcttgctcatgaaagtatgtgatgcaccagaatcaaaaagaatgatggcgatatgattggcaatggaaaacgtacccatcatcacaggctctccttccggggtggtagctacttgagtatagtagacacgtccagttttccttgcatttctacctgcctgagtgcttgccacatttcccttgccttgagatgtgcttccggaagcctgttgaaaattggatttattttgctttggatagggacaattcttaatgaagtgtccagacttcccaaagttaaagcaactattagatgaactgggtaaggttgggaaacgagtacgagggcactcggctgattgttttgagcaaaggcaggagtgggatggatgaaaactggttgctttaaaaaggataagcgggtggatgaggaaaagagtgatttaccaacctcgactgcttctcggatccttgagaggatccttcacccccttcacgccaatatctttttgtctttc

SEQ ID NO: 109355 - DNA, 375 bp, Zea Mays
tctatacattgttcttagatgttggatagctaatgagttggacatcatcgctatctagtgttttatgtcttaagatttatatgtactattcacttaaaaacaagggctagatattaacacgcgaaagtgttctcggcaaagcagagaaaaaagtagtgttgccctatggaagtcagcctaatagtctccctaagctagccaagctgagtgcccaaagttggttaggaagggatgaagtcgaccaggccgggtaccttattgttgcgcctgccacattgtttaggcctgtgaaagtcgacctgaccagatttggagaccgtctaggccaagtttgcttgattctaaaccgatttgtattcaaatatgtttttgatg

SEQ ID NO: 109356 - DNA, 285 bp, Zea Mays
cggtgttaagaaatccacttcaaggttctagttacgtggagcggtgagtaaagaagagggagagaagcagaccctaattctatagctaggcttcccacaagaaataaggggacaactaaaccaacactaacaacttgagtacatgcaagcattattattttttgaacgaacgacacaaaggttgtgtctgttgctattaataatagcgccctcccgcaaaagcgggacaagatcccaacaaaattgaataaaatctaaaaactaacatggtaggcaggatcgctt

SEQ ID NO: 109357 - DNA, 459 bp, Zea Mays
acaggaggtactagatacaataatcaaataacaacaagcatgttccaacaaattaagtattgacagcaaggtcatgagttcatcaaagagaagaacagatcaggagttaatggtgtaagcagtaatgacaacaagcatgatccagacatctcacctttgtgcttgacgcgactcattaatggcgtaagcagtagggtcagagcaccgattccgtcaccgccaaggtggcgcacaccgatccctcacggtctaccaaaatacaacaaggtcatgagttcatcacagagaagagcagatcaggcacaaccacattaagcaatgacaggaggtaccagacgcaataatcaaataacagcaagcatgttccaagaaataaatacccagatcaggcacatatcgtccatgaagagccagatccagacatctcacctcagttagggttagggtttacgactaatt

SEQ ID NO: 109358 - DNA, 705 bp, Zea Mays
tggagtctggccgcggcatcgctcggtgttgtgggggcgcgtcgtcgccgcaattcctcgctggaatccgaatttggccgtggaaccgcgcgtcttcgtgggcaagtcacggcgctacgtgaattacggtatggtttcctcccctgtgttcgcgcttatccctatcgcatattgcacctctcgggtggggttttggggcgctgtgcgagggtaatcgaactcgacgacgatgtgctgtcacggtggagctcgccgtcgccgatggtgaggacggggggtgatgacggttgtggtccgtccatttgttgatgagcgcctaggattagatctggcataggatggtcctcgcccatcgatcctgcaacgaacggctgcgattagaagccaagttaccctttcgcaactttgtctggtgacggctggatcgggatcctacgactgcgattggaacccggcattccagtgcgggcgtgggttgatagccgttgatctcgtgatccacggctcatgtgtgtaggcgggtttgatctaatctcggccttcaatactcagtcgaacggctaggatcgcttcataccccttcggcctggagattttttctaaagaaccctcggactttagtgaaaacaacccgcagtcctatctgcaggactctgtgtcttgggaccttttgccccgtggcccctggcatttccagaaattgag

SEQ ID NO: 109359 - DNA, 462 bp, Zea Mays
aaccaatatgtcatcaaaaaatactagtgcatagtggctaaggataggggcaagatttatgttcattgcaccctggaatgtcgccggaggtcctgataaaccgaaggccatgacccaaaacttgaagtgaccatggtgagtttgaaaagatgtcttatgttggtcttcaggtgccatccagatctggtgaaaccccgctcgcaggtcaagcgtagaaaaccacgctgccccgtgcagctcatgtaggaacttgtcaatgatgggaacgagaaactctgtcttcactgtgagagcattaagatttgagatgcctgtaatccacacaaaaatgatatgtgttgtcttttttcttgaccaaaatgacaactcactcttgctgggttgggtgatgcctgactgcaacatctttgtgacttgtttctcaatttctgtcttcaatgctagggcataccgatatggccg

SEQ ID NO: 109360 - DNA, 602 bp, Zea Mays
atgagatacaacctttgacaagaccagcttgaattcaagaagctcattgtatgtctgttttagcttgtcactatttgtattcatctcaagcagttcatgctcatgttcacccaatcttgcctagagaataaacaaaagaaagttttcattctcactcaagcaggatatttgttttcacttaaaaaagcaacctttgaaatagaagccataaaaaactttctgttacaagaaatatgagtaatgcacctctagctcctccagatcaatatccggttcaagtgcaggtcgaacagaagatcttaaacctgccctgttgatctgatcactgaaaaattttagtttgcgtgacatttctgcacatcgctttacctgcaatggaattaagatgtgtttgtcaacataattaaaaagttagtgagaccagagatttttaaatatcagcaacagcccaaacaataagttttagtactggccgcttcatcatcatattgtttatgtactgtgctatttttaaaggatgtgaagtctggttctaatttcctatcatctaccatactgtactcagtgctatgagcatattttaactggtaacttgattggca

SEQ ID NO: 109361 - DNA, 928 bp, Zea Mays
tctgacggcttcctgactcttcatgcactaaaaatctgaggaactgaccgaccgttacccaaatgtacacttcttcgggttcatctttagcccaaaccttccggtgcattctaggacccagcgcaagtcttctatatgcccctggtggacgtagacttgactacgacatcgtcaatgtaaatctccaacagattccctatcaggtcatggaaaatgtagttcatggtgcgttggtatgtagcttcggcattctatatcccaaaagtcatgaccacatactcaaataatcctaccgagcctggtaccctaaatgtggctttgtgaatgtcttctggggccatgaaaatttggttgtacccagcgcttccatccatgaagcttaataccctgtgacatggggtattcgtcctttggtgtggccctgttgaggtctctgaaatccacgcataccctccaccggccatcctccttttgaacaggcactacactagaaatccattcggcataccggcacaacctgatgaaccctgcctccaacatcttctctacctctttcttgacttcatgcagtacttcatccttcaacaatcatgctcattgctgaaaaggccgaaaccccttcttcagcgggagtaggtactctacaatgctcctatcaagcctcagtatcttcgtgtaatcccaaataaagcaacccaaatattcctttagcaggcttatcatcggctctcataactctgggtctaacctcttgctgaagaatgtgggtcgtggcttatccccagggccaatgtcgacttcttctagctcgtcagtagaggcaaacccgtatcctagttttccatcgccccctgcaaatcaatagtacacacatgcgaggagtagtgctaaaaatattcgggccgatcgcatggatcggctgcctcat

SEQ ID NO: 109362 - DNA, 648 bp, Zea Mays
cgagtaaggagcgaaggaccgagtatgaaacgatgatatatgtgatggtcagttatgctttcagggaacatatcctccagccgattgcaaatcaacatgccaaacattgtatctccttctatgctgatgatgttgttttgttcatgcggccctctcatcaggatatctcagcaattatcagcattttagacatatttggtcatgctacagggctaaaaacgaacatctccaaaagttctgttacacccattcaatgtggagcgaatgagctgaccaccatttctgccttattaccatgtgctacaaaaatttttccctgcacttacttggggattcctctatcaatccgtaggcttgctaactctgatctcttgccacttgttgataaagttgctgataaacttccaggatggaaaaccaatcttctcagctgggctggtcgtcttgtcatggttaagacagtgctgtcttctgtccctatctatcttatgcttgcattagaactccctaaatgggtttttaaggcaatcgataagaggagacgaggctttctttggaaggggcaaggtgacgcaaatggaggtaactgccttgtgtcctgggaagctgtccagcggcctctcaagtatggtggtctgggtattctca

SEQ ID NO: 109363 - DNA, 525 bp, Zea Mays
acacaattgagccactcaattcatcaagcatatcatctagcctagggatgggatgaagatatctgattgttatgttattaatcgctcggcaatctacacacatgcgccaagatccatctttcttaggaaccaaaaggacaggaacagcgcaggggctcagagacttacgcacgtaacctttgtcgagcaattcttgcacttggcgctgaatttctttagtttcctcagggttggtccggtatgttgtatgattgggcaaggaggccccgggaataaggtcaatctggtgctcaatcccatgaattggtggtagcctcggtggcacctcgtttggaaaaacatccgaatactcctgcaaaaggttagtgacaacagggacaaggaaagaggtatgtcctaaagtgaaaacaaggtttgtttgcaaatcaaggcatagcaaacaacagtggtagcatcaatctcatccaaatcatatttagtagctgtcggagagggaattctccggccgggtggcggaacgcatcc

SEQ ID NO: 109364 - DNA, 282 bp, Zea Mays
tgcagctacagagtaacgagggaatcaagacagtccccctcgaccccgtgacccccaagcaaatggttctggtcagcgaagacctcctgcccgaagaagaaagacttctctcttgtctcaaccacaacaaggatgtattcgcatggtctgccctagacctagtcgccattagccgcaccatcattgagcacatcttgggcattgattccaccatgagccccaagaaacaaaagctgcggaaaatgtccgatgaaaaaatagaagtcgcgaaggcagaagtcc

SEQ ID NO: 109365 - DNA, 484 bp, Zea Mays
gtgggtttggtattgtcgtgagttgttcctccgtgtttttggtgctgttggcagcgttgttgcagtttgttggttggttttactgtcctggtggtttttgtggtggccaaggaggtcgagggggccgcgggggcaccgatatggctccatggtgatgatctccgctgtccgctcgcctccctccttcgaactcgagcatacagctggttcttctggttcttgtcaccgtcgatctcttgacggctactctttgcttttgtgggctaaggcttaaatgtgggaggtgtgcggtactggtgggcgctctggtttggagttccattcccatccttcttcgcaaggccctggatctcagaaactttttgcgccgttgtgccaccagttcgggcttcgcttgtgttgctgttgcttttcatatggtggctgattcggagcgacagcggctatagcaccgcgactccatgcatggagaactctattcgcc

SEQ ID NO: 109366 - DNA, 388 bp, Zea Mays
tactggttcacctaatgggatcaaattgggggcagattgagcatttaggcacggtgggcacgacctccatagcacggtcatagttttccactttaggggacattcaactaccacctggcgtgccaccacctccatgacttgaaaacgagtctttatagtcgagctaacataattctcccattcctgctgacactcaattagggatgacacatcttaggacgcttggtggaggacctaggttaagcaccctctcaacggcaatatggtcatcttcacgacaacctagctttgtgtttagcctttgtaaccacctcactcaaggagtgtctatcaacgaatagcgcaggcacacgtcacatgtcaacggactcaatattttcgtaatgat

SEQ ID NO: 109367 - DNA, 506 bp, Zea Mays
cgtcaattccacgacatcgcatggcggcagaccgagctccgacgagcctgtaccggctggataactcaactaccggtgctcccgtgcggttgacaccgaattgaacccttaataaccatttcccctcgatcaattgcacgatctgagctttgaatcaccctgtccacggagacagtgcgaactaaggatgaacacgggtgttcatgacgatctagcacggtttagcttaattgaatgggtcgaggagcatcaggagaatctaaggacactgaaacgggagagcatgaacggacctggaacgagctagccacggcgaggtcactatgcgcggtgtttcggaccgatttggtggaaatcccaaattggggctctctggtgagtaattggaggcacgagcgggtggattggatgcttgaatacctaatggagccgagggtgtgctcaatttatagggcccttgagcggtggctcgtgaatttgagctcgcgcggtggcggtcggagaga

SEQ ID NO: 109368 - DNA, 359 bp, Zea Mays
ttgtcatagaattgattcttcctaagagcatccagaacgagatgaagatgtcgctcatgctcttcctccgtcttcgagtaaatcagaatatcatccagaaacacaaccacaaagtcatccaagaactcatgcaacatcttattcattgcttccataaaagcaggaggggcattagttaagccaaagtacatgacgataaactcgaagtgcccatacctggtgctaaaagctgtcttctcaatattctcctcgcgaatcctcgactgatgataaccagagttcaaatcaatcttagagaatatctgggcacctctcagctgttcaaagagaacgtcaatacgaggtagcggatatatatt

SEQ ID NO: 109369 - DNA, 464 bp, Zea Mays
ggagctgctggtggtggtgaaggtagtggaagattgggagagcataggtatcctgctactatttatgtgggatataaactgaacaggttgaggtaagaaagattatggcaaggaaaagactttatccaaaatgttttagtcctaattcatctagagattcgctttgactgttatacccttccttgtcgatgttgatcttttcttctccgatcttggtctcattgattcgaggtcagtgtatatcagcagagttggggcatatggtcgaagtagttatgggtgagatggactacatgatgttggtcaaaatcttgtttgatgttaggcggggataaacaggttatgcaatccatcgtgacactattggttgggttagctcttatgctcatggttgagttggtctaatgtgctaagttatgttaacacctagccagtaggattcaagtaccattaatctgtctaag

SEQ ID NO: 109370 - DNA, 668 bp, Zea Mays
cactcattacctacgagcacctcgggccacataacactcatgacctatgaatccctcgaactgtggcacattaatggcccacgcacccctcgccctacgacacacttatggcttgtcggactaggcctgagtatgcaaacctcccgcagggcactacacgatgggctgtatcgagccccaggctacggaggtcagggatcagtgtagccataatgatgacgcctatgaacattgcctccccgatgtcatctgccatccctaattaagacgttagtgtcgatgtatcataggtcttaggctatatccaacagctctcctatcttatattcattttcaaatttcactctgcaaacagtgtcaaacaatatcatctataatgtcgtatctcttattttacacgatccaccaaagacagccttatcggtttagcactcacatgaaaaataaccaaatctttttctccggtggtgctctgcacctccattttctgcattttctctcactgtagtagctctgaactcgttggagtagcccttggccctttcccttcgttgtcgaaaaatatatctgcatcaccactaccgtcggcaaagtagagacaacaaagtgtcgatttttaatgaccatagatcaaatttgttgaatttcatggcagtgacctagtgaag

SEQ ID NO: 109371 - DNA, 824 bp, Zea Mays
cgaagccaaagctagggagtgttttttgagacaaattttcagccataactcagcaggagtcagagaacggcaatcttgggctacttcaagctgatgcaacaattctcgggccaatattaattgggaagaaacatgtccaacctttttgccgctccaagcctgcagggccttcgctgtagccttcactttgaaggagagcattaggaaataaatcttcccagtctactgtgtgcaacactctatcaagcttcactagagtgggggaactttactgattagaccaggtgaacttgtggccaattagagggatatcattcaaggcaagatcattgacaatcttccaaaatcgacccatcaaagctcggttaatattagagttgttcttatcatctgtgttaagaataagattgaaatctcctgcaattaaccaaggcccttggcaaatagctctaagatcacttagttcctgcatgaactgaattttctcctcattcccttgtggcccatagacgcaagtaagccaccaggttgaaccactaacagaagtaaattgaaccgaaactgtgttgttggttatgtggctggcaccagtggaacctacagattgtttccaaggaaccagaatgcctccgctggctcctgttgccggcagctcaacatagttcgcaaattcagagcccaaagaagagagaagcacaccccttctaacacacgacatcttcgtctcctggaggcagaccatatcaataccagaggagtcaattagagtgcggacagaatcctgacgagctgaggagttcaaacctcttaccttccacatgagc

SEQ ID NO: 109372 - DNA, 497 bp, Zea Mays
acacaatttatcagaagcacagggggttctgtgcaaattctaggaccttaccgtaatgcttctaatataattctggacggtgggttgtttttgaaataattcagggtctctttagcaagattaccaggccgaagaggtatctcttgttgtgagccgttcgatcaagattcggtggataaaatataacaatgaagggcaagtaactgtaacccctgatccatgtatcagcggtccagatccaaggcaggcgtgatccactgtgcaccgcaggatcatgatcaaacggtcatggtttaacacctgaaccgttttccagggatcaaatcaaagtcgtccgtccatagatcgatggccaggtggtcgtcttcaacccccccggcactcactcctttcttctggccgactcaagacggcgccaggagcgcacgatggtttatccctggcggctaaccagtactaaccgaaaacctcggcttgcattgaggatgacatgatag

SEQ ID NO: 109373 - DNA, 635 bp, Zea Mays
tattgatggagcgaatgatgcgttcggccttgccattttggggggaagtgtaaggacaagacatgcgtaaaagaactccatgggtggagaaaaaatcgcgagcgttgaggttatcgaattcgcgaccattgtcacattgaacaccctggacggtgacaccaaattgtgtgcgaacataagcgaaaaaatttgtaagggtggaaaaggtgtcagacttaaggcgcaagggaaatgtccacaaatagtgggaatagtcatcaagaatggccagatagtatttatgaccagacacactagtgattggtgaagtccaaagatcacaatgtattaattgaaaatttcgagtggcatgtgatgaagaagaatggaaaggtagacgaacgtgacgtcctagctggcaggcatgacataagggggtatttttattcggggtacaagggatggcagaagactgagctagctgagtgaggactgtagatcctggatgtccaagtcgttgatgccacaatgaagaggtggtagcatgaagggaagatgttgtgctcttgagtgggtagagtgggccggagctatcacaccgaaggatcacgcgccgagtgggaagatccttcacagagcagccaagagggtcaaat

SEQ ID NO: 109374 - DNA, 323 bp, Zea Mays
gtcggtgcgacatgctcacgcatacctgacttggggtgattactatgctctgctatcggagcaatcgacctaagtcggaaacgccttaagtcggcgagacatgcacatgcatacatgacttaggatgattactataccctgctagcgcagcagccggcttaagtcggaacgccttaagtcggtgtgacgtgctctcgcttacataacttagggttactatgccccatcaatgcatcaatcggcttaagttggaagcgccttaagtcggagcaacatgatcaattagacaacaaagagcttagggcacgtaccataccctactc

SEQ ID NO: 109375 - DNA, 550 bp, Zea Mays
tgcagccatctttggctggcaggtagactttggtgctgatttcagaggaccagggcttctggtgggttcgtaattctatgtcacttggtcgttttttattgtcccaaatgaatactacatccattctggtttggaatacccggggcctgaataataaggccaggtgagattgtgtaagggaaactattttatcctgtaaagcagatatcatttgcctccaagaaatcaaggtgtcagatctttccccgcatctactgctctcagtttgtggatctgaattcgataagttcttgacccttcctgcggatggcacccatggtggtattcttattgcttggaaaggcgctgtttgtcaagccatttcttcccgtgttgatgattactcggtctcagttcagtttgctgggctggatggtatggttcacaggggtgtatggcccccaggaggatgatctgaaaatccagtttctgcatgagcttaaagacatcagggcactctgtacaggaccttggttgcttgctggagattttaatatgatttatcaggtgg

SEQ ID NO: 109376 - DNA, 688 bp, Zea Mays
ggggattcaggactctgtctgctcatgagtccctgacaccactatcctcctacgctgcctcggtaagagatgctgccagaggaccctgtggtctctcagccacacataccggcagcagctacaggacacgaggttcagacatcttcctctgtgtctgagtggaggaagccagaccagcatcgttccaggtggagctggtgaggagcgcctcaacaccctagctggtgtggtggctagtctcaacaccgacctggacagtgccaccctggatctctctagggtgcacttggagctggagaatgcccatgctaggattgcagccctggaagcccaacttcaaggacgggatccgcctgaagtccaagtccccgccatggcgttgtctcctccccgcaagaggcttcgctatggggagcccaaatccgtcaccaggctgctttagagattttaagtttatgttgtaataagttagttctcgcgtcagacgatgaatactcttttaaagttatctttataataataacaaccatgtgatggtgttggttgatatgtttgagttggatttttgtttgagtgcaatggtctaatggccataagagcatataaaaaagcataaacttaagatattcccctctagaatcttttctacttatcactcttctaagttcactttctaaccaatcagatg

SEQ ID NO: 109377 - DNA, 967 bp, Zea Mays
tcttttcatccgacattttgcggagtttctccttttttaggcagattgaagggtcattgcttaacccgagttcgatggttgtgcaactgacactgacgaggtctaaagctgaccaaccgaagacatatttgttgtgatgtaaataggataatagcttggactcttgctctgtggtgagatcttcgcttattaaaattgtctgatttggaattgaagtgtccaaagggacatttttggcttcttcattgctctgaatctgagctttgggtgctattgttttttcgtggcgctggctgatggagccttcatcctcagtggtgaggcaatggacatcgcgctatcctgagacgaagtctctttcaatgttacaagtggtttggtggttcccatagattgttattgctctgagggggcttaggatttttatgcatagatagaagtcatgaatggctgcttcgagtttgtttatggatcctcttctcattatgtacaggtagaccatatcgactatgtcagcggtcacctattctgatctcgtattggggcttgtgccgaaggagagggggagccctatcttgctaagtgggaatgttcctttccctccaaagtcatacaatgtgttgtcggttggctgaacaaagttgtggttgatgcccatctgattgaatgcatgcagaaagacgatgtctggatgactcccattgtcgacgaggaccttgtgtagtaacaagcctaccacattacaactaatgacaagtgcatctgtgtggggtgcacttcggagatcgatgtctcttgcatccaaggtaagtggaacatgagaccacttcgtctgaacaacaggtcttgtgatagcgacgtggttgactcatgataatgatctctttttggcatttatttttgaagttcgagctagacccttcggtgatcatatggattactcctctaaaggtaggattggtgtcac

SEQ ID NO: 109378 - DNA, 428 bp, Zea Mays
tgggagatatgtcatcaataaaaaaggcttcaagaatactcagtttgttcattattgatctgcattcttatttaactcggggtgaccactatgccctgctaacggagcaatcggcttaagtcggcaacgacttaagacggtgcaacatgctcgcgcttacttaactcgagtgaccactatgccctgctaacggagcaatcagcttaagtcggcaacgacttaagacggtgcaacatgctcgcgcttacttaacttggggtgaccactatgccctgctaacggagcaaaatcggcttaagtcggcaacgacttaagacggtgcaacatgctcgcgcttacttaactcggggtgaccactatgccctgctaacggagcaatcgacttaagtcggcaacgactcaagacagtgcaacatgctcgtgcttac

SEQ ID NO: 109379 - DNA, 565 bp, Zea Mays
gtgtgcagccatcagggctatgacaacacaacaaaccttcgtaataagcacaacaggcacaattctggctcggtaatcggggtacacgataagtccacgcaacatgcgcaacaagcgcaattggtgctcaatgatcacggcaggcggacaatgcctacagggcatgcaaaaaaatacacgactcggcggtggcggtccgactcaacgagagcggtccaattaagcgagagtgcaacacagcaatcacatgatgcagccaagttcgtacgacacaaatactgtatcatgttgccagggcgtagccaatgccaaaactcatccaattaataacgtagcctgatcggcgcgttcgagtacccactatacaatttaatcgctcggcatgagtctgaagctcaacgcaacacaaatatttagagcgacataaaaatgtgcaacataaccttcacatgtatttcaaataattttctgctatttactactggaaataaagctgaaaaataatactaaaattaatacacgaacataagcacatctagtgcaaaaggtatttcctcattttgaa

SEQ ID NO: 109380 - DNA, 975 bp, Zea Mays
caaaccatggtgaggccagaatgggtaattttaggtgacttcaacatgatcaggagagcaagagaaaaaaacaaagggtcaatcaacagaagggtgatgaggcagttcaatagcacaattgatgatctgcacctcttagagctagatctcaccgatagagcatttacctagtcaaatgaacaagctaaccctaccatgactaggattgacagattcttcgcgacaacagaatggcatgatctgtaccccacagctgatctactctccatgtgcaccatgacgtcggaccattgcccactgttaatgcaaggccactctacggttaaattctaccgggggttcagattcgaatcgttctggccacagattgagggattcaatgatgtagtccatcaagcatggaattctacagttaacactgatgatgcaatcctccaccttcacgtgaagatgactcgcacggccaaggctcttttgacctggagacgcaatacagttggcaacttcaaagtgcggatggctatcattcagatcatcctcactcttctggagaaagcacaagaaattagacaagtctcctccgaagaattggaattcaggaggacccttaaaatcaagattctggatattgcctccgctcagaggtcacgagcaagacaacattccagacttacttggatgcgattgggcgatgctaacactaagttctttcacttagcggccaataatagaagaaggaaaaatttaatcagatcgctaattcgagatgacacgctgttaacgagccaggaagacaaaatgaatgaggtacaacatcacttcggtcagattctaggcatgacaggaaggaggaccagtgctgtttgttgggaccatctggggtatgctccttttgagctagctgagctggacaacttgattgatgatagtgaaattaaggacgtgatcatgaggcttcaatctgaaaaggctccc

SEQ ID NO: 109381 - DNA, 357 bp, Zea Mays
agagattagcaaatatcataagcatgtttatcccatgaacaaatataaccgaagcaaattatagtaagaatcataactaccaacaacataaatacttcaacttcatataagcaacaataaatcacaactatccatatgcataataatctagttgccctcctccataatataaagacacatatggaataaaattatgccatgaaggataaccgaacataccttgggatgatggtatagctgaaaaatatggacgatgcaatgaccaataactttgatgagttggggcaaacctttcacctaaacgtcctgtacttgctttcttccttttgtttgccttcattccacctcttcctaaag

SEQ ID NO: 109382 - DNA, 683 bp, Zea Mays
gcctggttaatagaggagtaaacaactggatgatgaggatgttaggacgtgtgatatattagctaatgagcctatattagtatattacgatgtccgaaacttttactattatctccctttctacaaggagcctcttatgcaaacatatgagaataacctcacctcttgtttattaatatttaggagtgaatttatatgacgtattgcaagatcgagaactgaaaataaacaaatatgagactcgaggatttaaacagattttgggctcccagtgcgaaataatacctatatgtttgtttgttgggagccttctttgctcgatgttcctcaaaacactaacttaacagttactctcaagtttaaaacaagtttgttttaagtgtacgattgatgtaggacacctggctggagttatcacacaaacatcacaggaacgaagttaccagctttggactattgacgtgcatgcatgacagatgagcaactcgaagctatgtgaagtccccgagacttattcagcaaaactactgtaggaaaagatagtttactcattagttcaaacatatatccttaatagtgccatatatttgggacacattttttttgggcaagagagaatctcatcgtcctgcctacgaaattgtatttcctttgccttcgtattgtaactctaagaagccgaa

SEQ ID NO: 109383 - DNA, 291 bp, Zea Mays
aaaagttgaaaggcataatggtgccaaaccggataaaatccagcgcggtcgcaatggcagagggagcgaggtcggaacaaacctgtagcgctcggcgcgaagaggaagaggcggcggagggagcgacgacgccgaggagaagcccccaagcggggccaaagcgagctgacgtgagggagagtgccgccgaagtatccagaggcatagtgagctgggattacaagaagctaagagacggtatgacctttgattaggaatcggacgtcctaaaaaatttgcgccgacgtggac

SEQ ID NO: 109384 - DNA, 635 bp, Zea Mays
atatggttgacacaaggagaagtggaggagggagccatgccaacccacctcgacgcgaggtgcaggcaccctagcaagaggaacacccgcaaccacagctaccaccacccccaccacagatgacaatggatcttgtgttcacgatgcagactcacgccttgcaaacctcaggacaggtagcggtcgctctttagcaagcccatcaacaaccacccccgccagttcaagtatggatgtcttagctgcctcgtgataagcataaagagttcatgaagggacgtctgcccaccttttctcattcaggagatcccatggatgtggaaggttgacttcatgcaatggagtgagagttgcacattgtttagtgcagttaccatgagaaggttctatacaaccctcgctagttgagaggagctgtgcaggcttggtgggagtcatatctggccacccacaagaaccaagatgccatcttatgggaggagtttagaagtaacttacagaggcaccatgttctagaagggatgatgattatggaggaattcctagcattaaagcaaggtgccatgtctgtcagtgaatacaaggatcgtttcctacaactatcctattatgcaccggaagaagttaactctgat

SEQ ID NO: 109385 - DNA, 1478 bp, Zea Mays
gtggacgaaaatcactaaaacatgaggatatgttctgcatcgtgcatggaaaaggggctagccacacttcaaaaatatgctcaaaataaagaaaagcatcaaagaagtacaataggaaacaaagacaatatccaactattgggagaaggcctctggccaaaggttcatactaacaaaatcaatgtctagatattttcttaggataaggacatcaatcaaagcaaaaggccatcttcgaacgttggacaagctgaagaagacagaagcatagcttcggcgtgatcggaaaaagctttagagaaggaaagcgaagagggtctcgaaggtgaacaaaaggcttatatggtatgtcagggttgtaaaataacatgattgtactctctcaattacgaagagttactatgtaataactaagtggtaaagctgtaatttcatacaaagatgtatattgggtcatcctataaatagacgaacaatgccactactataggggtcggtcctttgcaaatctcacatgtggcattcttgtgtgcagagcttctgaaggtataaatgtatggaaacatccgtattaagcataagcctatttcatgctcaagcattcatattcatgtatatatgcggaaaattatgacctccaaaggttgtaatcaatcgaatgacattgaattcttgaacgacaatcctattccacacacttattgaaatagccaaaactccgtatatcttgagtccatcttgtgccttggacccttgtatgttgttgtatatcttcaataagtcttttaatgtcttacttgagatgtgataatttcaatcaccactttgccttcgtccaagtccacatacatcctttgaactatatccaaaacactagcaagtaatattagaacaaatggttatgttgatcatcaaacaccaaaactaactatcatatgagcctcgatccattttccttgcatgacgaaaacgaagttgatctcttactaacgatctcctccaaacaaatggttcaagggaatctttgtccatcaaagacatgccaaacctaagtgacttgaattcattatccaccaactccaactcaaaagccttagcatctaccaaatcttcctcggatctagtcgaagccacaaaaggaagctcctctgtaccagacaccttcacacaagcgacgcttgggcacattacacaaacttagaaagaaatcaaacttcacccaaagcttcatttcacgaaccaacaacaagacatctcgtttaagggaaccgatagcaaataacgacccataggtgtggtatatatagatgacttcgatcaaaagtaactcttcaccttcattttatacttgacttcggtcaaacttgaccgttaaaaactttgaaattcacttttcacactacaagaaccaacttcgacgctcgggaatgataatttcgcaagaagaccttcgaagcattgcccacgagaggctactg

SEQ ID NO: 109386 - DNA, 704 bp, Zea Mays
ccaaattccacccatgagctagcactcacactccgcacgcaacaaattcttccactaggtcctggtcgctgctcaaccaggctgtgtcgcgaagggcctcctcattctgatcccctttcttcactttaaattgtgggaaggccacataacaatgcgagcacaaaatggttaggggcaaagcaggcaacccttcgacatccccaggtgccacataaaaccaaaagtaccaccagtagccccacttattatttgcacaaggaacaatttcaatctcttcggccatagtcttcccagtcctcgccatgaatgtgcaggacccaaattgcgcaatcaaaccacctatctttttcttctgctaatgcaagcaatagttcttggcgaagacctcaacagacggctctccgccatatgacgacaccgcccaacacatacttcgccaatgccaccatagcattcgacgtcaactgctgaatttgaatctcaaactttcgcagaacttcaattaagaatcgatgcgccggcaagcgaaggccagcaacaaaaaacacctcgaacacaaccaactccctctccggctccgggacatcttcagcccctggtgccctcccaactccattcccaaaataacccagacactgcttctcgagcacgtggcctgagtaaatcctcgatgtgccaaactccaccgtgtgcccgtgctgtag

SEQ ID NO: 109387 - DNA, 364 bp, Zea Mays
ctttcatgatatttcaatcgtgagagcaataggggagattaatgttcctcttcctgaagcttcatgaaagtcggtcttcggtaccctctggacaaaatgttggtcgaagttctgaaaacatttgaaatttttcttcaccaacttacccacgaagctattgtcaaagttggggttttcatgtgggccatgaggagccaaggattagagccagatgctaggtggttctgcaatatgcacgagctattatatcagacgaaggcaactggaaaagagcaatatcacaacaattttggctgctacagcttcgtgcatcgcgccgaggccagctatcctgtgccaacatttcgaaaaaagtggccaggct

SEQ ID NO: 109388 - DNA, 485 bp, Zea Mays
gggagttcttccctcttccctttacgctgttgtgaggtcgttcaggatgagcatgcatacattcttaaattaaacaaatggataattgagtaaggactttaatacaaaatgatgaccaactaagtaccccagtaccattgttataattagagagaggctgagttgtgtttccttttttctttttataattctttttttcttttacttacgcttaaccatacacagatgacttcccacggatcctcggacgaagggaatgcactgtcccacactgacgggcttgcacgagagggctttccccgtattttgtgggtggtacttcagggagctggttacactacgcctcctcagtacgcggtgcagcagttcgagaagcaccgagtgccccattgtagggtgaggatgaccctggagcctcatcccctacagccaggctggcgttcgctggactctgagtcctttggataccgggctgaggatacgat

SEQ ID NO: 109389 - DNA, 812 bp, Zea Mays
gaacgagttcattcttcttcttctctctttcaagcttcggcatacctcattccctcagtgttgggaatactcggttggccaagtattcttgaaccaaatccctagttccaatgtgttcagatacaactctaaactcatacacagcatctgggcatggtgcccccggtgtcatggtgcactgaggcctagtcagcccgaaggttaactccagcgggctctgtactagcttctcctttttctcatcaatcttaacataaaaccattcagatttccaaccggtcggccatttagtgagatagctgaccaccggtgtcttcatgtctttgtgataagcaaagttatagcagtcgaagttctcatgcagtccgtcttctctggccttcgtctgatagtgaagttcatgtactcggcagaaggcttcggtgagcggctccaccccttgacttaggagagcccagatatagacgctgagcctaacaatggcgttaggggtcagctgatgaaggtaaatctcaaaattttccaagacatctacaatcatcccgtgcagaggaaatctcaaccctgctttgaagaagctcttaaaaaccaccacttcatcattttctggttttgggatagtctcttccctgccaaaatgaatcaaccccttatcggcttctctgaagtagcctagctttgtcatcgtagccatatcagcttcagacacagttgactttccaaaatccaaatggctgggcttcgatggcatagcggtgttataatcaatctcttcttcaccaatatcgccctcttcaatatctgcctgctcc

SEQ ID NO: 109390 - DNA, 668 bp, Zea Mays
atgttgacaggatgtcgttggcataagaaaaatgatgggaggcgaacccctttttcagggaggcattggaatagaaggatggggtgggtgcgaagcagacaaacaatctaggaaggtaataaaccagaatacaatgctatatcaataacaattaatgtgttgaagggcacaactgacctgtatggtttaataatgtgcatattaatttattgtgcataagctagattttgacattggaggagtaactatggataaaccaataaatgtgaaaccaaaaggaagaacagttagaagtgatgaggtaaggactgtaaaattaggcgccaaaggagaaaaaagatgaacaaaaggtgcaagaattgcggagttgcagatggtcataatagcagaacttgcctttcagttgaagaaaatagagctcgtttggtaatccttgctaacccaagaaaaagagggcatccgccagggttgaggaacattaatacgtcgagagctccagaatggaatgaaacaactacttcaaagaagcatgcgatgagtgtagagacgactgatgagtttgatagtgaaatataattgtacttgtgttggatggcttgtttattactgttaaaaatttatgctatggatataaaatggataataacgtggttcagtatggtttgtta

SEQ ID NO: 109391 - DNA, 495 bp, Zea Mays
gaaaaataaagaaaagaaaccaaatgttatcctataatagataacataactgattaagaaacaaagaagcagcctaacatatattcagatgaatattttctaggtcaaaccactggtaaaaatagtagctgataattgtctgacatgttcgtccactatcgaatgaaattgcattttgcacaaattgtagcctcctaagctcctaccatgaacgaaccacaatgagctaagcgatactctgatctctcggcaaaaccaaaagatgcctggaacacaaaccgatgaaaagcacccaacaatcagatgataagatgcactggcagaggtcagtggcaaaacaaacctgcacccacggaggtcttcgcaagatctggtttaggaacgctctcagcactaaccccatggaatgccggccagaggcctgacgacacgggcgtggagcaggggtaggaggaggcaaggcggctctctggccatcgacggcctcgtctcttg

SEQ ID NO: 109392 - DNA, 413 bp, Zea Mays
acgattagactgggcgcttacctcttcgttggttgagtatgtatcgttgatctatgatctaacggttgtgatgcgcgcggggttaggcagccgagccaactttacataagagccctcgagatttaaggtaataatcccgccgtccatttttcagtataaagaaagtaaaattaaatgaagactttgcgttttagcccatggggtttgtttttaggcacaaaattgatacaaatatgcacaaaagctaagaaaatccatatgtttgtaataaaattatctacactttggtaaccttattgatacaaatatgcacaagtacgttcaagttgcgttagcttcgtaataaaattatctacactttggtaaccttattttatcatgaaacatgtttgtaaataattaatttgtttact

SEQ ID NO: 109393 - DNA, 329 bp, Zea Mays
gttcaaaactgagataattaaaggcatgtgcaacatataacattctacattccacatccaacttcagaacaacataacgacatccaaagtagatggtcataacagtgagaacatttcgtctttactacatgttgacgctgatctagcatcaaacattagagatgtaccgtctagcggtaccctttgcagcggcatgaacggtccgtggttctaggccggacggttcgtgacctcgctgcaggaggagctccttccctttgtcgcgtccggacggtctgtactttgagccaaatgatccacgatagcccaaaatcgtcttcttcctcgca

SEQ ID NO: 109394 - DNA, 553 bp, Zea Mays
tagaattatttttgtattaaaaatgaatttctgtaactaattatcaattttcattgttctccggaccgagcgctaattacagagaactccgggggcaaatccagaaatttttccccagactcaaacaactcagaggcggactgcgggtttattagttgattccctatggtctctttagcaattgttacaccacgaaggggtatccttgattatcagccatttgatcacaatctgaccgaccagattagatcggcctgatatgaaccggtacgcagtactagtcgcaggatccactatggacggacaagacttaaaacagggtgatcgattctcccacgtccgatccgcatcggatggctcaccacgcacacacaccgaagcggtgcgcgcaaacagatcttggccgccgagattcgatccgaaggccggaacgcatgactcatctagatctaattgtggcggttgattcctatccccacggctcagacctattcaagccgcaaaactaactgtggtcacaggttccaaatccaacggccaagctctattcttc

SEQ ID NO: 109395 - DNA, 588 bp, Zea Mays
gtcgattgtgcgtagtgacggtgttagcaaacggtatcaacagatgggatggggaaaggcagcggcaacaatctagcagttgcacgattcctcgtcatcatgatgaaccgcccgcctttcatgtcgtcgtcgtcgtcggcagtcggcagcagggacgaaacgacgacacggcggccgggcagatctcatctgatctcagtgagtgcacacgcgtcaaatactccatgagtccacagcatgacgacgacgcgaccacaagatcatgagacatgaactaggaattagaacaaatctagtactactactagcttgagaaagtgccattgttggatcgaggaattcccttcttatcttcgtgagaataatccatgcatgcatgggagtctaatcagaagattgaaagtgttcatttgtcggaagcaatggaagccctaaactacttaccctggagagaatgtgttggcttgcgttggctacttccaagcaatgttcttggagaaggaaacgaatggaagcatatgagcatatcaacagttcatcactggctcagacggacctcagagggtatcagctgagcacatgccctca

SEQ ID NO: 109396 - DNA, 497 bp, Zea Mays
ttagctcaaataaaaaggaactgcatatatttctggacggggtactattgtggtaataaacggtggcaaaacagaccaagggcggtactcccgactcccgtactacaaggctacaaacaatgaaacagtggcaaaagaagttgagttcaaaatcctgagtaaggcaatccagagacttcactcgtaaatttcaggccatggaaagctagttccaggcttcaacaggggcagagcaaaagaacaggtcctgcctctcctgaaactttggccggttttaatatgggcaaccgcaaaaagaaggataccaattcacagatctctggccccctctcgataaagttgccgtcaaataaacagaagcaccgcaagggcaaggcgagtttacagcaaaaacgcaacggcgcttcgccccatcccgacaaactcggattcagaaaccgcaatcacaaagagcggcagctagctagttgggaatgggaacacacggaacaacggca

SEQ ID NO: 109397 - DNA, 485 bp, Zea Mays
cttttgcacatgcgtccacgcatagcaatggcacacgagaggatgcaagagcctctagttgacttttgaaaaccagtgtcggctggattagagatttttcttccaaggacctgtacctggaccagtgatttcggcacaccgtgtactccaaggtaacgtgggccgtcgaccaagatctttacttccacgtcgacgcgagggtaactaatgttaggaatctaggcatttttatatttattttaatttagaaataccatatcagatttacgaattgtgaaatataactaccataatagtagtagacgtatatatgaaaatcacaccggtcatagcagtaactatatatatatactaaacttaataaattcagagaatgaattatatcctgcttaaagacttatgttaaagacattagtgactccattcacatgtatcaatattatacgttactcaaagtagtggaccatagtcgatacagtcagatg

SEQ ID NO: 109398 - DNA, 356 bp, Zea Mays
atgcacaatcatttatacttgaatgaactttgtcaattatctatcatgggcatgacaatttgttagaaaaaatatgttttttttcttgaataaattaatggtaattatatcacgtgtcaaaaatatttttcaattgacaccaataatattaactcagaaatattttgcgtaaatcgaaaaaactcaaatctatcctatccttatttgggtaccatatgcacatctttaggcttctattgaatcaagaaattggattgtacatctttttgattttgatatcgatacatataaggtgtcctacggataatgcaaatcgaagctatttgatgtctgactcaggcctatatgtatatgac

SEQ ID NO: 109399 - DNA, 923 bp, Zea Mays
ttgctcatcacttgcttttcatttgtcattgttggaggattactgtttcataagttcaggtcagttagttattctttaaatatgcatgcttctttttcttgttccctgttttatcagaggacatactatagccttggcagttaattttgatgtgaaaatgatgaagtatattgatttataataattcaggaagcaacaacaatccctggaggactgcttttgggaagcttgggcatgtctatgttcatcatctacccatctaagggtaagtagggactagggggagtactgacagtttctgtaaggcttaataactgatatgtttttccccagctattttcctatccgtttctttaaattcttttcctttaacaatcattttctaatatgtcgttttgcttgctcgaacagcaaaagacacgtgttgagcgtgtcattgggttctttcttgctatctggggtatattattctattctcgattattaagtgcaatgacagaacaatttagagtgagttatttcataattatctgaaactgagataaaaattttctatattgatgcacctttttgacatatactcacctggttgtccacagaaccagatgcataaagtaagggaaggggcacaggtgcaggttattgaggatgatcatatcattatttgtggagtcaatagtcatctgatgtctatattgaaccaattgaataagtaccatgaatcatcaattcgcttaggtttagctacagcaaggtaatgaaggatggcgtatcattttggttatgttaattcacccttttacttttaagggttgctaagatctatgtatcctatctagtgcctctgattgttttcttatgaacaatgtcaaggaagcagaaaatccttcttctctccgatcttccaaggaagcagattgata

SEQ ID NO: 109400 - DNA, 979 bp, Zea Mays
taattattgtagggaaataaagcaaccgataccttctatatgtttgagatcagagttgcaagggcatacactagagctgttatgaatagatttgaggaggcaatgaaatatgccacggcatacaaaaatatcccaagatcgagagggtggaccaaatgattgggtggtgcaacacacgaataggtcatgtagaattgtgtggggacaacaccagttcaaagttgtagcaaacgtggacgacaataagtatacttgcgagtgcaagaattgggaacctacatgttagttttctactcctaataatattattgttgtacatgcaggatgggtaacctgataaaacattacataatgatatgtgcaggtcttctttgtgtacacttattgaaagcctttatgcaccttcagatagatcgaataccaaaggagtacattatgtaaagatagactaacttagctagataggacgttccatttgagagatcagataaaaattctaaaggaaaagatgggattaccaaatcatatagacaaaaaatgttgctaatgaaaacattgaaggttgttcatcatgcaagtatgtccaaagcaagacatgaaaaggcacttgatacgttagacgaactggtccgagttttgtcaagaatagaacctgatattgggtgtgatgacagtgacgacggtattgattgtgatgaaaatcaggtgatgggtgaactttgatctacttgatttcatatatatatatatattaagtaattaataatttaatgtcttatttatgagtgcaggaggtgggtttatttgctggagggtatgggatcaggcggccaaactgaacaagctgatcaaaatgtaagaaaattatgtgttacatcactaattggaataaattttggttgtaacaatgctggtaatgcttattgtattagaataagtctgtgttgcaggtggttggtgataaaaacgtgggtgataa

SEQ ID NO: 109401 - DNA, 845 bp, Zea Mays
ttttttgcacataactcacagatttgcataaatctatttgcaaaactgtccatatataaattttctcaccttttcttatttcatggttgatgcactccttcaattcagtctaccaaacctattcttcatggtcttcaaactccatttttttcctactttaaggttatataattttattatcatgctataatggcagggaacagccatccacgctgagattccagcagccttagccactgaaaagggctcactaatccagattgagaaagtatatgaaattaggcgctttcgtgttgtgtcttcccgaagctatttcaaacctgttcagaacaacctaatgatacaatttactctctacattcaagctaaagtagtgaaggatccacctcatatcttcccaatatacatatacaacctcacttctttcgaaaaaatagaagagagcgtcgacaacaaaaattacttgatcggtgagaaatattttactacagcattattgtgtcacttgcgctaaatgaagtatgttatccatttaaaacaaacagacttactaacccaacaatgcagatgccattggaatgctgacacaaattggcgctccacatgtagctggttataacaattcaagcatcgtcagggatatcttcataaaaaatataaggtacaaacagattcttagctactaactgttgctattatcttgcaccatacataatgtattagatcctacaataccttttccataataacccttacaataggtactgtgactataattaactacgttattcttttttcctctttagtgatgcctctcttaaaatcacgctttggggagatcaagc

SEQ ID NO: 109402 - DNA, 288 bp, Zea Mays
tgcggaatcctctccacctctcccaaaattggtagtgcacggtgaaaccatagtcctttgcgaccgtgtagccccaacttcccctcctaattccgcctagacccgttgcggcgccgtttttccccttttctgtcaccggcgagcgaaaatcctccgcgctccgtggccagctctgttcctgctctttttaatcgtgtttcagcacccatatacgctcgtgatactcatcggctccaccctccttgcttggccactctcaatcacccggaacacatgaacttgtgttcg

SEQ ID NO: 109403 - DNA, 471 bp, Zea Mays
ggcaaacacccgcttcatcatttcatagcctttgggataagtcctccgtgtctttttggggaggagtttcaatgccacgaccttcatgtccatgcgctcacatctagcgtacctaatgagatgcatgatgcatatgtatgagcataataaaaaataacacaagaccatatgatgtcacacgatagtgaagtaatcactaaatagcaagacactacaaacactcatacacaagcactagctatccatacatcatcggcacatgaatctaacaccacggaagacatgggatactcgaccctgaacttaatttgcacgcaagcataacaggggaaatgacaatcacattagtacacatgctaacttgagaatagcaactacaaatcttcatcaatcaagaactaactaaacctacttagccaaacaagagcaattccaagcaattaacttaacgtttgcagattctggacagca

SEQ ID NO: 109404 - DNA, 365 bp, Zea Mays
ctcaaggtgattgagtacaagttcccactacttgatggagtatgccctaatgcagcaaagcccagattcacatcccaacaactctgtgggcctgcaaggacatggtgggaccactaccttgccatgctatcgagagaccacgtggtgacatgggaagaattcaagatggcctttaaagggcaccgtatttcggcatgtatcatggatcacaagatgaatgagtttctagtcctcactcaatagaatcacatagtgctccagtacacgcaggcattaatgatctataatatgcgagataccatgctgacttcaatgagaagaatagggatagatttcgtaggggcctagcaccgaactctgtgagc

SEQ ID NO: 109405 - DNA, 514 bp, Zea Mays
gcactttgcacatctttataaccttatttcttgtaactcgagtcaaagtgtcaagaatcttgatcggatattccgtataagtcagatcgtcttgaacactaaggtcctccattggtagctgctcctcaggtaccctgaggcacttcttcagttgtgacacgtggaagacatcatgtacatccgcaagatgatcgggcagttctaattgatatgcaacttcacccactcgctttaagatcaagaaaggtccaatgaagcgaggggacaactttcctttaactttaaatctcctcataccccggatcggtgacaccttcagatatacgtgatcaccctccttgaactccagtagtcttctccgggtatcagcatagctcttctgtcttgattgtgcaattctcaaattctctcttatcattcgcacttgctcctctgcctcttgtataagttcaggcccaaagaactgtctttctccagtctgatcccaatatagaggagtcctgcacttcctgcc

SEQ ID NO: 109406 - DNA, 732 bp, Zea Mays
tttgagtcccaaaggatctggggcgcttcaggtggtatcagagctgttaggttggccgcaggacgtaacccttagccttgatccaaaagtttttgagtcaaatctattttcataaaaaaatcttgctctcatcccttcatttcaaaaatgttttctgctttccttctatcagaaatcagatggaggcctacagccaaaccagcttttgccagaatgaagatggttttcccaagttgctgagagcatgcacagtgcacctcgaaatcaggagccagccagagtatgatggtcatgaattcgtcgagcatggcacagagaagtgtgtcgtgactgtatacattggatccagtccacaccatgtgaaatggagtgtcactgctacagggcacaaattcaaagacacctgccaagtcgtcgctcgcaaggcactgagggccctatgtcaaatctatgaagaagaagtgaccgacaccccgctcagattctttccgccctttcagagagaccgtctagtttggatggccaggatgcgtgcattggaagggcagcagctgcttgaggacgaccccacagtcgtgtacctcactgcatacctgctcaccctggatgcacagtatgatttcttggctcgacaccaccgtcagatgattgcccgagcagaagatgcagagaagcgcaatcgtaagctccatgtggatctcacctcaactcaagcccgtatagctgccttgg

SEQ ID NO: 109407 - DNA, 555 bp, Zea Mays
attggcttaagtcggaaacgctttaagtcggtacgatatgctcacaatcgcatactcgagggtgatcacaacaccctattaacggaataatcgacttaagtcggcatagcgtgctcgtgcatacatgaactctatgatgcaccacctcgacgagaaatgccaactcgatgaaaagtattttctgttcgaacgaatcaaaatttgtcttcattacacaatcactgtgcaggagcattctcgcaggggaccttgccagcaggatcaccagagggagaaggcttactcacaccagcggacgcggcaagaacgtcagcaacaatgttgtcaggcaccacaacacgaggtcttttcatcaggattcaaccagcacgaacagctttggccatcgctttatcacacatcggtttcatgataccatggtcatgctctaagaccttaatgtggcgacgagcaatttccaactcctgcgaaacaagtttcttcgaggcgcgcaactatttgatgatggaatcttttgaagacagtaacttactaagacgcgacacttcagtctag

SEQ ID NO: 109408 - DNA, 407 bp, Zea Mays
gataattctgctcatgcggcttgagtaagcgtgatgcataagcaatgactttctcattttgcatcagaacacaccctaagccttgccttgaagcatcacagaagatgatgaaatcctgatgtatatctggtagtgtcaaaacgggcgcggtcgtgagcttttcctttatgacctggaaactttcctcacacttcggggtccacacaaacttattgtctttcttgaggagctcggtcataggtcttgctgtgctggagaatcccttgataaagcagcggtaatatcctgccattcccagaaagcttcgaacctcactgacgttgaatggctgcttccattttgatactgcctctaccttggataggtctacttctattccttccgcagtcaagatatgcccaaggaag

SEQ ID NO: 109409 - DNA, 436 bp, Zea Mays
agaagttatgattttctgaatatttaggtgttaaacataaaacaaaataagtgcttgattttaaccacatgttacataatagaataaggttacttaatgataaccaatattaatatgagtccaatgcaactataatggattaatttggagttaaaatggttaagttatgattattctagaatttatatacttagtttacatctataaaggattatcaactaattctgtaattgtttatttggtttattacagaattcggacgacgggcataaaaaaccaggaatcacaggggttgtttcataaaaccgcagggcccgatggtaaataatttacactaacagtggatggcaggtttattaccacaaaacagatggtctcttttataattctgcaggctcgaaagggtacgggccaatatgagccgtctgatttgaaa

SEQ ID NO: 109410 - DNA, 419 bp, Zea Mays
gtatgcactggcaagaaatgagcggtcttggtcaacctatccacaatgacccaaatagaatcatggtgccgggaggcattgggcaatcctacaataaaatccatgcaaatatcctcccatttccaagatggtatgggaaggggttgcaaagtgcctggtaccttcagatggctggccttgactctctggcaggtgtcgcattcagatatatacttagcaatttcccttttcattctggtccaccagtataaagatctgagatcatgatacatcttgttactgccggggtgcatgcaaaattttgaaaggtgagcttcatccaatatcttctttcggagctcagggttcttggggacaaccagtcggtctccaaaccatagaattcctttgctgtcccgacggaagcatttgtatttttc

SEQ ID NO: 109411 - DNA, 711 bp, Zea Mays
ggtcgattcgcctgagcggggccgctcgctttctagggacgacaccatggaatggtcctcctatcggtcagaggtggtcctagtctaagcccatggcgtcgagcgtagcatagtaaaggatgttgagcccacttccttcatccttcaacaccttcataagtcgtactgacccccatgatgggactcacaatgagcgagtattgtctgggtcgagggatatgctccaagttgtcgacgcggtcgtaggtgatggcttggtcggaccagttgaggaaaactggagacgcttgccgagcctagagtatttcacattgttccaacttcgatgtcctcttagcgtgtagtaatctgacccccccaggatcgttaggcatctggtcttgtttgggaacacaactcctgccttcttttgctcgccgccctgcctaggctctcctcccatctcgagcggtgtttctccacccaggaaccttctcagcagcccatagtccttgtaggcatgtcggaccaggtagtaagggttcggacatggggcttcgagcagattctcgaaatggcatgtggcttcctcagtcggtggtctctttcccttctgacctatcgccgccactagcatttcatcatgccttcgtgtttttttctttcttttattgggatgccctctgagacctccaacaggctcctagtcgctcttggccttctacccatgat

SEQ ID NO: 109412 - DNA, 1198 bp, Zea Mays
cggcaacatggtaccgtgtcgtttgcgcattcacgttgtttgtgtctgaaaaatacttgcttgagaacaatgtgatctctctggctgcgaacgcctctgcaatacacccttcaacccttgccttattccgcaccattcctctgagttttttcaattctctttcttgactatacatccacctgaactgtgcaggtcctcctaccaacgctttccaaggtagcaaatgttgcatacaattaaaaaatctaggtgggaatactttttccatcttacatacaaggacaacgatttccttctcgaacctcagcatcaatttctttgagatttccttagcacatatctgcttataaaaataactgagttctgcaaatatcttccacacatcgggactgaagtatccacggaacattaccggcactagtctttcaatcaaaatgtgatagtcatgactcttcaacccaacgagtttaccagtgtcgaggttaactgctcgttttatattagccgcatagcgatctgggaacctcaactttttcaaccattaaaatatctcttctcgctcttgtcgtttcagacaataaggagctcgtggctgactctcagatccacttggattttttctaagctcaaggtgcggacgatcacaaagttcagctaagtttcttcttgcattcacgttatctttggtttgaccggtgaagtcgaagcacatgcttatgatgctttccgcaacattacgttcttggtgcatcaaatctatattatgtggtaacaacaatgccttcgtgtaaggtagctcccagataaacgaggtgtgcgtccaattgtgttctttaccatacccttgaaatcgacctcctacgcccggttttaggtcacgatgttgtatcatgatattttcaccagtttgccgcttcggtggcccatctctaaccctcttgccttttcggaatgactttgtatcctttctaaaaggaagattatggggaaggaggcgtcagtgaacatcaaaaaatgtttccttcttaccatgttctaacctatatgcttgtgagtcacccatacatatcggacaacgcagtatgtcatggacacaccaaccagaaaaaatgccatatgctagcagatcatgaattgaccatagatatgttgcgagtagagtaaaccgacatttcatatgactatcatatgcctcaac

SEQ ID NO: 109413 - DNA, 406 bp, Zea Mays
ggagtagacaattttgcacttaatcgtccgctcctaattgcacttttgcaaatctcccctctcaatctcctgggcgccccttatcaacatcatatggcccagattataaatcggtgcacgtttcagtttttgatgtaggtatatgctgtgaaacatgcagtgttaggattattatgtattatggtgtgctgaaagaatgtacttattgttatcggctcaaatatctctaaaaatgtatagtaaactagatactatttgtatatgttatatttatgtatttttattgggtatgagtacctgtccaacataaaatacccacataatggtatggatgtggaattatacatgtgtacatgtacaagtattagagcgtgaattatttagtctaatggggactagtataaag

SEQ ID NO: 109414 - DNA, 369 bp, Zea Mays
aaaaaaactctggtttggagccttgtgcaggagccaatccccagtttttggtccatctgatctgatagccatgcatgtactgactgttcaatggggtggtatactgtgcagactgatttgcaccaggggactttagtaataagaattggttgcacaaaggtactagatcgttgagaaggtacttgtgtcacttctcctgctacagctacttccaattccaacagaacaaacaagctttccattccacgtgttaaatacacctttgtcaagtttccaactacaagtggagtacagttgggaggaatttgctgggaaatggtgagcttcagttggaacacactgataataataatcgtaagccatcttgcg

SEQ ID NO: 109415 - DNA, 325 bp, Zea Mays
gtcaaggaccacaaagactaacacacgccccaccgccctgttgccggtcttgttgcgtgaatcaaaggataagaaataccagctggtggaccttatgggtgcgttgttaaagatacctggcctaggccgtatccagtaatggcaccagtgccaccctaagaatcctggcatccggccccgacaagtcgaggccatatcccagggggccaagtaccgggaaagaagccgacaacaatgcatacaacagagaaaaaaagagaggcatgcagacaagttgtaatgtcaccgacaagtagtacctaaagagtatcttacaaaatcaaag

SEQ ID NO: 109416 - DNA, 413 bp, Zea Mays
gtcaggagcacgattgttattaccttgctggcggtgtggcataccttctgtgttttgatgaagacggcgacataggcacaaatctctggtggccgcttgatcataattaccttcttcatcgaacacagcatcatcgggaagacatggaagaggaggtggtggtggtggtgcttgttgttgcgtctccaacatagcaagtctgtcgacgatctgggacaatcgtcgatccagcctctcgtaagtcttgccaaggttcatgttaatgaaggaatcatgcactaacttgtggaccgtctcctccatttgctccttcaggagcttgttgtttgcctcaagatcttgatgtctaacacattcatcgaagtctgtagggatccttgcttcttcgtcgcctaccatcgaaacacaaaaac

SEQ ID NO: 109417 - DNA, 480 bp, Zea Mays
attaaatctgtggttgactcgttcgtcatctcatagcgtagcatcactcgagaacgctaagcattgaggcggatcatggtgagcacggagcagtgctggcggtaacatgcatgaggccatgatcgacgctgaaggttgaacagatataactgtgactcattgagtcgtcgaaactggtgaccgggtggtattgagttgatttaaattcatattaagtcaaaatcattttcactccatttcagtactcttcaatccacatgaaattagaataaccgaacaatgactaaaaagatttaaccgagactgacgacctgggctcttcaacctcactacctcagttgactgaactactgaaggttatccatcgatcgctgaaaaaaaaaacaattaagacacggtgtttggttccagatgcacttacatgaacagaaaagctctacttatattagcacacccggcccattccgacgttgcacttgc

SEQ ID NO: 109418 - DNA, 468 bp, Zea Mays
ctcccattctgttgcttctttccatttttttaagaccatccttttcatttctaacctcttcactactgaagaaatttcttgtgcattgtcctgtgtgactgtgtctgccttacttcccgttacataggggggtgatgctaattttctttatttatgacctgtttaactgaaggtgtgaatcattctcgacatacccgcgcacctacgacctccttcacgcctggctcctgttttctgagatagagaagcggggatgtagcctggaggatcttctgatcgagatggaccgcatcctaaggccttatggttacgccatcatcagagacaaagttgatgtcgttacctacatcaagaaacttttaccagcgctaaggtgggacgactggacgtttgagatgaggcctaagaaagatgcgctcacaataggtgacgaaagagtcttgatcgtgaggaaaaagctctggaatc

SEQ ID NO: 109419 - DNA, 285 bp, Zea Mays
tgatacaaattggctcaacatatgaacagcatgggcaatatcaggtctggtgatggtgagataaacaagactacccacaatatgacgataccgagttgggtctgctagaggtgtcccatcattcggacgaagttttaaatgaatatacatcggtgttgcaactgtgcgtgtatcagtaagtccagagcgatcaagaagatgttgtatatatttggactgagacagataaaagcctttttgagtctgctggacttcaatgcccaagaaatagctaagcagtcccaa

SEQ ID NO: 109420 - DNA, 506 bp, Zea Mays
caaatttttcaggcaccttcacaacacctctagtaacatattcgccaaatttcacgccaatccggtataccaggcttcaatttcactcaattccccatttcgagcgatcaattccgagccaagtgcccaaattccattttcttcgcctcaaatcaaaccaagctcacacttcactcatatttacccatataaacctattcgtgaagtattgtctcaattccacatcatttcatacctcaattcgaatttcaaacctcctatggcactatttctcgttcaaacgtcgttttcgcgtcgtttgacctctcgatcgccatatctctcgttttctgtgccataattctttgtgtatgtatttattcacatttcatatacttatgactatgtgactaatacatgctcacctcttctgtcatttcagtgaccttgcctgcccgtgagccgtctcctgtcctacttggattttcacctctcgtgtgagctttccaggtagacatccactcttt

SEQ ID NO: 109421 - DNA, 712 bp, Zea Mays
atactgactaccagtgagttctaaggaactttgggctcgattcatgctcaaaggaataagcaaatgggcaagatccctatagcagaattgtagctggtgtatagggctacaagtttgttatagatggattggcaagttcctgcacaaaagtccaagatctaggcattgcaattttgtctgtcaggcgctctgaatcaggatttcgatggtacagtgttcggatcagattgccaggttcagttcatctcgccgccggcgaccacgcgctcggattcgcgcctgatgctacgattcatgctcaacgaagtactgattgttgctcggggtagtaaatatcgtcgtgtggatgaacttgagccactgttcactccggccgccgtgtccgcctagctcacggccgattcggatgaactcaccggagttagctgctcaacgatcgtgcgccatgtgccttggtgtctttccacgtcgcagtagctcatattacacatatccggtgatcgccgatgagcccgtcacggtgaaagccaccaatctcttgcgacagtgctcttttctttctccgaccgccaccgcgccatctcaaattcatgggccaccacttggggatcctataaattgaacatgccgtcagttccgcaaggtagtcaagcacccaatccatcaactcgtgccttcaattgttcaccagaggccctgaattgctcacatc

SEQ ID NO: 109422 - DNA, 649 bp, Zea Mays
gctatgatttggaggtgcattaccatcctggcaaggccaatgttgtggcagatgccttaagtaggaattgtatgaatatggatgcaagaatcgccaccctatgtgatgagttgtgcaagttgaaaatagaagtcatttcctccgatgcattgaattatatctcagtggagcccaccttacaagagcaaatagtcttggcacatattggtgacaagggtgttcaggtcattaaggaaatgatcaagcagaaagctgaaaaatacaaatgcttccgtcaggacagcaaaggaatcctatggtttggagaccgattggttgttcccaagaaccctgagctcagaaagaagatattggatgaagctcacctttcaaaattctccatgcaccccggcagtaacaagatgtatcatgatctcagatctttatactggtggaccagaatgaaaagggaaattgccaagtatatatccgaatgtgacacctgccagagaatcaaggccagtcatttgaaggtagcatgccctttgcaaacccttcccataccatcttggaaatgggaggacatttgcatggattttatcatgggattgcccaatacctcccggcaccatgattccatttgggtcattttggacacattgaccaagac

SEQ ID NO: 109423 - DNA, 766 bp, Zea Mays
tcaaaatcttagttttgaatgggttttttttagggttttgctatttcaaacaaacatactgaagaactacacaaacccatgatcagctcgaactagagccttaaaatgatcctagggcaatcctcaaatagagagtatccccaaaaacttcactcaaccatagaaatcaaaggttaactctaaatataaagaggaaggatttagaagaagaaaacacactaaacatataaacccaaatctgatttgagacataaggcaaaaagcacactggctccatttggttacggccacacttcctcaaaatctcaagcacacatagatgtcaaagttcaaagcacttgtggatctccgggctagagctattcaaaactagagaatcaaaaactctaaggccttgtttgggagcaagggtaatggaggggattgatggggctagatgtaacacctcaagtgttagctatggagtttaacccaacacatgtggagttaattcaacatatcctattaaaccaattatcacatgtgaactagttttgacaaaaggcaccatacttgaggataaaaggccctaagtaatcatcttagaagacctatcttagtcacttcatacaaaacaagaagggagaaagtaaccaaaactctaaacacactacattgagccattgaagcatcaaaaagagataaagaattaaacaatatggatcacactatcatgacttggaccattaattgaagttgtagcacaccaaaatacctacaaaattta

SEQ ID NO: 109424 - DNA, 487 bp, Zea Mays
cttggtaccagggtgcgactcgttgtaagcttcgccagcagtggacaacggatgactacgctgacattgattcttccgacgatgaagacacgaagtacgaccagtccactagactaggaacccaagtggaggtggcacccatcttggatcgagtggtaagttttactcaattttaataccagacatgtatcaattgtatgtttgatgcaaaattgtgttgtacagggtaacacattgagacgctcggtacaggacattgattgccagcttttgactgtgggcgacaacagcatgcgtagcttcttggaggtaagcctacctgtagcgtttatagcctttagcttgttatgattatagctttgatatgttgtaaactaatatgtctttggcgtgcaacgtttatctaggcgcctacgcaaagctgcttctcgctgtggctgcaggaccaatgttgcacatgacattcatgtaccgtcgtagagccaca

SEQ ID NO: 109425 - DNA, 467 bp, Zea Mays
gaaaagtcgggagagctgagagaaccgagttaaccaactccaatctttcggcctgggagaggagagcagatgtgcaagacagtcttctctcaatcttttagataagtggtagaaagtgacggattctaggttttgacaagcccagagggacaccaaggtaggtgaaaggcattgatcctgtctgacagttgaacgttctagacagaacctccatctttgctgggcagacattaatggggtacatacttgatttattataattcaccctgagccccgtcaaagttgtgtaggagttaagaactgctctgaggaagaataattgcctagggcaagcttccattatcaataatgtgtcatcagcatattggacaatcgggaaatcttggccacagttctcagtaagaggcaactgaagtaggttttgctgtctcgctttattgataatactctgaagcagatctgccgct

SEQ ID NO: 109426 - DNA, 366 bp, Zea Mays
gcaaggcttgttcagttattaaacagactcttcagcagattgttgagaaacaatacaatctatctgatgtttttggcgagttaattgatgaggtcctccgtgctgagtcgggggacaatgaagatggttatgatgtgcagaaaacaactacaaaatcagatgatattcttccccagtcggcaggttagtgagttttatggtctctacgtcaatctaaaaaagttatacaaacatttttcgatatcgttatgatgccattatttaaaatgattttttgtttaaatgatacgtaaagaaggatgtacgtgtccggccacgcaaactgtaccggatatgtctactccagcatcccagcaggagacgcgg

SEQ ID NO: 109427 - DNA, 1045 bp, Zea Mays
tgtccaaaaaaagaacaacaacaagattggcataatgctatggccaccagaataagaggtcagagctgtcttttaataactcaccgttgattccaatctttgtcttctcgccactcgaatattctgcacagaaacaaagagagaacaaaactctaaatccactgcaggttgcacaattcacacaatatgattggtcggtgggtgcaacagctgcttatgtggcacgacatggggcacctgcgtagctatcaccctcgtcagctcgatgcacctcgcacttcaattcacaagaggttatacaggctggaccagtgtctgaaactacacttacaaggctgatgaggatacaacgtcaaaagtaagcacttacaccgaagaagagtctgtgatgggtggaaggcgtagccaaagtggactgaaccagtgctcctcacgcatagaacctacaacacatgagccaaggcgcataagtggggccacctgcaatgtgctaggaatcatacgtcgctacatcaagggtgagaacaccacaactaattaaacataaaattaggggaaactcattattcactgcccaaatgcaactgagaacacagtgagaaccacaatttgtgttgttggaaaaatcagggaatccacctgcacgcggcacatagattggaaactcgttttgtgacaatttttcttagaaagggaagagagagaaaatagaaaagaacacacaaaaatgaggagtggacatgtcagtttagctatctcgattgaaactataatggcatcactcaagatccaatataacccaaaacatagcacagactggaaaataccagacacccaaatccaattaatttggaggcctaatcagagctaaagccaagaaaaatgcacaaagacgagtgcggtgagagcttatgtggggctatagatgtgtagcttttattacatactaccgataaattatatctaaagtcgtatcaaaccatatatatgttaagcattcagttttctgaggacctgaacttaaaagggttagatttagttctca

SEQ ID NO: 109428 - DNA, 473 bp, Zea Mays
tgcgtgcctaacaacacaacgttcataatgagatactacatgaaggtcatccacagaggccagaccaacccttggctatgataatgtgggtgacaaccaatagctagaaccatcatcaggagaagggcgttgtaggctttgggtgatcaaattcctactagtaatagcaacaacacaataacttgagggttcaagcaattgacactgatagcacttaggggctcattatcacttaagggaaggacacgacgaccactgaccataggagccccaatgccactttgcccatgacaatattggcttcgataaggacctccgtctcaccattgatgctaagaggatcacaactagcacatgatctggatcaccacatcaagaagggaggaacctaaggaacaccatatctataactccatggaggatggcccaatcatctgactagatcggtctgatttctttcatgagtagttatt

SEQ ID NO: 109429 - DNA, 472 bp, Zea Mays
cgatgatgagaggatcattcctgctaacattgacgacatagttaagcaatggctcgagaacatcccgcgtagccatatatccatacaactctatggggccaccatccacatcaatcttagccaactttaaggagaaaatttgcaacatgttttcaaaatgcttcccaaattttttttgcccttgcagtgcatgcaatctttgggatctgataacgtcattgcctcaatccgagcttcataaaacatcacatgatttattatagtgggatattaatacggggacaaaatactagctaggcatatgataattaagtagacatgatccttaggatccattttcacaatccaccaatcatttttctagttttcttcaatccccaacaaactaacttattagaaacttatgtaacacctacgatacaaaaatgacaaacagtgatgaaaacaaatggaggaagactatatatacccc

SEQ ID NO: 109430 - DNA, 536 bp, Zea Mays
atccagctctagccaatgaggacctcagcgccaagatactcaatacacaatcacagaatccataaagtcgacgtcggtagcccttaagttgttgtgggctacacacaaaaggtctgcagggagattctgacaacttattggtcaagtaggtaaaaaatgacggcagaccaaccccttttattctatatagctcaataatattgtgaatgtaactgaagtagttattgaatttcgccttttcagagaacttgtcacaatagagtgcgcggatttcagcacggaccccatcaatgacaactattgtactaacgtcaaactgtccattccaacttaatcccacgttattagaaaaaaaatcatttcttgcaacagatccagtctaaaaactcttcctatctttgtagtatcagcaacctataagaaagtaccatcagcaaatataattatagcttcagagaactcattaccaggtatccgaaaaaaatcttcaagtgatgtttcccatgtttcatgaacaaattgtggaccaagcacag

SEQ ID NO: 109431 - DNA, 328 bp, Zea Mays
gcggcggtgtggcattaatatgggtaccatctaatgctccaatgcaatctttgaaatgaggcatcatccttcgatcaccagcaattctactatgtacagtggaaaattttggatcaattggtctgatgtagtccttgcacatacacaccacacactgaagtacttcatgaaacttcctgctaatagtctcccccgaatgtctgaatatatttgttaaagcaatgtttgaccaaccatggccacaagtgacaagaaaaatagctagcgactccatagaactcatatgtatagatgatttcagaccatacgaactctctagcaaatcatg

SEQ ID NO: 109432 - DNA, 722 bp, Zea Mays
actgaggaggcctgatcagctgcgcaaagatgtgacagaggtagtgagcatacgacaactaacggcgagcacggagaccatccaacactgtatcctcaatctcacatattagaaaatcaaccacatcaaactctgagtgagagatcaaggcaccaagtagctagagatgaatatgtgtggtggcctccctgtatcccatcctaggtagcaaagtccgcctcatcaactcatagaggaactttgttgcttgagtgaagtcagcagaagaatgtcgcgacccatctgtaaacgaaggtctgaacagggtagcgacatgagctgtggttggaacaactctgtcattagggcgacagggaggatctgatgtgccaaagcacaagatgtggagcctcatcgttgattcaggaaatccaaagagctctttgatctgagtggcatgtagagtgacatcctctcgctcgaacctgaacctcagccactagtgatctagatctatccaaattgtggcatagaaaactctgacccactgctcaatgtatctaccaccagaggtcaaaagagaaagtaaacatggcagataggataggtgaccctctgactcggcaccggcggctgacagaaatgctgggagatccaaaagccggtgcgccctcaaagcaatccgagctgacaactgcaccctgaagaatgactcctgagtcctggtgctgaagagcggtgca

SEQ ID NO: 109433 - DNA, 630 bp, Zea Mays
gtcttgttgaaatagcgatagacatgacatttgatgagtctaatggctcgcaagggcatgtttctaatgacactgcaggaaatgaagaactaccttgtgaggccataaagaaacttgcaataggtgaagtgagacctcaagagaaggatgatgaagttgatcttccccctggccacgcccctgtgattcgagggttggtcctccaccgggcggaggctcggcgtgctggcaatgagccagtaactgatttcactgccagtggaggttctgctctccttcaggatctccgtttccagaatcctgcattgcgcattcgcgatgccaggattgatggaaaccgcttttggacgcttcatcatgtggatttttataattccgtgattctccccaagaaacatcaacctattatgcttcaacgctatatcaactgggaaggttgtgagaccattggggacccagagatgacacatgcattgagggcctgtgaaagcaaaaagatgaagagtatcatgacattccaatatgattggaatgatgaagtcattgcccaattctactcaactttgtggatcaagccagctgacgagaagagtccatacaactatccttatctgaacttctacattgaag

SEQ ID NO: 109434 - DNA, 289 bp, Zea Mays
gaaagtttatggtgagaaagaactccatgttaagttgtaatgcatctgaagattgagtttgacttcactcctcccttgacaaggttggtcttttctcctccgatctaggtcccattgattcgtggtgagtgcatattattgaggttggggcatatggttaggatagatatggatgagatagactacatgatgttggtcaaaagtttggatagtccgattatgtaattcatcatgactctactggttgagttagatctattaggatgacataaaatcttttcaagataag

SEQ ID NO: 109435 - DNA, 517 bp, Zea Mays
ccagttagagcttaatatgagacaaaggagatggctcgaactgattaaagattatgaactagagattcactatcacccaggcaaggctaatgtagtggtagatgcgttaagtcacaaggcttcctgccattgtttgacgctgaagacttctgacattacgttatgccaagaaatggagaagttgaacctgggaatggtacaacacagaactgcaaatcacttgaagcttgagtcaatcatcctgcaaagaataattgacacacaaagaaatgatgagggaatgaaacacattcattagaaaatggaggccggaaaagccaactgcttcagaagagatgatcgaggtgttgtatggtttaacaaccgcatagttgtgcctaaaaatgatgagatctgccagcaaattctagatgaagcacatcttagtcgctattctattcatcctggaagcactaagatgtatcatgatctaaaacagcattattggtggacaaagatgaagatcgaaatcgcacgc

SEQ ID NO: 109436 - DNA, 315 bp, Zea Mays
cacggggaatcacagtgaacagccctgacggtgacgccctctcggagtctcggtccctctccaggctccagccttacttgtgcgcagccgctgcttttccttcctcttcatcccgtactcttgctgatccatccatcggcgattgatctgggaagctccggcatccatccatcggcgatgacgctgggaagctccggcgctggatcgagcatcgtgggtaagtaacctacttccccctttttcccttgctgtggatctgcctatccggtccgttctttgctgtaccttgcgtgggtgcgcgtgccccgatctgac

SEQ ID NO: 109437 - DNA, 442 bp, Zea Mays
agaggaagaagctcaagacgttgtactgagcctgctgatcttaagcttcgggttgactaggcccttgtgtcgtatgtcgacggggtcactgtgtcaagaagctgtggcagaattccgggtggtagctgagcagatcagcacaagagatctagtccaagaatatctagcctataaggtgttcccgacgctgagtgaatggaacatgccgaagctaaaggggacaaaggagaagaatgaacttgtgcgactgccttatcggttcaagtttgagaaatagtttaaaaggccatgccaagagtggttagaaatgatagaaaccatgtgcaacgaaattttgggtaattacactaaaaaagaagaccagctgatgactgcggcctttgggacccgaccgaagcgaaggttgaatcgggtaatggatgcattgaattttgaatatcct

SEQ ID NO: 109438 - DNA, 309 bp, Zea Mays
cagacatagtgtaatcaccaaggtaagatcaagagatgagaaaggtaagggtaatacccaaccagagcaaaagcacaacaaaggatagagttaaaaactcgcaagcgacatagaagaggatacgaccaagggaaagtaggtaagatacaactctcagattgagatggaagagaggagattttaaagggtaggtattaaataaacaacaagtaagatatagaggtggtgaaggtgataaaaaggcattacaaaggatagagttaaggcaagacttgcaaagtgtcgaagtggagaaaacaatcaaggata

SEQ ID NO: 109439 - DNA, 305 bp, Zea Mays
cttttcaaccttggcaacagtggaaaatgcctcaaaaccttatgtggaacccgcttcaaaccagtttcatctttccatctagactccttgcatactgggcactcattcattttagcattaacattccgaaacaacacacaattgttcttgcacacatggatgttttcatatctaaggcccaattctttaagatatttcatggcctcattatatgattttggaaactcactgttagggtatccatcggacatcagcttcatcattgctgaaaatgttgtattgctgattcgataacgagacttcat

SEQ ID NO: 109440 - DNA, 483 bp, Zea Mays
caccttggtgacgcgcttagaacctatgactgactcgacgacgagagggtagacctcaagatgtgggatgttgtcggggtggtcgcgacggtcgaagacgattggaaattccaaccaccaaaggtatcatgggattgtcggctccgctgcgtggacttctcgatgagcagcctttatgcgatgcttgtcgtcgtaggctcggccccgccgaagatcatgaggcaccctattgactcggggaaatctttggtggggacttcttgctttgctagctttgtcggctcctctggccttgccttttttgtgagaggtatggagataaagcgcttcaggagctcgcactcctagagcttgtgttggatggggaagccatgattttgacacgacgagtccatcagcttctggaaatggtcgccaccgttcttggccaacgacctagttggtcgatttgctgtgacgatttcttcaccgcgccgaggatgg

SEQ ID NO: 109441 - DNA, 593 bp, Zea Mays
gaaaggtaaatattttcgtgatacaactattgtgagggccaaaggagagaatacagttcctctttctgaagttgatgaagtggttgtttataaggggtttatgaaggctggccttcggtttcctctacataaaatgctgattgaggtacttaaaagattcgagatatatcttcatcaactcacccccgaagctttgatcaaaatcgggggttttcatgtgagcaatgaggagctaggggttggaaccaggcgtcgattgcttctgtaatatacatgtattatcttatcagacgaaggcaatggggacggaacaatatcacaacaattttgattgatattccttcgtgtaccgctctgatgcaagacgccctgttcccacgcttcgcaaaaaatggcccgggtcttggatgaagcaatgattctatgttaagaatgatttggttgatagggaggatgtaaaagatataattccgtgttcaatatgatctcgcttcagcgtccgaaggccctcgatgatgaataatgacaaagctcaagcctgcatggtagccttcaacaatgtgtgcagctacattggcaccagacacttggtc

SEQ ID NO: 109442 - DNA, 583 bp, Zea Mays
atttttgggcggtctttgctgttatcgtggagactgctctggcctcgatccacttggtaaaatattcgacaacgacgaaggtgaactttaggtttccttgagccgtaggcagtggcccgacgatgtccagcccccaacgctgaagtggccaggtgtgggcgatgagcttggtgaattgcgaaggggcgcctgagcgaggagagaatttttggcatgcttcgcatgacctggtgactcggttggccgtgcatattatcgcaggccagtaaaatccctgacgaatcaccttagctgcgagggccctaggccctgagtgtgacccgcaggttccgccgtggactttgcgaacgatctctaggcctttggtttcggttatgcatttcagcatagactggctgatgccctttttgtaaagctagccctcgactattgcgaaatccctgctcccgtgtttcagtcgtttggcctcgttgcgatcggttggatggtaatagccctagaggtatagtgttattggggcccgccagtctttggccattatgaggttgactattcggtggcccttggtgtcttgagttatttg

SEQ ID NO: 109443 - DNA, 1433 bp, Zea Mays
tgttgcgacctcctaacaccctaaataaataggggagggccagcttgggaatgttttcgtacgacctccactccacaaacacagaaggcaaaattcgatctacctgatagactacatcgtcctcggtcacgactactttggtcagagcacgccttggctgttaagatcatctacgagcgggacatagcccacaccagccaacgagacacccgtttggactcgggtgccccttggggtttgcgatgcaactgcactaaagtcctggtcaaggttgcgaccctcgatgttttgttggtgctcacgtgccctctccagggagatacgagcatcctcacccgcatgactgtggttgagctctgcccgtaggtcatcagtccacgtgcccctcactacgggtaagtgcacggatgctgacgcctcacttgatgctaggatattcgtggcccggttctggctaagctagtagcagcttgggccatgctgaggaggtggtcgacatctttacgccaccgcctcatggcccctggtgaggctgtagagcttggggctgtagagcaactccctggctgctgataactccccactgagagtagcccacaagggggtcctagacgccttcaccaacgtgtgctgttgcgtagcatgcacaacagcagcactagacgcagggcgataagagcctcatggcacggaagatgccacctcttcccccatcgggaagtccccaaaggacgagtcgtggtgctcgacgatctataccatcatgttgagcaaggaaaacatgcaagaaatctaagcctaacccccacctgacgtgcaaaatgtcggagagaaaactctagccgggtggcggaatgcacccgcctaatcctgtgaactagggggtgcctagggtttgcctgattaggtcgatgaacacagaatcacaccacagtttatagttgttcaaaccgccgaagcataaaaccctacatccactgtgagttgtattgatcagggcttgggaaacctcaagtgtggacaaatctaagggtgctcgagggtctcctagaaagtctatcccttgtaacgttatgtgccctcccttttatagcccaagggggcacatataaggaagctgagccccgataggcgggcctaggaatatagtaataaaaacataatacatggaacaattgatgtcgacagtggacatagatcttctcttggttgtcgtgtggatttcttgaccagcctctccttcgccatgtcttatcagcgtatgggcgaaggctctggtatgggttgtagtgtagactgacacactaacgtgcgtaggatcatgcgtagtcgcccgtgctgtcacgtctagccgatcactataacgaacacaatacccgaccgaacgacgcttcatgatggtgtcttccacacgcgtggcataacggcctcgg

SEQ ID NO: 109444 - DNA, 786 bp, Zea Mays
ccaaagcgggggctcttcaagacttcgcttgccacgactccgggtacaagtcttggcaagattcgaagacccgacgccccgagagaagactgatgctcctgttcgcgtggactgtggaatgggcccatgcggcgccctgctggcctactcaggcccatgtgtaagcccatcctagggtagggttgatggtgtgtttattcatattgtacttaactccactgtaatgacccccaatgggggaacattttggggaagacgtaggtaaccaggggcataatcgtacttaggagggcatgtccactccctttgttacctataaatacttgcgcattgtacattgacaggacacgcttaacatgatgttgttgctccctgttcgttgtattgttgagcactagagcactcctacctctcgttgcttaggcccactcgaccacgtgtcacttggtcccaacatttggggtccactgtttgtgcttcgacaaaccaatcccgcgatggctcccaagaaattgacttcgaaggccaccacctccctggacgacgcgatgaaggcaacccttatcggtgacgtccctcatgaggccctcgaggatggagcaaacaacaacaagcgacctcgcacggagaacccgcctacccctgagggcaccgttcgcatgtgtgtctctgaaggcctcccccgaaaccctccgccaggctttaccccctagaagctgacgatatcatcgaggacaactaagtcctaggcatctcagctgaggacccgctaaagttgcacgtgct

SEQ ID NO: 109445 - DNA, 574 bp, Zea Mays
cattgtctcagatacggtgccatgaagaatggcattcttcacatcaagtggatgaatgggccagtcttgtgagtgagccaatgagagtactgtgcgaattgtagctgacatcaccactaggctgactgtttcttcctccacgttgctgcataagcatcgtttcatcaggccttgtgacacgatttcacgatgaccttggagagtgagggtatttgctgggaatctctgttcaacaccagtctaagggtttacttttgccacaacgtctctatgcggacgccatactccaccaggctagtataacaatgtgcaagcccatctctactattgatacaacgtctaagtctgctgttgttgataggctacatatgtctatcccactattttttacagcctcgttggagctctttggtgcttgactttcacatgatcgggcatcccattatgttatgcagcaggtgtgtcttcatatgcatgatcctcgcaagtcacactgggcagcgatcaagctacatctgtagcaccattgatcatgatctccacattccttggacttcgtcgatctactttaggc

SEQ ID NO: 109446 - DNA, 511 bp, Zea Mays
cagggatctgtagagcggccaaacgtccaacatttgtttcagtcattttttcaccaatagaaataggatctagtttctgcatgcaggatatagattgggtgcttagggaagggataaatttcagtttattaagcaaggcaaatatctttgctggccttcccacatatgctgttgtctatattgtcaagataaacatatgtaactaactggttctgaagaagacgacgaagtaataaaacgatgataatgttgttctaagtttaaaaacattattgtataaaacaacatgtaaatgttctttgaagcggctctggcagttgacaaaggtgggtcatgataatgttgttctaagtttaaaaatatttgatctaactatttattcaatcattgaaaagaaagcctaaatgcataaagaaatttattcaatcatttaatttattaaaaaatgttttgaataaacaacatgtaaatgttctccacgaggataacatgttgtttaggtgtataagct

SEQ ID NO: 109447 - DNA, 477 bp, Zea Mays
actccatacatgcttcagttttatttgactctggagcatcgcattcatttataactaagtcattcgtggaaaaacaaaacataccaaagcaccctcttatgaagatgttacatattagttcaccgggaggtgacatgaatgccacacactcatgcctccatgttaatctcaagattcaaggaatagattttctaatcaacctagtggtcctaggatccaatggtattgatgtgattcttgaatgtgactggttgaaaagttgtgatggagtgatacaatgtgccaacggaacaattatgttgacaagtcctcaaggtgaaagaatccaagttagcacagacatgtcaacaaatgcaaaaggagagacaatggtaaatcacttggaataaaagtccctagaaaatatcaaggtagtgtgtgaatacccagacgtatttccggatgaattaccaggtatgccacctaaccgtgatatag

SEQ ID NO: 109448 - DNA, 509 bp, Zea Mays
cgagttcagtgacaagaagccttgtgccattacagagacccttattttgattcaggttgcgcaacaacatcacaatggcacccttttttagctcgagtttgtgggtaggaaaattgctcgcatcaattgagtttaagaattcagtagggtagaggacatcaaagtctggtatgtgttccgacgattttgctataacgtcacagctcaggtattgtatggtttctctagggacaagcgagagaacgtatttgttaacgtcatcaactgttgcattatttgggcaaacaatggcacgcgaggaaaggtacgtgggatcttggtaattcaatagaaaatttgggtatacttctgatacaagggcagctaccttatcaccctcaacacggggcaacaaatctacagggattgtaatccacgttgcctcacactcgctccctcttctttcagcaggcaaggtaccatcaccaatagataggacccatttggcaaacatgtcgagctctttctgt

SEQ ID NO: 109449 - DNA, 534 bp, Zea Mays
gtcaagaagctggtctaggttgttccattcccatggaggtaactgagaatctttcagccttagaggtggctgctgcaaagaacccggtccccaaggatggtgcaagcggttacccagcccctgagggtgttgccggtaatgatccggctcgggtgggtagtgcgagctgcaacccagcccccgagggtgttgctgctggtgatccggctccgatgggcagtgcgggcagcgacccagcccccgagggtgtccaagcgggctccccttctcatacctctatggatgtccacgttgggtcttctcctccacattctgatggcatggcaacagcgcatgcttcaaataaggaagtcgccttagagaccggcgcacctgacgctagagttttgattcctgctggtgatgttgagttgatccccgatgacgctcttcagattgcctcggttgatattcctttgtcgagtcaccaactggcttctcatgatttggggcttccttcattcttctccaatcttcaggtaatttggcttttcc

SEQ ID NO: 109450 - DNA, 358 bp, Zea Mays
cgacagagttgctcctgccactgctcacgtcgccgccctgttccgacattcgttcacagatgggttgcagtgttctccagccgacttcactccagcagcaaagttcctatatgagctcatgaggcacactttgctatctcggataggatacagagaggccaccacgcatatccagctctggctactcggtgccttgatctctcacttggagtttgacgtggttgattttctgatctgtgagattgaggacaccgttttggatggtctctatgctcggcgtcagctgtcgtacgctcactatctctgtcacatatttgctcagttgatccggtctcctcagttctaggccaccctcgag

SEQ ID NO: 109451 - DNA, 560 bp, Zea Mays
atttagtcttcttttagcactttttcagtagcttcatttaacagtctgtcgacagcttcgtcaacagcttcattagcgattcttattatatctaacgcttcctgcatggtcgggtcaacttcggggtcatatggctctggtggaggagaaagttcagctacattataaaaactgtttgttaattccgaggctgaaaacaaacttcgaagctaaacctcagtaaaggtacctataagccttgcgcgctcggtaacttcttcagcccgctgggcttcttcttgagcgtcgtgagattctttttcattttttctaatcgcttcatcagccatatcacaactgcccttcatccacacatcggagtaaaatctcccgcctagcgcagaagcttcagccgaagggtctttggtgtcatccgtcgagaaaacaaatcacggctgagctgcagtcttagcatgtttgcaaccggctttctctaagatcaccgcaaccccctgtgcgccagcgaatgcgccgaagtctccttggtcacttaaaattttgtcaaaggcttagaattctcc

SEQ ID NO: 109452 - DNA, 409 bp, Zea Mays
ccgcaaccagccctttccaggttagttcatctctctctcccttgtttaagcaccctggttactctgtgatgcttgccgagccttcaatttaaactaggagaccaccagtcgccgggaacacgatgatctagccgccatgctctcggtcaccgtggccagagctccttagttggtcttggatgcaattaggttgggggaaatgattaaggtagccccaatttcatgtctgttgcttggagaacctagccgttgccccaatcggctggtctgctagctcgccggagttcgtccctgtgcagttcgccgccagggacttcggacggagaaaggatagaagtgcggggttgtttttgtagatgtcagagagacattgaacagtggccaggaattcttagtagatatccaaaac

SEQ ID NO: 109453 - DNA, 725 bp, Zea Mays
gccatgactattgcagacttggaagatcagctccatgaccttaaccttgagctggaggaggctaatgatcacattgagatgcaccaccaggaacatgttgagatggaggctgaccttgaagatgctgatatggatgaggaggaggaagacccagaggagattgagggtgtttctgagttaaccaccgagagtggagcaccactaccaccagtcgactgagcacacccctcagcagggagtgttatgtcagttaataattaggatagattagttagcagcgaatgatgggtatgctcctcgaagtagccaaattttggttcttgggtgtaactggctaacctagactagagcattccttgcatgttggtaccctaggttgtaaggcaaattttgtgtaaacatggcctaaccacatggtatgtgcaagaaactgaaaactggttgtggttgttttggaaatcataacgggtgcgagtcctcggtataattttggtattttcggtccttgcaatgtataccaaatgttgttgtgaattttgttgcctacgcacctataaaatcctaattaccttcagcatatgcagcacaagtgatgcctaaaatactaatataaaggttcacagttgcagatggcagatgaaacgcgccagcaccctagaggccatggtgagactggtggaaaccagcaggcaccacccgtgccgcaaccgccttccatggaggcg

SEQ ID NO: 109454 - DNA, 476 bp, Zea Mays
atctcctgtcggggctaataacgggtcatgtgctgggtcgtacattgtcctattcctttttgttgcttgctgaagttgagtggaatcaacaaagtccactgctggcttcttggaaccagtcaaacaataatagtaggggttcgctccatgtttgccccgtgttttccaaaaactatatttagtcgagagggttttgttacatccaaactcttagagtccccccggctggccatggatcgaggtaagcatctggctccagagtggtctcaccaaggttagtccaagcgccgcccgtcacaataaaggtgggtagtgaccaagcactcactcgactcccgccctccatcgtattggtgactaactttcctcttagggtggtgggctcaagcgtcggggaacaggtcatattgctttcatcttctagcttgttggaagggaattgagggctagcccttgtggcagcaaacctgcatcgc

SEQ ID NO: 109455 - DNA, 787 bp, Zea Mays
gtttgtatatcatttccaagggcagtggctggcctcctaatgtcgaagcgagaccatatagggcgttgaatgattccttttacatcctccctttgacttaggtcattcttcacgtagaactattcctgcatccaggacctaggccatatcttccgaaatgtgggaactaggtggctcgccttagagcgaggtacgaagctgtaacaaccaaagttgttgtggtactgctcctttctagtagccttcgtctcataagacagttcatggatgttgcagaatcattttgcatctggttccggtccttggctcctcatggcccatataaaaatccccactttaatgatggctttaggagtaagttgatgaaggtaaatctcaaaggtttttagaacctcgaccaacaatttgtctaggggaaaccgaaacctggctttcatgaagcttctgtaaaccaccacttcgtcagcttcgggaagaggaacattatcttcccctccagccctcacaattgagatatcacgaaagtacctccccctcattgcatcaatctgcccttgtttaatagttgattttccgaagacaacatgactcggtctccatggccgatcttcggcatctttatttccgctttccactatcactagaatctttagatatcccagctaacatctcatgtgcaatcttctctgcgttggttttctccatagcttcataaacccggacagtgctgtatcaacaatcttcttctcatcagccattaggttgatggttgttgaaataccgaagc

SEQ ID NO: 109456 - DNA, 329 bp, Zea Mays
ttttcgacatattgtgtcttagtttttgtgggggatttttgcgggtatattacatggctccgcctcattaaaaacctcaccccccgggaggaaaagagtgcgggccggaatgatactgtttggtgaattacaagggcgtgttagccctgaggattcaaacaaaaaatttgtggagattatcgatattccaggaatgctctaggtcctcgccggatggcgttgttagcctgtacatgctaggggacgccttcgtcttgacgatgaaaggaccctcccactttggctccagcttgccccgtgactctgtccgagttgtccggacgagtacg

SEQ ID NO: 109457 - DNA, 1114 bp, Zea Mays
gataattcttgtagaccaatgagggcagacaaagcaggagaaggaacaccactactttccccactggctatgtagcgccgactgttcttccgaatcagagggatctcatcttcttattcctcctcatcttcatcagcaacacggacagcacacccattggggtcagcgtaagatgggtcacacccattgggatcagcttcagtaaattcaggcacgggcacttcctcagcagcaggagccgaaggaccagaatcccgatccaagctagacactcggcgaagacgtctcttcttatttttctgcccattagcaggagaagcaggctgattggctcggcaagggcgtttcgggcgaacactgtcaggcctctgaatatccaaggctttactagcttctgggagaggcgccaccaccaatgttccagcaggagcggcatcagaagaatcctcggataatatatcaagcatggcacgtatctctgcatcactgggatccaaaggcacctcaaagtgaacctgtcgttcatcatcaggaattttttcaagcaaagcaaccaagcactaacttcttcggcagagggtcgcactctaaggcccaaaccgccatcaccagcatgaggatttgacacgaaatgagtaaaggccttggaaggaggcaggttccaggccgagtacgcaacaggggcaccaacatttgataccttgcctctaagtatcatttcaagccggctcaccaagtccacaacaggaatttttctgttggttacccgggttgagtcagctaggcctcagtacagataggccgggtatgccctgtccttcagtggctgaatattcttgaagacaaagtcagcaaccacagcctctgcagtcagacccctctctttcaacaatccaacttcagctaacagagcccctgcttcagccacctcctggtctgtgggggattcagtctagctcggagtgcgaacatccggctgtctccctgaccgtggggggagagaatttttgtgattctcaacgataaaccactccaagcgccatcctttgataatgtccttgagtgggatatcaaggtagtcagtcttcctcccacggcgcatctccaagctcac

SEQ ID NO: 109458 - DNA, 408 bp, Zea Mays
gttttgtcaagctcttgtataaccgtaacagccattgcttcagcaggggccgagtcagaagattctcgagccaacatattgagtacaacatctatttctgcatcatctggactcgctggcatctcaaaatgaacttgcctctcatcattgggaagatcacaaagaggagcaaccagagcctcaatatcttcaggagagggtcgcactctaagacccagaccactatcaccagcaggagggttggacacaaaattgaaaaaggacttaggagatggcagattccaagcagagtaggcaacaggagcaccaacatttgatactttgcctctcaagatcatgtctagtcggctcaccagatcctcagcaggaattctcctattggtaacccgagtcgagtcagtaatgcca

SEQ ID NO: 109459 - DNA, 281 bp, Zea Mays
attttctagaaattcagggtttaaaaagtaagttccatagactcaggcatatgaattcactcaacctgaggatggtgggttgaatcagaacaagtcgaggggctcttctacaaaattgccacgctgaaggggtaaggacccatctgagccgtccgatctgtttacagcggacgagattagatcgcgtagcgttatgaaccggtatgcaatcatacccgttggatctgtgatccacgacccatattaaaagaacgaaggggtatgctcatcttttaatcccg

SEQ ID NO: 109460 - DNA, 983 bp, Zea Mays
tgctcatcatcatcattgttcatcttccacatcacatcattgaacatggatctaagtctagcagcttgtctcctatctttatcccttaaagcaaagaacttgctcggattcaagtatagggctgctccatatagtttttgctccatttgattttcccatcttttttcaaagcatgatagtacatctgcttgcaatcttggcttatctttcaatgactcctttatggtggtttttgcaacatccattgctgccatgatttctagggttgctagtgtctcatctccatcagtaatccttagagcaatgaggagtggttgtgaagcccttagacagttttccactttttcccaaaatggcatagaaagcacaattcttgtgatttgcctcccttcttcagtgttgggaaacttagttaggtgccactcatcactgacaaataaactctttagaccatttctatgcctaagcatgctcgccaatgtcagaaatgaggtagcaaattgagtcacacctggcctaacaagatcaccacctagcttctctctcattaggttgtgaattctaccatgcttgtaaatgaacatcgacactttcttagccatattgatgcaactattgaagtccttgatctttccaatgtcctctaatagcaaatccaaacaatgggcagcacaaggtgtccaaaacaaatgggggatcctatccatcaagattctccctgcagctttaaaattggctccattgtctgtgacaacttgcaccacatgctctcttccaatcttgtcaatttgcttctccaacaaatcagccaacatgttagcattagctacctcacttgaagcatcaacagaagctaaaaagtaggtccctgccggactgtttactagaaaattgatcaagtgacggtgtgatgtgtcggtccacccatcagacataagtgtgcaaccatattccctccaagatgcttcatgcttcgacctcaa

SEQ ID NO: 109461 - DNA, 494 bp, Zea Mays
atcaccagcgcgacccccgggtttcagcttctgtttatataataataagaggcgccaaaaggcaacagatttctgttggtttacaagaagtcaagaataggcgatgcgttcaagatgaacaaaaagatctcaggtttataagaacaacttctgtttatacttactatgtcgccatatttaccagacatgtactacatgttacaaccgttgatgtattgactagtaaccacagctgaggcctaacttttctatgagttgatagtacgtataggtgttaactgaaaacaatatcgcttgaaagcagagacactgtgcataaatttttgctctggcgcaagtcaacatgactgtgtagaggtgctcaactgatagattacagtcctcagcttaagcttcatggcaagttacagtagtaacgaagttgatttttccttgcaggtaacaattcatttgcaagttcataacagtccatttgtgtcccatctcacaaaaac

SEQ ID NO: 109462 - DNA, 468 bp, Zea Mays
ggccaccatacgtaacgactggtgctctaattcggctgagacctaattcaacccttaacaagtgtttcccctcaatcaatttcactagcggagctctaaatcgtccagtccacggaggcagcgcagacgacgggagaacagaagtgttcccggtgatctagggcagtatagctcaattgaatgggtcgagcagcattaggagaacctaaggacactaaaacgaaagatcagatagtatgaatagacctggaacaagctggccacggcgagggctctttcacggtggcggaaaccgatttgggggaaaagagcaattcgtgggctctggtgagtaattgagagcacaagcagttggattggatgctggattacctaacggagccgagggtgtgctcaatttatagtctacttgagcggtggccagtgaatttgatggagatgtgtggcggccagagaggaggaggggta

SEQ ID NO: 109463 - DNA, 416 bp, Zea Mays
atttttgtttaccactgttcccgagtaccaaccaatgttctccacctccttcgctttttgccccttccattttgcctcttggacacataggatattaacatgttttctgctcgttgcatcgactaactgtcttagcttacctgtaagggactctatgttctaactacctacatggatccaagtcggctcaactagcttccttacccctcgcacccattgagacagatgtgaagacccttgcacatttgtcactacacctaggcgccgatgtagcgctccactaaggaagcaatgacccgatctagatcacgatacgacgcgccaccaagggggtggcatcctagcccttgtccatttaacaccatactcgggttctgatatggcatgtcgctaagagggttacacctcaatggttt

SEQ ID NO: 109464 - DNA, 528 bp, Zea Mays
gattgtcaagtgaattttataattaaaattctccaggacaacgttttcggccgtacacctcactggacaaactcaccggacaacttcttttgaatcttcttgagaggtttcatggcacttagacaaacatagttatcaactaaaacaattgattaagtgtaggaaccatacctttttaattccctttcataaggatttgcaatatgcctaaactaagtccaaataccactttactcacacaaggaagttagtagctaaatagcagtgcaaaaaacataacataaagttagtgtaacatacttaaatattaaaacctcctgttttgtggttttgcccaaatttgacttatgtttggggccataaaccagcagccttcatatctcatcccatatcttagtccctattgcaaactctattttgtaaacattgtcatttatggtacaaaacaatgttttgcacgtttatttacaggtttcgctgaagatcaaactgttttgcacattcatattcacactccgctgatcggac

SEQ ID NO: 109465 - DNA, 647 bp, Zea Mays
ttgacctccagttttgccagtattcggcgtgaaagtgcgactccagaactgtatcactttaccacccatggtcttcttctgccaacagaggcaatagtgcttcgcgaagactttgattgagggtcctacaccatacgtggtcatggcccacacaaacttagacaacacaacaatagcgttcggggtcaagtggtcaactagtgcagttgaacgtgggcgacttcaaaaaacgcctcgaatactacgatctctcctcgtgggatcagagtcttctcagtttcaggaactcgtctggtacccaatacaaaatagcctaaccgttcaaattcccgcacgtggttcaaggggaccaaagaacgaccgaattctagcgtctcctgcccagccacgcaatgagcgctagagccacccaccgacaatgacatctcagagagcttagtgctccataatgaagaaaagagggcggtggcacataccgacataagcggcgtgcagtttgcttaatccgcgccaacgcaaacactacttgtagaacacagagaaatgtgcgaggcaggagaagaggagtaatgaaaaagtagggaccggaaaaagctttacacagccccgcccccttatttatacaacacccgagcgacactttggaa

SEQ ID NO: 109466 - DNA, 789 bp, Zea Mays
gtcgatgtttaatgtccggccgcacaactagggtaccctcgttgtgcttttgggtaggatggtgtcgtggattgtaactcaatggttcatgccgggggcacgagaaagagagagtcgagcgagttttagcaggttcgggccgcttgaggagcgtaataccctactccctgggatgactttgtatgtgggaggtatttacaagtggtgtctattaagtggtgagctgctaatgccatgaaagtgatggggatcccccttggccttatatacacgatcgtagggcgcttcccgcgtacacactagtaacactcttccagcttatctcctagctaatagcgaatagactttgctatcccgaggaaaacctggcgcctccgctccgagctatctccgacgtttgaggatgtcgggcgctagaaaagcgaacaacttcgatgggatcatgcccaagccacgagtaatccgggcgtgggcccatcgccttcctaggtcggcccatttttgtcgttctctttgcccggcccatgacgtggcgtccctgcagggcaactagcatgtggccccaagcagagttttcgccctcaagtggacccggggagatagccagcgaagctatcaggcaaaatgaagaggagacccatcgagcttcagaagaagccaagagagtcgaagaagctgggaagtgagaaaggcatgtatgtatatgtttctgctaagctctgggttcataattgttttaacttcgtatttgcttcatatttgacaagacttcatctttatgtagcagaa

SEQ ID NO: 109467 - DNA, 288 bp, Zea Mays
atctagcgtgcatatggaatagcttggtgttagcatctccctctctgagccaactgattcttgatctagatcgtgcaatggtgcgcttaaagaaggaaagggctaaggagtgctttttcagtccacatctcagccaatcctccaaaggggacaaaagtcttaaatcttgggctatttcaagcctgtgaagaatctctcttgctaaagctaactgtgaggccacatgcccaatcttttttccactccatttctgcaaagatctagcagtggcttttaatctcctgtcaa

SEQ ID NO: 109468 - DNA, 339 bp, Zea Mays
gttaaaattttacagtcataagtctgatcatttagaagtcatgcttttcgcaagtttagtaactgaatctgtccaattcctgtacagatttcagaggtcgcattgtttgcttaagttcagtttagaatcagtccttgtcaattataagaaagttgtagataatgttcttatcttacttgtgttaaattttcatgacaataaacctgatagtttgagagttatgaattttataagaggattgctatattctgtccactgtcagaacagatttagaaaactgtattgtttgatttagttaaatatagaatcactttttggtgattataaaagttatgtagt

SEQ ID NO: 109469 - DNA, 967 bp, Zea Mays
cttttccatgttgcttcatcttctccatggtgactccattgcattttgcacatctttataactttgttcctcgtgacacgagtcagtgtgtcaggaatcttgacaggatactccatgtaagtcaaatcactccaaacactgagctcatccattggtaattgttcctcaggaacacggagacacttctttagctgagacacatgaaacacatcatgtacatctgatagatgatcggataactctagttgatatgcaacttctcccactcgctttaagatcaagaaaggtccaatgaagcgaggggacaactttcctttaactttaaatctcctcataccccagagtggtgacatcttgaggtacacatgatcaacttcctcaaactccagtggtcttcttctattatcagcgtagctctcttgcctggtctgagctaccctcaagttcttcgtgattatacatgcttgttcttctgcctcttgaataagttcaggtccaaaaaactgactttctccagtctggtcccaatgtaggggggtcctgcacttcctgccatatagagccttgaacggtgacatattcggactggcctcgtaactattattatatgagaactcagcataaggtagactcttgtcccaactactaccgtgctgaagggcacaagttctcaacatgccctccaattcttgattagtccgtctgagggtgataagtcgtactgaagttcaactttgtgttcatattctcatgaaaacttttccaaaatctaggggtaaattgtgatcctctatccgagacgatcctcttcggtacaccgtgtagagacacaatccgagccatatatactctgccaattgagatcccttataagtagtcttgactggaatgaaatgagccacttgggtcagtctttccacaataacccatataggattgtatgctttcgaggtgcgaggcaatccag

SEQ ID NO: 109470 - DNA, 901 bp, Zea Mays
cacatctccgctcatcgatgtatgagtgggatatcatattaatcaaggggctaggcttggaactctgacccctacctaactcaccaaatgttggaggcggatttcctccgtccgggtggcagagtgcaccatcccttgatcctccgatgaggaaagggcttagaggtttgcctaaccaagtagattaactaaagaacacaagggtttagagtggttcgggccaccgaagtgtaataccctacatgcactatgagttgtattgcttgattgcttgagtgtgatgggtctggatgtgagtcgactacccctctggaggtagtgccctcccttttatagttcaagggagtatgttacaagggagctaggccccgataggtgggctaggtgtttcttctaccagaagcatgaggcctcgggttagggctggtaacactatatcttctgggcgtgtatctcctcttggtcgtcgtgctggctcctgacatcctatcctcatgtcccatctaattggaatgcagtcgtagtacttggtataggttgtggcgtagccttatacgctgtcgtgcgtagggttgcatgtacggtgttattccatctcctcctgcttgtctcctcatgcatcggtaacacatgaggaatagtaaaggtcacaatgaagggtgcccaagcggcacattgagtcaatggtcttgccttgataacgcgcggacaacagtgtatcccacacattacagattaggcgcgtcgcacaaatttaatgcaagggatacgccacctgcccctggtgtgggttggtgtgcatcccctgtagctattgctgatgcccccatgtcagagggcagacgtcaggcaccgcccatacacacctagtcacgtgtcggcatcggacctctgcctgggc

SEQ ID NO: 109471 - DNA, 367 bp, Zea Mays
ctacaaacaattcttcatattactaagccaaattttgtgaaccttgatatcatcaactttaagaaagtctccaaatgcaagtttattgcagcttggtctcaaataggcctgacatttgtctatccacaatttagcaatatcaacctctgctttcatatgcactttagacggaaggataactcttattccctctgaacacctgcgattcaagaatatatttggtagggtgacattcaattcaaaagcacaagaacatatcgattcacttcatagctacaaatacctcatatggtcttcaaactcatagaaagaagctgatcgttcaagaataagtctagccttctcttcctaggaagtggcctctttg

SEQ ID NO: 109472 - DNA, 322 bp, Zea Mays
aggaaggtcaactggaacaatctgaagagcatcgtcgggggttgatttagctccactagcagatatcagaattctggcatccggctcgccgacctctaaggtgactccctcgctcaaagctaaagaagtatgcatcgctatcactccatcagatcatggtggagacgacccgacgtggacgtccatggaggtgtgggaaggagagctcgctcggacaccctcaggggctgggtggcagcttgcactacccatcggagccagatcactaccagcaacaccctcgggggctgggttgcagcttgcgctacccaccagagccaga

SEQ ID NO: 109473 - DNA, 564 bp, Zea Mays
ctatggtgatggtccctgctgggctcgacatcatgagcttgaggtatatgtagttgggcatgaccatgattttcgtgtaacacgaccttcccaatatggcgtggtaggacccacataatcctactaattcaaatgtgagggtttccatcctaaaatcgaatggggtgccaaaggtgatgagcatgtcgatctgccccaaaggcgtggccttgtagtggcatgatgccatagaaaggaactccagatggctgaagatgatcactgttgacgcacatggcttcgagggtagaagagtatagaatgttgatctcgctgcctccaaccattagtaccttcgtgagtcgcaccatgccaatgatgggatcaatgataatgggtattgtctaggccgtgggatgtgctcggggtggtcagaatgaacgaatatgatggggtggtcggaccagtcgagaaaatatggggtggccagacgcacttggaacacctcccggcgctcgatcttgcgttgtcttttggtcgcgtagtagttgggcccaccgaagatcatgaggcatcccatttcat

SEQ ID NO: 109474 - DNA, 393 bp, Zea Mays
gcttaatcggaccactctcgttgagtcggaccgccatcatcgagtcacgcatttttcgcacgccctgtaggcattgtttgtctgtcgtgatcatcgagccataattgcgcctattgcgcatgtttcatggacttgtcatgtaccccgactattgagccacaactgcgcctgttgcgcttattacgaaggcttcctacgttgtcgtagcccagatggccacacacgcgttgacgccagatacgatagagcttgtactcgcgtggattgtggtgggtcgttcaagccctaaagtcacattatgcgcaaccttcataaaaaaaattgtttggccctatattttatttgattgtgttgtgtgtcattatatatttatatatcgccaactggccataa

SEQ ID NO: 109475 - DNA, 274 bp, Zea Mays
ccagaggattcatcggagaggtcagtccactgttgccctgactgcccagttcaggcttatcatcatcctttcttcttctctttctattgcgaagcctccttcgatcctgactgcgtagtgcagcaactgttgtttactctgaatgggactgagactcaaccgcctccgctagctgcagcgagaccctacaccatacaagtgccttagccccagcagctaccttcaacagagccagaggcctcatggaattcttgagatgaacagaggtcggttg

SEQ ID NO: 109476 - DNA, 849 bp, Zea Mays
cccagttacccgatgagttagtagaagactttgagaagctcaatctaggaatagttgctcacactgatgggattaccatcaaagtggaacctaccttagaataagaaatacgtaaagctcaggttgatgatgccaagattcaagaggtcagagatcttatggtagaaggcagaggttcagacttcacagaggatgatcaaggcacaatctggttcaagaacaggatttgtgtccctaagattgacagtcttgatgtgaccatattgaaggaagcacatgactcagcttactccatccatcctagtagtaccaagatgtaccaggacctgaagcagaagtattggtggtatggactaaagaaagatgttgcttcacattgctagagggtaaaagttgaacatcaaagacctgccggtttgctgcacccgcttaagatacatgaatggaagtgggaagaaattggtatggacttcatcgtaggtctaccccgcacatctactgggtatgattctatatgggtgattgtggacaggctaaccaaagtagcccactttatcccagtgaagaccacatattcaggagccaggctagcagatacatgtaacagatagtttgtctacatggagttcctaagaagatcgtattagaccgaggatctcagtttacttttcggttttggcagaagttgcacaaatgtttggatacaagactgaatttcagctcggcctaccattctcaaactaatgggcagatcaagagaaccaatcaagtactagaagatatgttaagagcttgtgctcttaaacatggtggcagttgggataagagtttgccctatgtggagttctc

SEQ ID NO: 109477 - DNA, 311 bp, Zea Mays
gagccgagaaactgcatccgcggaattgtttggttcatttctctatgaattccggctcagactgacttcaacagaggccatacaaatcgagcagtcattcaagcatttggctagcatctctagtttgcatgtacaaccatatgacacacgctttcaacagcacaggcaaaaagacagcggtagtatagtccaataaatggagtagatggtggggtcatgttctcagacacagaaaaaatggctgccagccacggtacaagctaatatggctttcctctctctttccatcttttttgcctggctcatttggc

SEQ ID NO: 109478 - DNA, 337 bp, Zea Mays
gggaaggctgtgacaccccagtgtcacctagggttctctcaaagtgctaacccatgaaccatcatcttaggtgaaccaaatttgagcatgaacatcaaattgacttaagaataaaggatccactaagcctaaacttaaaagtatcatgttcaaaacaaatgggtttttcaaaaaggcaaaatgtgcaaccccaacaaccctaattgagccctatgaacaaaattcaagaaaatggggaaaagagtgtgaaaaatttagaatcatggcttgggccaattataaacattgaagtatatttaataagcaacaataaagattgaggaagcttggccaaaat

SEQ ID NO: 109479 - DNA, 521 bp, Zea Mays
cggtggtgcgcagttattcagccatgaagcaaagaaaacacaaaaccagtcatgtgcttgcagctaatgctcatttaaatgcttcagttgatcattaatgtttgcagccatgtggtacattattacccatcctgctagccaaattgtattttagttcgttcatagctcagtatgccggatatgctgattgacaaacgcatacaaaaacgataagtgtggtgtccgtgggggttgtagattgtggataactaagccattggagagcttctgagtcaatcggaactcggaagcgatggtgagtaagctggagaaacccaagatgtaatgtgatatgggtacaacagtaatggtaacaatgttgcacaaaataattttagagatcatgtccatcaagaaatccataaaccttcaacggccaaaatcaccaaaaataagtgattcccataaaaagtaacttattttttgtagctataggattattaatagcggcacgctatatgtagccagagtgtactaattta

SEQ ID NO: 109480 - DNA, 367 bp, Zea Mays
attgaacacaagcgtgttcagctgggagatttgaagaggaaggctatatcctagggacagggaagcaacagtgttcgtcctcgctacggttcaccccagggtacaccatttcgcactggaggaggccagcgcccagctcagcactcacctcaggggactccaccgactcgtcaggctacccccactggcaccccgacgaaattttcaggacagagtgcaggcactacttgctacaagtgtgggaagactggacattatgcaaatgtttgcccacagaggattgctaatatcctagttcagaacaagcagcagactctgggatctggcaagggattctctattgccagggttaatcaagtcagcgctg

SEQ ID NO: 109481 - DNA, 453 bp, Zea Mays
gtttgtattgtttatgtttgtatttgtaattgattagggtattaattaattgtttaggtttggttcatttgtttccccaaaattcatttaggaagtaggccccaaaatgtgttaggagtgcacgtgatttcaccattactatgaataaaatcatataatgtgatggtggatatgtttagtaaaatagtttctatataatgtgatggtggatatggatgccgattagatgtgattggtggccatcgtgtcgtttgtatatctgcgtgtcggccatagtgctgatacttttatttgtaggttttggaaacctccccgtgcagggaaggtgctgccgaaattttctattgataggctttggttatatatgttatggaggaccgtgagtggatgtacaggggccgtagaggaaggaacgatgtaaccactgaatggattagaaagaccgatgatttt

SEQ ID NO: 109482 - DNA, 538 bp, Zea Mays
aaaaaatggaaatgaacgaccgagtgttcttctcatttagccactcgaccagggagctcgttcgtcacatgtacgggaggcacaaccggccggtgcgctcggacttgcacaactatagggcgtggctgcagcgcacggagtcaagcgtttccggcagagtgcgtcgatggcgagcgtttctacggatcaatcgttggcgtttctcagtgtaatacagaggcatcaatggcgcgagcgtttagacggacattcatggcacgttacaactgagattcaggcgcctctccctctcctctcctcccctataaaaggtgcagcgtccctcgccttctccctcttgcagcaggcagtagcaccatcatctccttgctcgcctaacgacattctctgctactgttcgtgaagccctctctcctcgccgacgtaccgctcggcacctcgcctgatctttgctatcggtctcccatgcttcgatcaccacctgtgttgtatgcgaggcccctgcaacgacgtcggagccctttacctgcgcatccgc

SEQ ID NO: 109483 - DNA, 675 bp, Zea Mays
tgaaacattagggttctaaaacattttggatatgaaagtactacataacacactactagcttgttcaatcagaatcacaatctataagtaactcatcttcagagtcattcgtcgtgcaatcctcaacgacaacctcgttccacttaatgcattgtccagtatgacacttttccgcgtttctcttataataattggcttctgcttcatctgcagctcgggagaatagctgatcctcagccttagtttcatcgcacttctgcttgtaataagtggcctctacctcttcggcggcctgagacataaactcgtcctcctcttgagcacgtaatcctgcctcagctagtgcgatgagctcactcaacattgatgtgtcctcctcctcttccccatgtaatcctgccttagcaagagcgataagctcactcaaccttgatgtgtcctcctcctccatcagctccaccgttgccatttttcctgaacgtatcttgcacgtgcctcatctgcgagatagttcacggcacatccaatctctgcaaatgtaatgagataaattagtttgcaaagtcaggataaataaattgtaccaacaaaactatcatgtcatttttctcactcacttcccttgagacgatcaacaagattctccaacatctgtttctcgactctagccgtctc

SEQ ID NO: 109484 - DNA, 681 bp, Zea Mays
ttattttcaaattctaagttggaccatccgataatcatatggatcactcaccgaaagggtggttgagcaaagtcttcctcttgtttgggtggtggagggagggatttgatgggcttgttggtttatttgtggtggtagtggggggagtagtagtctttcctagtgggggagttggggaagttgagggggaatctgtcgtggtgcgggttgaattttgggtggtactgggggaagggtgtgtggaggtcttcatagcgagggggtattggtattagtaattatgggctatggccctttagttgttttagggcaccaccctggccatgcgacccttggcctccttggttactgggcaatcctttatggaatgcccgatgtcttcgccatggaaatcacaatagagttttctctgatgttggggcctctgcctcgatcgtgacctcttcctgcaccacaacctcgttcatgttgtggagggttgaactgactgtgagggggcctcgattgactgttgcgggtaggcaatgttgtgtatttgcagctattgagtggggtcttgatgcgtgtggttgtagtgttggcctctagcccatggcttactagagtgtggagtgtctttatgtttatgttgagcctctagtttcctgaaatgtagttccttcgaccatgcatacttctcga

SEQ ID NO: 109485 - DNA, 844 bp, Zea Mays
ttcccgtatgctcatatcgtttttatgaaattagggacgtgtagaagtaatgtttgaacattaaattttatggcaactgttaaatcaagtatctggagatccctcctgaaagggcctcaaaaaactcatgaggctctttaataaggctcgtaatatgccgtcatattaggatgtgaaggcatattaagtcatattgtaatcttagctggccacacttaaaattgaagaatttgttgctttgtgaattcggttgtaagatgtgcatctgcagcctagagtgtgagattccatcacctagagatggacaactgatgagcagtgttccacttggttggcatacaaggcgcaattcaaggctcctcctacactaggcacaaaccaaacttaatttggcaaacatatgcagaaaacgaatacaagctcttcactttgattttagtgcaacataaaaccctaagcgcagataatttggcgttgtcggttggccaacccatgatgtatgtgtgctaagtattgtatttgggccctcaagactgtaggacacctttgcttgcagtgcccctttgcccatgcggtctagaacctggttagcaccacaattagttgctggtgggagaaaacacccataggatcccaaaagacaagaggcacatttgtattggtatggtcatgtaatatttggaattgggaataacataaccgaagcatctttgatagtatgtcctaaacagcgtagcaggtagctctaaacataaaggaaggcatttcttggtgcaaaaaggtttttaataattcactgcctgtaatttttgtttttcttggcttagtgtatccttgtcttcag

SEQ ID NO: 109486 - DNA, 1935 bp, Zea Mays
ggcgaactcgaagctgcctccgccacggcgagctcgagccattcctgcgttgctgaaccgcccccgccgtcttccttgaagagagagagagagagacacacacacagagggagggagggagggagatttgcttcctcctcctgcgccgctccattttgaaatcgatcccgttcgtttcggttgccttcggcctcggcggtgggtcctagactcctaggtagctcggttgttgtttctacgattcacctcgtttttattacgttgttgatttggtccaccgcagtggagtcgtggaatcaggacgccaggcgcgttgcgtgaggttggggattgtaatggttgcctagcatagttgctcagtcctcagctgtagttcaggagcaactgttcctgctcccttgttgccgttccacctgggatcgtgttgggatcgatcacaaaccgaacaattgtcggcaatctgtgcttatttacctccaattctaatttcatggacttagatttgctcaaagcttcacactaataaacaaatcaggcagggatctgaaatggttaggcatagtcacatgattgaggttgatgcacatatctgagtgttaataaacttgttctcaggactggcacgctggctgggtagtttatcatttatcttcacagaaggaagtttctctattggaactttagcatacacgggggtcagaatctcaaatttccacctgataatattccttcaatactcaatagtatattagtatgctaatctagttcactactttattaatctaatttcatccattctgttggaacaagtttaaagtcaaagggatcatccctcacttgtaaatcaaatccagtacttagttcatgtttcctttcagtatctcttagctgtgttttagaattctagttcattagtgctgatgtcctgttgagaagataatcgtatgccatatttgaagtgaataactaatcactttcctgtggtaaattcagattcatgagaaactcgcatctcacactaatattctaattcagcaatttgttatgagctccagtctgttggaacaatatcaaagccaaaggaattatccttcacctaaaattcagatcttagttagtctatactctatttgattaatctgttgtttatgttttcaacatccagcttattatgtgataccttgttcataagatcaccgtgtactgcaatgatccaattcatttgaagtgatgcttaacgattttctatgttcaggttcatgaggggttcaagaatgaatccaggtgaccgtagaacgcggagcacgatgacgatagtaattgtgatgggtttatcatgcttcttttacatactaggtgcttggcagaaaagtgggacaggaaggggtgatagcatagctctgagagttaaccaagaaactgactgtacaatcttgccaaatttgcactttgagacccatcataccataagtggcgctaatccattgatcatgtccaataaaatgattgagccatgccacatccgatacagtgactatactccttgtcaagaccagaaccgagcaatggcctttcctagacaaaacatgacatacagagaaaggcattgtcctgtagagaatgagaaactgcattgtctcatcccagcaccaaaaggatatgtcacccctttctcttggcccaagagccgtgactatgttccatatgcaaatgctccgtataagagtctgacagttgagaaagctgttcagaactggatccaatatcagggagatgtgttcaaatttccaggaggaggaacaatgtttcccaatggagcgaatgcttaccttgatgaacttgcatccatcatcccactcgctgatggcactatcagaactgcacttgatactggatgtggggtatgctctctcaccagatcttgttatattttac

SEQ ID NO: 109487 - DNA, 457 bp, Zea Mays
caggagcaagttttacgatggaggaagcagaagaaatagttgactctgtcaatgaaaggaacgatgacctgctctcagcatggtgtgaaatggttaacaacaaagtgactcctttgcctgcaacgcctctacatattcttccagccataaccacattctgtgtttctggatatgagtgctaccacctgcgatattggactgaaattacttctgaaagtaggtgaactaattattaacgacacactactctatcttctctcttgtggctcattttctttctatatacttgcagctgatccagatcatccatatttcaaaccctgtgagatgatgcaagtgttctccttgggattatcaagccctctcactcatcctgttaatatttatgggtatttttctgttcgtgataactgggaaccactccgcaattatctatttaagcgctcaagagctgatc

SEQ ID NO: 109488 - DNA, 432 bp, Zea Mays
agttccacctagaacaaataaaaaacccatgcgcaaattagatttcctgagaaggttggggttttctcaaacgaactcaaaacgagatcaacttggatcacgaccaaaaaaagtgcaccaagagggcatatgcagtgatccaaagagtgtatctcgccaccaatcaatccccaataacacccacaacacaaaaactcgaaggttcttcacaaatccacaaagagaaggaagggaagaacacaagaacaaaatcgactcaaaatttcagcagaaaaaaagttgagtaaatgattcgaacaaccttgtggatggatccgaccacccttcctttgaatagcaaagcgaagattacaaacacagacacaatttcaaaacatctgtggatctcggctacattagggatgaagactagagtttctaagtgctaaatca

SEQ ID NO: 109489 - DNA, 940 bp, Zea Mays
aaaagaataacctccaacttctcttctttgcaaactgggtatcacactctacccccctttaaaaagaattcgacctcgaattctgacgcttctatcggaacgacagaaggaaagattaatgagtcaacaacacttacccacaacgaaaagttccggatatttctgccgcatcagctcctcaagttcccacgtagcctcacgctcagactgattagtccataagaccttgacatacttaattgatctcttcctcaatacacgctccgagaattccaagatacgcactggacgacactccaaagtcagatcctgctgcacagcagttggttccttctcaatctgatggtccgatctcgcaagaacttcctcaacatagagagatgaaaaaccgggtgtagccctgccatggaatccggcagttgcaagcgataagccaggctacccactcgggccaagatagtgaacggtccaatgtatctcgggctgagctttccggagacaccgaaccgaacaactcctttagtaggggataccctgagaaggacttggtcacccactgcaaattccaaatcccgcctcctcacatcagcataactcttctgacggctctgagcggccaaaatgttctgacgaatttcccgaaccttttcagaattctgctgaacccaatcaggaccaaccagggatctctcccccaaagtctcctagcacagaggggagatacaccgcctgccatacaaagcctcaaatggtgccatcttgatgctagcctggtagctgttgttataagcaaactctgccaatgcaagatgatcctcccagctacccttccatgacagaacacaagcacacaacatgtcttccaaggtttggatcgttcgctccgactgaccatcagtctgagggtgaaaagcgacactaagtgaaagcttggttccca

SEQ ID NO: 109490 - DNA, 278 bp, Zea Mays
atgtgtgatagttaaagaagtccttatatggtctgaaacagtctccgagacagtggtataagaggtttgattcatttatgctttctaatggctttcagagatctcaatatgatagttgtgtttatcttaagtttgttaatggttcacctacatacttgttgttatatgttgatcatatgttgattgcttccaagagcatgaaggaaatcactgttttgaagccacaacttagtagcgaatttgatatgaaggatctgggtgctgcaaataaaatcctt

SEQ ID NO: 109491 - DNA, 714 bp, Zea Mays
gcaagacatggttgatggtgtgacttggctagccaccctgccacctagttggatggtcgagtggattgccacatcgacacgagaggatcaggagaagtaatgggataggccttgccctactccccttttattgacgttatttactatctgttgtgatgttaagaacaatgtaatcttttatcaaaacttcgagtcaggtaataattcaagtactttaaaattgtggtttcatgtttattgcactctctctgagtctcaccgtcgtgtgagatgatggtactcgatccttggtaagtggctttatcggactggatccaaggaattgacggattattccgatttaagtgtgtcgtcgccttcaagccttgaccggacatttaagctggaataatctgggtgattccgccacacttctgggcatgaaaaaatagctgaagagccaagctttgtccttgggacagatacagtgaaaatcgcccaatctactggtgaagagttggatgaactcggatttttattaagacatctcagtggagatgatctaagtgaggagaaagccttggagctggaggataaggccaaagccatgggctatggccctagggctatgctatttggaggcggagaaaaaaatgctaatgtgcgtacccgatgatgatgagtaaaggattgtaaagaatattacatgaagcatccttttcttacagatcaaag

SEQ ID NO: 109492 - DNA, 1002 bp, Zea Mays
cccccattggggtcagcagaagatggagcacccccattggggtcagcagcaggtggaacacacccattggggtcaacgtcagtaaattcaggcacaggcacttcttcagcagcaggaactgaaggaccaacgtcctgatccaaactagatactcgccgaaggcgtctctttttcttcttctgctcatcaccagaaggatcaagttgattggctcggcaagggcattttgggcgaacactgacaggtctctgaatatccaaggctgtatcagtttctgggagaggagccaccaccagtgtcccagcaggagcagtgtcagaagaatcctcagccagcaaatcaagcatagcacttatctccgcgtcactaggatccaaaggcacctcaaagtggacctgccgttcatcatcaggaattccctcaagcgaggcaaccaaggcgttaacttcttcagtagagggtcgaactctaaggcccaaaccgccatcagcaacaggtggattcgaagcaaaatgagtgaaggctttggaaggaggcaggttccaggccgagtatgccactagggcaccaacatttgataccttgcctctaagaatcatctcaagtcggttcaccaagtctacggagggaattcttctgctggtaactcgagttgagtcagctaggcctcggtacagataagccgggtatgccctgtccttcaacggctgaatgttcttgaaaacaaaatcagcaaccacagcctcagcagtcagacccctctctttcagcagtccaacttcagctagcaaaacccctgcctcagctacctcctgatccgtgggggactcggtccaactcggagtgcgaacatccggctgtcttcccgaccgtggggggagagaatttccgtggttctcaacaataaaccactccaagcgccatcccttgatactgtctttgagagggatctcaagatattcagtcttccttccacgacgcatctccaaactagcaccccca

SEQ ID NO: 109493 - DNA, 791 bp, Zea Mays
accaggtccttgtcgagcaagtccgcgaggtggggcgaccgatctggtccctaccgagcaagtccacgaggcaggacgaccgactaggtacctaccaagcaagtctgcgaggtggaaacctaagtccagcatcgcgagtctgcgtcaactatgataagatgcgtcaacctaggccgcagccaggcatgtgaacggtaggtcgagggcacaccgaggggtcactatcgacatgactgcaccttctcaagtacgacccgtggtgcaccccactgccctgaggggtcagtcgaccctgttcattgagacctcagcaccagagcttctacagtgactcaaatacccaatagtgcgcagccgatactccataccgggtgtatgcctatgcatgatggtgagtgacataatgagtcccggtggttcaccattcagagtgagtccatgctagcttcccctacgaacacaaatattattgtcccctgcttccaaaatcacgacatttggtgcgtcaggtaggggaacttttagcgtgccaatagacattcatcactccgatgacccacacattgacattcgctaacggcgaagctttcgcgtcggggagccacatcatgttcggtaccctcgacttcctcaccaccgccaccggcgagctccgcctggccacctctgatgtgcctatcaccatgggcacacaacccgcacgctccaccaggagcaaggcggtgcctaaagaggcgtgccgccgcattgatgtggcacctcaataggcacattgatgccataaaaaagaa

SEQ ID NO: 109494 - DNA, 373 bp, Zea Mays
ccgaggccgaggtcgtgtcctcgcccgcctccccgtcctcgccgtcctatgtcactgtcgtcctatccaccggtgttaaggtgagagcgcaacgactcagacagcccattgtttcgatttccaagctccgctgcgtgcgttgcagcctaggtgttcgtcgaacagctaacttcgttgctgggttggtttgtccgtttggctatctctgtgtctgggctgtggtgtggcctgtgggcaggctatagtagacggtaggaaggtcctgccgcgggacactgaggccgatcttgggggcgtcgacgatatgaccaagctcgtctacctccacgagcctggggtgctctgcaacctcgcactccgatacaggctcaac

SEQ ID NO: 109495 - DNA, 445 bp, Zea Mays
ataaaaccatgcaatccaatggagaccgtaatgtctttgcaagcgtaaaacattgcattgttcgttgattcatacgcagatgactattctaaaaataaaacatgatttttctaagttttgcatcaaatagtaactatgacccacatagaaacaataatacgatgttacactgaggatccggccaatagggttccgatgctacttgtcagggtaggaggagacaactcgggattgacatggggtagaagcagatgacgaaacgatggccgctccttcgtttacaagagtattctcttcttatcgttagcgggcgttatagcgtttacttgtatatccccactagggatggcaattctacccacgagcacggtatccgcaggttttatagctgatgggcacggatacacgtataaaatctcgttcacggataaggatatgggtaaaa

SEQ ID NO: 109496 - DNA, 891 bp, Zea Mays
tttacttgctctccttaccgccttaagaacactgaatgaagctaaaactgagtggaccagaaactcaccaagtatgactcttagttggtgcaatatgattgacatcagttgacggttccggtctattcacagagctagaaaaaccgataatgttggttggttcttatatggcagttagcaacaaaatgatctgcctcacaacaatggaaacacatcctttggttgctcactgggcttcctcatcgtcactaacatctttgggggcatatcaggacaactcgatgaacttatacatatattttatcaccgtcatacctccttggtggggtttcctgaattcaccctttttgagcttcatgatgcattgatgctgctaggaatatgttgtctgaaaatcttaacaaaaccattccatactatgtcaccagcattgacatttgcttcatggtaactctaccaccaagtagtgttggtcccttcaactgttgtccatgtcatcagcatgaacaacttctagcttcatctcagtttctcttagtcaaatatctatctcaactgggtttatcagaatctccaaacttgtgtggttgcagacagttgaaatctccaatcatgttgttgttttgaggggttgctgacttgtagctgccacagttaccctgattaccttgagcttgagttatgagagcggtcgttagcactttggcggccagaaccacatgtgctggtgtgcatggatgtggaggtagttgtccattttgcgctatgtctgggaccacattccgtgcatcttggacacttggttcccctggttgatctcatccccgtcttcttgagttacgaacccatggactcgtctcgaacagcgggacatctgcggtcgaggaaggt

SEQ ID NO: 109497 - DNA, 1631 bp, Zea Mays
cttgcaggagatcaggcctaaccttgagaatgcccagattttccagccccctaacgcagccgacaatgtctccaagtacctgtcctcccacactctttgcctgtaccagtatgctgtcgttctgcttgcttattctaaaagcgttattctgtccatctctgtaggctggagactgatccatctgctgaagctatggatgaagtgcccacaaaccgcagacggctgaagtaccgccaactaaatggatctgtattccaaagcttcagaccacttatgctgaatctgtatgaaaagccttcgtcagaggagaaactcgtcacaggtggccactcaaaagtgcgtatatctgtgaatggttcacctgaatcggatactgaagagagagataccatggtagacacgtccgtcaacatgggcaaaggcaaggtcgctgttcgcaagaacagaccagtttctgaagaagcactgtcacgttcttcagatgctcggtcagctggaagcagcaagggctacaactccgaattggatgtctacgtggacgcattaaccacggtggactctgaagcggagacagactcggaacacaggggccatggacaatgtacctttgatcggatggattcagacaatagattctccaatgctcaaaacgccatgacatcgaggaacagcaacttcgacaagaaagataggccagatgttccctcagcaaatagagatatgagtaaccagcatgaagaagccacggtctccacacaaaacaccaaaccagtggttgttggcgaacatgagaggaccagctcgttagaggaactgcttggccaagaaaaacctgcttcttgggatcatgagaggactagctccttggaggaattgctcaccgaagatttcaatgctccagaatctggagcaagagagcaggctactgaagagcagagctgcaatggcagtgccaccggtgctgtatcaaatggcacacaagatattactaagaagaccaaggaagtcaaggagaactctaacattgcaactatttccttcaagaaaatagcaagcaagaggtccagatatgtcggcagcatggctgcaaaagttggcattctgccaaggaaactctccaagaagcatgaccctttctctgattccctccggtgcatggcgaagcaactccttgaactgaagtacgatggcactaaagatagcgacttatatgactttgaagcaaacagtgtgggatgtgatgtcaagtatcagggaatttctgaccctcctgttgaaattaaggagagtgacgtgcacaaatttctgccagattcatcctatgatgatgtgggttcaagaaaatgcccgcaggaagaaatgaaccatgggcaggagcatgatgctccacctactgacagtccacatgattcagtccctgatgaaggaaacggatttcaggaccccaacatgatctacttggcaagcatcatcacatcttccagttcccaagaggaagaaggatgtgcaagtacttcactgcatgagaattcatctatggcagtgctcaaccatattttggagcatgctcaagagaagtttgaggaacatcttgacaaggatgtgaatgaggacattcatacagaagtcat

SEQ ID NO: 109498 - DNA, 596 bp, Zea Mays
gagggagcctcttagtcattccaatttctcgtcatctttccccaccaccgcggagccgtcgggtggcgtcgctagacctctaccttgttcaatcgcgggtaagaggttattacatatattcaccatcacctagggaacattgatcgcggataggattaatggatggggtgatgttgcacggaacgggcattgtcggccatggcctccgccgtggggttgcccgccgccgcttggtcagctggtggatgaagatggtgtggagatcgtaggatctagatgaacgatagagattagaaggttggggaggaaagtttgtaatcgttgattgcggaaaggacgccccggattagattcacgtataacgcttcggctagatctgacgcgggccgtttgatctagatcgggcgctcgaaaatcgatctgggcgttataaaatctgatgcgtcagtgatagatcttgcggctatcattatatgccggtttagtgatttaatcctggccgctagcgggtgatcaggccgtccatattcgcttgtaccccttcggccagcctgttttgcgcatgagcccttaggtttctttcaactcaacccgct

SEQ ID NO: 109499 - DNA, 848 bp, Zea Mays
gcactgcgcaaaggattcgtggcattcactgtggcaagcttaccggcgacgacccagctatctaaagcggcttagtgcgacatggtgaatagcctgaggcatggtgcaaccgtggtgaagggcacaaactctggtgacggccgcttggccacgtcgctggcgcaagtgggcacggcataggacggaacagtgcttcaagctcatccgcggtgaagatcttttcaccccgaggcattatctgggcactagtgggcacaaatcgcatcgccggtgttaatcacggcgaaaggtcaccggcggcgatatcctctgcacctgaagatcttttgctactgtaccatgagaaatccaattcagggcctctgtccgaccaacttgcaggacccatatcttagttttctgtgtgagaacttgttaatctctctgtaacaaagttgtagccctataatccagctacaatcttgtcacagcaaccatagtcaaatacttactggatcatctccaaaagaactctcaaagttcattccgagtcactgtcagaaaaaattcagaatctgagttgactgacagctagtctttagggctagttatctccaatttttgtatgtgatcaaggcttagttacataagcaaagttgcactcctattatagctctacaagttttatgtgttgaccctaggcaaattccttgtatttttagaaatacagagctccaaagtcagccttatgcaactgaatttagactaagacacatggatgtatggggtgcccctttttgcaaataagtccaaacttcatcatttggcttggaaatcctcaaatgtgagaaacacatagtttgtggtgt

SEQ ID NO: 109500 - DNA, 399 bp, Zea Mays
gaccataaagaaaggagtgtttccatgtagagctcggctaggttgagttctcaggctccagacaacatacggcaactctctaatccactttcctgcaaacttttcattcttctcgaacactttctttcttagtgcttccagtatcattccgttggctctttctacctgcccgttggctcttgggtgtgccactgatgcatatttgatctggatgcatttttgttcgcagaaatcaaagaactccgagctagtaaaattggatcccaggtcggttatgatgctgttcggtatcccgaacctgaatattaagtcatgtatgaattccactgccttagctgaagttagataggcaatgggcttgaactctatccacttagtgaatttgtcgatagcaaccag

SEQ ID NO: 109501 - DNA, 498 bp, Zea Mays
gttgaattgttcaatggaaggaaagaatgctgaaaggggagctggaaatccaaggatgcgtaacacatgttcgaaacgaacacagtgcaagggtgggatgaaacttaaaaaaatctacgatgatgctaaagagaatgttatttccgtttgaattgatctgctaaactatgagcataatcatgaattcttgaagaaagatacagaaaaagggcaattgcaatgcaacaaaactcatgatcgtgattatatggagttccttagtgcgatgcaagaaagcaggatttcacaacattgcattatgaattttgtttccgaaatgcatggtggtctggaaaacgttccaataaccgtgcaggacatgagtaacctataagtgtattattcattgacaataatggttattatatattaccgaaacaatcgacatgtgttaaaaatatgtagtgcataatcattatgtttttacaggaagaaagcatggcaaagggaaagaaatgc

SEQ ID NO: 109502 - DNA, 479 bp, Zea Mays
cttgaaagtcatccctaccgttggcactatagttggatcaatgtttttgcctgctatttcattgttattgttgtttgtaccatggaatatgttcacaacaatataatcaatcaataatcaaatacagcgattggacttacatgtgaatgcagtatctgtggcgtatccatctccctggagctaatattggacataggaggtcgaaccctttgttctccttcttcccctatgctcatctcggcgatctcaggacccattagagcaggaggtggtgtcaccagtgagttaccaccaactcctccctctatctttggatcaagacgaacgccatctccttccatcgccggcgaccctccagagtcggccatctccaactccgattagttatgcaggcttagtggtcttttttcgaatgaaagtaaatctcggatactataaaagtaaccgcatccacgtttacagggtctccccattatttc

SEQ ID NO: 109503 - DNA, 580 bp, Zea Mays
cagcaatcagattttgtaccaccttacaaacatgagtggggaagtcggtccaaggcctactgggatctgttttctgcagccatggccaacgagctctcagagcccaacaaaggctctttaactcactaatcccaagaccacccagctccttgggacgggtaaccttaggccaagccaagaggcaatgaccaccacagaactctttcctgcccctccagaggaagctcttcctcagtttatcgattgctttgatggccaatacaggaaggtcaagtgccaaagctgcataaatcatctttgccgtcatgacgaactacacatgaatagctctaccagccctggtcataagttcagctttccatcctggcagaaggctagccactctatcaacaatggcctgaacctggtcccttgagagtttcttgggaaacaaaggcaaaccgaggtacttacatggaaaatctgaaatattacatggcaacaagtcctgtaaacaattcacctcttcttccccacaacagattgggaacacactactcttctggatattagtccttagacctgaagctgagccaaatag

SEQ ID NO: 109504 - DNA, 291 bp, Zea Mays
gacaaacttacagttgtcaagacctacaataaggtaaaggctaagtcattttaggttggggatctagtatggaagaagatcttactattgaagaccaaggacggtaagtttggcaaatagtctccaagctgacaatgtccttatagatcacataagctgtcgtggtttcggaaaaccagaggacaataagatttgtgtttggagggaaagttagcgtggactcactccgaatggtgagccactaggattcaagcgatgggtgttacacagtgggttatactggttcaggtt

SEQ ID NO: 109505 - DNA, 739 bp, Zea Mays
gctcacaacttattctggtccaacagataagttgtttctaatcgtgaccatccatctagatccgtcggtcaccaacccttcttcattcttccagcggataagacggctgcgttccaccagagacgccccaccgggcactagcgctctaaaatctttcactacctaggactacgccattaggagtttaagacggacaagttacaaagctcatactcacggtgatgggataacgcgcactgaccacgggaaggggaagatccgatgggttcactgatctccggtgatgaattcctctcccacaggcgactcaacgcacaattgcttgacaaagcccatatacacggccgctgacgaacttccacgagtaccctctcggccatcgggcggctgcgggtgctaggattacgcgcagaggttccgccgagcccccaatggtgccctggctagatggtggtttttatcacgtctaaggatttgcgcgaggaggtagcagggggtggaacgagtcacagaagttcctatttatctcccgaagtctaggtctgggacaagggggaggtcacccacgaacccgtcgttggcggcggcatccacgccattcgttgagaagaagagggaaagcgttgacgtgtgggacccattttccagcgagcatggcacgcgcgcccggtttcaatcaccgtcaggtgggctccaccccgtagtgaatcggcgaaggcgtaatgtgggcatgagtgtg

SEQ ID NO: 109506 - DNA, 599 bp, Zea Mays
gggccaggggtgggcgctcctttttatcgcgtattctctctcatccacacaacccaaccatcattccgaacttcctccttccttcgttggtacggcgacacaagatctattttcttcctccgagctatcggggtcacgctcaagttctcgagttttgtctcctaggtcgaaggacgtcgcccccatccgcggcgctgaagcacagtcgactatgaacttcaaatctaccggatcccataatcgtgcaggacctttaattattgcgtactgaccttgaagaaccctgaagcaacgttcgacgtcttttcgatactctgctttcatctggccctccgtaggctagcttacgaattgcagcatgaaccctccagtgtagtggcctccatcagaactgagacgacgctggtcgtccttcgttgctacatctgaaaggctgcgccaagtggcacaaatccaaacgatgaactcgcatctgcagaggaaatcaaaacgatgaactcgcatccgacgggggaataaatgaaaacgatgaacgcgctggcaacctaccaccggggactgcggatggctgcaacagagcagaaatgggatactagccg

SEQ ID NO: 109507 - DNA, 815 bp, Zea Mays
ggattacgctcgacggtaaaaagatctcgtcgcggatgaacacaagacactgtagtcgctccgtctcttgcccacctgcgccggcgacgtggccgcacgaccattgccgcgactatcgccgttctcctcgggtatgccacgttgtggctcgttactgtgctctagtaaccgtggcacacttaggatcgcaatcgttgagccgttaccccggtgaacgccacgattaaagccaccagtgttcttcttcctctccggccgccagcgcactacgaccaattcacgagccaccgccctcgaatcctataaattgagcgtgctctcagctccgctaggtattcaagcacctagcgcacccactcgtgtctcaaatcattcaccagagaactccaatttgggaattcccccaaatcaatcaaaaacaccatgcggtgtgagctcaccgtggctagttcgttacaggtctgttcatggcttccttgctctcgtttcagcgtctctgtgtgctgtagatacttagccacctggcaaattaagctagatttggccaggtcaccgggaacaccacggattgtcctcggtttgtgtcgtcaccgtcgatagagcgatttagagttagaactctgtaattgatggaggggaaatggttattaggggttaaatttggtgtcaaccacacaagagcaccaatagttgagttatccggccggtataggctcgccagagttcctcctccgccgtccacggtcgtggacttcaccttgtgaagaaatagaaaaggggatggtctatttgcatttgtcagtgctcaaagaaat

SEQ ID NO: 109508 - DNA, 778 bp, Zea Mays
gatgagtcaaaaagatttgtgacattcttaacagtgtcagtatttctgatgaaatcatactttatttgaaattcaagtcttcattgtagtgcacgctccccttttgctcgaatactactatagtatctttgtaatgggttttcgaatagccttctttgttagcaatggaggaggaagctctctcactcggcagtcactcccaggagccgaggctcactctcactcggcagtgagttggtagtcgcttgggagggatagttgcttgctcagttcatatggtttctgtagcatatttatttctagattagtatttaagagtccttttggatgcgagaatcggttccgattctctctagaatcattaggaacacttccaaacgatcaaagacaaataggcaatactgattctaggtagaaacatttttagtgattcttgttgtactagagatcagaatcacctgtagagtagttttgagtgattttgtttctgtttttttgcatgcaatagtgattagtttttttctacttatttttagcgcaacaagttaaaataggttacatttaggttgttatttgatttttttgaagtatatctttatttataagattgtttttgtaaaaaacatttattttgcgatacagaatccagcctaacatccaaacggtttcatgaagtgattttgattcagcacccaaaacttttgttgattgtttctggaaccaaaatgtttctacgagaatctggatctctaccaaacggaccctaaaaccaaaccag

SEQ ID NO: 109509 - DNA, 701 bp, Zea Mays
gaaggaagaagggaaaaatttgagcttgttcggttgccataccggtttaagtttcaggactcattcctcgacccttgtgtcgaatggttggaaatgatagagacaatgtgcaatgagatccttgggaactagacgaagaaagaggatcaattgatgatagctgccttcggcactcgaaaaaaatggaggctgaactgggtgatggatgcccttaacttggagtatccagaatacgaaaggcttgacgcagaagctgggggagcaaagaaaatgggaattgtaagcattttgaaaaggcgagcaatgtgatccattgaagaagacaaaaagagagctacttccaagaagcaaaaaaattcagtggagccgaagctttcggctcccaaaaaacgaaagtcctcaactttggcccctatcaagacgaaggtacaagatccaccagagaagattgctggcacctcttcatcttcttctatcggcattacagaaatcctgaaggtaatgactgaacccttcccgtttgctatgttaagtcccctggggtcagatctgactagcttattacagtcaaaggaggaggggttgaaaaaggtgtggaagaagagaagaagactacttcggtgaccgggggaaatgagggtggtcagaagaaacgacgcatgatgactgtgatgagggctatccataagaccccacccccg

SEQ ID NO: 109510 - DNA, 459 bp, Zea Mays
tgggggtgctcccattggtgacatcatcgatgtacttggtgtccttaaccattatttgatggctaccaaatttgccaagtaccttctcgggcaccatctttgtgtacctaggattctcacagatcaaggagacaagtgtaggatctaaaatagtaaatgaccttagcattaggtgcatgactttgtgattcgaccatcttgtgctcccatagttctgcacttagttcaccagggactttaacttgttgtacatctcttgtggtccttctcccttcttcatggcgaacctcccaagctcaccttcaatgagctccatcttagtgattttggtcatggtgttgccctcatttgttgtcctcagtgtgtcccatctttcttttgcattctccaagccattaactttgttatattcatccatgtataaagatactagcaagacaatattagcttgggaatttc

SEQ ID NO: 109511 - DNA, 648 bp, Zea Mays
aagccaaggaccagagatgctggggaggaggtctgagagttcagcaaggaaggtgggggagtcctggtggttggatggggcatagacgttggtgatggttatgggcgcattggcaaagtgcgagctgaaggtggtggtgagggagaaagagcgagagatgctggacgtgagctcaagcacagcgctgtcccaggcggtcacgacgcccccctggaaccgtcggcattgacgcagagaaagctggctagatttttaggcaaaaacgagcgcgctttaaggcagctgaggtcgcacagtttggattcttgtaggcaagcaacggacggggaggcaagggagataacaaacgatagtgcatttatccggatcgcctaaaccacggacgttccacgaaagcacaacacagtttttacaacccggactcatgactgaactgacagaccaccaggggacacactacgaccacggcagagggggaacacaccacggcgacatgtgacatacagggataggtatgaccagacaacagacttggggagacagcaggataacattacagaccacagaccgacaacagatttgctacagtatcgacggcaggtcgcccgtccaccggcagtcaggagggaagaggcaatcattccgaac

SEQ ID NO: 109512 - DNA, 367 bp, Zea Mays
tgcttgtgaagtaggaattgccaactgctatcctatggttcataagctgaacatatccttatttgtgttacccctttccaggacgaaaatactttatattaccattaaaactaaaaacagattaattctgctcaaacttttactcctacaatacatatagtgtctatttatctatttctttttctgattgtaggaaagtgcttgaggtcggtgttgtgacatggtctttggccactgctataattcctgttgtagcaggttttatgccagggcttgtactatcgaggattctggtaaactacttacgaaaagtctgctcagggttgttggtccgaaatttgctctacttattgtgcttgtgtattca

SEQ ID NO: 109513 - DNA, 471 bp, Zea Mays
cggaccctccggtcataggggtcggaccgtccaagagagggactgtgagcagcaaacctctttgtgggacttcaaaccgtccgacctatagtctcggaccgtccgcgggagtgtccttgtttcggaatcctctctatggtactcccggaccatccgacctcagggcctagaccatccgcgatgctagcagcaccctaatcaatcatttcgggtgtttgcatgcttcttcatttatgatttagcctattctccatcggctctagcattataggagtgaagccttcctgcatacacttataaattgataatcttaaaagtcaactcctgtcaaacattttgcagtgtcataagtctaaagttcaggggcatcagccatagcaatgcaagctgatgaatctacatatattgtttctatctcatcacctacccactatactaatgtttggtgcaaagtataaggtacacatttat

SEQ ID NO: 109514 - DNA, 456 bp, Zea Mays
gttgagggagatgagcagtggccattgatccttggatcgacggtggggatggggttaggggataacgtttcagtgggggcgtgtggaccatggatatcaccatgtgcggctaagatttgatcacgggtacattagtgcatggatgtcgatctatgatctggtggccacctatgtgtaccgcttcacgatctattttgaaccattgatctctgattcatcggtcgaggttgcatgagcacgtctctcgccagaatgtttggctaaagagtcctcgcgcttcttcttattgaacccgccatccctcgtggttcaaaggaactagcagttgggtccttggattttacaaaaccgcccctatactctctggtttttttaccacagcccatgtgttgaataaaagggataaaataattcaaaaatgatttttagtttagaaataattctagaaacttgttt

SEQ ID NO: 109515 - DNA, 332 bp, Zea Mays
ccgccaagaattcgtcgcgtgcctgtagttgtttgtcaacagcagccacctgtgatgttcctggatgatagggcagaagagcaggaggttctcggccatataccaccttaaatggagagcatcagagagcagtctggtaggaggtgttgtagtagaatttggcccatggaagccatttaagccactctcttggtctatcccctgctaggcaccgaagatacatggtgataattcgatttaccacttctgattgtccatcagattgggggtggaaagctgaactcatgtgcagcttaactcctgatagctggaactattctgaccagaatgtg

SEQ ID NO: 109516 - DNA, 645 bp, Zea Mays
tttttcttttcaaatttgcacagggacctcgcgcgctgcgcctacatgagctggtgcgcgacagtctgagtatacatggatgtaggactctataggatggaagtgaacagaacttcacatgcacgcacatcaagtggttggtcgacagaagtcggtcagactcagacagaagggtacgtatagcttagctagctgaagcaagcatgcatgcagcatggtgcagatgcagatggtccacgaacacatatgcatgggacgcccgatgcatggccatggaagttgctggctggctagcaccgccacctagcgcggttgcgcgcgtgtgtatccatatatattacgacgccatagacatggacgtggatgatgtctctacataatacgccgtagtcagtacgacagtgaagtatgccaccgtgccacgcctctcggtctctggatctctctccacacggacgaatatataatgtgtgcatgcatgcatcaacatccaagaattgtggctttggtattgcctggtccctctttatgggtgcaggccggacctagcttggacgacattgtttgttggggaccgaccgatcgagacgcacggaaccgcgctcactgttctagatcatagaaagtgccatcagtattgatttg

SEQ ID NO: 109517 - DNA, 322 bp, Zea Mays
atgagcataagagctaacccaaccaatagagtcatgatgaattgtataatctatctatccccacctaacatcaaacaagattttgacctgcatcatgtagtctatctcatctaaatctatcttaaccatattcccctaactccgagaatatacactgatcttgactcaatgagaccaagatcgaaaaaggacaagatcaactcgtcaaggaaggagagaagtcaaactcgatcatcagatgcattaccacccaacaaggagttctttctcaccgtaaactttcttaccccaggctattcttgccctaacctacccatctttt

SEQ ID NO: 109518 - DNA, 366 bp, Zea Mays
cctggcgcgaggtcaggaggttgacgacgacaaaggaggaagcggtggcatccgcgaccacgacgcttgtgcacggtcaaaggttgttgccgtacttgcagctgtcgccgttcttcgatgattagcctctggtgggtttaggtctaagctctgtcattgcttgtaattatatacttctatgaaatacaaagccaaagtatgcttttgtgcaactattttctaggaaatgctacccctaatcatttacacacatctaaaataggttcctaacaagtgtcatcatgcaaaggcatcatctatcccactctaaaaatgcttcaataatggatagataggataagtacctcaatatcattcatattaaat

SEQ ID NO: 109519 - DNA, 555 bp, Zea Mays
aactgaagcatttcttaaagtacctacactgattgttgagtgattcttggagcacttgggtgtctagagctactagagagaagcctcaattctcttgatatgttccttagctcccatgcttctgaaatgggtggttacggtggtatatatagcccacaagtctaaaactagtcattggaagtggcacaatttttttgctactcactggacatgttcggtgcagttatcagatactctagtgacacccacgtcagctagacatgggactagtcaccgttgatcatttgtgttagtgcaaccaatgcttttaccaatgttacacatgacacatctagtgtcttatagccctctctgtaaccctctctaataactaccctatccaataggatatctgatgctacattagacgcatctggtgcattgtagatttatcaaaacatgttgcagtcttttctaagtgttgcattcggtgtccagttaggtgccacacggatcgtatctgtgattggtatctagtgcgcacctgcatgtctggtgtactcaactatagtggcc

SEQ ID NO: 109520 - DNA, 483 bp, Zea Mays
tcatggtccaaaatgaagatgtaatgccaataaaacttactacaattggtttgtgccaaagggatacacacagctaaatctgtctgcagaccattttctggctgacttaatgggatcaaattggggccagattgagcatcaggaacagttggcacgtcatcgatagcacgatcaaagtcttcaggggcacggtctactacaaccggatgcaccacaacctccatgagttgcaaatgggtcttcatagccgaagtaacataattatcccaatccagttgacaatcaattgggatgactcgtcttatgacatttggtggatgaccaatattaagcactccatctaccgcaatgtcatcatcttcatggtaacctagcttttgtttagcctttgtaaacacatcactcaagtagggtctaccatcgaatagtaccgacacgtgttgaatgtcaatgacttggcatttccatacggatcttgttcca

SEQ ID NO: 109521 - DNA, 337 bp, Zea Mays
tagagtgagggcatctaagttaggttgggcagaggacctaatggtgaaaatttgtgctctactacttgtgggagaaaaatgagcgggggcatatgccctcactccaaccaacgtaggtccgcccctgcctacgtggggtggggaagagatggggatcccttggacatggtcttagttgaaacatgtctaggattaaacctgctcaggctagtcctattcccagcaagccaacatgtgcttggcttgtttggttcagctgctatctctagtttgcatgagttcatttggttgggtgcaaaacatactagttgcactagtggagctaagatagggtccg

SEQ ID NO: 109522 - DNA, 609 bp, Zea Mays
cagaggaagactccaccttagacatgtcagaacaattcataatcccaactcaagtgatgatagaggaaaccacgctcaaggacatcagaagagctcccagtcttcaggggcgcaacaaagttcttacaggccaccagttccaagagccagaggaggaagaagcttcataggaaggtttagctcccaacccagaaggttgttcttcttattctgcggtgaggataaaggacatacaacaaggacgtgccaagtcatgatctagaaacaaaaagaaatagctgaagtcgaagcacgacagaatcagtcgaagcaggtcctgcatactgcttcgtgatattcttcgtacgtttcagagtttgtgggcaaccagcagcccacaacatcagttgcttcggcaagtcattctcatgctgcatgggccccaccaccaccaccaccacctatggcaccaactttgacccacaatcagtagccagaagggtaccgccaagcacatcaacagtgtgacacacgagaagaatccaaagctcgcacagtcaatagcattatgctcgagtcaatgcacatttactgaagtcacacagaggctcaattataaaattttcatac

SEQ ID NO: 109523 - DNA, 295 bp, Zea Mays
gattgcttgcatcccattatttacgatatctattccatggcccagctgctccagcattgattttgctactattatgttgaccttgttatcttcaactagcaggatctttgctttattgccgattggagaacactttggtttcttgtggagtgattgttcttcaagaactttgcacgcagcagcacctgaaacagataccaagtctcctcgggaactggaaacccgttcagcttgactattcagctcaaggaccattgcattatcaggttcttcagctgtgctcctaacactagca

SEQ ID NO: 109524 - DNA, 1037 bp, Zea Mays
ttatgctataatataccggtatataatctcgttatttacctttacatcattaacacatttctaatgtctggtttacacatcagagcatccaataacaccacatgatttcaatattgctcaacataatgaatatactagaagtcgggaatttcatggagaaggtaaccataaattatgatttatattattttacctagaaatgttcatttctttttttaataactgcaaatagtgcatttgttttttaacacagatgatgcatttgaatcatatcgtctgcttgggtactccagtcataccgaagatccatatgactatgtctaccataagttgccagatagacaccatgttctgcgaaaaatacctgactgttgttattgcggagccatgaaatttcaatttgagccacacggaatgtgttgcagaaagggaaagattaaagtgcacatacctgatgttcctactgagttgaaaaggttgttcaccagtcagggagatgacgatgcaaaatattttagaaaaaacatacggttcttcaactctcatttctcctacaccagtcttggagttacattggatcaacgagttagcacagcagctaatacgggtatatatacatttcgtgtccaaggtgccttgtatcatcgtctcgaccatttagtgccaggttctcaaggccctcgtcatttgcaactttacttctatgatacagaagatgctacattggcccacagggcacagagatcaccagaccttgatattaatatcattaaaaatatcttgacaatattagagggaaatccatatgtacaaactttcaatagacttggatccattccaaatctagatgactatgttattgaactcaacactaatgtaacacctgaccaacgaaggtacttgactatgcatcacatttctttgttgtttacttgcagcacatttctttttgtaatacatgattttaacatgtttattctgcataaacaaggtacaatgcgcccactgcctcacaagttgctgctatttggttcgaa

SEQ ID NO: 109525 - DNA, 400 bp, Zea Mays
ctagtcctgcagttgttttccacagactagtggcaagtgaagctctccaagtgttcattcgccaagcaacaaatccattatttgggccacgtaatatccaacaggggtgtggccaccgacccctctaaggttgctgctgtcaccacttggccccaacccactgattgcaaacaattacgcggcttcctgggacttgctggttactaccgtaagtttgtacggcattttggagtcatcgccaaaacacttaccagccttctcaagaagaacacgccgtttgtctggacgggagaacacgagcaatcctatcaggcactgaagactgctttgtccacggcaccggttctcgctctcccagatttttccaaacagtttgctatcgagactgatgcttctggca

SEQ ID NO: 109526 - DNA, 352 bp, Zea Mays
gcgagggattgcgttactccgacgatcagccaccgtgagcgcggggcggcgctgctgcctagtccgtcgtggggtggaagatggccctcgggccgttggattcacaagcgacaatctagattaggcggattataccccttcgcctatctcgaatctaggctgttgagcgtaatatggtcggtccagatgcaatctcgcgtaattgaaactgggccgctgatggttgatcttgcggccacaattgcgtaccggttcgatcgaagtcagttttaatctgcactgtgggcttttgatcgtgcggctgtaatctctccataccccttcactgcgcgcactttctaaaagagaccct

SEQ ID NO: 109527 - DNA, 375 bp, Zea Mays
ttgtattcaagagcttcttcagggcgggacatcagttctgtggcagaaccaccgagattattcgagcttaagtgcccgaatcatgccttgaaggcagcaacgcaattatatcagaatagcctgtcagttcttcggatctagtccgatagagccacttaccatggatcgagtaccattagcccacacgatggcgagactcatagagaatgcaataaacatgaaaccacaagttaaagtacttaagttattatataaaatggagtttgacaagataacaatgttcttaatattgcagcggaaaataaatacgtcgataatgaggaatagggcaaggcctagctgtaacaccctggatttgggggtataaaatttctt

SEQ ID NO: 109528 - DNA, 280 bp, Zea Mays
cgctcggacaccctcgggggctgggtcatagtttgcgctacccacttgagccggatcgtctccggcaataccctcgggggctgggccgtggcctacgcttcccacctgagccgaatcatccccggcaacaccctcggggctgggtaagtgtcaacaccatccttgagggccaagttctctgcggcagcagcctctaaggctgaaggtccctcagttacttccatgggagcaagacgatccaagtcagtttcctgaccctcaagaccgcgctccaaggtcg

SEQ ID NO: 109529 - DNA, 605 bp, Zea Mays
cacaaaacatcaaaaatagcacgtaagtgttcaatatgatcatcatgagacttactatagataagaatatcatcgaaatataccaccacaaatttaccaatgaaagcacgtaaaacctcgttcatcaatctcatgaaagtgttaggtgcattagttaaaccaaaaggcatgactaaccactcataaagaccgaacttagttttaaatgcagttttccattcatcacctaaagacatacgaatctggtggtatccactatgcaagtcaattttagagaaaacaatagaaccatttaattcatcaagcatgtcatcctatctaggaataggatatcggtaccgaattatgatgttattaatggctctacaatcaacacacatgtgccaagtgccatctttcttaggaaccaaaagaacaggaacataataaggactaacgctctcacgaatgtacccgtggtccagaaggtcctagacctagcgctgaatctccttagtctcctcgggttggtcctgtaggcagcacggttgggcaagctcgccctggaattaaatcaatcttgtgctcaatgcctcgcacaggtggtaatccatggggtatctcag

SEQ ID NO: 109530 - DNA, 863 bp, Zea Mays
tttgcatgttataggtgtactgcatgagagggtaaaggaacaagatgccaagtacccatacgatcaagagcatccaacaagtcgccattcaataatactagaaacttcatgataagtggatggttcaacaattactgcaacaacacgtggaagccatagcgagtcggaggttcaatggtactacgatcacggagctaatatccttgatgaatcggtaactcatcaacaaactgtgactcattatcaatctataggtcattagaaacagcaggggagtcatcattgttagtacaagcatcaacaataggttcttcatcaggaccgactgtgggactagagcgaggacgacgaatgtaggttttggtgataagtggtttagaagagaaatgtgaaggaggtgttaaagtagaaggatttgtgatgggatgagaacatcagatggagatatggtagatgatggtgtattggaagatggtgacacatatgaaggagcatagatggtaggaaggcacatcaaggaggtgaactatgtagaaaaggaagatgaatgtgtgattgagttataaaagaaatgtcgatttttattaaaactcatatctcatgaaatatgaatgcaacagattgaaggattataacatcgatagtctttgtgcttcggactgtatctaaggaaaacacactcaacagattgagcagtcaattagtccgttcacgaggggctaacaagacgtagcatgtacataaaaaactctaagatggtcatagtgttgagttccaaaaagaatttcaccaggagttttgtcagagatttggatgatgattgtctattgatgagatagatcgcaatagtcaatagatactgc

SEQ ID NO: 109531 - DNA, 806 bp, Zea Mays
cacgtactcctacatcctcatgcctctcgacagcgaggagggggcaaaaaaaaagaaaagaaaaaagggacaggagtgttctagttattgtgcgccacattgctggtggcggttggcacagcgttttattaacgctctgtgctgaggagaggggaggagaggcgggggggcggttgcgaggctagacccctagacaacggaaaaggcgacggggctgtgggagaaagtatgccgtggctgcatggcgcagcatcatggagcatagtggctagtagtacgtagccactagcgtcttctcactattatcaatcgcaagcacagccgttgtttatcgccgatccaaccacaactcaaaggaacccaagatgtcatggcagattaaaaaaggacttcttttccggttaggcggttaccaactccgagctttcggctcgggatcgggagttaccattcgataaccatccaacccacgcctgcagtccagctccagactcccagtttcacgtcgttcgaatcgacgccgccatacgagcaagcgcaacaggatctctctgcctggctggcgatgctcgaccgatgcagcagtacagtacgtacgtactactactactagtttactcctgctaagttagggttcacacgagcccccattggccgccactgaacccttgtagctagatttgcgcgcgctcgtgcccacctaccaccgtgtctcctacggcaacccaacccgtgcaggaactagcagaggagtagtagtagtactagcgtgcgtgtgtgtgtactggctgcttcacagcatctcc

SEQ ID NO: 109532 - DNA, 313 bp, Zea Mays
ctttcagaactgctgccactttgattggatctgtggccaccccctcgacgctaatgacatgacccaaatatgagatagtttatttgcccatgaacatttggagagctaaatctgccactggtctcgaataagcaactgcaacaccaactccaagtgtatcaaattgttgtcctaggtgtcactgtaaaccaagatatcgtcgaagaagacaagcacacattagtgtaatagtggctgcaatgtcttgttcatggcaccttgaaacgtggctggggcatcggtcaacccgaacgccatcactcgaaactcaaat

SEQ ID NO: 109533 - DNA, 832 bp, Zea Mays
tcacacatgaacttaatctcatttgtttttccatcatccaaaataaagttctccattgttacaattgccatcacaaaatccaactcctagcttagtataccccgaaaccccaaagctaagctatcctaaggagctctactccctatcacatgtatccccatcttggcatctagcgggaatacgaggcaacgctagactctggagaaggtggcccccagagtgagctatgctagcgatgtccaagctagaagctggcttgagatccttcccctcgatatttgtgtcctcgtcttcttccatgtcctgatgcatcttctgatgatgcatgtccaggtgctcgtttgcctcttcaagctattgtcgggtattctagagctggttttccagaacctcgatggtgtggtttctttcttctacctatccttcaagctcgcggattcggggactcatttgctcagtctgaaggcccttctctaccaactcagttgatagatccaccaccagatcctcccgatcggtgatggtgaccttaccatcctgagtcaagcccatcagctatgacatggcctcgcgttgtaggtcctgcaagtggtagagtgcactcatgcaccgaaccgtcagtcgagtagtggccccagggaaaagtgcccacacctccttagtgtggtccactcggtcttgccacatcgggtcatcctcctttgcagtggggaataacccaatggggtgtgttgccatctccaaggggtgaaatgagcagaaagtagtcagtgcgtgcatggctgcggccttggtggtgtcgtgggcttggaaaccaatggtctcagaatcc

SEQ ID NO: 109534 - DNA, 516 bp, Zea Mays
ccaatttccagggagttccggggctagggagtaagttttcccatacccaaagtggactccgggttgattctgctacaacacaggggcttatttgtgaaataccccggccggagcgctatggacaccactcagccacccgatctgacctagacgactcggattaaatctcggttttaactgaaccggtacgcaaccctacccttcggatcaagattcgtcggccccgagttgatgaaaccggatccgctgtttatctcgaaatctaaggccacgaattgatgagtcaaaggggtaccaggcgatttaatcaaagccatccgctggccgatcaatggccatcagcccataacccaccacagtcgttcatcagagaacgtgcggtcaccgcatatcgtccaactcccgtcaccgagccccaacggcgcacgcgcgacccacggcggaggatcactggagcaaggtatatacggctaccaggcgtacccaaacctcagcgttgctacgaaagaagaaaaa

SEQ ID NO: 109535 - DNA, 558 bp, Zea Mays
aggaagcccatgattctgattattctatccaccctggtagcactaagatgtatcaagatttgaagcaaaagtattggtggtatggactgaaaagagatgttgctgctcatgtggctaagtgtgatgtgtgtcaaaagagtcaaggccgaacatcaaagaccagctggactattgcaccctcttaagattcctgagtggaaatgggaagaaattggtatggattttattgttggactacccccgcactccagcaggatatgactctatttgggtaattgtagacagattgacaaaagtggctcatttcatacctgtgaggactaattacacgggagccaagctagcagaattgtatatgactcggatagtttttctacatggagtacctaagaagatcgtgtctgatcgaggatcacagtttacttctcgattttggaagaagttgcatgagagcttggatacaaagttgaattttagttcagcctaccatccccagactgatggacagacagagagaacaaatcaagtgctggaagatatgttaagagcttgtgctct

SEQ ID NO: 109536 - DNA, 2178 bp, Zea Mays
tgcaatcagatgttgattattgtgtctgtctttttcttttttttcactcagaatctataatatcagaatttgcgtatctaaacacccagattgtaaccatcagcttctcccacagcagtccaaccaaacattcagccaacttttttccacaaccagcttattctcacgaccatattaaaaaaaagccgaaccaaacgtgacctatgattgctgctcactaagtgttacccaaatcgtcagagtgagggggaggcggagggtgaatgtgaacttccggatgtctccaattgcttctgatcctgtccactccattaccaagaatagcactccatgtatcttggagtagagggaggaggagggagctcagccagtcatctatggattggtgccccaaacaacaagaccggccgagagggaagagcggaggccggaggggtcagctcttgcacttgtcaggggaggctagtctaggctaggggatctctgattgcctcctatcctctcctagccctgccctgccgcagcgcaacgactccgaaatctgaatcgccgcctccctccgccattcgcgtcagtgacatctattccttcaattcattcagtcaggtaacatcctcgacgcccccagcatctatttatgtgtttccattccattgtacattgccagttggcgtatagctgattgcgatatggatcatggatcgacaggcgacagcccatgcccttcacacaatcaaaatcgaatgttggttacacaactggaaaaataacgcacaccccgcaacatactaggcacgtctttatctcggatcagtattcggtaatatggttacctgcgcccgttatttttcaccttactctttttgggtgcggagcacaaagctcatgactttatgggcactaacatagtactctgcatctctcaatagggagtaagaacgacagcgcattgccaggatagaaatcgtcctgatgttcttcgtaagtctggcatttagaccaggctgacaatgtcagcttccgagttcaggattccataccagcaagtaagtggctcatatgtttcaaccgtatttttttaatgttttgggctggagtttggctatcaatgtgtatatatagcccgttgcattattcaagtgctttacttgggtgataaactggatatgactgttagcaatcacaccgtatgagcttttactttggatggagttttagttatcaatcattggtacataaaagagtaaatcatggagaatatgccacataatgcatgcctatggaggatatgctgatacaaaattcatgtcttattatgctttattggataataactgtgagagagttggaagcgtgtgtttgtatttattgatgaagatagacagcacatgtacaggtatatataggggaggaaggtgagaggtaaaaggaagccttctacacctaaggaaagatctagagtacaatcagatcctcaatcatagtgattgagatcctcaatcagatcctcaatcatagtgattgagatcctcccctaatcctctctatctatatcagacaatacttccatatagggcggccggcatatctgccaggcgacagccaggatacagtttctaacaataacaataataaatttcaatatgtaaaagcctcttctccccccttccttttgcactaaagtcaagttcacaagatcactgtttagttgtttggccgaggcactgttctacatgtccacttcactttgtttaattctcttgataggtttcaccttcgcagcctgctgagaatgtaaatcagtttaagacctgtcgatgtggggagggagacccgaactccacttctgaaactggtgacagtccaccggcctcttgtcctaattgccaggtttgtatgatcttcttacaactaaaggctttgtgctgcagtaaaggaaataaaagaaatggcctttttatgatcaacacgtatgagctgactttatacagtttgatgttttcacaagatgtcattactatgcatgtctgccactgatgcttatctgcaacttggttgtgcctcagcacatggccaaagcaaaatttatgagaaacttattttattattgcaaagtatactattattcaagttatggtagacagtaaaaatagagaaaaaaaatacctggttattttc

SEQ ID NO: 109537 - DNA, 557 bp, Zea Mays
cttttttgacataatatgggggcagacaataatacacatttgaaaggcatcaaaacataataacctaaatatatggccatgttttaaaattttccactgttatattatgcactgggatttgtaataccaccattaccctacttagttctgaatatgagaatactttctgactttttaggtcatggtacctcaaaaacagttacaactaccatctccttcaaaattttcactcctcaacctagatcaccgagtctatgttttttgtttcttattatatactaaatggtcaactacttttcaggattatcaacaactagtttggaagtcttgcaagttgtatttaccacaggcttttcaacatcatcaacagctggtttggaaaccttgcaagttcaatctgcgacaggtacaccacaaatatttaagttttaccaatcattagttgctattttcccactccttccccacctacatacaatacaactgattttttgtttcttactgtttaacccatagtcatttactttttttgaatcgttgcctgttggctgttgatt

SEQ ID NO: 109538 - DNA, 372 bp, Zea Mays
cgctgcctgtctctctctcctcgctctagctctgtcctcgcgggctccaactgtttagtgtggacgttgtcgtgcgatgcccgttagggtttgattttccccaccttagcacggtgatttggcgccgcgctgatatgcgcggtctgtgtcgtataagtcgtaacccccattttggacggttgctgttgaattgcttgccaatccggtctggttctgcggatgctgtacgttgtgacttgtatttgcttgccagttttaggttcaacgtggctgtgaagcatggtgggtagttttaaactttttaattcagactagttagttgcccgtatattgctacggtagactttgttcaaatgagatatttattcaaac

SEQ ID NO: 109539 - DNA, 1381 bp, Zea Mays
ggcaaaaaaatttaataaagcctaaagcatgctcaatgacttccgtagctggctaagggggttagtctatgttaaatatatcttatgtattcatcgtggcgtaggatagcgtgggttgaaaatataaatcatgtgacatgtgattcgtgttttaaatgcgagatgtgcgaataatcggttagtgtttcactcgtctaatcgctaagtgttgtcataaataattgcgctaaaattgggttataagaatgcagtggtcacgtggtgtgtttgggtgtgacaagtagattaggagtgtggggtctgtcgaagcactgtgatgtcaaacatgtatatcgaagtgcattgtggtggtaattgcgttaagttaatcggtagtgtctcgagtgcatgccacagcatggttgtatgcgagacaaggtaacataaggtgtgctcgacacgaatgttcggtcgacataagtaggaaattgtgtttgcttaattagagaggtggtgacatgccgaattagtcatcgctttctcaatatttataagtcgaatcgagtcgatgcgtattttgtgtttattaaattatgcttcgcatataatgtgtgattgtgctcacgggttcgagtagacacttcaagtaaatcaagtagatttgtgatacaagtgtgtaatggagttagttgttttaggacaattattgaaatacgcggttcgtaggataaacatgtatgcgttcatgatttgggaagtaaatgcgtggtgactgcgaattggagatttgtgatttacgattcatatgagttggtcggtgtgcgaatatacttgtgaatctgtgggtttataaaaatgttgtagtatatgttgtgtctcggattgcggcaataaaaggcaagttgacgtgtacgttatctagcggcgatgtcgttgctctagttaaccgaatggttagataacttggttaagctcgtaatcgcagcgaatggcttgttgtggtctaaatgtgtatggttatgggcacgggtaaaaagtagtagtgctcatgtggggtctaattgaaaccccaaatggttgggtgattatcggggagaatgcgtcgttgattggttgtagtagttttagtgcactaaatgacttgaataaaatttgcaagttgacttgttggtcctcatttgattgttttaactctaacaaatggtaaagtgttagaatacttcaaatatctagatcatgacaattcttgaattatatagaaactgaaattcattgattgctgttttgggctgcacgcgctgtttttgtcgtgctgtatgtttgatgaactaaattgtattttctgtagatatgtgctatagaaaagtggtagataactttattatcttgctggtgttaaaat

SEQ ID NO: 109540 - DNA, 303 bp, Zea Mays
tttaatagtttatggactaaaagtgactaggaggtgggaaccaaacaagacctaagggcatgtacaatctcatttaatgtgtggtctcttgaaccgtctctaaggggctaattgtaaaaaatacaagagctctacacgattctcaatacatattgtcacttagatgcatttatggtctaaagtctcaggattgtatcatagagtttttaaactatctcttttacttagaaacccaaaccaccgtctcagggttatacatgtcctaaaggtgactaaactagcacttttacaagatctgttcat

SEQ ID NO: 109541 - DNA, 542 bp, Zea Mays
tggaggtgtaaaaatcatcccctagctgattcagctgcttggatgcctatttgttgtcccacatgcagaaaaagaagttggccacatctcttgtcttccatgtgctttccccatacgtggtgctcatgcagaaggattgggagacatgttagtgtagttggactcctgttaaaccctagtaaagaccccaacagctccagctctctaaactatttacattggtgagttatggcaccaaactaaactccatgtgtttctgtcgatttccttcccctctcaccgtgccataccattcccatacacctattctaagcccttaagtttttcctagttccttggtctcattgcatcagcttgaacacgagtttgccttggaggtggggaccatacaggccgactgcccacctccccgtggtaagccttcccaagaaggtaatatgtttgagttgttcacgtttcataacccatgtgtgatggtgatgctcacggcgttgcccttttgaacgctactgtgtatctcggccagaacgccgtcggttttg

SEQ ID NO: 109542 - DNA, 662 bp, Zea Mays
ttaactgaactcctccatggtacagtgctctcgggaggatcagatcgccagcgcaacggtcctcaccgccggtgacctaccgccgcgattcgtgctgctgttgccgcgatttgggcttggctaagttggatagcactttgggtcacacaaatatcctcgccgtggataactccggccataaacaagtccggccaccgtaccgtgtatgccgcggtggaaagttcgatgggctcgccggtaaaccgtcgtcgcatggccttatgccacgtatccgagcaccccgtcgtatcatcgtgactccctatcgctgtctcatcgtcgccggtgaggttgccacgacagtggacacgaaatcgcaaccacaatgttcttccttatctccggccacccgcacggcccggccaaattaagcgccactgacgaagcttcctataaattgatggctcgggctactgcgctaagtcatcccgaagctatagcacccgctcccaccctcgatcatccaccagcacgcgcgaatttccaattctccccaaattcggtttccgccgccgtgaagaacagctcgccgcggccagctcgattccggttagctcgcgtccttctgttgcttgttctagcatccgtaggcaccccgcgaactccttgaaccgtccaattga

SEQ ID NO: 109543 - DNA, 413 bp, Zea Mays
aagggatatggagggaacacaaggccctagataagaagcattctctagctacaactttgagcttttagaatggctccgggcatggaaataccacctagacctcaggccaagtgaggtacggtatcgccacgtgccagacaatggtgtccaaagcctggacccccttaggtgtggtctgggcccatgttagagaaggcccaggaatgccatgtcatcgcttattctcgggcctgtcccttatctaggcagaggtccggtgccgacgcgtggtcagatgcccctaatgtaagccaccggatgatgcctaaagaaagcctctaacatagggcccaccagcattgagtgtggatgggatgtatatttgcccgtgtcagtagcaggtagcgtatccctgacatgaaatgcatgtggtg

SEQ ID NO: 109544 - DNA, 914 bp, Zea Mays
gtcgtctctgtcgttgctgctactcgacagacagcgatggattataaatttcagcaaacagactaaaccacacacctgacagtctgacagcaacaaaactctgtctgtttttggctcgcgtacgtgacctctgatctgtatttgctcctcccggccgctcgtcgtcctctcgcctagcttctttcttcttcctgtgtcgttgccctcgtcggcgcctctgcttcttttaatctttgacgtggtcctgcattaattgctactgctttgcaggcgggatcttgattattaacttcgtcctgatgctggaatctttcctaatgcatcggatgcgtcccccattcctgctttaagctagctagcctccgtcgtttctgtccagttcatcagagtatacactaaatatactcagcatgcatgcatgtacaagcagctgttgagatttgttgatactagctactgcgtgctgtcgggactcgggagcagcagtatatggtttactcaactttgttttcttatttggatcgtttagatgcatgagttgcaacgtacagcgtggtgacagtggattgattattctgtctgtcttgtttgaattgggtactagtgtacgtaggcatatccatccttcctgtacgtatgtatacacgaactgaaaccatcgatcaggcaggcatcgtcgtcgacacagttggcatcggttgacggagcccctctccctgaccagctaggcagttggcatcgaccaaggcatgcagaccaagcatgcagactgagcgccccaccagtacttacgtgcccggccgtcccccggctttgagaatttgacagtggattgataatttgtttcaaaggatttccatatttccaagggaaattagtttattgtccctagaaaaaataggaatccttttgga

SEQ ID NO: 109545 - DNA, 398 bp, Zea Mays
tgcatttcatgaagactcctcctgcgcctcttctgtacagcaaaccccctatgatggtgtagtgggctgactgccttgcaatgcgttctgccatggctttatcatattgctcttcttcattctttatgtacctgatgataggctctctccaatcgttgggatctacctctggctgactcaaggcgttgcattcttccacctggtccgtgaggatgctcagctgtgatatttcttggacgaagatctcaggcggagcatgggcctgactggatcccagcttcgacaacgcatctgctgctgcattgcgatccctttccacgtgatggaactccaatccttcgaacttgtcttccagttttcgcacagctgcacagtatttgccattgaatcggtcgagt

SEQ ID NO: 109546 - DNA, 622 bp, Zea Mays
cgagggatgtatgcacttcgagaccttcgatcggggcaacgaggacttctatgctggtgtgttctaggtcgaagacgacgtgcgaaagcgctatgcgggggcgctttacgataggatgtggggtcctcacggccgcaacgtcgtttgagatagggccgaccgagcgctgacacatgtatgttttgtttttgacgatgatggtatgtgtgctcgttgtttgaaacattgttatgctgtcttcacaggtgatgaggaaggaagaggtggaagacctcgtcaaccttgagaggtcggtggcctgtggtggagacggaagcggaggagctatcctcacttaaggagccatgaagtccttgttgggccggcccattactctcggacttggctcgtccgcgcaagttggctcgtgtagatgtgtgtcctccctccctcctctccccctatccgtctctgccgacggtacctccccgccgcgacgacattgataaagccataaacggccacacccacagctctttcttctcacctctctactacccacccatggctcgcttaactcccaccaagtccaaatccaccgggaagtctaagccctcctcgtccgccatggacgccgcggcgg

SEQ ID NO: 109547 - DNA, 339 bp, Zea Mays
ggaggactctggcccgaatctcaggacgagattcctttaaggggggaaggctgggacaccccagtgtcacatagggtttctctcaaagtgctaaaccaagaaccatcattttatgtgaaccaaattgagcatgagcatcaaattgacttaagaatgaagaatccaccaagcctatacttaaaagtatcatgatcaaaacaaatgagtctatcaaaaaggtaataatgttgcaaccctaataaaaaccctaagtgagccctatgagcaaaattcaagaaaatggggaaaagggtatgaaaaatttaaaatcatggcttgggccaattataaacattgaag

SEQ ID NO: 109548 - DNA, 896 bp, Zea Mays
cagactggtagatgcaaggactagaccgagaggatccgacgagcaggctcataacatggttgttttaggccatgttctaaacctctagagctaactattaactaggtttagctaggttggggcatctaacaactaatacttatttgaggggtatagctaacaattagttgatccattctaaacctctcggctaattttagcaactaggtattagttttagagatttagaacaagactttatactatctaaaactttaatttttttctatacttaatactaaataatcattgggcataaaatggtgtgcaaaattgaggggggcatggcccactttgcccccctttggatccgcctctgtacatacatcatcaatcttttgatcccgagcgatacaacaatattgagcccatgtatcaaggcttcgtattctgcaacattgttggaggcgagaaataagagttgcaatgcatacttgagctgatctcctccacgagcgatgaagaggatgtcaatccctgctccttgtaacttcagtgatccatcaaagtacatatttcaaacctctatcgacttagtgttttcgaggatttgctgctcgatccattcggatataaaaatccactagagtctgggttgatcgtcatgcagggtcgaaactctatgtcatgagctccgagttcgcacgcctacttggcgttgcggagtatgtctcctatcgggaagcatgtaaccattatgactttgtgatcgtcaaaatagtggcacaacattcgtgcggtgaggagcactgcatatagtaacttctggacctgagggtatctgatcttagagggctcgaggacttcactgatgaagtatacgagatactggacttgatacacatgcccttcttctg

SEQ ID NO: 109549 - DNA, 278 bp, Zea Mays
ctcaggttgaatttctgcttcttataactatcgtatgctttgtctccttcccataatagtttcaagtcttcaaatagaggtctcgtcatcacattaagctttgttctaggatgttttggactaggtatgacaagacacaagaatataaatcctatattatgcaaagaactagtggaaggttgcatggaatagcaaacatgggccaacatgaatacgatgtcacagttagattgaaaggtgaggaaacatctactgccaagtcaatgcgaacatttctc

SEQ ID NO: 109550 - DNA, 694 bp, Zea Mays
ataccttcaagctattataagcaaggcaatctgcatgttcatccttcgacattgcagataagccaagctctagcttcggaaatcccatattctttgccatttcttgacaaacagatatctccttgttgtccggcaggtaatatagaaagtcatcttcgtcagtgccgctgtataccaaggatcctgggggatacttcagatccttggaatattgcctagctttggcaatttgcacctccgttagtttttttcctgcagcgtgacacaccataaattctaattcctcaatagatgcttcaggagcagggaattcagattctttgttagccttctctttttctaacggtgacggtactttcgcggcatccgaaggtctagattcagtattcttttcaacaatctccgcagaccttgcttcggcgggagttgagggcccagcttaagcttcgacctacgtcatgtcggcttcggcagattcctttgtattcttaacttccacgctaggttcttctgcagaggtaggagttagcgcctttgtggattccataacagcgtctagttcgctggccatccttcttctctttggggttactgaaaccactttttgtatcttcgactattccgtttcttgcaatggactcaaagctttcacttgctccactgctatcttcaattttggttcttcgactgattc

SEQ ID NO: 109551 - DNA, 403 bp, Zea Mays
ttttgtttcagattgctttgttgaatttgtgtccgtgttcgagtcttgttgctggtttaggtcgtgtcgtaatcgtagttcaaccgctccatcgatgttatttgtttctgccgctagcccatccaccttacccagattacaagtcgagacaccacattactcgatttgcccttgctagccgccttgtgtgaattctcgccacgctagccctagattaggttgcaagccgcattgcattgtagcccctccttgtttcatcatctggcgcttacctattgcttataccagggaggtttgtgcccctgtgttctatagccgccgctacggttcctaccaatttgtgcccttgaaaaccataacttgaggtaccttccataaaacgggcataacttttcgctcggtg

SEQ ID NO: 109552 - DNA, 907 bp, Zea Mays
ctggagaccatgggagagcttaagacggttatctaaaaactctatgcttaagctgttaattgttttggtgtttattgacccaaggttgaataattatgagacactaatcccatgttcatctcaagtaaaaagtggaataagtccttgatcattattggtgaatcaagcaaaggacctcgattgtgcatctgtctcttcaaaggacggtacctgtgtttcttaagtgcattatcattattgctcttaaatttaagtgtcgtgcttagagtagttatgctttatgattgcctgtgttaaatggatcataataatgtttgcctaatcatgactagtgcactataggatatatcttttgaatcattcatgggtagctctttcatttgttatatccacaacgattaaccctcttggtgtatatggataaacatgtaactttgtgtaagtcatgctatgtgcaaatatgacattttgtttagtccatgttcacatgattatcctagtttggtattgtgtgaatttcaaatccatgtcgtgcccttttgagctgtgagatgcgtaagcaaaaggagctctgaattggtgataacaagtgctctcataaaggcaaaggtatggaaaatggaactgtgaaattgtactgaatatcttgaagttcctttaattgtgatcatagctatgttcttgttctttcaatcggtaatatcttggtttaggtgatttatgtctttaaaatgttgtttcttttggtgcatctaagaaaccttcttaattatggcatgcttagacattacgctttatatgcatgattatgttgttctccaattggtacatgtggtacaatgttgtcatgcatgtagcatgtttagattgccatgtatgtggtacaataattggcatgcattgctgt

SEQ ID NO: 109553 - DNA, 516 bp, Zea Mays
ggctttacaatggagataaggcaccaaatagactaggaggtggcaacctctaaaaataacaatcggcttacaatactttacctaatgccactcaatcaaattactcaatgcaatatgttggcaacggtcacccactatagagcatgaacagtattgatcactagtgagttcgagggcactaagtcactcaaaaatgtacaaccccattggctcagcccaacgatcctctctacataaagagagagaaaaactgatcgttgaaggctttttagcctctaacttggattttttcggctcattgcccttggaaatttcggagcaattcaaatcaactccaatgatgggtcaacatggtcatcatccacgcatgctctcgcatcagaatttttggcctactcgcctcacaaataccagggcaactatccacgacccaacgatcaatcaaagtggtcaaaccacgttagaatttctggccacctagtctcaaaaattttggggtgctacccacatggccaa

SEQ ID NO: 109554 - DNA, 666 bp, Zea Mays
ttaattaaagaaaattagttatgcttctgtgctgaacttgagaaaatttgtagatgttcaaaccccatttaaccactatttaaaaatagtaggaaccccagtattgaaaattcaagtagggatatctattaaaagccatttttacccaaaacttaagaaaatcagaaaggcattagaaaattatgaacagtgagtgcaattatttttcctagcctacttaagtaacaaagaacctaggaaaaataaaaagactactagtccagaatagaattaaagtggaatgttttatttagcattattccaactagaaaacaattattagagttataaaaccagacccaaatttgttaataaaaatccagtggacttgtaaccaccaaaacctcactgcaaaaatgataaacaccccagcccatcattttaagtagggtaaacaaatagaacttgataatgagtcatatttcaaataaatcatgagtaacccaaaaataatgcaataatgggcaaataaaattttgttagatcaataataagatagaccaccagagaaaaatgcaaacccatttgaaagatgcacaataatacctattgccaatacttcatgaaaaaggtcatttaatccaaataattcctaccaccccttcccttaagcaaaaagatgccaaa

SEQ ID NO: 109555 - DNA, 789 bp, Zea Mays
aagatgatgccatgaccttagcctttgaaaggcgaggcaagaaaagactaaacagaatttttgatgttattggttttgtgtacccagattatagctatccctcacgaaagtagagaaaaaagagaaaaaaattgctacttcgaccatttctgctgcgccgaagggcaaaaagatcaaggtgttaatgcaccggcctagatacattgaaacggccagggtgccgaagcttgttgaagggacaccttccaccgcagagccaggacaacctactcgtgccggctccaaggaagaatcggctgaagtgccggaaataatagagcatgagaaaatcgaatcggccggagccccaaagcattctaccgaagccatagaaaaagcggtcgaagtgccagagctaggagaatatgatgactaaaaaaatccagagcccgccactagagccagggttgccgaaggtgctcagagttcctgcaataactcccaagaggaggaaggatggctagtgtgctgaacgctatcttagagtcgacaagggcatcaactcctgctcctgcaaaagagactgtcgaagctgctacagctcacgctgaagtcgaagctaggccctcaatgtccaatgaaacagagcctgttggtactgggcagagtattgaacaaggaccttcagacgtcagtctggttctggagaaagaagacgcacccgagaaggttgaagacgctatcttagagtcgacaagggcatcaactcctactcccgaggcatctactgaagagcttgactttattatt

SEQ ID NO: 109556 - DNA, 322 bp, Zea Mays
gtttaatttcgactggttgaaaatgtactttaaactcttgtgatcagtatacatatgacatacatttcccagtagataatgatgccaagttttaagggcatgaactactgcggccagttccaaatcatgtgttgggtaatgttcctcatgtcggcgtagctgccttgaagcatacgctattactcgtccttcttgcatcaaaacacacccaagcccaatgcctgatgcgtcacaatatacatcaaacggtttctcaatgtccaattgagccaaaaaccggtgtagtggtgagcaatactttcaattgttcaaaggcctcatt

SEQ ID NO: 109557 - DNA, 305 bp, Zea Mays
atcatattaggttttgaatacaattttctttcacggtacgccagaaaactagggtttgtggagtcagtattttagttcatagggcagacactacttagaagttcagggtttggggtttaggtaccaaacattgtccaaatcatgccaaactttacccaaggtttctaaatatcattttaagattatccaaaaagtttagggatttttggggttattagttaatttctaaaattccagaggtataggcttaagcctttttaattgctaaataattacttgttggtactaaaaatcttaaaacaatt

SEQ ID NO: 109558 - DNA, 451 bp, Zea Mays
tgagctaggcctcgggtatctgcagcggaatcaatcaaacggagctcgagtcagcggctggatcgagcaagagggatgtccaacacctggaacaatgggtggaaggaacggcaaaaccacgtcttcctgcgtgaattcggaaccccagaaatcagaaccctcgcaaaccggactccacgcggaacgaacggttcggagatctgtgtagcggaatcagcccagaacgcgagcggagaaattcagaacgaaaaacctgcaaatatatgagaacccagccgagactagcgaagaagcagaagagattggtaagacagagactgcgagacgcgagaacaactggaccgcagatcaaacggaccctcgaggagccttgcggagagaaggcggcgcagagagcagttggggactgcgaacacgccacgaaacggagaaacttcacaaatcagcccgg

SEQ ID NO: 109559 - DNA, 404 bp, Zea Mays
gtttgttgtctgatatgttgttgtgctgtcttcacaggcgatgagggatgaagaggtggaggacctcactagccttgagagcttggtggcctggaaggatgctgcggtggaggtgggagcggaggagaaatccttgcttcaagaatgtggtgcttagggtcctgtggcagcgggcacttctgtggaggttgaaagaatgtaataggaatggtttgacagttttcattttgtacatgatacttaagattggttgctgcgcaggtttcggcatctgggcctgcacaagcaaaccttgatgatagggcaaatgatgatatgttggtgtgtgaaaatgtagtgattcttagtagtgacgcatctgatgaatctgatgttgggtcatggtcttcagaaggtgaagggtt

SEQ ID NO: 109560 - DNA, 456 bp, Zea Mays
gggcagacgacccctttgaaaaatcagaaggggaggtggggacctgcctcctcgggtgggtgcaggaggagctggagttcctcctgtctatcatgacgcagatcatgtcctacgcgtcgcttgttacctacgaaggggcagcgaatgccttgtcccgcgagggctgtaggcatttcgaagccttcggccgaagctacaaggacttcgacctgggagttttccaggccaaagatgacttgctgaagcgctcggtcgaagcactttacaataggatgtggggctctcatggtcgcgaagtcgttcgagagagggtcgactgggcgctagcacaggaatgcgtctacccttggtgggggtgtgctttttgtttgcttatctaatgcactggtttgttgccttcgaagcgatgagggacgaggaggtcgaagacctcgccggcctagagagctcggtgac

SEQ ID NO: 109561 - DNA, 684 bp, Zea Mays
ggcaaaatcatctagagcgcccaggaattcttcgctgcgttgtgacactttcgtggcgccactccgtgtcgaggacaaactctggtgtcaactcaactgctattactttgctttgattctactcattcgttcgtccgcatcgcgttgcaccgattagcacgatgaaggggtgtcggttctgccttcaccggcggggcgtcatggccaaacagtgggcgccacggcgtttcagggcgactggatggctggaggagggtgatgagccctgtgccatcagatctagagtaaacgtctgtgattagctagtagatctggccgtcgattgtgttgaggatgtctcacatcagatcggggatagcattgattcttggtcattggatcaggatccggtggttaggaaggcgtggtcggctttgaaccatacgatagagatctgacgaaccatgtggcataccggtccagtataagggtaggtctaatcctaacccttgatccgcgatcatacggccctgagatcatgatacccctaagagctcgtgataaattagcgaattaacccgcagtcccaagcagttgaaagaaacttacactgaggccctagaatttttagatggcaccctgcaattctttgtattattgcgcgcagtccagataacaaataaaatcatagaaattaattctaaa

SEQ ID NO: 109562 - DNA, 376 bp, Zea Mays
ctcgcctactccatttgtcgaagcgctacataatatgtcccaatctgcaggatgaaatgcataagcgagaagagaagatccaaagcttgttgagtgaggtgactcagcagaaggaacatatccaaactttgtcctccacaaagtctactctcaaaatactacgtagcttgtcagaagaccaatccaaaaagtatatggctgtgaagtccttgagaacaactgtaaggtgttcaaatttcttatgataaagccatggacaggctgaagcatgttgttcggtaaaaaacagtggtctccaatattgatgcttacagagaaattacgatagaaacaactcaaaaattagagtctaatgtggctagaggtgagggagctc

SEQ ID NO: 109563 - DNA, 311 bp, Zea Mays
acacaactcaaccctaactccccaagtcttcacccatgcaccagcgaccgcatcctgcttcctgcctcggcggccggagtctctcatctccccaagtcttcgccttggcggatggagccccctgacccctgttgacgaccgacgctaattagacactttcgcacttagacgtcgacacccatgtccctggcgcgcgctcttgcgtacgaagcgaacacactgccacccacggaccgttcacacatggttctttttttcacttccaaggagatttatgcgtagtttagtgtgcttttgatgctacccagatg

SEQ ID NO: 109564 - DNA, 315 bp, Zea Mays
ataaaagacgatggcaccactcaattcatcaagcatatcatctaaacgtggaatagggtgtcgatactgtatcatgatattattaatagccctacaatcaaaacacatacgccatgttccatcttttttaggcactaaaataaccggaacagcacacggactaagagactcacgcacgtaacctttgtcgagtagttcttttcacttgtcgctgaatttcttttgtttcctccggatttgtcctatatggcgcacgatttggcaaagatgcaccaggaataagatcaatttggtgctcaatccctcgtataggtg

SEQ ID NO: 109565 - DNA, 413 bp, Zea Mays
ttgagacggccgatgtaccaaagcttattgaaggtgcagaaactgccccttctgtcacagaatcaggtcctgtcatgccaatcgaaacttgtatagatccagcctaagagccaaaatcagagaaggcagcagaacagatgaaggtattgagcccagcaattacaacagaactgctgaagccatcaagtgtttctgcagcgactccaagaaaaaggagaatggctagtgtattagacgctgttttggaatccgcaaagatgtcagctcccgcttctgtcgaagcttctagcgaaaaattaaggatgtgaaagaagttgttgctgcaatcgcggccatcgctcctaccaaagctgggccttcggaagttgggccaatagaactggcagaagagagtgctcccaagggaactaaac

SEQ ID NO: 109566 - DNA, 688 bp, Zea Mays
ggaacgcctggccacagcgcagcacgagtttatggcgacggcgaggaattccggtgagctcggtggtctatttcgtccaaggatcccccacgcagaatcccgagaccgcgacgaaccaccctgtcagcactaagtctccacgtggtgccaaaaacagggggccgacggcggcggcacacaccttgtgcagtgcggtttctacgtcggtgtacggtcgtcgatagggacgattgagggagcacgagtccgcgaccatatatacacaggcggtggcggcatgcgcggatgtggtttatgcccgcagagtccgagctccagggtgtttgataggcgagatttccgggctgttacaacaacccgatgtttactccatgtgcgagattgagagaggaaaaattgtctagcgggtcccatcaagtggccaaccactcggcaccagagagcacacatggcgaggggagaggtggacgaagcagtgagaattattgagtggatctcgggtgagccactagcttgaagatgaccctgacaagctgagccacacgcaagacacccaggcgagaagaataaaataaaggaaaaaatggaggagggcgtgggacggtgggaagcattagctatggcatcacgtgccgaccaggtaagcttctactttttttattattttcttatttctattttcatttct

SEQ ID NO: 109567 - DNA, 305 bp, Zea Mays
gttgtgggtagggcctggagtccggagaatgattcgctggaacatgcctccactccctctgcccactttgattgcatgagcatttggccccagagaaccgagatgatcatgaactccattccttctttcttcgctgaacggaagggtcttagtgtctcagtatggttaggctatctccagcaaggtgtgtatatgagcatgcaaaacattgttttacattgtagattatagattgtgtttgaatagagagtgaaatagaaggtgagatagagagactgctgaacataaacttagaagaatcctat

SEQ ID NO: 109568 - DNA, 533 bp, Zea Mays
atggtgccatcatttctgcctcgatgccacatcgacccctagcttccgtagcttgggtctcagtgtggcatgtcacattgcggacctcgtagatgtttgcacaatcatgccttgtctcaataggtcatgagtgcgatgcaaaccgaggggttcgcaggtcatgagtgggaggcggaccagtcctcgactgcacctcggtgacatgcgtagttaatgcggccagctacttatggtgggtcagtattgggccaggcaaggaatccacttgagtggcttcccttcggatcgcccgaccccctctctagctccaccacgctcgaccccgggcttggtgcattaggatttatctaggggcaggcgctgtgggggatggatatcccccgggtccacatgagtgcgaaaatacactggggccacacagcagtcgaccctttgaggcatcccgctatgggccgagcaaacgaaaccaacagaagggagtcggtccacctacgaaagagacccacgtccgagttagtcgcgacataagtgta

SEQ ID NO: 109569 - DNA, 408 bp, Zea Mays
aaaattgcatgttctgtttggatatgtatgttgaatcatcattacagaattgtaggttctgtttggatatgctgaaccaaacaatgtctgtaacaaggatactagagagagggtttatgacttggtgctttgactactagcattcatgtggtaggacctttgttgtattaaggttgacttgttggtatcatgctgtgtaacaatttgtaagacagctttcagcagtgtttatctggaacgatacaagcatgtccagaacttgtatgcaaatttagtaaaaatctggaatttgttattttgtttaatataaacactcgctgataataagaaacaagtttaaaccacaaatggccttatcgttcgagcaagctcgatcagggtcttcgacttgactaggcaattaggaag

SEQ ID NO: 109570 - DNA, 887 bp, Zea Mays
ctctttctaagttctcttgcgctactctttattggttcttcatgggtgttttctctgttggatttttagagtgacatgcactatatgggtctttaaacattttccacgttgtcaagtaggtccataaacttctttatcttaactagctcacatgaaccgatggtgtggatgggcaatgatggttgcttcaacggtggagatctcgaccacttcatcacgaactatcccgagatgaaagacaagtcagaggctaacaaacatgactatcactttgaccaatgcatgggaaagtgcaagtacatctctagcaagtacaagtccaaggggaggttcaacaaggaggtgatcaagcaaaagtatctttagaaggccaagcataaagagcatgccttcttcacctcccttagtgaccttggcaatgactccgatcacacttcttcctcgatacacaatgagcttgagaggtgggtagaggacaagttgaataggttgtgcttcttcacagacaccacttgagaactttgcaccatggcgcttagagaggatgtggtgagcgactatggcgaggacatcagtgatgattctacctttgaggtgtcacttttcacgaatgaactcatcgctaagttggataagatggtggttgctttagctagttagtacaagtttcttaggcttgcagcacgagagagaaaagagtacaagaggaagtatgtggccaaacttaaggagcctgagtcttctagagattctatggtacttgctaacaagactaaatttgatgagtgtgctcttcacatgtcaaacaatactacatcgtggaccaagtatgtcgtgttgctagatgagtgcgatgagttacaacctagatctaacttgttggggga

SEQ ID NO: 109571 - DNA, 318 bp, Zea Mays
cacggtttagattagagcaccagagtgccccttcgatgggttgttttgagccgttgatctcgctatgggcgaaccagatcagaactagcataccgcttcggtaggatttaatccggagcgttcgtttaggatcggacgcgtacgcttagatccggactcataaaacccgagccattgatcctggatccggcggtcttggttacataccggttcgccgtgagcataatctaatctgtgccgtccgcgcgtgatccgacgaccaggaaccctggataccccttcggctagcgtattatacaaaagagaccctcagttcct

SEQ ID NO: 109572 - DNA, 537 bp, Zea Mays
gttaggcacaagcaataatcacctctcgatcaaccaacacacaagatgtatgatgccaattgccaaccttaagttaaaaaacataagcaaatacaatgtccaccacattaattatcaaaatactacttaggggcctatatgcttcagaatgagagggggcacctattcatgaggacatcctccactattacccattggcaaagacacagttggcccaattgtagtcggacggcgaccatgtgagccttagaattatcccacctcgcttaacttgggaggaggaagccactttaaaagggagagccacccttcccccattggactagtcttttggtgcgattgggcctttccctaagttgggtgtgcttaataaattgttgggctccgggcaacctaacttgttgggcctcgaccaaccccacctgggctgggtgtatcatctggtatcagagctagggcccattttaagaaggtggaaatgatgaggacatcctccactattacccattggcaaagacgcaattggcctagttggcc

SEQ ID NO: 109573 - DNA, 426 bp, Zea Mays
attttggcagcataagaggtccctgcgccaaactcaggcaccacgaccggttcaatgtaacgcggccggtgggtaagaaccttcatctttttgcccttcggcacaggctcaactggggtggccaaagcagcagttttcctctttttcccttgtccccgcagcggatagcggtagtcggggtatatgaagccaatggcatcaaaaaccctgttcagtcttttcttccctcgtcttccgaaggctgcggatagagcattatcttcggccttggaataagctccaagcaattcatcacttgtagcttcgatacacttcagccagtcgtctttgggttcatcaaacttctcccttaatctgaaggtatacttcagtcgaaccagaccatctttgctagagtcggtggtggactccttcggcatttcccag

SEQ ID NO: 109574 - DNA, 532 bp, Zea Mays
tggtggagtgagtgacatggcgataaaagaaccgagccacggtggccgccggtgaaatatctctggtcaaactccggctaggttcgcggaaccatgacacggctcgtagttatctcaccgcagtcgatccctcccccaattcactcgagcacatccaaatctacagtgcctcggatcttttcatcgttcttcaaatatttcctgcgctctgatcttcagcgtttcactgaaccgacctcctttcaccctttctttctctcaattcttgttaagaacagggtaatctcccttaacaaaaatcgttcactaaacaacagtctttaagtttactataggattcatggatcaattctgcatagattctcaaatttggtgctctcaaattgactgcatttcactggggccatacttttctgaatccagttttcagtattgcccaactcacataacttgcttctgacagtacaacttcatagcactagttctcagatttttgtacaataccctagcaagccgactgcatcaaagttac

SEQ ID NO: 109575 - DNA, 367 bp, Zea Mays
cttgcagctgctgagctagctacgccgcacttgtctgtcccggagatcggcacctgatgatatttatgcgataaagcattaaagcatgcaggtgcagcacctaagccggacgacgacgacggacagcctacgtgttgcgagcagcaccgtacccgtacatagcacattcctccgcgtgaaccaaaaacacgtaaaagaaaaggtcggtcgatcgaggtagataagatagattaggtgtaggcatatgctgatcattcatcatcgtcgttgggcacatgacatgatgcatgcttgcagtgcaaggaccgaaccagatcgtgacgaactggacgtcgtcaccggccatataccctctgcgacagctagc

SEQ ID NO: 109576 - DNA, 500 bp, Zea Mays
ctgccattctgtggctgcttcttaaaagttccccttgtcggcccctgattattgcggtgcccacgaccccttcatctagaggagcctctcttctcctaagacggaaagtttgcatgtgcttctggtatggccgcagcgccgacaggacgcttctggtagttttgcatcaggagctcattctgagcgtcagcaccaagcaacatgttgatgagctcacaatacttcgtgtacttgttgtttcggtactgctgctggagcaccatgttgggggtgaaaggtctggagagttttctcaatcattttaggtctgtaactatctggccatagaaacgtagctgagcgacaatgcggtgaatggcagtgttgtaagcctccacagtcttgaagtcgaggaagcggagtgtggcccattcctgttgcgcccgcggaagcatcacatgattctgcacaccgaagcgctctcgcagcttcgtccacagtactagagggtctttcacctc

SEQ ID NO: 109577 - DNA, 989 bp, Zea Mays
aaataaagagcctactttggattggcatgtctcctaatttacttattagaatggtattttccaggtggtaaaattttgaagcatcagagattcaactttgcatgattaaaatgcaattgtgcaaaactgtacccttatcacatatgcacattcagtgctgagaaaacatcctatttggtactatcatgtgaacctactgaaagaggacaggggcttaagaagaaaatagttaaactcaacttatgttgggtggggctgagggttattcagtaattccaagctagacattgcctgaagttacacaaagtttgtctagttccttccaatccctaaggcataaaggcctacaacttaaggagcaggggtttcaaatggcttctgaaaactaatgcttggatcattttaaattttggggatgctattaataaaccataaattacaggattagcacttaactgaagtacaaagaaatactaagatggtaatacagagaaggtttaggaaggtaatcaggaaatgctatgactgaaaaaaagacatcaaatgaaggtgggctaacttctaaataaagaaaataatcacaaatggtttgcaactaagacgactaagcaagagctgcttgaggaaagtcacaagcatgaatttggctgtcacgtaaattttcaaaacatcacaaggcatattagaatcctagcattgacagtatagtcatagaatgtgtaaagggtacattctcaactacaaatcatgctatccaagtcacctgatctttcaaggtataccagttttgactcaatgaaaacctgggtgcttgaatccttggttcgctttctcatattattcaacttatattatttgtctgtagaagtaaaaagtggagcccttgtaataactaacagtgatttcttgtcaaggcctcaagggcattgttccttatggtccacacactaaagctatcaatgagtgaaccaagatatattaccaggtat

SEQ ID NO: 109578 - DNA, 411 bp, Zea Mays
aaagaacttgtttctgcatcatgttgtactcttttctttgcatgagttttccccctgtttgggtttctcattcaaagtttttaacgagacaacatcaacataaggtctatgtcgtatcatctatttttcccgtagaggttttcaaggatgatacattatggcatagttattgttgtatttgaactaggtgatgagtttatctccctagagttcaaatgaatcaacaatagagtatgactactctccttatttctcccactgggtttttaaggagactcagctcatatgttgatttcttagattttctggcaagattatcttggagaaatattagcctgagttatatgtctcatcatttattttccccacggggttttttgaaatgatggctatagacatattattgttctt

SEQ ID NO: 109579 - DNA, 1445 bp, Zea Mays
attaattaaactaaatactgtagtatattttgatctcaaccacaaccacaatggtctgaattcccatttgatacaagtaatttatgtatacacttctcacagatcagccactatgcctcacaattagcatataaacttgtggaatctaactaattaacatatattctctgaagattacagcaggaacacccttttgcttggacgaactgccttgtgtggttccaaaatataaattaggggcacatgtggtgaggttctagcagcatcactaattaaactaaatattgtagtatattttgatctcaaccacaaccacaattgtctgaattcccatttgatacaagtaatttttgtatacacttctcacagatcagccactatgcctcacaattaacatataaacttgtggaatctaactaattaacatatattctctgaagattatagcaggaacacccttttgcttggacgaattgccttgtgtggttccaaaatataaattaggggcacacgggttgtgggggatgttgttttagggaggtgaatgtggttcctaaggtgagaagatggtcgcgacctagaagggaagggatggggatggccgctcctgctcccttttgacctaggaattacagaggggaggaggaagacgtggtggctggttaggaattaccgaggggaggaggaagacattgtggccgcccctgctccgtagattgatctattgacagggaacagaaggaaatcttgaaggagatctagtgagcttcgattcaggcggggttgttgtagatcgtgtcaattccttttctgtttacgcgcgggttgaggtaggtattcacgccaatcactgtggtcgtcgtgaaggaaaagttggattctatgtttaacgatcacagaggtcagctcgctaaccatgacatgtttttggtcgtcggctgggttggacagagcttgcactgtgccgccgagactcctcacaaccacatattacaggtggtcttcattttctggtcgttgataagcttttctcttgtatatatataagtgttagcttagtaaataaaaccctagagaagctttgattgttgcatagtgtttttaaatgcaaaagatgtttgaaatgtgttagcatacctccttgaagtctccattacttttccatatttttcgagtaattttctcattttcaagaaaacaaattctatttatttagggcacttaaaaacattttttataagctccaaacactttattcgagattgttgggctctaaaacatgtctaggattttttctagaattcttggactctttaaaaccagttttcatgcattaaaaatatattattattatttattattggcatccattatagttagttaatttttaaaataggaaccctattggtaagactaaccttccctttactttgctttacataatt

SEQ ID NO: 109580 - DNA, 519 bp, Zea Mays
gtcggtctatcactacgacacctttcgtaaagttcttgatgtctaggcaaaatggatggtcatgagggagaaattgccgatgtttatcgaatgacgaatatttgccaccctttttcaaccaaatgaacctaagagcttccttgcaaactgggcatgagaacttaccgtgaacacaccagacgcagaatagcccatatgccagtaagtcatgcatggagtactagtaccagacatgcattttgaagtttgtctttgtagatcggtcatacgtccataccccttcctcccaagcacgtaccaattcatcaatcaaaggctccatgtacacgcccattttattcgctgggtgttctggaattatcaacgacacgaatatattctgcctttgaaagcacacaccagggggagattgattgggataacaaacacgggccaacatgtgtacggggtagcgctcattccatagggattgaacccatctgtggccagcgcaacacgtacattacaagcctcttcggc

SEQ ID NO: 109581 - DNA, 639 bp, Zea Mays
gttcatatgaattttctatgaattaatcaagttccaacatttatttatgcattaaaaatcaatttctgtgattattttcctatttttattagtctctggattgggcgccaatttctggaaaatacagggactcgggcgcaaaagaagatgagactcaaagcgtagcagccccggacggcgggttgattctctaaaagtataagggcttttctgcaaagtggcatggcgaaggggtacgggccgatctcggccgcccgattaaacaacaagctcctagatcagattttagttaaaacgaaccggtattctacaggagtccttggatctggatcctacggcccatagtcgatctgcgggttggaatgcatagctagatccatccgtccattcccagactggcggttccgattcaaagaaatccattcactgccccaactctaatcccgatcgctcaagcctgatccgacggtccgaagaccgcccttccccgtttaacccaaacacggcggcgctgtggtcaatcacggcggtgatcccgctggcgcgcggcgatcccttgatttagcgcataatctgactctctggacggcgctacacgtggagcagttagtagcggaaattaataggccaaagcaaaag

SEQ ID NO: 109582 - DNA, 596 bp, Zea Mays
gaaagagttgatttcatggcgtgtttggcaagggatcaccgtgcccacagaagacacccacgagtcgttgtttttgttcctttcttgattcgaggtctcggtttacctatctctcccttttttcgtggccttctcgattactattctcttaatttaacccatttgaatctcaattatgttcttcaaattgccattttcatgcacctctgtgaagcctttcttgggattagcccacattttgtattgtggaaatatctctaccattgtatgcccgggatggcgagtgggtagcatcaggtggttgggggcagcctagagctttgttgaggtaagaaagctgaatacctagatatcccctaaaggatagcattaaagcgtggcgatttgaatggtttaccatggagaaccacaacaattccatgcctccccgttctaggtggcaactatgacaggaccgcccaatctataaaagcacaagtactaaaaaacatatgcttccacaattgtttaacttacttgagcctatattgacctagtagacagccaagtatcccaaaggacctcggtaaatcaactcacaactaagatcacaaatt

SEQ ID NO: 109583 - DNA, 521 bp, Zea Mays
aacttgaactcggcgcgataatcatcagagggagtgggattgctcgtcgtgatcgctgtggcaccatggagtcgccttcgacgtcgtcaggggccttcgcgtcatcaccgctagtgagaacctttccttgtagatccacttttgtttccgcgtcatgtataactagtcagattgggaactagagcatgggggcaccggtagggtgctcgtcgatgagaataccgccgcgaagcccctatgtagtgtgggtatcgttcctggccttgtgatttatggttatggtagcgtttgatagattcgccttgatctgctctatgcatagatctcttccactctcaaatccatagactagatggctggttcgtctgctcgtcggagtcaccaccgcagaggaggccacctccgtcctgatgttgttaggaggtaggagatgaagggtggtcattgattggccaatgaagggtctaaattagaacataaatatcctttcgtcgatctaacattcgagccatagatcagag

SEQ ID NO: 109584 - DNA, 689 bp, Zea Mays
aaaatttaaaatttccttacgaacttatagctcaaagcatgttgctaagttagtatggcaaacatagatgtggaacataagaagttttttttcttgatggttatcctcaagtgatgattatcaaagaagtctggggatatgatggtatttgttgggacgataaaccgttggtccaaacactcgaaagtggtgtcacaggtggctcgacaacaacaactaaaagcgcaaatatcttatcaagcgtgtcccgctacatgacacagatatttatagggtaactataccatggttatctactacaatctagaatatgatgtacaatagagtaataacatgactaggtcgctttccccccaactacaccaagatttctaccttgatggaggctggtcggcgggccaaagctagctaggatgttggtcctactcgggccggttttttggatgttgtcttcaagccttcactctcgtgtggtcttcactcggtaggggggagcacccttgtagccgtcgcctttattggctacgacgagttggcccctcaatagtcgagggccccatcatcgttgttgtcgaggggagaggccttcgtttgtcgtggtcgttgcaaatacaccatctccaacgcttgcctttgccttttcatcggtccgcccctctgcgtcgagcactttatgcaattgattagcg

SEQ ID NO: 109585 - DNA, 423 bp, Zea Mays
actcgcttgactctctttctcgtgcccccggcacaaaccatcgagttacaatccacgacaccatcctacccaaaagcaccacgagggtaccctgggtgtgcggtcggacgctaaacaccgatagtcgccatgcccgatatccctccgattgatcccagcagccaactccctttctgcggtaaatgcgcttctgttgtctcagaaactgatctccttcacatcgtcgaggtcgatgttattccgtccaaagagttatgctcttggtggatctggtggggaattaccatcccgacagaggatactcatgaagtggttattttcgtgccctcctcatcaaagggttggctttgccagtttctccctttttccgtggcctccttgacttctattctctcaaccttactcatctgaatcccaactcca

SEQ ID NO: 109586 - DNA, 546 bp, Zea Mays
aagcaagctaggatttggaacttgaagtgaagttatctagaaggaccccttcaaaagctattgaagatgccacattctctatcttatcccccacccctcaagaagtttcgatatgtgttccctagatctattagcgaacctcttggctaggttgatagggtagttctatgttattaagttttttgactagatcggcaaggacgatgtaatattatataatagtgggtttctaatccataatctggttatataccccttgacttcttctaattttgttttctttccattgtattgccatccttgggcaatatctaccttgatatattgaacttgtttcctctctacttctctccttgataattcctctctattttgtctccttgttaaactttatccctaactcacttcataatccttggctttatcatttatcctcacttaaccaaatttatggttatcttatttcactcatggccatcaacaataatgtcttgcccttgtttaacaccttgttatttctgatccaattccttgattttatcttct

SEQ ID NO: 109587 - DNA, 858 bp, Zea Mays
aaggcttggttgcgggttggttattggattttgcgggggctcctttgcatattatcccagccgaaggggtatgaactaatctgtgttgtccgatctggtttcaacggcacatattagaagttatctaaaccaaacggttatgtaatctgagccacccaatgagcaatcgacgacccagatttaaaattgcagatctaatcctacgcgcccgatctagatcggacgaccccgatcgcatcagtccactcgacacctggattcgatctcgatcgccaaacgcatatcctacggcggatgccatctctcaccccaaccactcgattagatcagacggtcggcaaccttcttccaaatccctcacccaccaccgtacccggacagcggcggcgatgtaggctccaacggtggcgccattatcggcgatgcgcgccctaatgcccggtcacccaatcatgcatacatgaagctcttcacaatactggtaccgaagcgaacgtacggagggaggactcaccgcagattgcatagcgtcatgtcctgcccatggcggtcggtagctccatggcgaggagattgatccagtgtgcaattccagcgtcatccaccattcatccacccagacacggccacgtgcaccatcccagaagatccaagctgccccaggccagaccacgtgacacaaatggcaaagcaggcaagaccccgtggcggcggcaacttcctcaccctctctgctaattctcccagacaggtggaagcacgaacgccaatgtaggctacggttagatggcccagggggagagtcgcgatggcctccaatttatacctccgagcaacaacctagcgcggatatagctc

SEQ ID NO: 109588 - DNA, 425 bp, Zea Mays
tctgtcaaggaagaccaagagagtttgaagaagataaaaacagtgccagagccaaaggtgtcggctcctaaaaaatggaagcttgccgaaaaatcctctcagaagacgaagatgcaagatgtgccgaaacaaactacaagcccttcgtcttctgctgtggaggtctcggaaatattgaaggtaataaccgggtctttcccattcacacctctaagtcctctggcattggaactgacgagcctcttatagaaaaaggaaatctcttcgggtgctgatgggagagacgggggccagaagaaacgacgcatgatgaatatactagaagccattgagcaaaccccgaccccagcctcgacagataaagctactaaaccgactaatgccgaagctaccgttgcagccgaagacgaaaatctcacaaccac

SEQ ID NO: 109589 - DNA, 535 bp, Zea Mays
tttgttgagggcctgcagggcaaagacgcggtctccgtcgatgaggtctttggacgttggttcgtctacgtcggggacgactgatgcgcttgttcggggtgacccatgctttatttcctgcggggtcatggcctccgatccatatagtagacaaaaaggagtgaatccagttgcccgacattcggtcgtgtttagtgcccagactacttcaagtagctggtcggcccatttacccttcctgtcgtcgagaagccttttcttgatggcggtgaaaatcttgccgttggcgcgctcgacgatgccattagattgcgggtggtataccgaggcgaaggcaagcttggtgccgatggagaagcagaagtccctgaagtcctggctatcaaactgtttgccattgtcgaatgtgagctcggacgagactccaaatcagcaaacaatgttttgccagaagaacttctgggcagtcttcgacgttattgtggatactgccctggcctcgatccacttggtaaaatattcgatggcgacgaag

SEQ ID NO: 109590 - DNA, 602 bp, Zea Mays
actgcgtctagcgctgagctacaacggaggctccatttgagggagatagatatcccatgggtcatcgtcacatggacacgttccatgggccacttaaacaaaccccgataagtcgaacaccaagatgtaatattaggccgaccttcaggagaagcaggtgctaccgggagaatgacacgctcagtcagaagaattttgaagagtgtggtgtaaagacgtaatccatgcacatatatcgcagaggagtcaacagaattccaagtaacacgccccgcatgcgacaggatagcagatcgttcggcgccaaacttgaagggaagcaaccaccaaaagagtcgtctcgtaagaatagtgaaagtatataggtccaaataagttttcacggtttgtaaagagatatatccctagcctgctatataaggctgtggaggtacccctacaaaaataaccccctctctcaccatcacacccaccagaagaataataggagttttcatccaccgccatacatgactcgcctataatatgtgaactccaagcaaactcaatattcagaaacacacaagacatagggtattacgcattcaggcgacccaaacttg

SEQ ID NO: 109591 - DNA, 1589 bp, Zea Mays
gttttccactgagattcctcgatcttcaccttcttgcaggatgtcttcgaccccttaagtaatggggtgcgatgcgagagcaaatcttggtgatcggtcatcatagggaaggtctccggagttgcatgaatggatgttgcattccagagtagggcagggaactgtagcgtattgttattcatgtatagggcaagggtatttataggtaaccgagtgggtaggacgtcccaagtaccattatgcccccagttacctgctacattaccagaatattccccacattggggtcattacaacatagtaaaatacactggcccaaacacacccaaaagtctaccccctcttagaggcttacaagtggttccaagctctaggtgagtagagtcaggcgccacggaggatgtataaatccgtcgctcttgtacaggacccttcgccccttggtgaccggcaagggagcctttgctagaatctcggctctatctgatgtgtagttatcgagtcatcgtctgcctctgactttcacaatggcgagccccttcttctcgtacggcagtggggccagaggcttcatcgttgatatgaaatcaagtctttgggtgttgcaggcccagtgtccaaacatggttaattctgctcgggtaagcatgatcgaggtctggttcggcctttactccaacattgagcatttgcaaataactgatgtttctctctttattgaagagggatacccaggaagggctagatgccgccgacaagatagtatccctgattgtattcatttccattaaccttgaagttcattacaggtgcttgaccttgaaggtcattagtgaatgactaattgattatgttaataccattgttggacctagccaccccaaaaaaagcatgctagatccacgaatcattcgatgcaacaacctctaagatgatggtgggatgttgatatttgcaactatgggttatagatacacatcgggtcatcatggcattgttaagcttcgtgggacgcctacaaggcccccaatgggctgaccgttaggtgcccagtgggcctcagccaggtgcaactaaagacgaccaaacgagatatacaggtgggcgaaaaggttcccaagatcgtgccccgcacaggcaacgtacgcgcaggcctaacgaagaccaactgatcgctggaagacatggcacacttctagtggaagttgacatataggaatcatggtctgagattatgcggggtgatccctctttaatccgatataaggcggagtggcaacccctacaaaaacagtagaccctcatacctcattcattttctactttcaataactacttgtaatcctcaatcacaagcaatatacatctcagaactcataggacgtagggtattacacattcaagcggcccaaacatgtataatctattgtgttccatcgtgcctggcatgaaccatcgagctaccatcgacttcgccgttctcccaaaagcattatgtggtatatcccgtagtgcaccatcagtaccaaacaccgacaacaaccaacacacaattgaactcctacttccccacaatagtaagctactct

SEQ ID NO: 109592 - DNA, 377 bp, Zea Mays
ctcgacttatggctattaagtctaagtttgcattctcaaacaactgttacaaggagcttttgaacttaatcagtgatgtacttctgaagaatcacaagatgccaaaggacatgtatcagtctaaaaagttgttatctgggctcggtatggactacgaaaaaatcgatgtctgtgaaaataattgtatgcttttctggaaggagaccacgggtgagaagaagtgtaatgtatgtggtgagcgtagattcgttgaggttgaaaacgacgatggtttgaccgtgactacgaagattgcacgtaagcagcttcgttacatgcctcttatacctcggttgaaacgtttgttcatctccaaaaatacagccagacacatgagg

SEQ ID NO: 109593 - DNA, 919 bp, Zea Mays
attttatgtacactcaagttacccagctcagttgtgaagtaaatagacaaatactggaagcattgcctctggagaggtgctagacagcaatgccacataggcaccttaggcagcttggcatttagcatgcagaccaaaacacaaagggggcatggggattctagatctcaagaaacacaatgaagccttgctaatgaaaaatgttatacaaattcttcaacaaacaagatttaccatgggtgcatctgatatgggacaattaatacaaaaatggtatactgcccacagatggtagtaagggttcgttctggtggagagatatattgaaaaacttgtcggcattcttataaatagccgaagtcaaaacaggtaatggaaccacaactcgtctttggcaagaaaactacacaccgattcgtgaaaagtgtccaatgcttttttcctatgcagtgaacaagaatatgactctaagacaagaaaaaatgacacccttggttgaggatttgttccatctacctctgtctgcctccgcttacatgcaaatgctttcactggtcacaatgtttcatcacacggaactgacggacgcaccagacaaatggaggtgcgctagtgttgcagataagtactcatctcaaaagatctatgaacttatacataaagtccctgtagcgctagacacttttgctctgatctagaaagcaaaatgccagcctaaacaaaaactattcttttggctactccagcacgatagattgaataccaaatcagtgctcaagagaataaatatggaactagactcctacacatgttacaattgcatacgtcagaaagaggaaacatggagtcatctgtttctgaagtgtagcttcgccaagagatgctgggaaatggttaggatcacgccaacccgttcctt

SEQ ID NO: 109594 - DNA, 676 bp, Zea Mays
cgggtatagctgaaggactggtggccagccagagcaacgaggacaggaggtcttgggccttgttggggtaactgtctgcaatattggtttagccatgagggcactgacaatgatgtagcaaatgctgcggacggccacgggacagagcatcggcagcggtattgtccgagcttggtttgtacacaattttgcattggagtccgagtagcttggtaaagacccattgctgccatggtgtgtgcaaccgttgatcaaacaaatgagccagactgtgttggtcagtcttgatgatgaactcgccgaactgcaggtagggggcggcattgttccactgctagtaagatggtcaaatattccttcttgtaagcggagagacctgtgttttagggcccaaagctttgttgacatacgcgatcagatgattgtcttgcatgagaacagcaccaacacctaagccactggcatcggtttccacacagagttgtttggtgaagtccgactaggcgagcactggagccgagtgaagagcagttttccgtgtctgaaaagcggcttcgtggtgccctgttcattggaaaaccgacgatttctttcagtaggtttgtgagaggcttactgataaccccgaattgtcggacgaattttcgatagtaaccgtcgagcgaaggagtattca

SEQ ID NO: 109595 - DNA, 397 bp, Zea Mays
gttgtggcacatgtgcaggaccaaagtagaggcgaggcgggcaaccaagtggtcgtgcgatcatgacttaggtcggtcagcctttcttgtccatggtgttggctaaatgttgtcccttattacatatttttccacattttgtcacatgtatctaaatatatcaacacaacttgtgtaactcattagcaataactttattcacttcatcatgaagttttctctcgttcttatggatagttgagggccaagatcctgaaataatggttgtcaacaagcatcaaggtgattataggttatcttggttagtctacagtagaaagattaggagtcattcttcaatacatcataaggacaagccccgatgtactcatacagatattttatgctttgagaattg

SEQ ID NO: 109596 - DNA, 478 bp, Zea Mays
cgcctatagaattttgccattttggttttaacatatgggcatgaaatgccaggtatcctagttgcgctggtgctcacgtatagaacttaacttcatactgtcaccttgcctaaaacttagaagtaaaccaaactaaggagaatgaatccttcgtccttccacatgtacgtgcaggtacacacactatattggggaatcacaaatttctatgcaaaactcaagaacttacccaccttgccatgtgtgatctgtgatctttgttctataactcttttccctctttaatgaaaggcagaggtcctgccatttgtgtttcaaaaaaggtgttcaaagttgcatctcttatcaaatagcaggatttaaagatctgcttcttttttcttggagagttggagttaactctaatactccttatcaggttgatgtagattgaaccctcacgttgcagataaataaggcgattcttagacagttctgc

SEQ ID NO: 109597 - DNA, 829 bp, Zea Mays
acattaccaaatagaaacactgaatgttttgtatacgtggttagtgtgctcggatattccgtcagaaaacatttttcagtactgaatgccgttattgtttttccgttgttggaatacaaccgtatttataaccgcagaagtaaatgcagtatgatggttttgaaatttcttcgtgtttcgcggggcatagaggtcgccctaagatgagtgattgcaaacatgtttgcgttggatcgagtaggcgtgagtgtactgtgccaatttaagtcattgccaacttaaatcgactgctctgttggtagggtataatagtcaccctgggttacgtaagcgtgagcatgtcgcactgccttaagccattgccgacttaagccaattgctccgttagtagggtatagtggtcaccccgagttaagtaagcgtgagcatgtcgcaccgtcttaagccattgccgactcaagccgattgctccgttagtagggtatagtggtcaccccgagttaagtaagcatgagcatgtcgcaccgccttaagtcactgacgacttaagccgattgctccgttagtagggtatagtggtcaccctgagttaagtaagcgtgagcatgtcgcaccgccttaagtcactgccgacttaagctgattgctccattagtagggtatagtggtcaccccgagttaagtaagcgtgagcatgtcgcaccgccttaagccattgctgacttaagccgattgctccgttggtagggtatagtggtcaccccaagttaagtaagcgtgcaggttgacagcaaacaatttgagtgcctttgaagtctttttattgatt

SEQ ID NO: 109598 - DNA, 465 bp, Zea Mays
tgccaagtacatatctgagtgcgatacctgccagagaatcaaagccagtcatttgaaggcagcaggccctttgcaaccccttcccataccatcttggaaatgggaggacatctgcatggattttatcgtgggattgcccaatacctccaggcaccatgattccatttgggttattgtagacagaatgaccaagaccgctcatttcttaccagtgcataccacccacaagacagagaaatatgcagaagtttatgttgatcaaatagtgcggttgaatggtattccaaagaccattgtatctgacagaggagcactgtttgtggcacacttttgagagcagctacaagaatcacttgggacccatgtaatacgaagctcagcataccatcctcaaacagatggccagacagagagagtaaatcaaatcctcgaagacatgttgcgagcatgtgtactacactacag

SEQ ID NO: 109599 - DNA, 770 bp, Zea Mays
atgacatgaagttagggctcgaattcaatcatgatccagtgggaatttgactaggaatgctataacaaagatgaagatggtttgtagggctacaactttgctgcagagcattggttgtgttaccatggaaaattgggaggaaattggactcaaagttgatatgttaggagctctgaatcgcagttccgatggtacagtgtcccgatcaggtcgccagctctgtccctcgccgccgacgtgccgcacgcggattcgtgctttcaccgccgtgattcatgctcggatcggttggatagcgcttggggttgagtaaatatcatcgccgtggatatactccggccactaaactactccgaccactgtaccgagctagtcatagatgcttcggatgtgttcgccggagatagccgcttcacggccttgcgccacgtgcgtgggcacatttaccgcatcgccgtgactcgcttaagtcatccgatcatcgccggggagcccgccacggtattctccacgaatccactacgccagtgacctcccattcctccgatcgccacgcatctcaatccaatttcaccggccaccgctcttgcctgctataaattgagcctgtcgtgagctctacagggtaatcacgcatctaagccgccaagtcttgtcttcaattgtccactaacgcccgtgaattgctccaccgcgaaagagacctcaccgtggtcagtttgctctaggttagttcaagctccttggacgattgttctagcctccttaag

SEQ ID NO: 109600 - DNA, 482 bp, Zea Mays
cttatatggccaaaaaacggtgatatttcatttaccctgctctggagattctgcaacgcaccatcttgagaacaagtttgttatgccctttggtcaggaaacgaagtccttgtttgtggcaaggtgctgtagcacatcattagtaggagaaccagagagggggaagaacttttttttgtctatgcttctatccttaactgaggaagatatgctaactaatttgaagtcacttcctcaagccacaccaaattgccatcttctccttcagctttcagctttgctaactgtgtaaccaagtcaggcccactgctggtagtacctaacagtgcttggcaattggcataacaaataccagtattgtagtactgtatttatttattcttaattggattgctatctgccaacagtttttcttcatgaatcatgattgtgcctctgtcacaaacccaaccaacatcaatccttgccttcaaggcctcgga

SEQ ID NO: 109601 - DNA, 582 bp, Zea Mays
ggggtatgaaggttccatggctagaccacacatgcccctcttatctgaaatatccttctccattcttaggtatccattctcgccccaagtcgttccccatgagttcttcattagccagtacttagtaccatcgctagtctttccataaccaatggcagcaatcccatggtctaagtcagtaccgcatgagccagtcatcacaccaccagagtagaattggaacgtcatgtctccaccgtccactgccaccgacacaggctggtttgccacggccttcatcaaggcagcctcatcatttgccggcacatcctcatagccctttatggttgcggcactatttgatccactcttgcacttgccatctgcagcagtgtaaggatagctggactccgtggttaggccgccgttcttgatgatgaacttgaaagcatcgtccatcaaaccaccctcacaaccttgatcctcgtcatggacatcgcaatccactaactcttgttctgcaagagagacgagcttcccggtactgattttcacgatgccttctgtggcggccacggctgagaacgcccagcagcaacctgc

SEQ ID NO: 109602 - DNA, 1124 bp, Zea Mays
gggcattcaaggaagagttcagggtccgagcgctgtccaagaatgcagaaacctagttcagatcagcttgactctaggcatacctttcctcagcatcggagcaccgtcgagtcagagctggtgaagcatcaggaaaaatacaagatgtaaaacgagagaagcaataaacagcaaagggaagttgcagatccactaaccaaagtttgaggccttcagatcatctatttgcctctgaagcaggagagaattccactgcatcaaagacaaaacttgatcggggacaggggcatcacaaggtttcaactgggccaacatagagttgaggacattctacaagctcaaaagttagcaagagaacccatttgtcaacgtaaacaatgcaaggcaaagatcaactcacctggtggttagaaagaaataagggaaatcccagggccgaaggcattggtgcactgtctgttgatggagtgttgacacggtcaatgttgagagcatcactcaaggagaccttagctctgatggcaggcggccgattcccaacatccgggtcattacctctaaggtgaccggaccaacaagagtagcaggcgaacacgtcaccataggttcctcagattgaactggtggcgatccgacatgaacatccatggaggcggctgaagaggaaccaagcttggcacccttgggggctgggtcatcctcggcaccacccttggggactgggttatcctcagtggtgccttcaggagctgaagcacctttagtcgtacccacaggagttgggtgactttggcctacaacgtcaagagccagcgtgtccccatgagctagaccaccctccaaggtcaaagaagcatgagaaaatgtccaggttagttcttgcccaacaggattaccagccaaagggacgtcatccgggacctctgtacggacgacagaactttcagtcttaggaggcttcaataaaaggtcttcaggaataatttcctctagtgtatggtcaatggcagacattgtcaacccttggagactaactagtcctcataaagcctgcattggaatatcactgctgctatggctgtggctgttcttgcgaatcaaagggacaatttactcttcttcct

SEQ ID NO: 109603 - DNA, 332 bp, Zea Mays
attaggctagcgcggaactctatcccccttatttccacttctaccttcaaacatatcttattcatctagactttcccaccaactgaattaattttcattggggttgtcatggtatagttggaaggttatgtgtttctacccattttgcaaaaataaatgaatgagttgcactagtatcaaatagtacttttgccgtacaggattcgactaagaacatacctactgccatgtctggagcatcttggtctgcttcggcctacaagtggttcacctttccacgattgtatgcatggccgcgaccgcctgctgtatgttgtggtgctgtctttttt

SEQ ID NO: 109604 - DNA, 357 bp, Zea Mays
gcgagtgtcagcacattgccatgtgggatctgtgataggtgataaatgggcattttcagctatataaggagaccaatttaagctatggaggtatcgaagattcagaagaaacacatctccatctccattctcatttccttgtgttctagtgttcatctaatctgtccagaaatctctgcatctcttttcccttcccctctcatgtacctggattctcttacattctagtcctttgctgctgctggttgagttgagatattagtgttgttaacagcgaggcccagctccgttctaatcgggtacggtgagcatagcagcgagttgccccggtgatggcaaagtgatgaaactcgcttc

SEQ ID NO: 109605 - DNA, 359 bp, Zea Mays
aaaataaagaaggagttcctatccctcaaacagggaggcatgtccataagcgaatacagagacaaattcatccagctatcccggtatgctcctggtgaggtctatgatgatgagaaaaagcaacagctctttttagagggtttgatcggaccactacaataccaactaatgacgcacacattcccatccttctagagaatgctagacaaagctatcgctctgaagcacatgagggttgagcttggagaaaaaggaaggctactaactagggacaggctaggagcagtacccgtccccgttatactgcaccccaaggcacaccaactctttgcagttccgggcaacagactcaacagacc

SEQ ID NO: 109606 - DNA, 745 bp, Zea Mays
ggatgacttcgttttatgccccggacagaaggggactagcacgagccgttggattacgcccaggaattccgcagcgcaatgagcgcctacatcttcgctggatgccacacaacagacggtgaagttgttacggtaggagatagagccgacagatgggccctacctggcagtggcgatactcatacgtgaacgcggatgcaacggactggcgctggagccccaagcgtcagtggacggatgatgcgggttggatgggttgaggggaagtgggtcgcgcgggcgaattggtgctgggccgagctggatttggcctagggtggaattttgtattttttcttttccattttcttttctaatttaaatttaaaagactcaaaccaattcaaattcctattttcaatcttagatttccacatattaaataccatcctaatgtgaatattacccccatcatttgcatttatttcatttatcctttttcctattattcaattctagacttaattgaatttccccttctcattttctattttgcattcccatttatggtttggggttaaatcttgttttcaatagaatgtatcacaacaacacattagcaagagatgtacctttcttcatttctttattagttacttaattaatttaatactatcaattgattatgaacaggaaagggtcttaataaattcccaaaggtttcaacaattctcaaaataatatcataaatatatctatttcttta

SEQ ID NO: 109607 - DNA, 399 bp, Zea Mays
ccacagcagaaattcttctgttggttacccgggttgagtcagctaggcctcggtacagataggccgggtatgccctatccttcagtggctgaatattcttgaagacaaagtcagcaaccacaacctctgcagtcagacccctctctttcaacaatccaacttcagctagcagagcccctgcttcagccacctcctgttctgtgggggactcagtccagctaggagtgcgaacatccggctgtctccctgaccgtggggggagggaattcccatgattctccacgatgaaccattccagacgccatcccttgatgttgtccttgagggggatgtcgaggtaatcagtcttccttccatggtgcatctccaagctcgcaccccccaccagctgatgctgtc

SEQ ID NO: 109608 - DNA, 431 bp, Zea Mays
ggcggaggcatcaacaagagccgacgaaggatccgagaggaagagggataggacgtggcgatgtttgggatgagtggaaacacgtccgcgatagaggcatcgagccgagcgacgacgacagaggatccgaagggggagggaagcacgaagtatgggagagagaaggggacggtgacctcgcgactagagaaacaagcggactggacgaccgagcaagacatccaacccatccgaacaaccacgattttcctgatgacgtggaccgccccataacttgaaaaatcgcaccaagttttaatataagagaagagatgatagataataaaaagagatatattatgtctctgtataccccctatgtttcaatatattattcattttagcatcttatttttgtgtccatattcaaatagataaaaataaatctagac

SEQ ID NO: 109609 - DNA, 639 bp, Zea Mays
ttaccttagtcaagcttgtcgtgggtgatttggtcttgaacgtaatgcttatgacccaagtaggccacgatgaaagtgctaagacacttttctatgaagacttagatggcatgaatagagctatatctattagtaagaagcttttcataggatatcttaatggacatgtaggtagaccaaatgcaggtttcgaggcgattcatggaggttttgggtatgatagtaggaattgagaggaaaaggaagtcttggaatttgcggtagcttttgaccaattgatagccaacacattctttaggaaaagagagtatcatttagtgacctatactggccaacactctcagattgattgtatcttcacaagaagagagaataaataagcgtgcttggattgcaaggtgatacctaaggagtgtattttctctcaacataagcttgtgatgtgggtcttttgttttcaggtgcatgcctgtagggataaacaagccagaatacaagaattaagtggtcaaaacgaaaaggggagacatcagaaatcttcaaagaaagaccatcaaagagggcacttgaaaggagatgacacaaacaacgtgcatttggaaggtgacctcaggggtgttagtcctgaaggtctgggcc

SEQ ID NO: 109610 - DNA, 633 bp, Zea Mays
ctcaggggttatagcgtaaaaatctggacctggttgtactgttctttacctacagttggacggtgggtttatttagataaaatacagggtctcttttgcaattgtgttggccgaaggggtatcacgacatgtgagccgtccgatcacccgctgaaggctcggtttacaccagtgaaggttataacccgatgcgcattgccctccctcagatcacccaccaaggctcatgatttaaaataccgagatataatctaacgccttcaatcactatccgacggtgccagcccaaatagacctcgccggttcgtgtctccaatcttagtcgtgcatcatccgatcgacgacccaatgcactcgagatccgtttcgtccgtcgaccgccagattatgatcctgcggccaagaagtcgtcttctatccacagcgcccaaacctgatggcgacctgataatcacggcggcgtagctcccgccgcgagcgatttccatgatccactgccctaaacttccccctgaagggttcccaacacagaggagggtggcacgaagaacagggacgtgattttacctcgaatcgaggcggtgttgccttgcccccacgcaaccagcggcacccgaggactcccgcaaccac

SEQ ID NO: 109611 - DNA, 330 bp, Zea Mays
cgcgagcatggagaggtgaatgctccttcggagtcggacgtagaccgaatggatgacatgctagatgacattagacatgagtatccagcactggagaccgaccaacccccgctggaggaagtgcagtagttttacaagttgctagaagccttggatgcaaaagtgcacaagggtaccaacatgattgtacttcaggttgtaacaagacttgtgatgatgaagtcaaagtacaacttctcaaataactactacaaagatatcgtgaagctgattattgatcttcttgagccggtacgtgagtcgacgagtttgagtttatctagataaagc

SEQ ID NO: 109612 - DNA, 362 bp, Zea Mays
gtgagagtcatcttaggggatgcatatccttgattcctcatgagaggacatgatgtggtcacgtgatcctcctcgtcacatttgaagcatctccttacttcattctcagtgtccatgtgtggacatgaggcgatgaagtggcccaactccatgcacctgaagcatctcctttttcatctcccctatttgttcttagagaacatagagagaacgtcagtgcaaatatcatgactaattaattttttatctttttccttattcatgttgattacttcatttattgctctaggaacttccttcttgtggagtttgatgcttgttgcgatttcttccttctcaagcttcttcaccacgtgtctgtg

SEQ ID NO: 109613 - DNA, 936 bp, Zea Mays
gggtatagtgatcaccctgagtcgtgcaagcgtgagcatgtcgcaccgacataaagcatttctgacttaagtcaattgctccgttagcagggtatagtgatcaccctgagtcttataagcctaagaatgttgcaccgacttaaggcattttcgacttaagtcgattgatctgttagcagggtatagtgatcaccctgagtcgtgtaagcgtgagcatgtcttaccaacttaaggtgtttccgccttaagtcgattgctgatttcgagttgagcccgatctaggtcaattgttgatcaaaaacttgtatgccttggaaaatggaagctttattgataatgaaaccttctgcttataaagtacaactcgtcctcaagagttttgaggcattgctaggggtagaatttcctgaggtgctcaatattccatgaattctccacttcggtgtcatccatctgggtgagccggtaggatcccagtcatgtgacctctgcgaagatgaatgatccttcccacggtggtgatagtttgtgtcgtccctcccccgtcagcactcggtggaggaccaaatctcccactgcaaaggatcgatgtcgcactactttgtcgtggtagcgcctcagggtctgttggtatctggccgactgaattaccacatttagctgttcttcctccagtacatcgatgtcctccaacctggttgcttctgcttcggctttgctttcaaatgttaatctgggtgctccgaagattagatctgctggtagcactgcctccgatccatacaccatgaagaattgggtgtttccgtgcaaagctcgactcggttgggttcgtaggctccagactacatatggcagttccctgatccatttccccgtgaggttctcgcttttgtcgaacacttttttccagagtgcatctagtatcatctcgtt

SEQ ID NO: 109614 - DNA, 1045 bp, Zea Mays
attttgtgcacttttggaccctagtgcaaataccaaagttacagaacatcacaaatcatgtgtttttcacatttggggatttgcaagtcaaatagtgggatttggacttatttgcaaaatgtacccatgaactccataagtttaagtctgaattcagttgaatagggatgactttggagctctatatttctaaaaatacaaggaatttactcagggtcaatacatcaaatttgtagagctactaaaggagcataactttgtttaagtccaagacatgagtgctgtacaaaaattgaagtaaaatgggctcaaagtgttgttgtcagtcacccatacagtctgatacttgtctgacattgagtttgctaaactttggactcaaatcaagctcgaaggagtaagtaaatgagcaaggtctctatagtcgaattgtagctagtttatagagctacaagtttgatacagatggttggttgagttgctacatgaattttggagcaaatcacccccaaatatgctctgtcaggtgctccgaatggcattctaatggtacagtaactgaatatgatctcaggttcagctcccctcgccgccggtgatctcgcgcccggattcacgccggcgtcgcgattcacgcccagttaaacgcagataacgatccttggatgaaaaatctggtgctggggatgagttcgggacaatgtttcgccctagctgtcgtacccccttgccttacagccggtccagataacctcgctggagttggccgcttgctgctctggtgccacgtgcctaggtgctctaccacgtcgcagtgacttgctttagcatgtccggtcatcgacggtggtcaggccacggtgaaagccatgaatcaattgcgaagtgacctccccctctccggccgccagtgcgccatttcaaattcaagatccaccaccctcgggcactttaaattaagcatgccatcagctttgttaagtcatcacaatgccaaagcacccgctactgcctccgattacccactagagagctccaatttcat

SEQ ID NO: 109615 - DNA, 1483 bp, Zea Mays
agttaagtaagtgtgtcggttgacagtgaacaattcgagtactttttgaagtctttttattgatgatatatttcccagtttacaaagtacattgtcttcccaatagcttttgagatctagctaggggtaaaacttcctgagatgttctatgttccatgagttcccaatttccgtgccatccatttgagtaagacgatacgatccaggccgagtgacttctgctactatgaacggtccttcccatagtggcgacagtttgtgccgtccctccgccgttagaatttggcggaggacgaggtctcctactacgaaggatcgatgccgtatggccttgtcatgttagcgcctcagagtttgctgatatcgggctgactgaatcaccgtattcaatcgttcttcttctagtatatcgacatcctccagtctagtagcttcagcttctgctatattttcaaagattaaccttggtgccccaaacttgagatcggcaggtagcactgcttccgaaccatagaccataaagaaaggtgtgtttccatgcagagctcgactaggttgagttctcaggctccaaataacatacggcagctctctgatccactttcctgcgaacttttcattattgtcgaagactttctttctgagcgcctccaatatcatcccgttgaccctttctacctgcccgttggctcttgggtgcgccaccgaggcatatttgatctgaatgatcttttgctcgcagaaatcgaagaactctgaatttgtgaagttggatcctaggtcggttatgatgctatttggtattccaaacctgaatattatgtcttgtatgaattccactgccttagctgaagttagggaagcaatgggtttgaactctatccatttagtgaatttgtcgatagcaaccagtacatgagtgtatcctccttgagctttcttgaaaggcccaatcatatccagtccccaacatgcaaacggccaagttacgggtatggtttgtagttgctgcgctggtagatgttgctatttcgacaagtactggcaagcttcgcacctctggactaactcggctgcatcactcttcgctgttggccagtagaaacccgacctgaagaccttcccaaccatggtcctggatgctgcatgtatcccacattgcccagcatgaacctcttctagcagttgctttccggtggctgagagaatgcatttcatgaggactcctgatgcgccccttctgtatagcgtttctccaatgagagtataatgagccgactgtcttgcaatacgttctgctgcatttttgtcatctggttcctcctcattttttatgtacttgatgatcaccagaatctgactctggttggctcagagcgttgcattcctccacccgatccagtgaaatgctcggatgcagtatttcttgtacgaaaactccaggggggacctgggtccgactggatccgagtttggacaatgt

SEQ ID NO: 109616 - DNA, 649 bp, Zea Mays
gtttccttgggtgatcttccttttcacttgaagacgattgagctatggcacaaacacgcttatttattgtgtgtaggggcaggggtacttgtaggagtaagtgaagaagtggcggagacatggtggggttagttgacctatggagaggttgatcgaccacttagatccaccatccttcaatccaattgctcatataactccttgatggaggttgataattattccaatggtaattggcttctgatcacatgtgcaaagctccatgtgggtcctctaatccttctattgatatgtttcaaccataggatgaatcgaccttgcactaatgattgcattggtcccaaagtgtggttcttctgaatggagtggatcagtgacatgggtgaggtggggccaggttaggttaaataaaagaatacatttgtaaccatattaattgaaaacataatatcactatgatgttggttgcaccctaactttggtgcaatgttgatggtcaacaatggtatttagtgaccatcaacaataactaaacaattcaatgagtggtaatgactcacttgcatgagaaacaccctctttgtaaagacactccaatgcccctatttgaaatctctcatgtgtccaaactcactatgaccaaacttca

SEQ ID NO: 109617 - DNA, 337 bp, Zea Mays
ctcacaaccaagaaggttgttctgcttgtttagtggagaagataaggggcacacaactaggacatgccaagttacaatacagaagcaaaaggagttagttgaggccaaagcacgacagaatcagccgaagcaagtcctacatactacttcgggctactttccatacattcctaagtatgtgggcaatcaacagccattttcacaacccatagtgttagtagcttcagcgagccacgccccagctgcatgggccttgccaccaccaccaccggtcatggatccaacttcgtcctgcaatcaacaccttaaagggcatcgccaaattcagcaacaacgc

SEQ ID NO: 109618 - DNA, 278 bp, Zea Mays
cgttgggggaacttgtggctggctgcagctgctggatgcggccactccgcctcttgccagcctcacgtttcccctcaccacttattcctctccaccaccaccacgaccgcctgcctgcctttgggtcctacgaatgtatagcaaaactctgttgaggttggtgttaagtaggcttctacttctaatggctggataaagatgaactcaacagctacgctacgccctcgggaaggagagaaaagacagggaaggaatgtccagctggaggcttccgcggc

SEQ ID NO: 109619 - DNA, 479 bp, Zea Mays
acttgaggttcccctgggccgtgggtaggggcccgacaatgtccaggccccagcgctgaagaggccacgtgtgggcgattagctttgtgaattgcgaagggcttcccaagcatggagaaaacttctggcaggcttcacaggaccttgtgacccgatttgcggcgcagatcatggtgggccagtagaaaccacgacggatcacctttgcggctagggccctaggccctgcgtgagagccgcaagtcccgctgtggacttcgcgcaggatttggacgccttcggtctcggtgacacatttaagcatgggttgactgacccccttcttgtaaagctgaccttcgattagtgcgaagtcccggcttcgatgtttgaggcgcttggcctcattgatatcggttggatgatagtaccccctgcaggaacagggttattggtgcccgccagtcttcggtcatgatgaggttgactatgcggtggcc

SEQ ID NO: 109620 - DNA, 350 bp, Zea Mays
aatttctgttttgaggaatatgcccccaccttcaaaaagctatcttttagcttctttatgcagtccaaggatttttcataacacctttccctagaatcacgaagctcttcaacattattttctagccttgaacttgtccattcacttatctcttgctttgccttcgcaacttcaaaattttcattcatttcgacaagttttttctttagatcgtcaacttcggctttgtgagtttaggcttgtgcattagcttcgctgatttttagtttatccactaaggagagcagaatcttatctttttcgagggcttcattcctcagtgtgatgacctctgaccgaaggttcccaag

SEQ ID NO: 109621 - DNA, 535 bp, Zea Mays
gccggctctctgcatggctgctttgttttggtggctactcgttaaactaatacccttttttgggctatttggtaaagcaacaactggatgtcacgtgatgtcgtcctgggcacgtggcgtcgacaagaaaagcagttgtctgatctagttcggttttgatttgaagagaaattcaatttgaatgaatgtggacaacggactatctggacctcaaattctaaggactcgtctgattccattagtcctaggactaaaatttagtctagagactaacatttagttacaccctgtttgttgtagtaactaaacagattctaaatacatttaatgcaacaaataaataccaaaatatttattttcttgtttcctgggtatgataccagttttctaggcagggataaatgttgtcatttagtcccttttatcacccatgttagtcccttttatcacccatgtgaggaactaaatactaaagtcaattagttcctaatttagtccttccatttagcaaaatatggactaaacgggactaaat

SEQ ID NO: 109622 - DNA, 694 bp, Zea Mays
acaccgacttaaggcgtttccaacttaaggcatttccgacttaagccgattgctttgttagtagggtatagtggtcaccctaagtgtgccatattgattttgagttgagtcctacctaggtcagttgttgatcgagaacttgtatgccttggaaaatggaagctttattgataatgaaaccctctgcttacaaagtacaactcgccctcaagagttttgaggcactgctgggggtagaatcttctgaggtgctcaattttccatgaattccccacttcggtgccgtccatctgagtgggctggtaggatctcggtcgtgtgacctctgtgatgatgaacgacccttcccacggtggtgatagtttgtgtcgtccctcccccgtcagcactcggtggaggaccaagtcttccactgcgaaggatcgatgtcgcaccgctttgtcgtggtagagcctcagggtctgctggtatctggccgactgaattaccacatttagtcgttcctcctccagtacattgatgtcctctagcctggttgcttttgcttcggctatgctttcgaatgttaatctgggcgttccaaagatcagatctactggtagtactgcctccgatccataaaccatgaagaatggggtgtttccgtgtaaagctcagctcggctgggttcgcaggctccagactaaatatggtt

SEQ ID NO: 109623 - DNA, 538 bp, Zea Mays
tgggcatgcaatgcatgaatgttggtcatgattagttcatgtctcgggactgtaagcgacgagcgaagagatctgttgatgaagagcagggaacatttgagttgacagcaagacgactttgtaacactcgaggcatgcggtcggtctactcctccgatccatcctgctagtagtactactagacatcatcgagtgcaatggttaaatgccattgaccttcttgacgctatatatagctgcatgtgctagctgctgctaggagggagccagctagccactcgtgctccattttctacgtgctccttcctatagtaatagtatagctgatgaaagccctgcctgtatgtgattaggtcagctcattagttagctcaaactaaagcactacgtatggtccgctgatgcaatgcaaagccgagagctagcaagggagaagaatgatggcgtgcgtacgtgcgtatcttccgaggagtaggacgactggctggctgcctacgtcatcaattcacctccatcatcacactttgctctgttgcca

SEQ ID NO: 109624 - DNA, 801 bp, Zea Mays
gtggatcacaaaccaaatttgatatagcagatgagggtcttttacatttaagaccgaagatcatttgtcacatatgaattgtcatgtacactgagatatctttaggattaaatgtcgaaaaacaaattgctagtactcatccacgcccagcctttgaaccactgtgttgcttatgcaccccaggcatgcacgaaaagagtgatggtctctttgactttgagccaaacagaaaagctctaaggggaacaccacctttcgttgacagggtccggaagttttgttgagttcggtggcttcttgcaatagataccttgagattctctctaagcttcaagatcacccttccaagctccacttgaaggcctcttacatggtccagcccagcttctagctccttagcgactttgttattctcttgtttcatattaagcacctctccttgaaattttgcagcttgaaaagggttgaagtgaacttcatcacatttatctagagttgtaatctttgatatgtcttcttgtatgctgcatagtgatgaaaatctgttctctagctctcctttcaatcgcacgttcctttcaatccaaacttgaagatctgtatttaggtccctcaatttcttttctagtactgctgattctagctttgctacctgataactaccagcaaagccataaatgccctcatcttcctgttcatcagtcattctgtgcatctcagttttcaacatgtcaaaagagatttggaaattccgtatttgatgatataatgtgctaaacctcaaccagaagttcaagttct

SEQ ID NO: 109625 - DNA, 505 bp, Zea Mays
gcatggtaccaacaaactctgaggcgctatcacgataagaccatgcgacatcgatccttcacagtaggagatctcgtcctccgccgaattctaacgggggaaggacgacacaagttgtcacctctatgggaaggaccgttcatagtagcagaagtcactcggtcgggatcatatcgcctcactcagatggacgacacggaaatcaggaactcatggaacatagaacacctcaggaagttttacccctagccatatttcaaaagctattgggacgacaatgtactctgtaaactgggaaatatatcatcaataaaaagacttcaagagcgctcaaattattgtcgacctgcattcttacttaactcggggtgaccactataccctactaacggagcaatcggcttaagtcggcgatgacttaagacagtgcaacatgctcgcgcttgcttaactcggggtgaccactataccctactaacggagcaatcggcttaagttggcgatg

SEQ ID NO: 109626 - DNA, 851 bp, Zea Mays
cgggatgatattggaggcactcaggaaaaaagtctttgataaaaacgaaaagttcacaggaaagtggataagggaattgccctacgtcgtttagagcctaagaactcaacctagtcgagctctgcatggaaatactcctttcttcaaggtctacggttcagaggcagtactacctgctgacctcaagtttggggcgccaaggttgatctttgaaaacatagcagaagccgaggctactaggctggaggatgttgatatactcgaagaagaacggctgaacatggtaattcaatcagcatggtaccaacaaactctgaggcgctatcacgataagaccatgcgacattgatccttcgcagtaggagatctcgtcctccgccgaattctaacgggggagggacagcacaagttgtcacctctatgggaaggaccattcatagtagcagaagtcactcggccgggatcatatcgcctcactcagatggatggcacggaaattgggaactcatggaacatagaacacctcaggaagttttacccctagctgtatttcaaaagctattgggacgacaatgtactttgtaaactgggaaatagatcatcaatagaaaggcttcaagagtgctcaaatttttcattgtcgacctgcattcttacttaactcagggtgaccactataccctactaacggagcaatcggcttaagtcggcgacgacttaagacggtgcaacatgctcacgcttacctaactcagggtgaccactataccctactaacggagcaatcggcttaagtcggcgatgacttaagacggtgcaacatgctcgcgcttacttaactcagggtgacc

SEQ ID NO: 109627 - DNA, 312 bp, Zea Mays
gaaaggtggtaggaatttcttgaactaaatggtctttttcatgaagtattggcaatgggtattatttgtagcttttaattgggttttgcatttttctcttgtggtctacttcattactaatctggtaaaaatttatttgctcactgttgcacactttttggcttgcttatgatttaattgaaatatggcttaatatcaagttctatttgtttaccctacttaaaatgatagactggggtgtttatcatttttgtagtggtatcttagtggttgcaagtccactggatttttcttaaatattttgaaattgtt

SEQ ID NO: 109628 - DNA, 489 bp, Zea Mays
cctttcagcttcgtcatacttcattcactcaacgttggagataccctgttggccaagtattcttgcactagatccctggtgctgatatgttcagccaccactctgaattctgccacggctagttggcatggtgaccttggcttcatgttgcacaggggtctggtcatcccgaagcttaaactcagtgggctcatgaccatcgtcttaaacttctccctcttcttctcatcagccttgatataaaaccactcactcttctagccagttggccacttggtgcaatagctgaggaccggagccttcgtatccttgcgatacgcgaagttataacagccaaaattttcatgtagcccgtcttctctggccttcgtttggtaatgcagctcatgcacttggcaaaaagcttcagcattcgggtccatccctaggcttcgaagggcccagatgaaaatgctgagcctaacgatggcgttaggggtcagctgatga

SEQ ID NO: 109629 - DNA, 665 bp, Zea Mays
ctcgggttgaatgttgtagttgacaacaaaggtgtcgaactcttttggcaatgaagcaaaaatcaaatggacaaggaattcatcgttaacatgcagatccattggtttaagttttgagttcatatgactcatctttagtatgtgctctcttatgccagtgccattgccttctccaaaatacctctctgtcatcatatgctttatccgctgagttgcatatgtctttgaagagccatagaactgaccctttattctatcgaggtattttgtgacagtgtcacactctggaattgagcccgcaatagaaggctcaactgtattctttagcactgccatgcactttttgttggcaataacccactttctatgttcaaggtcgtaagccatctgtttgggagcatggtccctctgtctgttctgccaagcagactcagcctcatctgtctctctcactggtgccacaggctcagtgggacacggtgtggtgactacccagtccacctcagccaaaacgaacgctaggtcaatctttttcttccattctgtataattatctccttttaggagtggaatatctttaataaaccccatcaagaagtatcctcctgaaattacaattcatgtaaagtgagaacaaattacattaattgcatgcttcagttcca

SEQ ID NO: 109630 - DNA, 391 bp, Zea Mays
ccggtgatggcctcggccgcggggagtcacgcactccgccgtcttcgtctgtcaggattgaatgcgaaacctggtcgttgatctcggtctgaacgaccgagattgggccacatgcgtagcgattgagggtgcatatctgggccgccaattttggatccaagggcatgtgccgtgtaccggttcactggagtagttcatctaatctgggccttatatcctaaaacggatggcccagaaccgagcacgttgtagccgcgtggtgtttttgcattatgagtcctcggggttttccgtaattaacccgcagtcctgtgtagttcatatttcattgcaaacggacccagaactttgtgaactagaccctgtcctctctggtaattgtgtgcgcagt

SEQ ID NO: 109631 - DNA, 389 bp, Zea Mays
tccatgtatatttctttctcccttcttgattttgagttgtcctcgactcaaagtcgttggtgtctgcaaaaggtgttgatgtagtgcttggtgtcatccaaccttgctccccttcttgaagttgaccctgttgttgtaaaagataaaaagagggacaagtggaactagaggtgatatggttaggtttaacacagccctctaattgatcatattgtttcatgacaaaatgagatttcatatttgaacaaatatatactcgatgtaccatatattctcctttccaattatatcttccaataacatggtatgtatgtttagataaacatggtaaatcagcactaaaagaaagtttctcctctaaataatttagattacataaaagatcaaat

SEQ ID NO: 109632 - DNA, 445 bp, Zea Mays
gtctgttttggattgcatctttctcggccatgaccatctgatcaaaagaccaaaaggtatagaatggaggcaaagggactatgcatgtaccataggttcatcgtcgtacaattccacatttgaacatgacaatatatcgacgatgagtatgcagctataaagtatcctgacattactagatgaataggagatgcttgacgcgccacctttccagtcgttttattcgaccgttttattttagcgggtgaccgaggtttctttgttggtcgatcgtgtagaacgaccttcttgctaacatatttggagatcaattgatcaaaagtaggaccaactttatccagtcaaccatgtgtgttatatgtgcttttcccttgcatcaccttttttgctttgtgtggaggtcgacgcctctagccatgggcggtctgtccggccgagttagcag

SEQ ID NO: 109633 - DNA, 345 bp, Zea Mays
ttcgaattatcgacaggaagaggcaagcattcttctagccgggttctaattcttgtcatggttccaaatgtctcgttgcttgggttgacgtttgtctccccaaaaattgcggaggccttggtctccacagtctggaaactcaaaaccgttgccttctcctaaaattcacggataaaatccttgatgcctccatgactacttggaaataatgttgtctcaggcgtcgtgatcccatccttgtctcgtctcccccctcatcctactttggtcgaatcttcctctccacaattgacttttatagaaagatcaccaccgttatcatcgaggacagcaagtccacttctt

SEQ ID NO: 109634 - DNA, 403 bp, Zea Mays
cgcacagaagtctccatggccggttatgacttcgtcaaggacatcaacctccttttcaatacattcgatgccccgggtatatcttcggcagagaggttggtttcctcagatgcagctccaactgaattgaaaatgcttctcaatcgagcggtgcattggcttgcaaactcgaagcatctctccttcagagccctcagcgcctcactaagcttcgtatttttctcagtctcaaccttaagtgttgctttcaaagcttcgttttcttggttgaatcgattagagctttccttcaaaagtgcctgagcatctgccaattctatacccaatttcttgttctgagcttgtgcttcggcaagggacccttcggctgaacatagcatttcatcttttttcttcaaagagt

SEQ ID NO: 109635 - DNA, 733 bp, Zea Mays
ccgcgacgtggcgttaaaacgctgcggtggcaccgcccggttaatcagcggtcaccggaccatcgccgtggctctgcccgtgcgggtaagctcgccagcgcggttacagctccgcaattctcatccaattccggccattggcctataaattgagctcgaatcctgtttcttcaccacatcacgcacacaagcacttgagcaatcgactcaatttcaccagaagaactcccatagtccacaaagtcattctgccctgttcttcgcactgccgtgaagaactcctccgtggccagcactcctcgggtcagtaactccccgattgcttcctgttgtagcttgtttatagcttcctattgctctcagagccgaccaattgaagtttgtcagagtcccatcacaggaacactcttctgctccgtagaacgctgccgcgacaccctctctatcgacccacttttctactcttgcccagtccaaattctagcgtgtacataatctctggtgaacccgtgaagcttcctcaagcttcaatttggtcatccatgtcgtcggttgttcggaacgtgtttacccatccgatcacccgcactgtcgccgtgaaccggttgattcaaagccccgctagtgaaattgattgaggggaaatgggcgggaggggtacaatctggtgtctgccacacgggagccccagccgttgcggtatccggccagcgtaggctcgccggagttcggc

SEQ ID NO: 109636 - DNA, 584 bp, Zea Mays
acagggacatcttcaaactgacctggtaactgttattgtaagagaactgcgcatagggcaaactcttatcccaacttccaccatgcttaagagcacatgctcttaacatatcttctagtacttggttgggtctctcggtctgtccatcagtttgaggatgataggccgagctgaaatttaacttcgtgtctaggcaatcatgcaacttctgccaaaaccgagaagtaaattgtgatccctggtctgacacaatcttcttaggtactccgtgtagacaaactatctgtgccatgtacatctctgctagcctggcacccggatatgttgtcttcactgggatgaagtgggaaaccttagttagtctctccacaatcacccaaatagagtcatacccagtagatgtgcggggtagacccacgatgaagtccataccattttcttcccactttcatttaggtatcttaagtgggtgtagcaaaccggcacatctctgatgttcagctttcaccctctggcaaacatcacacaatgctacatgtgaaacaactctttttagaccataccaccaatacttctgctttagg

SEQ ID NO: 109637 - DNA, 483 bp, Zea Mays
gatgggaacgtaaccaagtcgaactgcatctttacaagtgttttttcttatctatctagtttttgtcatatcttttaggacctagattatatctcctgacttgttaagatctttgccgtcatatctcctaacttgtaagatctttgccatgtttatcgtttaggagaggctctcggtagtaagacttcattctagtcctcgggcccttagccgagccaatggatctatcttttccgatcttcatcttggccaatggtaccagtggtgtatatcattgacaaatggtacccacaaaaaatgttttgaaagctgatttgcatgtatatgatcctgatatagtcaatttccatgtaagctggtcctacaaagctaatcttccaccaaggctaaaattaacagatattctttggaggcctaagctgctggggctctaaacctttgatattcagcagtgatttcaaaaccctgagcaacaaacctttg

SEQ ID NO: 109638 - DNA, 356 bp, Zea Mays
ccttgcttcttcatcgtcgcctgccatcgaaacacaaaaacaagaaacaaacagtgatagttatccctaataatttcactacacgctcctctcaggtggaacacagaaacacgctctattgtatcttaccaagctcttacaagtgtctgacgaaatacaagcaaaggatggtacaatcggaggctggttcgtgatacttaccaagaggtagtgaaaccgcgattgcaaggtcaaatctgtattgatcagaagatatagtatgtggagttgtagggcaggcacaacatgtatgtgaatgtggaacaaaatcgagtgcagattagcgaagttcaataaatatccaaagcacaagtcac

SEQ ID NO: 109639 - DNA, 573 bp, Zea Mays
gccccctgttggttatagcagattcatctggggggcacatcccatctttttgtagatcctttccacgtgtcccatctactggaaaggggaagggtgagaagtaccatgcttcccttgatggtcaagttcatggcgcttggtgagttgcgagcgggtagtccgagtgaggccctagtctcttccacaagagcccagcgtggggtcagctagtgatcgtccccatatttctatgtgccaactcatatagttcccgacctcgttcgactaggactaaaggctcgtttcctagaactcgaatgtgattcgaaagcacccttggagctcatgcactagggtcctagccagtactgtgcctgcctcctatcgcctctcactctattgttttgggagcgaccgcgaaccctagtaggctggccttcgaacttcgattgcttagacccacctagtttgccccttggtgcaataggcatgggttttgaggtcctattcatgtaaagaaagggagatagagataatgaacagggacatgtgagtggtctcactgaagcacggtcgtgcggttgcatggtaaca

SEQ ID NO: 109640 - DNA, 422 bp, Zea Mays
cgcgaaggcgttacgtacttggtctggtgtatttgttatgttggtctggtgcgaatgtagtcggtcttttgcgcggacagtttggtgtagtcgttttcgcacttgttaagcttcgtccggctgcacccttaggcaactgttgcacagatagtcttcgcggaagacttcgatttttcgcacttgttgtgctagcccggctgcacccttaggcgacttctgcacggatagtctgcgcggaagactacgatttttcgcacttgttgtgctagtccggctgcacccttaggcgacttttgcacggaatcgtcgcacgcgagggtagctagcgctaggcctcgcggtgacttttgtattggtcgaatgtcgaagaccgtcggcgcggtctttttcgacgtagatttttgcgggggatttttcacttg

SEQ ID NO: 109641 - DNA, 523 bp, Zea Mays
gaaaaggctgagatgcaggtcgttgttcaattgtgtcggtcgacgcacaacgacgagacgccagtggaacctcatgagacgatgcgtgggcggatggtgacacacctccgattacatcaagagcactgttcaaagaaaaccgccgaggcctcgctgctgggcgtggcctcggggacgacggtcttcgatccatgaaccacgaagcagataaaaatgaggggagcagtgacactaaccaggtgaggcaggaggatgatttgggactaggtgttccacaaaaaagtggaagacaagagtatgtataggggcgggtgccttccacgatgcaggaggagataacaagatggggaggggtgggttccttccacaacgcagagggaggaggatgtagctgaacgggggtattcaacaacgccgagatgggatccgtccacgtcgctgagggaggcgggaggatagagtcagacgggggtttccacggcgcgaaacaggctcaatgcttgtggaggtgggaggatggaat

SEQ ID NO: 109642 - DNA, 585 bp, Zea Mays
gtgctgactggtaataaacagttcgagtgcccttgagaatgaaatcttttattgatgaggtatttatcgattacagaataaaatgctcccccgatagcttttgaaatcttgctaagggtaaaacttcctgagatgctctatattccatgaattccctatttccgtgccatccatttgagtaagcctatatgatcctggacgagtgaactctgctactacaaatggcccttcccatagtggtgataattttgccgtccttcccccgttagaattcgacgaaggaccaagtctcccactataaaggattgttgtcgtataaccttgtcatgatagcgcctcagggtttgctggtatctagctgactgaattactgtattcaatcgctcttcctccaatacgtcaatgtcctctaatctggtagcctctgcttcagctatgctttcaaagaccaaccttggtgccccaaacctgagatcagcaggtagcgctgcctccgaaccatagaccatgaagaaaggagtatttccatgcagagctcggctaggttgagttcttaagctccaaaccacatacgacaactctctg

SEQ ID NO: 109643 - DNA, 544 bp, Zea Mays
atgggctcgcgcccggatcgcccgtggactaagtgtaatcttgagggattcatccgtctttcccgcgctcgacgccctcaaacgctggagatagatcgggaaggagccatcgggttttccttaagataagccaagttagttcgctatttgctaggagataagccggaagagtgtgatcagcgtgtgcgtagggagtgccccatggttgtgtatataaggcctaggccctagggagaaccccatcattttcataccatcagcacctctccattcgggaaacaccacttgtaaacataccacacatacaaagtcaccctaggaagtagggtattatgattctccaagaacatgtagaaaatcgcctgactctctccctctctctctctcatgcctctggcacgaaccatcgagctacgatcaacaacaccgtcctacccaaaagcaccacgagggtacccctgggcgtgcggtcggacactagacaccgacacgtggtgagaattcctatgtcccattcgcctcgtgtgtagcatcgtgaagcgct

SEQ ID NO: 109644 - DNA, 410 bp, Zea Mays
cgacaaggtggcgcaagttgaggcggtcgaccttaatgaggacgagatggcgcttgtgatcaagtgcttcaagaccgctttgaagggacgcagagactaccctagcaagacaaatcaagggaaaagcgttcatgctttaagtgcggtaagtccggtcattttattgctcaatgtctagatagtgaaaatgactaggaccaagacaagaaagggaaggagaagaagcagttctatagaaagaagaagggtgaggcgcacatcgacaaggaatgggactcgaactgctcttcatccaactccaacaacaaaggacttgtcacatctaccttcaacaagtcttctctcttccctaatgagcgacacacatgcctcatggctaaggaaaagaaggtacatacacgtgacactcc

SEQ ID NO: 109645 - DNA, 358 bp, Zea Mays
attagtatttggaggtacttctttggccccttgctcggttgtggcaagcttcgtctcaacaggcactgtgggctcggcctcggttccagcctcaattgttgcagctttaccttttatctgcctagtatcagcttcagtctgcgctttggcagtttcggcaaccttctttatagaagaggggcgtttggaatctgttgtttccaaaatatctaatacatttaccatccttttccttctaggggttattgcagaacttttttctgtcttcagcactgttgcttctgctgaaggacttagaatctcgggcatctttgttgcttcttcagtttttgatctttcagccttatcttcgtcaacc

SEQ ID NO: 109646 - DNA, 545 bp, Zea Mays
agtggaaacaacaagtcagatcaccatgttatgtttggagggaatttattccagtcggtatcttgctctggttctggccatgaacagcctcgccacgccatctggttccatcagccctttccttattggatgagcaggctcgttcgctttcagaggtgacagcaggtttgctcctgtgaccctttccagaatatcatgactcgcggattgagatctcgtgatggttcatggttgcgagtactgcgcgcccggccggctcccatgttgttggttcggtcctcgcgatcacaggcgtgcagaagagtgtcatctcagatttaagcaagctcctgactggaacggcttgaggcgatctgctagcctttcgtcggggatcattgtttggtggtatgtcataattgctccccggacttagcatgctttgtgtagtgtagggtctgctagatctcctttgtaggctgttccctcgatttaaaaggtggcggcaggcatgttaatggcaggatgattagccattcaatatatgattggaaaggcccaaccgc

SEQ ID NO: 109647 - DNA, 535 bp, Zea Mays
gtcggttgagaccacacagaaggttgaggacaagcgtgcgatgaagacgagctcgccgagaacccaaagagagtgccatgcccatcatccgacgacaatactcggtagaagtcactctgggagaagagccgaaaggaggcgtcgaggtggagggcatgggcctcccggttgttgaggaaccgggctttgagtgcaacccaagcctagtgagcggtggacccccgctcgtgcacgatctcctagagctcgacgttgaggataacaccttactcatgtgttcatggcggacgataaagagggacagaaggagagcgcaacgcctaggctttgttttcctattcgcaggggtgaggtggtgagcatgcgagcaagcacgagcgccacgagacaagtgacgcctagtgcagtcaggcgattgcgcgtgcgcggtctgatcgacgacaacaatggtccaactgcatgattgactgaagtcgcgactttgtcttgattctgtaggaaactaagactccttgtattgcatagaggatggtta

SEQ ID NO: 109648 - DNA, 487 bp, Zea Mays
ggagaagaaagaatcagataagctcagagtatgcattgattttcgcaatttgaatagagcaactcctaaagatgaatattccatgcccatagccgacacgttgatcaataatgcatcaggaaatagaattattagctttcttgacggtaatgccggatataatcagattttcatggccaaagaagatgcgtctaaaacggcctttatatgtacatgcttcattggtttatttgagtgggtcgtcatgacatttggtctgaaaaatgctggtgctacttatcagagggctatgaatttgatctttcatgagctgttgggaaacactatggaagtctacattgatgatattgtagtcaaatcggctgagtttagttctcatatagctgatttgcgcaaagcctttgataaaatgtgtcggtatggtctgaaaataaacccacgtaaatgcacttttggactgtcggctggtaagttcttaggattcatc

SEQ ID NO: 109649 - DNA, 488 bp, Zea Mays
ggggtagacgtcatgtccctctttataagcttgggtgagtgcctttctgtagtcgttctgcagtctttatattccaactcacacctcgcatgagctccacctatgggctagtcgatgagtctcggatcgagaagaggttgcgccacaatggattggggtcggggtgaggtttgtacctcttcgaaccctctccttgttccacgggtgatcctgacgcccaccttccttgtcgcaggacgacttcagctaccttcggccgtgaggcatcaccttccatcgagtcatcgtggtcgggcccattagaccctctgcctcttccctatgagttccgagagtgccacgatgctttccacgcaacgctaaaggcatcgaggccgaggtcggtggatgcaccaaggcgtcctcaccttctatgaaagcgatggttgtgcaagtcggtgggctagtgtataaaggttgcttgttctcatggagggtttcatcataac

SEQ ID NO: 109650 - DNA, 646 bp, Zea Mays
acaaataaacagtactgcgtcttcatcttggtcatcaagacaagtcatcaaagcacccacaatagttggaggagaccctgcattgcaaaaaaactcagaaattggttgtttcatgtactgtgcaagaaatcaaagaacatataaaaattagatcacatacctaacatgtcatcacgggaccaagcctgcatacacatgagtgcttccaccattgatggtgcaagcctactacggtgtggactaattattcggcctcctgtgctaaacacggactcagatgccactgttgaaacagatattgcaagcacatcacgtgcaatctttctcaaagtaagatatttaagcccagcatgctgccaccactggatgatatccaaaccctgtgtcctaggaagcagtggttcctctaagtacaaattcagctttgtgcgcacataagtggaggtcacatctggttgcttggacatgtaatcatctagctacttcttgatcaaaaacatatttctccacagtcacagtcccatcttgtggatttgcagtcaatttaagagatgactgttttatacccttcctaacagccctatctagacaaatctcaagatgaccactcaagtgacatgtaccatttcttatgtcccctcctaaa

SEQ ID NO: 109651 - DNA, 457 bp, Zea Mays
cggtgggctggtagtatacagtctctgaaagagaaataggcttaaaacattttctataatttgtttgacgtccatcacaaatcactataagtgtaagacatatctagatttgtccttaaataaatggggtggcaagattttcatttgggaaatgctccagttatgcatccacccactgtgcagtttctggcgattgctgccgaaccctactcggaggggttcgcgatacaggtgttcgtgaagccgtgacgaggggcttcaccttcacaggacacatgctaacaagtaggagtaatctaatcatagggcaaccactgtaataatcgagtacgtacgatataactaatctagcataatccatcgttaccagagatggaaatggcggcgacttctgcggagacaacaacccagatgacgctagactactttccactctcggatccctgactaccactcg

SEQ ID NO: 109652 - DNA, 304 bp, Zea Mays
ccaccttggcaactagtccatcgtagaccagcggtagttttcttgctctctagccctgcaccattatctacgtaaactcctatgttcctagccctacatcaatgctataaattcttctgcctctaccggaccatcaaactaccatagtgtgctcgccgggccacattggcgggctgttatgactgatgagtaccatgcactaatcagcaacgacatgcgacgccttgtccctcaacatcctggcaccaatgtggttacgggcaagtggaacttgaagcccaagtcccactaggatggtacactt

SEQ ID NO: 109653 - DNA, 338 bp, Zea Mays
tggaagaaaaggttcaacgaatcatatataacttgaaagtagcacaagcttgacaaaagagttatgcagacaagcgacgctgacccttgtactttcaagtccaagattatgtgtacctgaaagtatcaccaatgaagggtgtgacccgtttcggtgtaaaaggaaagcttgcaccccgatacattggtccgtttcttattcttgaacaatgtggaccagtggcataccgactccaactacccgaaacattgtctacggtgcacaatgtgttccatgtatcccaattgaagaagtgtcttcgggttctagatcgaaccatcgatgtgatggatgttacc

SEQ ID NO: 109654 - DNA, 291 bp, Zea Mays
gacaaatagttaaatgtgtggaactgaacacgcccataatcatcacacctagctcatgtcaagtcgcagccgcatcgccatttgccataccgaggcatgtatcgcgcggactacagtgttgcacccctacctgtcaatcagtggtactgtacggcagggcaacatcgtagcccactaggaagtactcataggcccacaccacacacattgcctttgctcgttactatagaggcgtaatgactattcctaccgtcatatttgctttggcaggggcgtagggtcacctagctc

SEQ ID NO: 109655 - DNA, 630 bp, Zea Mays
gtttagtcttgacttttattttccagttaatttcaatgctctcaaaagttacccttccttactagttgtagctagagaaacatgggcatattatgttttagctaatatgtaggattatagaagagaatgttaggcatggaaaacgtctattccagatagtggatcttgactcatctgatgatctagcttgatctttgaagacttgagttagggctgaagactagatttggcttggctcttatccttccttaacgcggttgatcctttctttctcgagctttggtgtcttcatccgggtttgggacaagaggttaagatagatctataggcaacatatgggtagagggtttagtaggtagttatatgctagatgggattagttgtgtaacttgttttgtaggtcaagttgttgggtagggtcgagttgatctaagatctcaaacttgtttataggagcagggtctaatgtatttccccaaccttagctaatcatgttggagtgactcacattaggtttgatcataatagattagataggattggatatgactagagtagactagtttagtttagatagatctaatagggtagaatatatattgttaggatatgttagaatctcttgagata

SEQ ID NO: 109656 - DNA, 712 bp, Zea Mays
cctgggcaattaagagttatcttcttccctccccgcgtcgcgtgagagcgtgtggtcatggttgggagctcgagttgcgccgctggggaattgtggagatccacattcgctacttcgatcatcgtgagttctctcttgaatctacccctgtttcccctcgttcgtttgcgcccgaattagctcatcggtaggcatttggtcgccggcaatttctcatcggagatcgagggcgccgcagatccgcatcacgccgtgggcaatgatctacactgcgtaaccgccggtaaatcctggatgaccgtgttcgcctttccctcctctgtcgatcacgctatgcatcagcctgcatgcttcgttgtttcgctgggtgggcaatcaccggtgagggcaccgtcgttacccatgtcacgccgccggacggtgaacaaggagagtgggaaaagggggggtgatatcgggaccatccatctggtcatgggtgactcagattaaactctagcgtacctgttcggggccgcgttgtagccatcgaatctagatcgggcggctctgagcgcatagcagttcggtaagtaggaggttcatctgggcccttggtttctaatccggcgtctgagatccatccataccccttcgcggcacattttgcaaaagagcccctgagtaaattggaaatcaacccgcagtactgcaaacaggattctgagtctcg

SEQ ID NO: 109657 - DNA, 737 bp, Zea Mays
gtttttttggcggctttgccccactccctaggagggcacctgcagaaggcaatgagaaacaagaggaaactgctttcaaattgctatggtaatcgactgagtttttatcctgtatacagaaactccttttgtttgattgccaactaaaacagtttccacttgaaatcaattagtaatctatgaaatgtttacgtttcagttttgaccaaggaaagctggagcctgtcaactgcaaatctttagcacatgaattacttgagacaaacaagtgttacttcttagactatggtgctgaattgtatgtttggatgggcagaattacatccttgcaggagagaaagggtgctagtgaagctgctgaggtaacatttgtgcatctacttagttatgctatttcatcgtctcttagtgctacactgttgaaaatgctgacaagtcttactgacacttgctgacgggcttattgatttgtaatatagcatagtttccttcagtttttttacctttaaggttatcttttggatttatattcttctatcttttagaggcttggttacttgttcatactaattagaagtatttagagaaatattgcatattttcagaataacttctttgtgttgagtgttgactatgttgctgtgatgtttactatttatttgcctaatttcctatgtagaaattgctctctgattcaagccgaacaagaacacctatgatcaaagtgattgaagggt

SEQ ID NO: 109658 - DNA, 296 bp, Zea Mays
ccggttttatgcatgaccatgtggactcggaggacgcttgcgcttgccgtcagcgcggcgaggccattccttgcctctcttgcctctgcctatggtcgtgcagaagggggagaactgaggaagaaggagagagcaagtgatcaagggtgagtgaagaaagcagccaaggcaagcgggctatttaaagaggccaaggggtgaccatccacttcctaccccgctcaccgaatagtcgcaagaattcaataagcaattcaagccgcctgaaaatgagtcaggcaactagcgcagtttca

SEQ ID NO: 109659 - DNA, 337 bp, Zea Mays
gaaaagccagcagttgagtcaactacctgatccattctagggagcctaaagggatccttcagacaatgcttgttgatatcagtatagtcgacgcacatgcgccaatccactttattctttttgagtacaagaacaggattcgctagccactcggggtgcagtacttccctaatgaatcctgcagacactaagcgagctaactcggcgcgaatagcttcccttttgtcaagcgtgaaacgatacagcttctgtcgaatcagccttgcttgaggatagaccttcaatttgtgctcggccagttctcatgatggcggtcttgcgctcatcagcaaatccc

SEQ ID NO: 109660 - DNA, 333 bp, Zea Mays
ggccagctctccacaggtccgatcatgccctcctcactcttgtttcagctctcttatatgctcttgatgcttctcgacccggccaattgaattagatcgcgttagatcgccgggaacgcctcgggttatcctcagtttgcgccatcaccgtggacatcgcgatttagagttagaactctgcaattgatggaggggaaatggtcgttaagggtagaattaggtgttgagcaatggagaagcatagtcgttgcgttttctggacggtatgggctcgccgaagccgctgctccgccgtccatggttgggggtctcgacgtgtgaagaaatagaaaa

SEQ ID NO: 109661 - DNA, 598 bp, Zea Mays
ttttttttgtttgttaattaatcataggatcttcgatggtataatttaagattttttctatttttccgtcggtgtgtgtacagaactgtaagattatatgccattagttgtgctttcagattgtgcggattgttcagttgattttgcataaaacgaactagctaagatgggagacgtttttattggtggtttttaaactgaagtcaataaaaatatggtcttttatattggcggtttgttgtagctctctatgttccaagggctgtttgtagctatgaagcgcttcctaaactgaagtcagtgaaaacagtttaagactataatccatccttcctaaactgaagggttcttaaactgaagtcaatgaaaacagtttacctatataggattatgtgaaatcaaaatttaagatgcttcatttgtagagatataaaatcaaaatggttcactaaaataacttcagttctacccataaagctattcataaagactttaactggaaccatgctgcaacaaaagaagagaaatcagacttctagtagctcaatttatttgtagaggtatagtatcttgtgtcctgtagtgacttgcagatcac

SEQ ID NO: 109662 - DNA, 412 bp, Zea Mays
ggctgatataggcgttatggagattcacctactccttgatttgttagacactgaatggtgaaaactgaatttgtggtcaatgctgaagttcattatttctgttaatttgagagctacgttctggtgaaagctgaagtccacgttacagtaaatatccctttagttcattgatgttcagtcagtgatgttttcagttatgttcaattgtatgttcagagtaatttatgtaacgtgcagtgctgtttagagcaatttgtgtgcatcatgtactgtatgttcagtgatgtattttacaatccagtgatgaaatatttttttacataggatgtacttcaaatggaaggaggctattatagtaacctgatgaacgaggataacaacaatagttcgttcgatgaattcaatgttgttt

SEQ ID NO: 109663 - DNA, 583 bp, Zea Mays
ctgcataatcgcaactcaatgtttaactcaaacctcaacacaacgtgatttcatgcagaaaatgatatattgccatagaccataaattctaacctgtcgggggggggtccactactttcctccgctttgtaactatcttcttcaagacttttggaggactgtcatcgaagttatggttcttcgataatggcataaagtcatcgtcctcatcagcagcctgccttgtttcgtgtctaacagattccgccggaacacggggtatgtcaacactaaagcactcttgagtagactgaattataatccgttttggattagatggaggtcggtctacgttcttcatgtatgatgttcctgccaaatcaaataacacatatacataaaaaatgtaaaggagcaataaaaagataagcgcaagtcaattcagttcatgaccatgcattccattactacacaaaaaatcatgcagcagcactactaggaagggtttggaggtagggatagggagacgcgctgctgcgttgttcatatatgatgttcgagccaaatcaaacaacacatatacataaaaaacttaatggatcaa

SEQ ID NO: 109664 - DNA, 361 bp, Zea Mays
gttaaactgcaaattgcagggaccccggtacaagagttttcccacggttaggatggcgggttgaatactacaaagaacagggggctttagcaaaaccgcatgtctggaagggggtaaagataatcagagccatccgatcgatatctggtggttcagattagacctacaatccaccgaaccggtatacacgatgagccaccagatcaagatctgatggcccagatttttatgaatcccaatctaagcacaaccgcccgattattagatcaacggccggtactcgtccaagcgaaaaggtacgacaacttctaatccctaccgttggtttcacatcgcacgcccatcctcccttcttccttcc

SEQ ID NO: 109665 - DNA, 862 bp, Zea Mays
taggctcagttaggaccaggcccattcgagctcagttatcaatcaccatcgcccagtacagactgtagtactaatttaggctctgttgagtaacagcgtcatcacacatcatacatatccggaccatgaatcctcgcatcaatagcggaggcacgtgaaagttctacaagactgtagtacaatatgcatatgaccataataatataatctacaacatatatctggtagcaagaattcaatatatatagatttactaaaccatgagtttagaacagattaagaacggcatatcacacatcttgatttagcgagtggagacaaaacttattacttaggatagtttcgcaaggttagagacctaccggtttgacatagtgttggtgtagatttaatacgcaacaatgttgggggtataacattttgattaatcgtgtcgtcgtagatcatcgatccgtatctcaaaacccttttgtcagcaaaggagtcgtgcgaagctttgtcgtacctttgcgccgttacatgaagttgacaacgtcaaacctaatgcgaaaagacaaaaaatgttcatacaatttattgtgattttacccctcgttatattgtgtaactgtgattttactcgtgttggggttgcatccgtacataatagaagttgggtagttagaacctttcacctagttcatttcatattctttgtttttaatcattaattctaatttccactattgacgttgagagtgagggacaaatggtggctttgttttcaaaatggagggggtaaaatcacaaagttggaaaactaggagtaaaatcacaattgcaaggccaaaggggtataatcacaaatgcccctccccttttg

SEQ ID NO: 109666 - DNA, 791 bp, Zea Mays
cgggggcctgtttcaaaattggaagtaaaccttcttgaagagatctaagtcgtttgatgcctaaaaacaaagaagtctcagaacagttctacacactgtctcacctcaatgaatgcttcacacacatatccgaaggtcgatagggaaaatagtatttaggcatgagatgcccaacctagaggccatattagtcaaggatgcaaagtaagaaacattaaaaggcaaagtttaggttcatcattacattggaatagaaaaccatgttgctggacagacatgattggaaatcggtggggagacccatactaggatttctcaaaccttctacaaaccctcctcattcaacactccccctcgaggaagctaatcaagggtaaaggttacaaccattgtggtcagcaagaataggagaggcaaacatgaaggaagaacattcaaggaggaatatgactgttgggagaagaaggcaaatacaaagtaaaaaagtgttacaaggccatgtgaaaaataaaggaaaatatcccacaaaaacatatttagtgcccttatgtctctctggtcccgtgtaaagaacctaaagcgacgcacaatacacgtgaaaaggcgagtcatgcaacatgacagatgctcaggcaataattgtccaaccactatgattatttacacccgagaccccaccatatatgatgggtgagatctgtcatatgcgctcgggaccgagccctgctcgaagttcacaataattaccaaataaacctccacactaaaaatcaatagtaattcattttcta

SEQ ID NO: 109667 - DNA, 370 bp, Zea Mays
ctctagtaccatttctcctaacgcagtcacaattcgtcgtgtaccattacagagtccttcgggttggtttaaatttcgaagcaacacaattggaactcctttcttcagtattagtttatgttgtgggaagttgttcccattgagagaatgtaggaactctattggatagagtaaatcatatgttccatttctgtttgagtgtggtgcaatcctatcgctgcttgtatattctttagaatgaccaggaattaattgcacaaccttttcattaattaaaccagcaatttcatttgtaggtgttaagatggcgcgttgctctaagtagacatgatcattaaaattctctgtaatatttgtataaatgcttcca

SEQ ID NO: 109668 - DNA, 361 bp, Zea Mays
ttgggatctcccgaatctgctagctggctattggggcgaaggcgaacacgcttcctttcgctctacgacttcgtcttctcatcgcgcatatgaaggccacattcacagaacaagccgaagacatcgaccggacagagacctgtgcggatccattcgatctcgtgttgcaagacgaaggacttgtcgaagtctacgggcctcctgcgtcatcaccgccaggagaggctcatgtggaattcggcccatggtgatgggccccgcgaggacaagcacgataagggccgtgtcagtaataaggtttatcttaatggctatttgtaacgtcccctcgagggaatattctacggataaaccgggtact

SEQ ID NO: 109669 - DNA, 488 bp, Zea Mays
cagcacgcgaatggccaggttataggtatggtttgcagttgctgtgctggtagatgctgctgttttgataagtactgacaggcttcgcacctatagactaactcggcggcatcactcttggccgttggccagtagaaaccagacctgaagaccttccccaccagagtccttgatgctgcgtgtatcccgcattgcccagcatggacttcttctagcagttgcttccctgtagccgaaagaatgcatttcatgaggactcctgatgtgccccttctgtatagtgtttccccaatgagagtataatgagctgactgtcttgcaatgcgttctgctgtatttttgtcatccggctcttcctcattctttatgtatatgatgatcggcttcctatagtcatcaggacatgactctggttggctcagagtattgcattcctctacccaatctagtgaaatgctcgggcgcagtatttctaggacaaaaacccc

SEQ ID NO: 109670 - DNA, 854 bp, Zea Mays
ggcatcatatttatatatcgccaagtagccataacaactatatcaagctctatattgcttggaaatctgggaaactaaattgaattacaataaaacacagataagttaattttttgctctctctccttatgcataaagttttacccgaagtaacccgaagatatataatataatgcatgaaagcctttttggcatagaagacatcacaaattggatttctattagtaagcaaaaggccttaccaaatgatttaagactataaatctcagccatgcattgctcaaccagatgttagcacattgctctcttcgctaaatgacatgaagcaaactatgagataaaaggacatgtaatcgccagcaacacgaagttgtgagtataccgagaggttattctgagaaatttttcacaatgttggtgtgaaaaaccattgtgtgttcccgtcgaaccaatttacttgtcctatctaggacctctatgcttgtgttgcatacatctctctgaattgtaaatacttatagtcactgaattgacttggcatagtcctttgattggtatggtatagctttaagctaaatggtaaaggtcagtcctaaatggacataaatctggagtttatgtagtagaactacattgaattccaccctttgaaatgcttaccgtaatatatctctgatctaccaggagtaagaagagtagaaaatagccatgaaatcccatatgaccacagagcttgaagtgaaattgggcattaatatgtcattggtccttggcgccggaagatccataattcttgacctataagctattggtgatggtaatttgtaatagaaatatgaagatcttatggagac

SEQ ID NO: 109671 - DNA, 764 bp, Zea Mays
gttttacggtccttatcaaatccagcaatgcattggggaggtcttctacaggttgaagcttccggccaaggcccggatccatgacgtctttcatgtcgccctcctcaagaagtttgaaggcacacccccagcagaagtcgttcccttgccagatattctacatggtaaagtacttcctactccagctaaggtggtcaaatcacgtttaaacagaggtgtgtgggagttgctggtacagtgggttggacaggcagcgtctgatgcatcctgggagcagcttgatgagttcaaacgtcgctatccagatatacagctcgcggacgagctgtttgttggggaggagggaaatgttatagatacctttgtggggcgccagtattcaaggagaagggcagctaagggattgaatgccagcagggatagttaaggaaagacaatcagcaaataaggagaaaaggggcaggtaacaacggtggctacaaatcagcgatacttagtttccttagctagttggttgccaaataatagcagattagttccttaagatatctgcttagtttccttagctagttggttgccaaataatagcagattagttccttaaaatatctgcttgttttcttgagctgtaagtcgtctgcctctataaaggcgtaggctgtagtttgtattaggcatccaagaaataaagatcctccttagggcgggatcgtcttgggtcatcctggctgggcacaacgccagtacagggaacctagacgatc

SEQ ID NO: 109672 - DNA, 320 bp, Zea Mays
tgggaccagtagaagtggacgcatcgatagagagcccgcagacgatacgagagggggagacatctccttagacgagtaagttgacgtaggcaagagggtgcaggatgtggtgacgttgagatgagagcgatgacagcggcatgggaacaggggtggaggcatcgacgaggagccaacgaaggatccaaaggggaaggcaaacggtgaccgcaaaaataatagttggtggcggcttcgtgtgaatggaatatagaaggagacgggcgcaggaacatgaaggattcaacgtgattgcacgaacggttttaattttctaagtg

SEQ ID NO: 109673 - DNA, 319 bp, Zea Mays
agctgatgaagaaagatttcaaactttttcaagatttcaaccaacatcctatgcaaagggaaccacaacccaacttttatgaagcttcggaataccaccacctcatttttctcagggagaggaacaatgtttttacctccgatcctcactatagacacatcatgaaaatacttgtccttcatggcctcaacatgccctttcctcacagttgatttcccaaagaccacgtgacttggcctccacggtcggtcttcggcatcatctgcgccgctatcgacatcaaaatcatcgttgtcttcctaatcttcagacagcccag

SEQ ID NO: 109674 - DNA, 475 bp, Zea Mays
ggtggtggtggcgacggcgagggcgatggcaaaggcgacgacaagggcgacgacggtgacgacaagggagacggtgatggcgacgacgacggtaagggcgacggtgacgacaaaggcgacgacggcaaggccggcggcagaatgctgcaaggggtgagaaggccgactcataatgaatcggtctcaagttttcaacgatctccccctatgaataaaaatgcggctctttgctagtccactgttccatgcttttgtttgcgcaattgatggctcgccgacattttagaggtaattcctgagtgatgcttatgatctccgcttttccgagttatgatctagcacttttgcgccaaacttattgagccgactcatatttatgttgacatatccccttgagttctgaaccctaattctcgcttttttctctgccgcttctctgtttcctgagttcttgagcccgctcgctttgcttgag

SEQ ID NO: 109675 - DNA, 534 bp, Zea Mays
aaggatttcaccttggtgggctctgagggcccagcttcagtctcagatcggtgctttgaagcttcggcaccaaaggcttcaatatgcacttcagaagtttcaacaattttctttggagtcgtgcttgaagactttattgtctccaaaacatccagcacattaaccatcctttttcttttgggggtcattgctggacccttttggctctttggtgcttcaatttttgctgaaggacttaaaatttcatatgtccttgtttctgtagccttcggttcttctattttcttcatttctggcattatgattggctcttcaacattcggtaggggagtcggctccttggcttcggtggccgaagaggtttcaccagcatattcaggcactgtggccggttcaatatatcgtggccggtgagtaagaacctttatctttttcctctccagcgctggctcactggggatggctggagcaacttcctttgctgaagcagtattttttcttttttgaccccgtgtcggataacggtagtcgggg

SEQ ID NO: 109676 - DNA, 374 bp, Zea Mays
caacatggttgtatgcgagacagagtaaaataaagtgtgctcgacataaatgttcagtcgttgtaggtggaatttgtccttacttgatttagagaggtggtgacatgccgaagtagtcatcgcttactccatgtttataagtcgagtcaaaatgcggggtactagtagtacgctaggcaggcggtgttccaaatagataaatcgggtgatgtggtagttgtcaagcgtgatagaggttgtgtcacttaggttataaattgatgctcgacaggtggggtctcctaaaatatggcgttttaagtgacttgtgtgttgtccagtttaagttgagaaaatggttaagaaaaactaattaacctgctcccacctatgtt

SEQ ID NO: 109677 - DNA, 493 bp, Zea Mays
gttccttctcctgccttatcttccctcattggtctgcaagaattatctctggtgaactttgatcaaactcttgaagacatggttccagaagatatgttatcagaaccggcagatggtggcgcgatggatgtttgtgctggtgtgctcgatgctgggttggggtcatcccgggcagcgtcccgcgcctcatcgaccttggagcgcgatcttgagggtcaagaggctggtttggattgccctgctcccatggaagtgactgagggaccctcagccttagaggtggctgctgcagaggactcgaccctcaaggatagtgctggcgcttacccagcccccgagggtgttgccggagatgatccggctcggatgggtagcgcaagctgtgacccagcccccgagggtgtccgagtgggttctccctcccatacttccatggatgttcacatagggtcttctcctccacactctggttgcatggcgatagctccagcct

SEQ ID NO: 109678 - DNA, 810 bp, Zea Mays
caaaccctaagagtgcaagaaaccctaattggaaccctggaaaaccctagacctaaaccctaggggggctaagtgcaaaatcagtgcacttttggactaaagtgcaaaaactatgaaagtaaggtatcttaagtcatatggttcacaatcatgaagatttgcaagctaaaccctgaattttggacctatttgcaaaaggaccctatttgagttctaaagctaagtctgaaattcagtgttttgagctcatctttgtgaccttgtaacttccaaacaagaaggattttgccctagatcaccacatcaacattgtagacctgtcaaaggagaataactttgcttaagagagtaagcatggttgttatgaagaaattggagaaaaatgcacccaaagatgggctgtcaggctgtttgaagtctgaatttcagactaacagtgcaactgcaagaactttgggcacgaattcaggcatgatcgagcaagaattttcctagggttgctataccaagattatagctggatcctagagctataactttgctaaagagtgtcgatcatgttactacataaaattaagagaaaattcgccctaaactttgactgtcaggtgcactgaatgaggaatggccatggtacagtatctgaagtagatcagaccgccagctcagtttctcgccgccgacaatctctccgccgcgattcgtgccgccgccgtttcgattcgtgctcgggttgatcggataacgctcggagtcacgctgccgtggataagcttcggccagtaaattatttcggccaccgtaccgagc

SEQ ID NO: 109679 - DNA, 341 bp, Zea Mays
gaaaaatcctttttcttcaggaactcagagatgtcagaacagcctgtgctggcccttggttggtggctggggattttaacctcatctataaaacatcagataagaataactccaattttataagagccatgatgggtcgtttcagggatttgatcaatgaccttggcctcaaggagattccgctgttaggacgcaaattcacttggtctaaccagcaagataacccggtccttgttaagctcgatagagtgttttgtactgtggattgggagctaaccttccccagagttcttcttcatagtgctgcgtcacttgattcggaccactgccctttgcttctg

SEQ ID NO: 109680 - DNA, 376 bp, Zea Mays
gcgagagttaccaccctgtgtgatgaattgtgcaagctaaacctggaagttgtttcttcatgtgacttaaactatatctcggtggagcccacattacaagagcaaatagtcagggcacagattgaagacaagggtattcaggttatcaaggaaatgatcaagtagaaggcagagaaatacaagtgcttccgtcaggacagcaagggaattctatggtttggagatcgactggttgttcccaaggaccctgaactcagaaagaggatattggatgaagctcacctttccaaattctccatgcaccctggtagcaacaagatgtaccatgatctcagatccttatactggtggaccaaaatgaagagggaaattgcca

SEQ ID NO: 109681 - DNA, 588 bp, Zea Mays
ttcactgcggtggaaaccgaattggggagaatgggaaattggagagttctaggggatgatttgaggcactggttgctttactggttacacaattacatagcgtagtacgcgggggcagcaatttatagactccatcagcagtggcgcgtgaatttgagttagcgcgatggcggccggagagtgaaaagagtactgtcacgagagctcagtggcttctaccgtggcgacctcaccggcgatgaaccagtgctaccgggcggtttctaatgactcaccgtgacagggtaaagcgtcgaggcacgtagcccggccggattacagcgaacaccggtgatgccagcgcgactaactacggcgagacacgacggcggtgagaacagtggtcagagtttatctccagcgtgatacttcataccgaggagtgcttatctgagttcagtcaggcgtgaatcgcgacgccggtgcgaatccgggcgcacaggtcgctggcggcgaggttctctgaacctgatccatctcgttcactgtaccatggcgcagcttattcagttggcctcacagagcatatttggtaccaatttgctccag

SEQ ID NO: 109682 - DNA, 476 bp, Zea Mays
ctgaggcgaaggcaagcttggtgccaatggagaagcagaagtccctgaagtcttggctgtcgaattgtttgccattgtcaactgtgagctcggacgggactctgaatcggcagacaatgttttgccagaagaatttctgggcggtcttcgatgttatcgtggatactgctcttgcctcgatccacttggtgaaatactcgacggcgatgaaggtgaacttgaggttcccttgggccgtgggtagcggcccgacaatgtctaggccccaacgctgaagaggtcatgtgtgggcgattagctttgtgaactgcgaagggtttcccgagcgtggagaaaatttctggcaggcttcgcaggacctcgtcacccgattcacggcgcaaatcatagcgggccagtagaagccttgtcggatcaccttggcggctagggctctaggccctgcgtgagagccgcatgttccgctgtggacttcg

SEQ ID NO: 109683 - DNA, 587 bp, Zea Mays
gcctgccgttcaggctgagcacgcctcgcacctctgcgcctgttctcagacatctgtagaaatcacatacatatatcaaatccgactctgcagtcttttagcataagaaaagatgtatagaaactcttcatagcactgaacaattgaccatcttcaccgacagcttctcagataaagaggaaagtggaaataaatggattacccaactaaataactaactttattaataactacaccaagttgcaggggatacccacaccttggtgacaatcattacaaagatccaacttcagtacatgtccatcataacaagcatccaacataaaataagcaaactaactctaactagactgactagactgagacactgaaccaagaattattacagactccgactttgccgatctagggatccaaatctatctgggtcctgtagtctggggtaccatagtcgaagcgaccacggggcagtgaatggtaagggtgctgaatcccgataggggtgggagaaccaccatccagatagtggcatgctgcgcactcagcacgcaattccgcaacctctgcccgaaccttgcccaactcgt

SEQ ID NO: 109684 - DNA, 364 bp, Zea Mays
ctgatcataagagccttaagtatatctttactcaggatgatctcaacatgaggcagagaagatggctagcgctcatcaaggactatgacctggaggtatattatcacccagggaaggccaatgtggtagcagatgccttgagtcggaaattgcaatgcaactatgttatgatggattctcgcattaacaccttgtgtgatgagttgagcaaaatgaagattgaagtgattccttctagtgctttgtctcacatttccgttgagccagctttgcaagaccagatcatcatggcctagctcagtgacaagggagtgcaaattattaaggagaatctccatcagaagaccgagaagtataaatgttt

SEQ ID NO: 109685 - DNA, 348 bp, Zea Mays
tggaaggtaatctcaatggactttgtggaaggcctcccgcagtcagatcacttcaactgcatcatggtgatagtggacaaattctccaaatacagtcattttattcccatgcgtcatccctttactgccctgatggtgaccaaacaatttatggacaatgtgtttaagctgcatggcttcccacaagctatcatttcaaacagggataaagtttttaccagtgccctttggaaggaactcttccggttgattggtgcagagcttcgcatgtcaacagcctatcacccccaaacggacggccagacagaacgggtcaaccaatgtcttgagacttatcttcgatgtttt

SEQ ID NO: 109686 - DNA, 320 bp, Zea Mays
gatttcttgccataacttgcataccagtagggtgcaatgtaagtgcacctaacctttcgagcgtatctggcaagccaatggtgagtgaaaatattgttatactctatatgtaagatgtagatataattgttcatctattcttgaatttaaaatgtagcattttaatattgattggaattgattaacatgagcttcagttcaagaatttttcattcctttatttgagttctggttgaagaatttgttttcttccattattttgcactgtatgcgctgcattgtctcataatgagccatgtgttatggcccttgaaaaaaat

SEQ ID NO: 109687 - DNA, 440 bp, Zea Mays
ggccttcccggggtggtagtggatctcaaggtcataatctttgatcaattctagccatcttcgctgacggaggttgaggtccggctgagtgaaaatgtacttcagactcttgtgatcggtgaagatgtgacatttgttcccaatcaggtagtgcctccatatttttagggcatgcactatggctgccaattccagatcgtgtgtgggataattctgctcatgcggcttaagtaagtgtgatgcataggcaatgactttctcattttgcataagtacacaccctaagccttgtcttgaagcatcacagaagacgacgaaatcgtgatggatgtctggcagtgtcaagacgggtgcggttgtgagcttcttctttatgatttggaagctttcctcacacttcggggtccacacaaacttattgtctttcttgaggagctcgg

SEQ ID NO: 109688 - DNA, 615 bp, Zea Mays
cagaaactgtaagacaagttcgaaggactagaattccaccatgtgaaaagggattgcaatgcagcggttgacgcactatcaaagctgggatccagtcgggcccaagttccacctagggttttcgtccaagaaatacagcaaccgagtgtcgccacaaatcagatggaggaatgccatgttctgagtcaggcagaggcagatcccaaagactggagagagccaatcatcagatacataaaagacgagtaagaacctgataacaaggccgtgacagagcgcatcgcgagacagtcggcccactataccattatagggggcctgctgcatagaagaggggcaggaggagtcctcatgaagtgcattcattcggctaccgggaaaaagttgttagatgagattcatgccgggcaatgtggcgtacatcacggactctggttggaaaagctttcaggtatgggttttactggccgacagcgaagaacgatgcatccgagttagtctagaagtgtgaggcatgccaattcttatcaaagcagcagcatgtgcctgcacaacagttgcagactattcctatgacttggtcgtttacattttgggggctggacatgattgggc

SEQ ID NO: 109689 - DNA, 343 bp, Zea Mays
agccaaatgacgattggctaaacagtattgaggcttctagcgacgagttacttggggcatataccagagccgaagatgatgctttatcctcggccttcgggggtcggggcaagaaaagattgaacagggtttttgatgcaattggcttcatataccctgattactgctacccattgcgaaggcaaggaaaaaaagagaaaacctgccgcttcggccaccactgccgtgccgaagggcaagaaaatcaaggttttgacccaccggccacgatatattgaaacagccgtagtgcctgaatttggtgaagggacctcctccgctgtcgaagcgaaacaagctgctc

SEQ ID NO: 109690 - DNA, 1103 bp, Zea Mays
gtagagacctacaaagatcgctcatactatggtggcccgtcggacgagtgcccacattgtggcgccgttttctggtttcaggaacgggtcaaaagtgtgtctgctgttgcgcagcgcaggcttgtgtacaacctttgttgcagaggaggcaagatagttttggagccttacaaatgtccaccggcacccttatgtgacctgctgcgattcgatggtgatagtcgtgccagaaggttccttaggcaaattcgctcatacaattcccttttcacgtttacctcactaggcgccgtcgttgatagatcgataaataacggtactgcaccttatgttttcaaaatcaatggtgtcgtacaccatcgcattggctcgctactacccagtaatggcttgcgaccacagtttccgcagctttacatatatgacactaaacacgaggtgcaaaataggctgggcatgtttgagaacgagcctgatgtccatgatcgcccggatccggaggtggcccgtttattacttaacatgctagatgagcataacaagctggtcacggcatttcgctttgctaaagaacgtttagatgaagaaggtgaccaaaaggtgacgttgcgattgttaggctgtaacacatgtcatgacgcacaatacaacttaccagccaatggtgagctcgctgctgtaatagtgggtgattgcttaccttcacaatacaagtacgatgtcctcgtgcatgctagagagggtggactcaaacatctttcgtgcttgcacccgtcctacatggccctacagtacccactgcttttcccttacggtgatcgtggatatcaccttggaataaaatacactgacgtaggacaaggcgatgccacatgccgcaagtatgttacgatgcttgaatttgttagacatcgttcacactataggctcaacgaaccggacccattcacttgctatggtaggttgagcaaccagctagctgtcgatgcgtattctacgatcgaggcatctcgattgctgttcatagcggaccaccaaaaagaattgcgttgtgaatccgtacaggggataaccgacgccattggcaggggtctcaccagtgc

SEQ ID NO: 109691 - DNA, 697 bp, Zea Mays
ggtgtagagatggagagctactaaatttgaagagccatttacagtctattggagacattttccttctaataatagccaaatttatctttacaaaaggatctcgctggtcccttggagttgcttttacactcaattcacaagctaatactacattccaagaaacagagaaatcagcaagggagtttccactaaacgcacaatttttgcgagggaggggagaagagacataagcacctagacaacaagtcctatcgagtcaaccaagatcgatcttaagcgtgcaggaccaacccagtacactacatgggtgtaaacatgtacattggataattattgcaaaaaacgaatttaggcattatacaagtgtaattatatcaaatctgaatcttacattagggtttgggcgcttgcgcgcagaagaaaaggaagagaataggacatacccagctgctagccaactagccatccatcttacaaacttaaacattgtgctgaccacattaggcatctgtttggatcgaacaacatcaattcatgtatagcagtgtagtgagacagttgcattttctatagtttccacagaaatacaaaatgctcagataacaaatctcagaacgacatcaactactcagacatttcaccacaacaagtcagacattaatctcggtctcagaaacatggaaggccctgcgggcta

SEQ ID NO: 109692 - DNA, 475 bp, Zea Mays
aacaaaacctttgggcatgtagttaggaaaccatgagattcacatttttggtctggattgatgaaagtcaaagacctttttttagctaatggtatgttcaaagttaacaacggacatgcaaccagattttgggaagataagtggttggggaactttacacttcaacacaaatacccaagtctgtataacattgtccggtataaacatactacagttgccacggtactcgggtctgtcccgttgaatgtctcctttcgcaggggtcttcagggggagaacttggggagttggtatgcgctagtaaatcgggtagcggggctttctttaaacccttcgaaagatactttcagatggagcttgcatcaaaacgggaagttttccttccagtctatgtatgctgcattattagggaggaaaatacctcggcaggaaactctcatctggaaacttaggatcccattgaaaattaagatct

SEQ ID NO: 109693 - DNA, 430 bp, Zea Mays
tcaagcactagttgacttcgtatcagaatggactgagcatcaggttagagacaacccagaggctactgaagtatggcgaatgtattttgatggctcgttgaaactgcagggagcaggcgcagggatcctcttcattgctccaggaggtgaacaactcaagtatgcacttcagctattattcccagcatcaaataatgcagcagaatatgaagcactgatccacggattgaacatcatcgtgtcactaggcgttaagaggttgatggtatacagagattcactagtggtcataagccagataaataaaaactgggattgctcgactgattctatgggcaagtactgtgcagtcgtccgaaaattagaagacaagtttgaagggttggaattccatcacgtggaaagagaccgcaacgcagcagcagacgtg

SEQ ID NO: 109694 - DNA, 335 bp, Zea Mays
gccaggaagaagctctatgacaaactcaactttccgctcaggtggcatacctggtaaatctttcgggaacacatccgaaaactctgacacaaccttgatagtctcgagtgaatctgcctccttgctatcaatagccatctgatgacaacctcctttccttggctcaggtgagactaactcagccaccacttcttctcctagtggggacaccaacttaattgtcctcttatcacagctgataactgcttggtacttatctagccaatttatccctagaataacatctattctctgagtacccattactatgaggttagcgggaaactctatccccc

SEQ ID NO: 109695 - DNA, 661 bp, Zea Mays
gtttctgctataattttatacttgaaatttaaaaatgcgattttaaatacagaaaataaaaggaataagtccatcctccgtatctttctggatccgctgctcgcgtggtgtttttagtttgtgtgtgtgtaagggtggtcaccagcacgtctcgtaactggcggcgtgcttctttgatccgtttgcttatgtcgcctgacgtcaatacatcagctaaggtgccctttcccggttgtggatcggggttcaggaatcaggatatattcattctttctccaaaaactatagaattcattcagtgtcggacggaccttgacaaaatggaagaagcagggcgcagaggcatcagcttatttccacacgaccgcgtattttctatttaaccagcgcagcgcagcgcaggcatggaagcacagcggccgttcatgcagatgaaagatgagagagacctgaatgaaagaacaacaggaggacaaggaaggaggacgccgtcagccctctgtttaggaagctcaaccgggccatggagtcctcttcagcccgcaccatctacgtgagcactgagccgtcagataagaacatcagaggtggcactggatctggatggtccgcgagctagcagagataatagataacgcacgtcatttcaggtgttttaccc

SEQ ID NO: 109696 - DNA, 410 bp, Zea Mays
gtgattatgagagcataggtatccaaatacttattatgtgggataaaagatggataggttagggcaagaatagccaggggtaagaaagtttatggtgaggaagaactccgtgttgggtggtaatgcatctgaaggttgagttcgacttctcttcttccttgacgaggttgatcttttccttttccagccttggtctcattaatttgatgttactgtatatcagcagagttgggacatatggtcgaagtagttatggatgagatggactatatgatgtaggtcaaaagtttgtttgatgttaggtggggaaagacagattatgcaatccatcatgactctactggttgagttagatctttttgctcttggttgttattctagagtgggataaatatgctaattagggcaag

SEQ ID NO: 109697 - DNA, 594 bp, Zea Mays
taaaaatccatcggtgtcacaggtgttaagttgaggtttatttgcgcgtggaaagtaataatgtgattaatacttagaactcttagtcgatagtagaaattgttttggcttatatagagaggtggtgacatgccaaagtagtcatcgcttcctctatatcttgagttgggtcaatacgcgttatgtgttcatgaattgggaagtaagcgcatgatggtttcgagttagagattagtggtttacgggtcgtatgatttggtcgatgtgtaaaaatacatgtgaatatgtatgtttataaaaatgttgtggtatatgttgtgtctcagatttcgataataataggctagccgacgagtatgttgtatagcggcccaggttgttgctcaggttaatcaacttgttagatggctttagttaagttcgtggtcacgatgaattgcatgctgtagtctaaatgcgtatgtttatgatcgcggatgaaaagtattagtgctcatgtgatgtctaagttgaaatgcaaattattgggtgaaaagcgcttcgatatacatatatgccggatttgatgcttgtggtgaatgcgttgattaaatg

SEQ ID NO: 109698 - DNA, 413 bp, Zea Mays
ggcggtctgaggggacacctagagttgtcgatggatgggctaggccacatggagatgcgaccgacctacatgaagatgtggctgatccattggttgtagagggacgaccaaggtgcatctgcttcccctccaccaccacatctctgctggtgacgacgaccaccatctaacccgcagccagtggcaccacttggattggagctgatacactggtggactaggcggtcgcgaggacgaacctcctaaagttttgctcagaggtgggggtagtgcgaaagaattcccactagatccaaagatgtacatggtcgtggcagtgttcaagtagatctaagccccctggtgagctcctcgagaagaccgttgccaaccttttggaacgagggaaatgggatagatcgtgtgatctaaga

SEQ ID NO: 109699 - DNA, 752 bp, Zea Mays
aagctctagtctggcgtccaccctcagctgatcactggtcactccagtctcgcgaccaacctttgtcctattttggatacctgcactaccatggcgacatgagctctctccccggctggtgattctatcagtgtccttcctctccatgagtgggccctccctctcaaccccaacaccccctcattctgtcattcattggtgggacgacatgggattgcagaggtgcatttgcgcaaggttctgccctgcggttgtggttgaaaatatcattcgacgaggcctcataaaatggtgacgaatacatctcctcgacgtggaccgggcttctggaccgggtctgcaacctcgccagcctcggtcctggatccgcccctgtttgccaactttctccacatgtgaacggttcgcgctcttggcccggacagtctgcccttgcacatcaacgattgaaatcgtaacaaccaacaataacagttataagtgcattaaatgcgccatcagatgtcatataaagcaatcgcccggattgtccgtaattgctttacacacctgaaaaagcaacacacctaaaagactgtagaagcatatggaaaaataacatccctatcatatcgtgcaccaactctttgtttgaactcatgctcctctcaagactgatgtagtgcaccctgaagttcaacatcataatcatcaccttattcttcatcatattgagttcttgcgacttcatctatgcgttgcctctaccaaat

SEQ ID NO: 109700 - DNA, 673 bp, Zea Mays
ctcgatacctctgagtactccctcctgaagtacccgattcggagggtttgccaaggtaggggtggtggcactggtgttgtgactttcccctcttgggggctggacccctagtgttgcccctcctcgcgtcctggccatgaggctgataaacacccaaagacttctgagactccatggtgtactgatgttgcatctccacacccaatgcctgctccaccgtagtacgaaaatccaccaacggaaaggcgcccagagcatgcctgatagaaggtttcaggccctaacagagctggctcgccttctccaactcattgtaagccacatgaggaacaaagcggaccattttgttaaagcccacttcatactctgtgacagacttcttctcatgcttgtaagattgcaaatcaatcttcattttctctaggaaggtgaccaggtagaacgtcctctcaaactgcctgatgaaaacatcctaggacaggactcctggtgaggaagagtgagccgcctgcatgcctctccaccaaatttgagcctcccccttcaacagctgtgtgccaaaacgaacccgatctccatacacaatctcgaaaacatccatcttatcctccacaacagtcagccaatccgctgcctcaaccggagtaccactgccatcaaaggtgaccaactt

SEQ ID NO: 109701 - DNA, 347 bp, Zea Mays
acactctgcagaggtggtacaactttacccacaagccatgtatcccctctagcctaagttgattggacccgtaaacacttcctaggtgaatggctagggatccactatgaggctttcacaaaaatatccttagtacaaagccacccgctaaggtttccacgtcagtattgatggccctctaggcgaggtaacttagccaagactaccagcccatgttaacatgaaccgccaccaaaccactgtcgccccctcttgcccatctttctagtagggttgctaagcactaagtctatagagctaattaccatagcaaaagccattatagcactcgtgcttgcactgttacc

SEQ ID NO: 109702 - DNA, 753 bp, Zea Mays
gctaatgaccttttgtgataccaggtttcctataatcccctctatttaaggcatacctagatggtttttatatccactcaagaaaacaacacacatcaatatgccacatcgtttctcaaaataaaataatgaccatggaaaatttatccaaattgagtgagagaactgtccaaacataggttaaggttgtaaggcacattttttccaccatatcgttgctaaaaagttggaatatagagaattcaaacaatagatcaccttttaaaccacaaatgacgtttctatgattttgagggcactatattcgcacgagagggtattagagtgcaactagtggatgaagacgttattgggctagctaatgacttttgtgataccaggtttccaataatcccctctattcaaggcatacctagatggtgtttatgtccactcaaatataacaccatacatcattatgccacactatttctcaaagtaaaataaagaccatgggaaatttagccaaattgcgtgagagaactgtccaaatataggttaaggttgtaaggcaccttttttccaccgtacaattgctaaaaagttggaatataaagaattcaaaacaatagatcaccttttataccacaaaagacgtttcctagatgtcaagggcattgtaattgcacgtgagggtattagagtacaactagtggatgaagacgtcattgggctagcaaatgacattttgtgataccaggtttcctataatcc

SEQ ID NO: 109703 - DNA, 490 bp, Zea Mays
gttcgaactcatctttacagttgtattcttcctcatctgctactatcttgccaaaaatgttaggatttcgaacatgtcttctattctaataagatctttctcatgtttttattattagcgatcggtctccttttgatcatcgttcttggactaagactgcaaaaagaaagaaaaaagaagtttacaagctaaaaataattggcccatgctggtcacgaacctgcgaccttcgcgttattagcacgacgctctaaccaactgagctaataggccaactcccaagcccaactactcaatatccaccttcgcactcattagggtcgtttacagcttctatgttttctccaccaccggtagcaccattgggagtgagagcatcctcacaaaatgtcacgtaagcatcatcacgtgggtcttgatcttctttatgttattcatttcctaaatctgattcatcttcatgtaaccttgggttcgaactcatctttat

SEQ ID NO: 109704 - DNA, 527 bp, Zea Mays
gtgcaaccggacaagcacaacaagtgcaaaatacgaagtctttactaaaagacgaatccgcgccaaagccgcctaatggtgcagccggacatacattacgagtgcgccacacgaagtctttacggcaagtcatccaagcaaaagcccacacattgtcgcggcaagcgaagtccccatctcatttcacaacaaacaatgtcatagtttacatgcacacagcagagggccatcggccacattgcacaaataaatgcctaccacattttgctgccctccctcttaatcgcgagccaggggagggcagcgtcttcgctcactaccgcgatacaagagcgagggcaacatacacgctacattggctcagccttcgggataaggcccacctcacgaaattaaacaacatcatcttcaattcctcaccctcaaaaagattttgcagatccccctccccaatacacgtcccggacgacgaggacaacaaatctcgttggccactccgatctacccgtagacgggttcgttccatc

SEQ ID NO: 109705 - DNA, 473 bp, Zea Mays
cactggaatattgacggatgtgcaggagttgtctaagaagagtttcgtgctggtttttgccaaatctctcacgaattaatagcccaaactcgtgccaagtgacctggtgaaggctgtgttcgatcgactgtaaccatctggctgcaggaccggtgaaactcattgtggctacttcaatccagacggatgggtctacggagtacatgcgaaaatatgattcacaacgtgtttgccatagtttggggtaggaaccgtcgcactcaggaaaattcagcttgggcaactggcctaagtaattggtgaactgggcgccataagcacgaccgtcgaacggtgcgggaggtgggttgagaccagtgcccgacgcgcccccagtgtggatatctgaagcaaatgaaggagctccctgaggatgagagtgcatacccatggccgggagggagtgatgggggtaaaaacccccaaaacccgtc

SEQ ID NO: 109706 - DNA, 640 bp, Zea Mays
tgcaaatgagggaatttactccttgtccctctattggattcgtcggtctttatggtagaggacttcggcattcttggtgcactttgcccggggaccagattgaggagcactcaatcagtcaaacactaaagttttgggtgcccccaagatgggtgttgtggcatccaatagggatattgtgcttgtaccgtaggtgttccccacatttggttaggttatacggtgggtatacttgtggatacaagggtgcatagctaggtggaggtgcccattatgctggtgtcatcgattgtggatttgggaccagctgaacaacatccctggccgatttaattggccttacctcatgaaacaaaccattttccttcgcctgcctctctaaggctggagaatgagatcactttgctagacgatcacatggaacaaccttttgttgacatatttagaaagaagttgaacaaaagtagacctgattttaatcagtcgactaggtgctttggctatgctttgtttccacgtacctatctcgggttgtcgtggcttgaaggtgcgtggtcatggctacagacatctttgattgcccccgtaccattcggatgaggacaccagacagttcgcccactgcctggatcgttcggaa

SEQ ID NO: 109707 - DNA, 529 bp, Zea Mays
cccaaacactataccacaacctagcaataacgacttacttacagtcggtataaaccgttatagcaacgtactatcagtcgctatagagttataccgactaacactttctgacgctgtaagtggcgtcgacataaatgtatagcgacaaacatgtttataccgatggacggttagacgttaaaaagatataccgactaacatatttattccgacggacagtctgttagaacttataccgacacactgtctgatgcgatatatgtatttttatcgactaacaatcaaacactattagaacttataccgacacactgtctgatgcgatatatgtatttttaccgactaacaatcaaacgctacggctatatgagcctaaaaaaatatattactagcaatttccaattatcatcaacatcagataacaattgtactgcattcatacatagcaattgtactgcattcatacatagcaattgtactgcattcttacatagctcatgttgacatagctcatattttcattcatgac

SEQ ID NO: 109708 - DNA, 503 bp, Zea Mays
gagacaccagttccccacgttgttgagcgagcggtgtcagctactccggccctcccacccacgggttgggaggagctggacgctccttggagagacttggcgggggtcaggggagaatcgtctatgttcaacctcgtccccttccaaccgagtttcgacaccagctccgtcacccggatgtacgtcgggcttcctttccccttagggtgcctggactccgaggaggaagacgacccaggcttcgccctggacttctcagggctgagagatcttgagtccatgctgtagtttttgtatgcgtgtgacgagatgctctccgaaagctcggagggttatagttccggtggtgaaggctacgacccgacctaggaatgcttccacgttgactcggagatccccaaggaaggagatcacctcgacatgccgcgggaaggtgaccagcctccaccacgtaacctagatgagcctaaactcctctagggagccacgtagctcaccttgag

SEQ ID NO: 109709 - DNA, 595 bp, Zea Mays
gctctgctgactcggactgtccagatcctaatacgacggacggtccgtggcctgatactcaactctccaaactttgtccactttctgattttgaatttcaaattttgatttgtcgctcatatatggacattttgaccaatccaagggttagtatgcatgcatatacacattatgtatttgaggaatacaaattttcatataaaactatttagatcaaacaagaataaaaaattcatcaaaaatacccaataaatagcctagagagcatatttagaagcgaaatgcaatactacacatgtgtattcaacctcaagccacgtttgagagatctatcacattcatttcacttcttaatgtgcaaaacctcgtttcatctagtggctttgtgaatatatcggtcaattgatcatccgtgccaatcgaatatatagtgatatctccctttccaacatgatctctcaagaagtgatgttgtatatcaatatgcttcgttcttgagagttggaccagatttctagccaattttaccgcactctcattatcacacatgagaggcacattcttaaaaatgatcccataatccaatagagtttgt

SEQ ID NO: 109710 - DNA, 756 bp, Zea Mays
caaaaattgactgtcaggatgtgtggaaactgaatttggcctgacagtgaggtggcatgaagttagggctcgaatataagcatgatctagtaggaatttggctatagttgttatggcaacattgtagctgaatcattggtctacaactttgttgcagagctttgggtgggatgccaaagaaaattgagagaaaattcgccctaaacatagactaacagactgtctgaatgagcctcgcgatggtacagtactgaaacagatcgactgcccagccgttcaccgtcgacgatctctccgccatgattccagctgtcgctacgattcgtgttgcgggaaaggggataagcacgatggagtgaaaatctcggcactggattagctcgggctcagacacagataagattcgtcgtacccccttgctcatcgatcactcgggataggatctcgccgtcgttgagccatcactgccgtctgccgcgtgtccagacactttaccacgtcgcggctaaccgtgctacgcatatccggtgatcaccggaggagccgccacggtaaaggccacgttgcgtggccaccagtgactcatcctgtttttaccgatcacgctccgccgctcaaattcgttgtgctcgcgatcggtctctataaattgaagccaccgtgagcttcgcaagatcatcgcgtacccagccacccagtattgccctcagttgatcactagcaagctccaatttcggatttcccccaaaaccttca

SEQ ID NO: 109711 - DNA, 734 bp, Zea Mays
ttagcttttcttcaatatttaaggatttttcagactaaaagcaaaatatttgctttctttgctagattaacatcctcaaacccattccttaatgtacaggagcattccagattttcactgtgaacaactggtgcagagaaaaaggtgacattgagaggtgaccaagctggtggactccatgataacatttgaatttgtgcttcccggtcaaacaccttcatcccatgtactgcatgtgctttggtactgcagttttccataggtaccttcttccaacacgctttctgtactaggtgtccgtttgtaattatgagtgttgctacactattcttaacatcctatgataaatatcgacaatataaataaatattactattcaagttcagctagcaaaactagggcgacaataaccacatatttcattctgccatgcaaatgcaagatggtgcaccacatggtttcatgcaatctcagtttcaacacgtaagcaattccaacaacaacaaaaaatttagagatgtgtcgtgttttccatggtcttcgtatgcgattagttagcataacatatcaaagatgtatattctattgttgttgtacatttgttccatggcatacattttcgtatgtgtattaacaattgcatatgcatttggcaggatgacttaataaggccatgtcgtagggaaatactatttcttcaacttttctttctgttgacttctttcgtgcgaatg

SEQ ID NO: 109712 - DNA, 383 bp, Zea Mays
ggaggctgtccttttagcatgcatggctccatcccacttgcaaagttgctgctccacaattgctagtgacctaagctcagtgcttccaccgttatgacctgtttacacgccataacgaacttttattatagccacaagattcaggaaggtccggcacgatagagacacttgcttttacaaattacaggggagaaatccatgtgaattaggttttattattaccatggcagtcgctgtaagcaagaattaggtttcattataaagttacttgtccaatgaacttaccatgaagtgatcaaactcgattgctggcacagatggacaagcaagcagcactgactctccatggtgattgccatgtggctcaaaaccagagccctttc

SEQ ID NO: 109713 - DNA, 405 bp, Zea Mays
gcggttagaagtaccgcgtacagtagtttttgaacatggggatacttctttttagagggtccaagaacttcgctgatgaagtagaccggatgttgtactggatatgtatgtccttcctccacccgctcgactactaacgcggtgctcaccacgtgagtcgtgcaggagatgtataacaacagatcttctaccggctgattccgcgtggctcggcgtggtggcttgagtactggtggcatagtcaggaactttttcagtgcttctagagcttcctatgcttctgtggtccactgaaacttgtccacattcttgagcaatttgtagaatggtatgcctttctcgcccagccttgatatgaacctgcttaaggctgccatgcatccagtaagcctctgtactttcttc

SEQ ID NO: 109714 - DNA, 496 bp, Zea Mays
gctaagtccactagggccacatctgacgaagcttttatagaagaagaaggagccctcaatagcgaagaagtctgctgggccgaaaaaacgaaggattataactgtgacagaagctattgaagagacaccacgacgagcttcgggttcaaaggcaccagctattgagagcgctacagctaccgaagttgtacctactgaagctgcaactgccgaagctgaaccggtcgaagatgcaaatctagaaagcacactctctaatattgataagatacttgttgatatggccgcagaagaagctgctacagccgctgaagaggccatggccacaatgcctgagaaagagaaggaaatagccgaagatgcttctgaaaaagaaaatttcaattttcaaaacttaattggacaagaattgttgaaggttgagaaagaagatttgagagactatgccatatcctgtgggtatgaactaggggcgctactcttcggcggtgtggat

SEQ ID NO: 109715 - DNA, 274 bp, Zea Mays
tactatatagccagtccacatattctaaagtggaatagttgttgcagtgcgagacttctcgctcttgccttttttcacccacatctatgtaccaaaactgatcagaagaagaacatgtgtcttgaacctaggagtttaggcacatgatcaaccagtcggtgattgcaagggatgtctgctggtggttttagcataaatattggttctgtaataatacttttgttcatgtttagtgaagtattgtgcttttgatatagtctactgtatgacgaag

SEQ ID NO: 109716 - DNA, 377 bp, Zea Mays
agcagatcttcaggaacaacatcctcaagagcctgatcaaaatttgctagggataattcttgcagaccaacaagagcagacagagctggagaaggaatatcgctactccccccactaactctgtaacgccgactgttcttccgaattaatgggacttcctcttcttcttctttgtcctcgtcaacaatacggataataaatggcacagggtcacacccattgggttcagcatcggcagggtcacacccattgggttcagcatcagtagggtcacacccattgagactcaagtcaactgcttggacgatatgattacactcgtggtcacgtcaagttactactcaggggcagttcgctaaatgctcagcgcaccaagc

SEQ ID NO: 109717 - DNA, 318 bp, Zea Mays
gttgacgcagccgacaagcctcggcaacaccattggcaacaacgtggtactcagcttcaacactagagcgagagacaaccttttgtcgcttggagggccaagagacaagattatctccaagaaacatcgcataaccagaagtagagcgacgagtgtccagacacccaacccaatcagcatcagtatataccacaagctcgaaaacagatgtggagcatggtagaagaccatgatcagtcgtaccttgaaggtaccgaataatacgtttcagagcagtcagatgggactcatggggatcatggatatggagacaaattt

SEQ ID NO: 109718 - DNA, 423 bp, Zea Mays
aaataaacggccaaccagtcgctcggaccctattttgcctcacacgtgttgacattggagaccttgaagtttggtagccactgcaccgcgtgtagtcggccggtgaaggagaaaaccccaaacatgccccagctactgggttgctagcctctacatcatcatggtgttggtgtcgagacgacgactaggaacgatggctggccaaccattcattaactgagtgacaaggcgcatgactatttgttgatgccactgtagaagttattcgggccctgactcctcgctatgggtactgtggtcctggtcatactcttcttggcgtctcagttcttgttcatgtcatcacacacgtggtgcctcgatgctgctctgcatgttacgaaaactattgggtcggtggtgtgtgtccccctttggatgagc

SEQ ID NO: 109719 - DNA, 1560 bp, Zea Mays
taagaggtatcatgcttgacacctttagggctagtttggtgacaaagcaattgaggaggattgggcgggattgaggaggaaatggactaatttcctcctcaatcccccacaattcccttgtcaccaaactagcccttataggtttttctctactgtagctatacttctctgtatagtgtgacagaaaaggtgctgaaatattcaagcctgtgctctaatagaagtctagatcgtagtactgtccctagatttggtctttcagtatctctggttataggtgtgaactaattctattggtttgtcttaacttttctgatgtaaatttctcatcactcgaatggtttttcgttcacttagcgcacaaaaatgcttaagcatggtcatgtaaacatcaagggtcttaaggattacacataatagctatgcaagggattcgacaatgctaatgttgttgtgttttgcatcatctctcatggatatctcaagagccttctcaagtcttgacacaacttgctccatggatggccgttgcttcttgtggccagtgcataacagagcaagcttcaaactgaggtcaaatgcctccgttgaatactctccattcaacctaggatcagcaaactctgatacattgccatcttggataagtgtagaagcctgggaacaaaaggtacacatattcggctcattcaattgttcttcccagaacgtagtatcttactttaactgcttatgatcttaccattttgtccagtgacattggcatagcagtattcatgatgttgattgctcgtcttcctgagaggagttggaggagcaccatgccgaagctgtacacatcccctgcagcattcaccctgtggttgtggcggtattctggatcaacatagccaaatgttcctctgacttcagagcttacgtgcgacacacctaagtcgatgactctagagagtccaaaatctgacagcttgggttccatatcaaccccaagaagtatattggttggctgtcatagaaagtgtgagtttgactaaacatgaatctatagatgcactgaagactttcagatcatgcaacaaaccttgatgtcacggtgaacgatgcagccttcagggtatatgtgcaggaaccaaaggccacaagcacttccaagtgctatctgaagcctctgaatccatggaaggttcttgtcttttcctagaatcaaaattttttttcttcaattatgcaacaacgtatagagttctagtcgtcactttaaatgtttaggctatcatgttactcaccaaatagccattctgataggttaccgttgatgcacagctcatacacaagaaaacactcctcctgcccgtcacagtaacctcttaatgacacaaggttcgggtgcctgacatgtgacaggcttttaacttcccttaggaatgtttctgcatgctcattcttaacaatgtgcttcactgcaacaggccagccatttgtcagcactcctctgtataccttgcctggaaccacaagatgaaccagttgcacaccataaaggacaacatatacttgaac

SEQ ID NO: 109720 - DNA, 482 bp, Zea Mays
cggaggcgcaaatctctggtggcctcttcatcataattaccttcttcatcaatcaccgcatcatcgggaagacgtggatgaggaggtggtggtggcggtgcttgttgttgcgtctccaacacagcaagtctatcgacgatctggggcaatcgtcgatccagcctctcgtaagtcctgccaaggtccatgttaatgaaggcatcatgcactgacttgtggaccgtctcctccatttgctccttcaggagcttgttgtttgcctcaagatcttggcggctaacacattcatcgaagtctgtagggatccttgcttcttcgtcatcgcctgccatcgaaacacaaaaacaggaaacaaactgggaaaggttatccctaatgaatctcgctacacgctccttctccgggtggaacacgctctaatgtatcttaccaagctcttacaagtgtttgacgaaatacaagcaaagaatggtacaatcgga

SEQ ID NO: 109721 - DNA, 346 bp, Zea Mays
ggaaacataatgtacaatctgacaccaagataaacagtgctattaaaacaatctgacaccaagatggagtacttctggtactcactgacaattgtcatgtgtggaaggggaaccgagatgaaaagaaactgacaattctcgtgtgtggaactaatatgaaaggatacagagacttcacaaagaaaaagaaccgatggaactttgttcatatttctacaagatatattgttccaaaaggtatctcgtaataaggttcgcctgctaatttgtaatttcagttagataaaaaaaagtttatcaaaggttgacctttgacagtactggttgctgacttcctgcaattttc

SEQ ID NO: 109722 - DNA, 508 bp, Zea Mays
tcgaaatagacaacaacaaacaaacctatgaagggtcgtagaacttcattcattaaacgcataaaggtgttgggagcattagtcaagccaaatggcataaccaaccattcatataatcgaaatttcgttttaaaagttgttttccattcatcacctagtttcattctaatctgatggtaaccactatgcaaatcaaccttagagaaaataatggcaccactaagctcatctagcatatcatcaaggcatggtataggatatcgataacgaactgtgatgttattaatagcacgacaatctacgcacatatgccatgatccatccttctttggatgagtaaaactggaaccgagcatgggctaagagactcacaaatgtatcctttatcaagcagcgtctgcacctggcgctggatctccttcgtcgcatctggatttgtacggtacggggcgcggttgggaagagaagcgtcggggatgagatcgatctgatcctcgatgccacggag

SEQ ID NO: 109723 - DNA, 383 bp, Zea Mays
cgccgtcctactcctcctccccctcctcctcagccaattaccgccgaccatatttgtccaaaaacctgcaattaagagtaaacaaataagaacatataaaaagatgtatttaaaaacctgtgcgaaataaaaagtcatatagcattacatcgattaaaaataatcttcatatgtgtcggggttagccgaatcataactctcgtcatcactatcaaccatttcaatctcaacaccatcggaaaacgcaagttcgtcattaatgtcattgccttcaaggattactaagtcattatcattttgcacctcatcctcctcctcatcaacaaccatttcaatatctacgtccattccgatagcttcggttaagtctatctcaaatcgcc

SEQ ID NO: 109724 - DNA, 388 bp, Zea Mays
acatctaacggtcgcgggcgaagggttacccagatctaatcctacgcgatcaccgcggaacggacgaccagatgcacctcgtcaattcccccgcaccaacacctgagcaggggcggtgccgcccgaggttacagcggatccaggccagagttgaaggcgtccggcatacccccgcaccaaatttcccccgaaaggtcctatacgacgagaggagactggtaaaccgcatggaggttgtcttacctcagatcgagcgctgggaggggctatccacgtgatgaggcggtcacgcggcggatactggattccgacaaggaattgaagaccttctggtgatcttcacagcgtactggggccacggctaccttcatagccgaacggtgaagca

SEQ ID NO: 109725 - DNA, 463 bp, Zea Mays
ctcagcagaggatcgcactctaagacccaaattgctgtcagtcacgggcggatttgacacaaaaaagatgaaagctttgggaggaggtaggttccaagccgagtatgccactggagcaccaacattcgaaaccttacccctgaggatcgtttcaagtcggcttaccaagtcaacagaaggaattctcttattggtaacccgagttgagtcggccagcccttgatacagatatgctggataggccctgtctttcagtggctgaatgttcttgaaaacaaaatcagtgaccacagcttcggcagtcaaacctctctctttcagtaatctgacttcggtaagcaacacgcctgcctcggcaacttcctgatctgtgggagactcagtccaactcggagtgcgaacgtctggctgtcttcccgaccgggaggggagagaatttccataattgtcaactataaaccac

SEQ ID NO: 109726 - DNA, 549 bp, Zea Mays
ccaggcggagttgatccactgattgcagctcagatgagggtgatgcagcaaatggcggacactatggctgatatgcgtgcccagatgcagcaagaacaccaggagatgcgtcaggaaagagaagagatacgccaagagttgcgccaggagagagaagaaatacgccaggagagaagggcacaacaatagctgcagcagcaatttcagcaacagcagcaacagaacaagtaccgttgcctccaccaccaccaccagttccaactcgtgataagcaccgagaatttatgagtcataagccaccgacctttgcttgttcaccagatccacttgatgcggatgattggttgaagttaattgagaagatgctcaacatcgcccaatgctcagaccaggagaaagttctttatgcctcaggtcatctgacaggtcctgctgctgactggtgggattcttatactgctgcccatgatactgctgatactaccacttgggcagagtttagtacacagttcaggaactaccatattacagctggtatgataaagatca

SEQ ID NO: 109727 - DNA, 652 bp, Zea Mays
gcaaaggccaagcatcacgctaatggcgcagagtacgttacgatcgctgttgtctgacagtcgaacaaaaccacctacggatacaaccaagcacgtgtcttcggcacccacacattgccgcagcaggcgaagtccccatctcatttcacaacaaacaatatcatagtttacatacacacagcaaaaggccaccagccacattgcacaaataaatacctatcttatcttgttaccctccctctttatcgcaagccaggggagggcagcgttttcactcactaccgcaatacaagagcgagggcagcataaacgctatattggctcagccttcgggataaggcctgcctcacgaaaattaaacaacatcaccctcaactcctcaccctaaatagactccgcagatcctcctccccaatacacgtcccggacgacgaagacatcaaatctcgttggccatcctgatctagccgaaggcgggtttgttccatccccatccgacgatgcctattactctgcgacataccaccaacattatgcttcgccaccacccttcgccggtggtactccctagtcctcgcctcagctggggaatcggatgctccacgcgcttccagccgcggcacaaactccgctgcgaccacatcgaacgcag

SEQ ID NO: 109728 - DNA, 530 bp, Zea Mays
tcacataggattgggatgcttcacttctcgatggcgtggaggaggcgcaagatggaggcagagaagtgagcgaatgagggcagggggagagatttctacaggtgtgaggcggagaggtggcccaatatataccaatgttagctttctactcagattggaataagaaagtttagttatattctagttttagttttcattttatcaagaacagagtaccgtttcgcttgaatgcgttgtcattctgaagtcttgtgtcatcagtgtgatcaatataaagcaagtattctaatatctgattatctagtatcggagctgaggcaacgtaatgtcgatcatcgctgcagaagtagacgcgcgggagggcggtggtgtgtcgttctagtacccattattcacgacagcgaactacataagttggagcattcgagtactagcgatgatggaggcgaaagacgtctaggaagcgaacgaaccggcggcaggggtggctatcaacatgaagaaagacaagaccacgcgagcacgtcttc

SEQ ID NO: 109729 - DNA, 281 bp, Zea Mays
ctcgaagtcatcttaagccggtaacaaaatcataccttgtacctacctcttccttcaagcttaaactttgcttatcatactttaattcatacaggatgacgaagccgaagccaaagttgagggagtaagaaaacgaagccaaagcttaacagatgacgaagccgaaactgaagctccttggatactgatgaagcttgaatagatgtctgtagaaaaaactctaaaaactcttgtaataacttgtgtaaagaatgatgtaattaaattttactttgtggact

SEQ ID NO: 109730 - DNA, 657 bp, Zea Mays
acataggctagagaatttatccctcttgttgtactaatttaatttgtctagcatctttgattttagttaaaaattgtctattcatccctctagccggtgtccttgatcctacaccaggtgcttttggctcgccaaattctgccaaacagcaagggcatgtgttgagcaccaaatttggcgcctagatgaccggacggtccgaccttatggcccagacagtctgtaccttgaacggtccagcatgcaacctgagcagtctgtgattagattaattcatgctagaattcttatctttagcgtggttatctaacaactcatgggaaactgttgggtttcgcctaaggacgggtctagacctcccatatatatatgaaggggtacaactgattgaatcaaccaacaatatcaaaccacttttaccttatgcattagaactaggagtaatttagtcatagtttagctttagttgtagttccgcaacctcaattttctcctctcttcggctctatgtcgtctagaggagcttcgagtggctcaccgacgccaaagcaacctgaagatccttcctcaccgacggggtccctcccggtaggcgagatcttggttcttcacagagctctctacaccatcgcgatccgtccaccgcctacacacgaa

SEQ ID NO: 109731 - DNA, 550 bp, Zea Mays
gtaggacagagttgggatgaagagcagcttgtagaagaagagcagcccccgcatgaaggggtgtagggggagcccaaacctgcgctcgtagaagggcacgagcacgacaacctcctcatcctgggggcacggcacaccaccctcctccaatctccaccgcgagattcccttggggggagaaacaatttcttctccaggccgaggaagcgactatcctggatcgagcagactgggaacaacaccattcacacgaaactagtaaggcgggcgtgagggcgtaaggagctacaaaccaacggaaagcttccagtagaaggaagaaagcaagcgctcgagtgcaaagaaacacccacaaaccaactcagagcatccttttctctacttatgcaagggcctagggagcccaagcagcgcttagaaggacggcccacaacaaacaagcattggggaatctgtcgccccaaacacgaaccaccttgggcgccaagcagtgaggattgtgcgttttacaggatttgcgctgcttaggacaaagcgccacaagggtgta

SEQ ID NO: 109732 - DNA, 1152 bp, Zea Mays
cagcggaccagtcgttaggcgaaccagtgacgaacatgtactttggagcggacagaagtgaggaagggtttgggacaggaagaggatgggattgttggtgcttatacggataggaggtggtggtggtctaagcatgagggtgggattgagatcaggaccagaggagtgagagctggagctctccatgaagcagagcatgtgatggtgggatcggtggtagtggtggtgagccttccccgttggtcctgaagccggtaaaagggcatggccatgctagagccgacgacaaccatgtcctcaaacatttatctccctcgcttgacaatagaacaagggggcgagaaagaaggagaattgggagggagggaggaaatccctatcaggaaaccccaatttccaagcactcgaacctaaattagctcttgcaagggatggtatgggtttgaggccacgaaggctacgaaagaaatgggcaagtggtggcggcgatggcggtctgtacccatcccttccgggctttggctctagggatatggtcatggtcgtgtgtgtttgtaggtggatcaggcgaggatggttggaatggatgtccctgactcgtgagtgaaagaggtgaggagggaaagcacaagcatcgagagggagagggaaacaattgcatatttcgcactccaaacatctcttatttgattcaaatgtcatttgacacattctctttattcttattttttctttgtatttggatcctaaatagatgaaaatgtctcttacattttgacaaatcaactggcgtctgaggtcgtaggtataccccttgacactatatagtgtgtgcaggtgcatcagtctctatagccacacctaggccaacaagtgtatatgcaagcattataaagtatgtatagctacaccactaaccaattgcaacatacttaatggcatggattattgtagtggccactatagcacaacatgctcactgatattgcatgattaaggcatgtatcatatatggaccaacaactatgataagatagaggtagttgagcctctatagcctataggatggggaccaccatccttctagagatgtaattctctccttgtgctataaaagggatggaaggagcgaagtagaatggggcttcagct

SEQ ID NO: 109733 - DNA, 479 bp, Zea Mays
gttcgtgaccctgtggtaggagcgtctcctctctacgtcgtgtcgtacactctatgggtcggatagtctatgatggcgtagagccttactattctcacgaagaaccctagaacctacctctagagagggaccccgtcgaggaggagagttccaaggcatgccctaggagtcggtaggccacccaaggcatgcccagatagtgtagaatcgcctaaggattaaaagaatatgtcaatgaagagatcttgagtgaagtagatgaagttgatcttgccccttgggagggacctcgttgggctaagatcctagggtcatcttggggtcgataggccacccaagatggctctaaacgatatagagccggatagagatgaagattgataggtggaatctacaactaaagctacgctatatctactcctgaggcatgaattataaatgaaggtaaatagattggtttgattggaatgtgtttgggg

SEQ ID NO: 109734 - DNA, 418 bp, Zea Mays
tttgagcctggggttggactccaaaactccaagtcaacataacttgatctcattagtcatctttgagctccaacaccctcatgaccctttccatgacttaaatcataaaccatatgaattacctcgttggctttaagtcacatcgttatgttgttgtcttcaatgcaccatgtctcttcttatcctaatcaacctcgacctctagcaagaccatattcttcacttaggctttaggtacctgagtcctcttgaccttctccattttcttggcccctcgaagtccttgccttcttcgtcagtttgatcaactgtctccaagacatgtatattgattttccacttaatcaatgtccatcctccatcttcttcacttgtgatacctataatccatattcaccatagcctatatggaatatca

SEQ ID NO: 109735 - DNA, 450 bp, Zea Mays
ctcaaacaactaccttcgccatgccaccgaagaaagcaatagtgttaggggctgcccttgcaccgctggacatcaatcaagaggggctccctctaagggaggctcgaagccagaaaaggaaggccattagtccaacaccacaggaagaatagttggatcaagaaattagagatctagaggctatccaccagcaagtggagagaagaatggagaaaatgctttggctgtctgaactctaggagaagattgatgaagttgccaaagagatgtgtcacatcacacaagacaacgagcaagggtgtaggccacagcagagagagcttcgtcaggaaagcccgagctatgatgatgtatggtatgacgatttccatcatgataacattgcttttgatgatgcttcaaccatagccacaaaattgtaggctaccccatggccacttcatacaaacc

SEQ ID NO: 109736 - DNA, 476 bp, Zea Mays
tggtggagaaacataccctagggacgacttttcacggtgatccctacgaagtggtgtagctcaccctagtccatcacgaacttcgattgaagggaggagatgatgcgccataggagatcgggcaagaaggtcgtgagaactatgtcatcgacgtagaggaggtatgtcgtgtctaggccgcggcagaagaggaaaagggaggtgtccgccttggcctcgacaaaaccttatgtgagcaaaaaaaggtggcgaagcgactgtactaagctcgaggcatctgcttgaggtcgtagagggaccgattgagcttgcaaattaggtcggggtgagccgggtccacaaaaccgattgactgagtgcagtacactgtctccgtcaatcccatggagaaaggcattcttgaggtcgagctggtgtaccggccacgcccatgagggagctagagtcagatcagtcaggacagtggctggtttcac

SEQ ID NO: 109737 - DNA, 315 bp, Zea Mays
ctagtcttggcattgctgccaccactattgttgacgtcgtggtctttgatgtggaggatggtgaaggtatggattgaggatggtgagttggcaaccatgatgcgaatatccactagattggaaaagcagagggaaggggagatatggagacggtgctagaagagatcggaggagtatgtagatggagtgctagagaccaacttttgggtttgttggagcttgattggacctaatgatacatcgtgacaagtttgggtgtctaaaattatcctctttttttgagagtttaggacttagatgataccctaaaataag

SEQ ID NO: 109738 - DNA, 320 bp, Zea Mays
catgcagccagagccccaatcacctgcatctccagtcctagatctctcctcaggtctctctccatcaagctcctcgcctctacctaaaatgggtaatactactccttctcctgaacatgttgatttaccccttgcacaacgtagggatcatagaatcaatgccggcaaacctccatctcgctttggctttgagtacgatatagctaactacatgtcatactgtcatgtgtcgcctgcatatagaaccttcatcgcatccctgcagactgtgtccatcccgaaagattggagatgtgcaaaacagaatccaaggtggaaga

SEQ ID NO: 109739 - DNA, 383 bp, Zea Mays
agaccactgactgaagaagccaccaaccattttgagaaactgcttgaggccccatgtcgaaccactgctacccggcccgacatgcctacaaaaattgtgtgttgctaaggaagttcctgagcaaggaaaaaccacccgagaaggggggcaagctctagcaggatggcgagtaggagaaagtgggggccgctttcctcgacaaaactaggtgtttgctaatctttggtgggtctgactactacatgtcaagaaggcacataagtcaaaacgacgtgaggtactccaggctcaggaagcatccccgaccttccttgactggtccgaccactccattagctatgaccactctaaccacctagagcacatcccctgtcccgggcgat

SEQ ID NO: 109740 - DNA, 519 bp, Zea Mays
ctttctttgacagctcatctatttgcttcttgagctcaaccaattctagtctagataccctataggctctttagatatggggggtgctaggaataagctctatggcaaactcaactttcctctcaggtagcatacctggtaaatctttaggcaatacatccagaaactctgacacaacattgatactcttgagtggatctgcctccttgctatcaatagccatctgatgacaacctcctttccttggctcgggtgagactagcttagtcaccacttcttctcccactggggacaccaatttcactgtcctcttattacaactgataactgcttggtacttatctagccaatttatccctaggataacatctattccctgagtacccatcactatgaggttagcgggaaactctatcccccttatttccacacttacattcaagcaaactctatcggctcaaacattaccaccggctgaatcaatttgaattggtgttgatatggtagttattggaagat

SEQ ID NO: 109741 - DNA, 295 bp, Zea Mays
tataaattgatggtgccgctagctccacaaggtcatcacgaagccagagcacccgcccttgcctctgattagccaccatagcctcccaatttctctcttcccccaaatcgggtttctgcgccactgtgaacgtcgcgtcatggccagctctctacaggtccattcacgccctcctcgctcttgtttcagcacccttgtgtgctatggatgcttatcggcccaaccaattggactaaaccacgttagatcatcaggaacaccttggattgttctcagtttgcgtcatcaccgtgga

SEQ ID NO: 109742 - DNA, 335 bp, Zea Mays
tgaactttgaagaaattgaacaatcctatgaaccagccagattgggcattgctaggaggtatggtaagactctaggactgaggcaccaccttgcagtgataaacaagattgacaggatcactattctcctaagagcaatgacaaaagaaagataagatataagttttgggacatcaccaagcatgtgatgaatggagagatcatggatatggttatcttcatgattaagctattttgtgatctgaaagttgacaagaatccaaatctcccctattctccgtacattatggctatgatcaatgaaaagactagatcctagggtaggtttgaagtgg

SEQ ID NO: 109743 - DNA, 451 bp, Zea Mays
attttgttccttgttctcttgtctttgcacaaactatggcaggaccctcgggggttaaagaggatgagaacaccatgccacagtcccctcgttccaagggcatcatacaacattttgagccacaaatgcacatgcaacttgatggcctcgctgaagacatccacatcaccaacgcgcgccttggcccacttgaaacagcacaaatcaaagctggtacaacgctccaggaattacgaacagcccaagccaccaccaacagcaccctcgacaccattctgacatggctggaggagttgtcccagtagcttggtgagctacagggtgacactgattatggtggcgacaccgagtacgacgatcaacaccgtcgtcgctggcacggacctcgtcgtgtggtacataaccagaatgtttttcctctaagattaaactcactttacctgaattcaat

SEQ ID NO: 109744 - DNA, 478 bp, Zea Mays
aagttgaagaagtgtgccttttggctatccgaagtggctttcctggggcacgtgattaatcagcagggtattgcggttgatcccaagaatgttgcggctgtggtggagtggaagagaccttctagtgtctctgaaatccggagtttcttggggcttgctgggtattatcggcgcttcgtaccaaatttttccagcattgctaagcctttgactagtatcttggagaagggtgttcccttcgtctggtccggcgattgtgaggtcagttatcagtcattgaagagcaagttggtggacgcccctatcctagctttgcctgagagcggtaagcgtttcacagtttatacggatgcttcgcgtattggtcttggctgtgtgctgatacaggaaggcagagtgattgcttatggctcaaggtagttgaggaagcatgaggggaattatccaactcatgatctggaattggccgctattgttt

SEQ ID NO: 109745 - DNA, 570 bp, Zea Mays
gtccatgcaaagcaggtgcggatatcgttctgccatgttttcatgactaaaaagtttatttaatctcctttacttctttttttcacatatttgtacacaaacactacctactaataacaattccatttgtaaaattttggatggtacgttattgatcatactatgagtactggtttctgttctatatcttatgtttatgttgactcctttgacattttgtttatcaactaatattaatcatactgctcatcaactgaatcattgatcgaactataaacattggtttaatatctacaatatgttttaaaaaggctcgttcctgtagcattgtgtttttccaattgagattcagacataactgtttgcataataccgtccatgctgctcattcgcacatctcttttacaagtttttgtgattagctttccggaacacatttgttgacatctttctctttgcttcgttggttcttatggcattttatttttctttggctggaattgctattgcataatttatactatattttgtcaattgcaatgtaatggccattttatatataacatcata

SEQ ID NO: 109746 - DNA, 467 bp, Zea Mays
ctccaaaatgtgcatagtcaactatcattttagcatccaccaaaaatatgtttgccaattttttggtcacaacaagtgtaggttagatttaatgacccaccaacatgcatactcgccaactcatgtgcatcttttggcctgattccagcctcatcttctgcttcaatttcaaaagcttgtagctcttaaatatttctttgtgaaaccattaagtggaatgtttctggagtgtgaagaatacgattatgttctaagatcagatctatcactctatagtttccactttgtcgtaggtaaactctagccaggtggcggagagcacccgcctaatcctaagaacaggtggttgcctagggttagactggaagatcgtggaacataagaacacacgaggatttagagtggttcgggctgccagagcgtaataccctacgtccacttgtgagttgtattcctgtgagcttgtg

SEQ ID NO: 109747 - DNA, 409 bp, Zea Mays
aaaattgttgccatagcttactgccactctattttctacaacaacaggcaacaacagttgttctatcacgattggtgcatatcacaacgatttatggcctattgcgacattttttgtgatttttagtagtgtgtatggtgatctcaagatagtgttggatgttgctagaaggatgtggcgctagcagatggaagccatgttttgcgcagtcttgctgctatatagttatgttaatttagcgatcaataattttaatgtgagctttattctagttgtgaaaatgagatgttacaaattagccccgcttaggtcgaatctcattctcgagattcaggttagtctatgaaaaaattagagaactctgctcgcaacacatctcctctctccctagtggcttctgcctcaaaat

SEQ ID NO: 109748 - DNA, 572 bp, Zea Mays
actctgtccgaaccgttcggacgagtacgaggtccccttcgctaaattccctcgggatgactgcgtggtcgcgccatgcttttgtctgagcttggtatttgtttagggcctgtagagcgaagactcggtctccgtcaatgagatcctttgaagttggctcgtccacgtcagggacggctgacggaactgttcgcggggacccatgttttatttcttgcggggtcatggcctccgatccgtatagaaggcggaaaggagtgaacccggtcgccctgcactcagtcgtgtttagtgcccagaccgcctcgggtaacaaatcggtccatctgccctttttttcatcgaggagcatctttttgacggctgtgaagatttttccgttggcgcgttccacaactccgttggactgtggatgatagactgaagcgaaggcaatcttggtgccaatggagaagcagaaatccttgaagtcttggctgtcaaactgcttgccgttgtcaactgttagttcggacggtactccgaagcggcaaacaatgttttgccaaaagaacctttgggcagtttttgat

SEQ ID NO: 109749 - DNA, 437 bp, Zea Mays
atcaaacacctcagaattaaaacccactaaaagacctcccgatctcccattgggaggagaggagaaccaggcaaaaagcttgctacccgcgagcgaggacagaagagagtcattaaaatgttcttttttagtttcttgtaaaccaacgaagtcaattttctcttccctaatgatttccctcagaaaatcaaacttagaatcgcgacccaaaccctgacaattccaaataagtcctctcatgatttaaaacggatcaggagggaggtcagaacagacagactccccttttttcgtagatgaacctctacttttaggggaagccttttttttaatcgtttttttccgatgcttaattttcctaccttttcgtaaaaccatcacatcaagtaagtcctgatcaatattcaggtcagaatcatcatggacactactatcca

SEQ ID NO: 109750 - DNA, 413 bp, Zea Mays
aaaaaatcacgagatataagcatgtcaactaactgaatcgtcgaaaggagcaagggatgagtgtcctcttgtagaatcctccaacagccacctgtcaaggaaggagacgggcattaaaacaggtcgccaacaggccagcacatagtgagcaggagaaacacagtgaataacagcacctcatggatgtacataggccataattagatcataggcatagcgtagaactgaaccaatcacacaaactaaaaattcacgaggtacaagcgtgcaagcatgtcaactaacaaaattgtcgaaaggagcaagggatgagtgtcctcttgtagaatcctccaatagtcacctgccaaggaaggaggcgggcattagaataagtagctggcaggcgagcaaacacagagaacatgttgagc

SEQ ID NO: 109751 - DNA, 399 bp, Zea Mays
ttacattcaaggcaagttggaatcacaatccttaccaattttgaggcaattttggaatcaagtaccagcctgcaataaaatgaacgactaggatgcatacagacccaggtttggaagttcaagatatcattggaaagctaacaacgattcctttccattgcctctctaagtgattccaaattcaaccagaatcaatggggatcgtccaaccaatcaaggggacataatctgagttgttaccatatgggctcagattgctttgtacctagttgggttcattaaggaaaggtcctaggggttagccacgccataactagtataaatacacgctacaaccacatgtttgacttgggttttgctttagttcaatctatactcatacagttcaccgttcatcgg

SEQ ID NO: 109752 - DNA, 284 bp, Zea Mays
ttaagtttagaaacttaaaccagataattatttaatcccaccactgacttgaacttgattagtggatagtgaatcactttgtgtagtcctctaccccagacctagggaacactagagtgcctaccccttttctgttatgaacttgtgacccctctctgctgcatatgtttggtatattgttttgtttgttattttccccaagtgcatagtgtgaatgattgctttgcgtagacaacgagcagtctgtgtttcctgaggcagttgcagaggaagtccctgatcag

SEQ ID NO: 109753 - DNA, 1083 bp, Zea Mays
attatttgtggtccgatgatatactgacgaagaaaagataatgtcaaaattgcaagactcataggcagaagcctggcccatctgtcagcagtcagaattttcgcgcacagcagccgggcgccggcggatcttcccagtttcacaccacacgctccacggctggggatcacgctgtcacgctcacgcgcccctccccccgccgccaacgcccacgctgcgagcgcgaatccatcttctctacctcctcgtccattcctagggttcctcctctgccgaatcgcggggaactctgcgggcccaatttggtagggtaatctcctaccaggaggtcaaattccagtcaacgccgcttggttttgtagccgaccggtcgatttgaatccaggggcaccgattggctgggtgagagggcaggctcgatttgaacccgcctctgcccttttcgtggaagttttgggtcttattaggcgcggattactggggtctagggatgtggtagttactagctgcttgggttaggcggcgcgccgaggtgcttccgtgcttggctgactagtgtcaatggcgggatctgtcggcaaggccagggcggcgctgcggtcgtccccgaagcggtacagcggcacggacccaccgttgtctctggcggggccgacgttggcggatctgcagaggacggccgagctggagaaggttgttctttgtctctgcttacgttttgcagctctaacggcttacttggcttccattgtgacgacgttccgtttattttgctgaaaaactgggtttcagttcttggttgaagcgggcctctatgagggtaaagaggagtccgcgaagcgggaagatgtgctatccgagattggtctggtaatccctcgcttcctgtttacccgctgtttacatgtttgtttaccctacccaacaagttgacatctcatacttgactgaagttgtgggttgaatttaagaagggaacatgtgatatatactacaccatttctcgaagttgtgagtcattttagttttatcctaagtcaaacttcttgagctttgactaagtttatttataggaaaatgcac

SEQ ID NO: 109754 - DNA, 615 bp, Zea Mays
ggtacgatcccatgacttcattcataagggcttgggaggttgctggcacatttgaaagtccaaatggcatgaccaggaattcaaaatgcccgtggtgtgtccaaaaagttgtcttatgaatatcctccgaatgaactcgtacctgatggtatcctgagcatagatctagtttggtgaagaacttggccccgttgagttcgtccaggagctcatcagctactggtatagggtacttgtctttcactgtgcgctcattaagggctttgtagtcaatgtagaagcgccacgagttatctgccttcttaaccaataggactggagcggagaaggctgatgtactatgtcagattgttccctgtttcagcattgcttcacactgcagttgagtgtatctataaggatgtaccgccactagtgttgtgcccgacatcaggtggatgcggtgatcacatggtcgtgctggagggaagcccattggggatgagaaaacatcatcaaattgctagagtagggagtccatcattggtgtcgggtttgatgttgaaacacatgttgaaagtggcctgtgtatcacgatgtgagtagaattcaaccctttccacaaaacttggtaac

SEQ ID NO: 109755 - DNA, 659 bp, Zea Mays
ctaccgaagtatggcggatgtatttcgatggctcgctgaaactgcagggagcaggcgcaggaatcctcttcattgcccctagaggtgaacaactcaagtacgcgtttcagctattattcccggcatcgaataatgtagcagaatatgaggcactgatccatgggttgaacatcgccatatcgctagacattaagaggctgatggtatacggagattcactagtggtcataagccagataaataaagattgggattgctcgactgattccatgggcaaatactgtacgaccatccgaaaattggaagacaagtttgaaggcttggaattccatcacgtggaaagagaccacaacgtagcaacagacgcgttgtcgaagctaggattcagtcgagcccgggtcccacctggaatcttcgtccaggaagtgccacgcccaagtattccctcagatcaggcggaagagtgcaacaccttgagccaaccagaatcggactctaatgactggagagaacctatcatcaggtacataaagaatgaagaagaactagatgataaagctacagcagaacgcactgcgagacagtcggcccactacaccctcataggggccgcactgtatagaaggggtgtgacaggagtcctcatgaagtgcatttcc

SEQ ID NO: 109756 - DNA, 533 bp, Zea Mays
gaaaggggcgggtcgcgatgaattcgaggccgggcggcgggatcgaggcgcaggatcggacggctggtcgacggatcgacagctgaaatagcagaacagtagaacggacgactgagattgtataacggcacaacggtagaacgatagcctatcccatacggccttaataaatagtagagattttataaaaaataacttttctatattaatagacaatgaagactaatgataagacacgaaattatatcattctctttcactaaaaggtagacgacgtctcaataccaacgaaacgttcctgccaaagacaatctcctttagagataaagcaaagatactagataaactttgttaaaaagcaaaataaaaaataaaaaaagagaaattggcttatttacaaaacatgaagtttcgtctatgaattctttgtatggaaaaccatataatatgaaataaaaaggaaataactgaatcacacttgcatggcaaactagttagttgagaatattttatacttcatataagaaactttg

SEQ ID NO: 109757 - DNA, 786 bp, Zea Mays
gcttcagctatgttttcgaagatcaatcttggtgccccaaacttgagatcagaaggtagcactgcctccgaaccatagaccataaagaagggagtgtttccatgtaaagctcggctaggttgagttcttaggctccagaccacatacggcaactctctgatccactttcttgtaaacttttcattcttgtcgaagactttctttctgagtgctttcaatatcattctgttggctctttctacctgcccgttggctcttggatgtgccactgatgcatatttgatctggatgcttttttgtttgtagaaatcaaagaactctgaactagtgaaattggatcccaggtcagttatgatgctatttggtattccgaacctgaatattatgtcttgtatgaattccacttccttagctgaagttagagaagcaatgggcttgcactctatccacttagtgaatttgtcaatagcaaccagtacatgagtgtatcctccttgagctttcttgaagggtccaatcatgtctagtccccagcacgcgaatggccatgttacgggtatggtttgcacttgctgtgctggtaaaatgttgttgttttgataagtattgacaagcttcacatctctggaccaactcggctgtgtcactttttgtcgttggacagtagaaaccagacctgaagaccttcctaaccagagtcctggatgctgcgtgtatcccgcattgcccagcgtggatctcatctagcagttgcttcctagtagccgaaagaatgcacttcatgag

SEQ ID NO: 109758 - DNA, 582 bp, Zea Mays
ctcaaatgattctatcttatctttatggatccatgttatcctaataagcatacttatccaccctagtttaacaaccatgatctaatgcaaattaactagatcttatctagtcaaactagtcataccaatctaatctagatctcatctaatctaatatgatctaatctagtgtgttacttaatgctggtacaaaagataaggccatacccctcatgcacctaaaactagactagtgccttaaaccaactcagccacgtacatgagatctaacccaaccaatagagtcgcgatggactacataatttgtatatccccacctaacatcaaacaagattttgatctacatcgtgtagtctatcacatccataccatattctccatccacgatgatatactctcacctcgaagcaatgagacccagaccggagaagaaaagatcaacatcgtcaagaaataaaagaagtcaaactcaatcttcagatgcattaccacttaacacagaattctttcccatcataaacttgcttacattaggctattcttgtcctaacctatcctgcatcctacacaataaggtgacta

SEQ ID NO: 109759 - DNA, 443 bp, Zea Mays
accacctcactaatcggaaaggacaagaggtcataatgtccaattaagacctaacgtacctgcgtggacacctccacatacacccatgtcatgtcattatacatacataccaccgctaccatatatcccgaatcagatgtagggcgcaccaccatatccattcgggataccacaataccccgcctgggggcgcctcaatcatatgtttttgacaggttgacgcctccagtacaagaccgattgagagcccctcaatctggtccatgagcacaggcccaacaagattgccgaacaactcggccccaaaggctgactaatctggcagggaggcatatagctacagcctccaacagtcgataaaagaggacgtcattaaaatagtattgacagatgtcgtcgtacaacaaaataacgaagggccgatgatttttggtgaatcagcc

SEQ ID NO: 109760 - DNA, 522 bp, Zea Mays
gtcacatagtcataagtatatgaaatgtgaataaatacatacacagagaaatatggcacagaaaacaagagatgagacgatcgagaggtcaaacgacgtgaaaacggcgtttgaacgataaaaagtgccataggaggtttggaattcgaattgaggcacgaaatgacgtggaattgagccgacacttcacgaataggtttatatgggtgaatatgagtgaagtgtgtgtttggtttgaatttaggcgaagaaaatgagatttgggcactcagctcggaaacgatcgctcgaaacggggaattgggtgaaattaaagcctggaatatcggatgggcgtgaaatttggcgaatatgttactggagatgttttgaaggtgcctgaaaaatttgagttcaattggagcatttttggctagtttgggcatttcaccgaacacgtggagggcggagttttagggtttcggggaaatggctatttgaggtgggaaaaccctcccgaaggagctaggaacctgcaaggat

SEQ ID NO: 109761 - DNA, 400 bp, Zea Mays
caactttggtttctttgttaaccttttcttcttgtccttctcgatagatctttgcacttgtcttttcagaatactcacaacccttttctttttcactccctcggcctcttcatcaagtctatcatagttaggatactcgaagccaagagcatccatcacttgatttagccttcgtttctctcgtgtgccaaagacagcggtcattagctggtcctctttcttagtataatttcgaaggatttcattgcacattttctcaatgacctccaaccattcggcacaagggccgctgaaggtattatgaaatttaaagcgatacagaagtctaacaagctcaaatttctttccttcatctttctttttcggcattccccatccaactgatgtgggaaaagttttg

SEQ ID NO: 109762 - DNA, 412 bp, Zea Mays
ctattggcaacatgaatcaggtaccgatgcaacatggtatgataagctgtcgtaaaagaaacactacaaattttgtgtgcctcggtcagagactggaagttgttgcaagccgcaacggtctgttcgtactttccagggtgtttcaacgtcgaaaaatttaccattgttctatggttcagaggctatagaataaatcatggcacactgaaattcctggactagggtgtatacacgtttgttttcacttcctcttgtgccagtgctagcagtagtgttagctcagcagcagcaagtggtagtgagatgaagtctgttgctgtccatgtctggaaaagcgaaactaattgatgaattgccaatcaattagtacgagtaatattggtgttatgttagaagtttctctatgtttagc

SEQ ID NO: 109763 - DNA, 563 bp, Zea Mays
agcagttcaaaggattcacgctacaacatatagagcagaacaagaatgaagaggccgacatgctagcaagagcagcagcgaaaggtgaccccatacccttagttgtgttcttccacacaatcggcacaccagccgtaagaaatctcgaaggcctacaaatcacaaaagatcccaaaggccaaagaattgtaaacctaataatgactgaagactgaagagcacgcataaccctctattttgagggccactatcaccccactaaccaggccaaggccaagaggttgaagcaccgaagccatgacttcgcagcaatagatggccaactattcaaaaaggaataagtcaacctatgctcaagtgcatcagagcggtccaaggcatcgaactccttcaagaagtccacaaaggcatatacgattcacactcgggacccatgccctcgccgccatggtcatacgccagggattctactagccagccatcgtgtgtgcggtgaaccatgtagtccgttgtgcgaagcatgcaaattctcaccttgagcggggcaccttcgtagttcacaa

SEQ ID NO: 109764 - DNA, 369 bp, Zea Mays
gtaagggttgtgcttagtgcatattaccccttcataaaagagtgttgttttaggacattgatgttgatgtatagctgcaaccaaattcgatggtgtgaaatcgtagtgttgattgcatctatgacttgctttgagcttcattgtatgttgtttcatgctgaatatcaagttgtgtagtttccttagacaattagtccgaggtagaagttcttgtgttaattaagactaataatggacccatgttttgaatggtggtgctatatggggtaccttggatgctttgcttggagtggtcgaattcgaggatgaattctttttaaggggggtagagtgtgataacccaattttctgaaaagaagttaagcttct

SEQ ID NO: 109765 - DNA, 459 bp, Zea Mays
tgtgacttgtggacctctcatgtcaccagtgttttgggttataaatattatctgatggttcttgatggacttttcctttgcgttgaagtctgatacttttgtgactcttctcaactccgtttgggtttctactccgtttggtcacactattaaaactgaccagtgtgacggtggccccgagtttgataacttctttcagtccttctcctcccatggtgttcagctccggatgtcttgctcctatacttcttagaatggcaagcctgagcgcataattcacactactaacaacatcatgcgctctttgctcttccaagccttcgtccctgctcgctccatgactgggacctcccgcaacacctgtttcaccggcctacctttggggtgtttggccttcctcggttggcttgtgtgcctcccgaggccccccatggctccacttttgaccctgatggctcc

SEQ ID NO: 109766 - DNA, 488 bp, Zea Mays
cggtattcagttgaatccactgaggatgattcactggtcttcgacagcttgagttttgcttccatcgtagtcttgcttgggttgcactggttcagtccaaccttctcaagcagctgctttgcatatttagtttgacacaaactgattcctttgtcatctttgtgcacttcaattcctagatagtatgatagagcccccaaatcagtcatcttgaacaccttcttcatttcagccttgaaagcactaagctcactctggactcccccatgataataaggtcatccacatacactcctaccactaatttgttggaatttctgacccttgtgtgtagaccatgtccaaccttgcacttgataaaacctagatcattcaacatagtgtccaatttcgagttccatgctctaggagcctacctcaaaccatacaaagccttgtgcagtctcaacaccttctgctcctcacccttcttgacaaagccaggtggc

SEQ ID NO: 109767 - DNA, 416 bp, Zea Mays
gtgtctaccaagctctgagatgctaaaatgagatgatctaaagggggtctcccttggccttatatatacgactgtggagctttaccgcacacatgttgatcacactcttcctgcttatcacctaattagtagcaaacaaccttcactgtcccgaggaaaacccggcgcctccgcgcggagctatctccggcatttgaggatgtcgggcgtgggaaaagggaacggcttcaacatgatcatgtttaattcgcgactaactcagatgttgggccttttgtgctcctgggcctgccttctttcattgtttccactcgcccgacccccagtagaatgtcatggaggggcgactgccatgtggccccaagcgaagttttcgcccctaagtggacccgggggatatccatcccccacaagcc

SEQ ID NO: 109768 - DNA, 633 bp, Zea Mays
tagggaccgacgaaacgtggtgctagctttcctttcatttgaaaccttttgacaccacacatcggggagaccttgatataaacgaaatctccttcctcaaatcgagttcccttcgtctgttgtctgcgtaactcttctgtcgactttgagcttcaagtaatctcttgcggatcaaggcaactttctcttcggcttccttaacaaagtcgggtccttctagtgtcctttcccctacattggaccacattaggggagtctggcattttcttccgtacagtgcttcgaacggtgacattttgatgctggcctgatggctgttgttgtacgagaattcggcgtacggcaaactggactcccaatccctatcgaatgttagcacacaggctcttagcaaatcttcgaggatcttgttgactctttccgtttgaccatctgactgggggtggtaagcggtgctgaaatctagcttggtgcccattgcttgctggaggcccttccaaaattttgaagtgaactgtgttcctctatctgatactatcttccgcgggatgccatggagtctgactatctctttaaggtatattcgggcaagggcggctcctccaaaagtggtctttactggaactaagtggg

SEQ ID NO: 109769 - DNA, 287 bp, Zea Mays
ctcctgcttcctctcatcttcagcaacctcatctggagcatatctggatagctggataaacttgtcgtggtactcgctgactgacatacttccttgcttcagcgacagaaattccttctttttaatcttcatcaacccagcaggtatatgataattcctgaactgtgtactgaactctgcccaagtaatagtatcagcagcatcgtgggcagcagtatatgaatcccaccagtcagcagcaggaccagtcagacgtccagaagcatataaaaccttctcccggtcag

SEQ ID NO: 109770 - DNA, 573 bp, Zea Mays
caagattgttaatgtacaggaccaaacggatcacaggcgtttagtgtctgtcagttctacaaacaagggtggttacatccacaagatcacgatgtaatagcgcgaggttccgttcatcgaatgccatgcaatggaaatcttcttgatttatgctgcgcgggtcatctggctaggaatacgactccacattcgtagactccattcatgctgcttaatttgaagccgacatggcacaacaagcagatttcataacacatcttccctatcgcaatttgacagtcagatctgggagaagttatggttcgcctccacaactaaagaatctcactcgacggagtcacattaatgctctgagaccgaaccctgtctatgatcttctgcctgcctgttaaatcttcttcgtatccaacgacctgcagaaaaaagccagatttaaatgagtcagacaatgttttttttttttgtgattgccgagttattcgatagactacacacctgagattctgtctgcgtctcactgaaagggtagtaagtagtaggagctggggaggggactggtacagagtttaagtt

SEQ ID NO: 109771 - DNA, 499 bp, Zea Mays
gtaactgtgcctttatttacgtgaacgtggagcacgtctttccttatcttagaccggtggagatttatataatgcatggtttatactatcatgttacacaacgttatgcagtcgtaaacggtgtgcacatggtaatattcgttcccgtgattcgtggcacaaaagattccttctatgcatgatttatgcacattaatacatatatttatgcgtgcgtatatcgcctgtcgtgtatcattcgggattcgtggctatcatatgcatagctgacgcaagctcgcgtacagtgggccgaccgcgacctggttggcgtcctggttggggcttcccccactaacggaagcccagggcttccattacctccaccattaccttaaaccaccagcatgacttaaaccaccaccattacctttcctggacagctagtaccacactccactgagctaggaattaatacttgcaatttgcaagctaaggttctgttgttgttttctcaaag

SEQ ID NO: 109772 - DNA, 288 bp, Zea Mays
ttgcaatctctgcaataccatcttcaaatgatccacatgctcctcctcactttgagaatatataagaatgtcatcaataaataccaccacaaacttgtcaagaaaatccataaatacattgttcatcagattaatgaagaaggctagtgcattcgttaggccaaaggacatcacagtgaactcatacaacccatacttggtaatgaatgccgtcttcgggatgtctgagggtcgaatcctgagcaagtgataacctgacctcagatctatctttgagaacacattggc

SEQ ID NO: 109773 - DNA, 553 bp, Zea Mays
cctgtcatgagctgccaccagaacagagaatatgtgaatgcttacactagtctatgcaagtctttgggcactggagcttaaacggcacgcacccctccccatgtgggcagataagataacgacgtccctgagaatggggaaccgacccacgcccctcttctcatgctgcacccaccggccaccgacgctggagtgaattcaccgaccgtggctcgtttcgccgtcacccagaaggagacgtgtagctcgcgctgaagagattggatgtttgtttggtttgatggttcgttttggcgctgcctgccactgcagtctgcagcacagtgatcaatggcgtttgatagcagcctattgggggatcccagacctggtcagtccattttatttcatcaccattcatgggtgttacggcctgtttggatcaaccagagccagttattagctgggctagaagttagcctaaattagctggagttggccacctaaaagattgttcggtgggtggattgaaagaaatcggagggaattagatccagttctattcaaatttatt

SEQ ID NO: 109774 - DNA, 710 bp, Zea Mays
ggctagctatgagacaatatgcaatcaacaaggagtttgagttaggcatcgaagtaacaaggacaagtcgttatcgaggtaactataagggtgaggactgtaatggagcttttctacaggagaagaaggatcgcaacaaacatgattgtcttgtcggcgatttgaaatgtctgcgtccaatactcaaatttagtgaatctaattaagtagtatccttagtccacgaattgtctgtacacaagcacatcaaataaattgtttgtacacaagcacaagcactagactatgaactttctgtacacaagcacatcaaatgagaactgtccacaggctcaaatattttacaagcatttgaagtttacaaaaaatctactcaacaaatacatttgaagtttacaacaaatcattctgggtttgggggtgaggggagaggatctaaagacacgcacaacagggggaagacaataccttacatttgggaacgaaggcggtgggaactgtctctcgcggggaagacgatgacgggaactgggagggagaccggacggtggcggcggcgatccagacgggatatcaatggagagatgaaaccttagatggacgtactctgttggataagatcatgtgactctatctctatcttgttggataagataatgtgactctatctctatcttctttgcctatataaataggtcccccttgtaccc

SEQ ID NO: 109775 - DNA, 329 bp, Zea Mays
cagacattttttttagataatggaggagttgtagctcaaacaagagacaagtctgacaaaatgtaggaaataaaaaagtactcgatattattgactaatagacaatgttaaaggcgtggatatattaaaaaaaggccaacgggtggtgtatgtatttaggctgaagtctatcctaattgtacgaattacacttctttatttccttcctctccatctcttcgggagcactacttggactagactcgagtcagttggcatggatgggatgtcacaatcacaccacttctctgagtttcaagcctcgttcacctgctagtttactagtagac

SEQ ID NO: 109776 - DNA, 1168 bp, Zea Mays
ttggtgcccatagcttgctgaaggctcttccaaaattttgaggtgaactgcgtccctctatctaacactatctcccgaggaataccatggagcctgactatctctttaagatatatccgggcaagggtggctcctccaaaagtagtttttactggaatgaagtgggccaccttggtgagacgatcaattattacctagatagagtcattcccttttcgcgtccggggcagtccggttacaaaatccatgcctatttcctcccacttccattcaggcaccgggaggggttgtagtaggcctgcaggtttctagtgttcggcctttgttcgttggcaggtgtcacactgggccacatactgtgctatctctttcttcatccctctccaccagtatctagctttgaggtttaggtacatcttggtggttcctgggtggatggactaggctgagttgtgggcttcattgagcaggacttcccgtgcttctcctattggtacacacagacggttcttgaaccaaagaactccttgttcatctgccctaaggtccggaagttgctccttgcgagctctttccataagtcttgttgtctccgtgtccagccgttgagctttgcatatgaggtcttctaacattggcttgacttccaggctaccgttgtctcccagacatgcatttagctgagctgattccttcttccaatcttctaaaaagttggtcccctttatcccgaaaggttttcggctgagggcgtctgctaccacgttggccttcccggggtggtaatggatctcgaggtcataatctttgatcagttcaagccatcttctttgacggaggttgaggtctggctgagtgaagatatacttcagactcttgtgatcagtgaagatgtggcatttgttcccaatcagatagtgcctccatatttttagggcgtgcactatggctgccaactccaagtcgtgggtggggtaattctgctcatgtggcttgagtaagcgggatgcataagcaataactttctcattttgcattaagacacaccccaagccttgccttgaagcatcacagaagatgacgaaatcctggtgtatatctggtagtgtcaaaacgggcgcggtcgtgagcttctccttgatgatctggaaaccttcctcacattttg

SEQ ID NO: 109777 - DNA, 432 bp, Zea Mays
tagtagtcgatcgagcagaagaaggacatgcatacccagtgcaacatcctgtctatttcatcagtgaagtcctgggtccttcgaagaagaaataccctcaagttcagaaactattatatgcagtacttctaactgcacgcaagctctgtcactacttcaacgatcacaaagtcatagtagtcactggatttccaataagggatattctccacaataaagaagccatcggaagaatagccaagtgggcctatgaactgggagctcatgacattgagtttcgacctcgcactgcaatcaagactcaagcactagttgacttcgtatcagaatggaccgagcaacaagtgcccgacaacccggaaactgcagaagtatggcgaatgtatttcgatggctcgttgaagctgcagggggcaggggcagggatcctct

SEQ ID NO: 109778 - DNA, 450 bp, Zea Mays
tctccgtctcgggccacagtcgacatgggtgggcagaagtcagccttggtggatgcgcgaagttcgtgtcgcctcgctgtacatgctggttcaaggccacggagaagccccaccatcacttactttcggcaaaggaggaaggacagtcagccaagacagctgctagacacgtccccgcctcccccttcgggtgcaaaagagttcatcgataagctgaccagaccagcaggtgggattctgagggcgccagtcagaaggtcgcgacaaggcaaagctacagccactgaggtggtgccccgacgtagcagaagggtcgtcggagtaggagtggagcgactgccacctcctccaccggccaagcagcgcaagaagcgtattttgaaggagcttggtattgtgaatgctggagaaactgagactatcaggccagaagatcttgatgagtatgcc

SEQ ID NO: 109779 - DNA, 387 bp, Zea Mays
cgcctgcggattcgtcgcgggtcgggaccgaccggaaggattccgggatgtccgatcgcgaacactttgagacccggaggcctcagcaccttgcatgacatttccgcttcctctcccacgcttggatcgagagcatgggggagtatctccgtgtatttcttggtcatccgaggagtcggattcaaccacggacgggttcctccgacgcaccattctaagaaacaaaaatagaacctatgatgagcaaggatcaaacacgtttgagtagaaacgcataagatattgagcatgcacttcaaccgttcatatgagcggttcaactacaatgaacaatatcaaatcgctaaactctaacaatgtttgtgacaaatgaaagtaatctaagtg

SEQ ID NO: 109780 - DNA, 422 bp, Zea Mays
aattgttatcctcgccgattggggtgagtgtaggtgagggggagctgcaaaatctgtttgagggtgaggaactgaggataatgctgttcaactacagggagatgggtatcatcccgaaggttgagccaatgtaatatatgatgccctcgttgtgtgtatgtaaccgctatttgtatgataaggttgcgcgccttcgttgatccggccgcgcccgtgggcgacttctgcacggagagtcttttggaaaaggcttcgattttgcgcgcctattattccggctgcacctttaggcgacttttgcacggagagtcttttggaaaagacttcgattttgtgcacctattattccggctgcacccttaggtgacttttgcacggagagtctttttggagaagacttcgatttttcgcacttattgtgc

SEQ ID NO: 109781 - DNA, 395 bp, Zea Mays
cttttgggctgaccaatgccccggcttattttatgtacctgatgaactcaatgtttatgccagaattagacaagttcgtggtcgttttcattgatgacattctggtctattccaagaatgaagatgaacatactgagcacctgcacatcatgcttcaacggctgcgcgatcatcatctttatgctaagttgtctaagtgtgagttttggctgaaggagatcaaattcttgggtcacacaatttctcaagatgggatattagttgatcctgagaaggtacaagaggtaatggattggaaacccccgactacagtgaagcagattcggagttttctaggattggcagggtattatcgacgatttattccggatttctccagaattgccaagccaatg

SEQ ID NO: 109782 - DNA, 961 bp, Zea Mays
gtgagtaccatctattgcaccaatgcaatatttaaaaaatggcatcatcctacgatctttggtaattcttgggtgtgttgtagaaaaatttggatctattggccttatgtagtcctcacacatccccaccacacaattcaggacctcttcaaattttctgctgataatctcccgtgaatgcttcaaaacatgttgtgcagcactattgcaccaaccatggccacatgtaactaaaaagatggcaagagactccaacgaatgcatatgaagcgaagatacgagaccataagtactcactagcaaatcatgcaatctataaaacaggaatgcatccatccgaaacatcatgtggcttcctccaggagtacccaaagtttccatgacccatgcatatccactttgtgatgaagtcctttcctcatttttgtccaaatatgtcaaataatattttcctagaacaatagcagtacatgatatattgttctgaacaatctgtatcattgctattgcttgtgttctccattcatcatcatcacatacgctatcatcatcacatacgcatcccatcctatatcggtctccttgtttgccagttgcctccaaataccataatcaattttcaacttttcccacttgtttttgaattgttttctttcatacaaaatacctattctttggtagaaattttgaatcacatttttatacccaatcttattcaaatgcgtgtttgaacgattgccattttcaacttcttcagcaaatatttcgcaaacaaccttagtgttctcatcactccagtccgcttgattgttattgaaatgcatgcatattatggcacattactatggagcgaatgataatggtaccatgataaaattattaccttgcatcagcgaggttgacgtccagggagacagagcgtgtagaggagcgagttacagcagctggaggtcgaggtgca

SEQ ID NO: 109783 - DNA, 705 bp, Zea Mays
tactagagagagccccggccaggctagatgtgcgggcgcgggacgacgtggcaggtggtgggactaccgcgcgcatgcaccgagtcaaggtggggcgtttatgcatacggaatttcaatgaaacagatgcataaatggtaacgtggggggacccggtatggagacgtggctcacgcgatatgcttgcgtattttgctgttattggctgcgtaaattcgcatctgacgcgacatggactcggtggggcgtttatgcatacggaatttcaatgaaacagatgcataaatggtgacgtggggggacccagtaaggagacgtgggtcacgcgttatgcttgcgtattttgccgttattggctgcgtaaattcgcatctgacgcgacatgagtggtcagaacgggtagtgggtagtcacgcgcgcgtcattccaggaatgtggggcggtcgtacgatggggtgatgcatgtttatggaaaagtaacacaatgggcatgtaatcgtaacggatcggttcacgtaaatctcgggacatgcaaactgcgcatcaaatcgtgcaggatattggatcatgccatgaatataggccaggacggtttaggcgagtataggatctgcaaaaaatgggttacacacagccgccgccgcttttgttcagagctctcgaagagttagggcatgcacaatggagacagccaggggatcggag

SEQ ID NO: 109784 - DNA, 1142 bp, Zea Mays
gccttctttgaacaaatggaagcgtgttctatctctaacaacaatttctctcccatatactttggatattagtttggtaacatgatggcaatcatggcaaactctaaggttcttgaatatccgaataggcatattgtcacttatactaatcaaagcaaatgcaattgccagcttctcactatgccgactaagagcaccctccttctcttcttcttcgatgtcaagcaaaacttccttcatgtctgggatgtaaccctcctccaatctaattctagtatcaatctcataccattttgacaaaatatcttttatgcgaggatgagagagatctccaacaatgaattgatgaataactccattaacctccacagtgctacaaccaggtgtcttgtcaactcccttttcacgcattaggtgcctgatttccctagcagaagcatgcctacctgatgcagcataaatgttagatagaagtacataagcgccacttttgtcaggttccaacaagatccaatgcttggcaacatactcggcgaattccacattcttgtgaaatctacaaccagccatcagagctccccagatcaaggcatcgggttccatgggcattttctgaatcatctctttggcctcataaagaaagccatttcgtgccaggaggtctaccatgcatccgtagtgctcaatctttggtttaatgccatactttctcaccatcgaatcgaaaagctctcggcccttgtcaaccaaccctgcatgtgtgcacgcacacaacacaccaatgaaggcaatgtcatccggtctgatacctgagctctccatctgagcgaagagcattacagcctccgaacctcgtccgtgcattgccagtccttttatcatagtagtccaagccagcacattcttgtactgcattctttcaaaaacgtccattgcgagctgcacctcaccacacttggaatacatatcaaccaaagcagtgccaaaaaacaggttgatcttaatgccatgagccttgaggtaaccatgcacccacttcccctgctccagtgccccgtgctgtgcacaagctgcgagcacccccacgagcactgtgtcatccgggcggacatcctcagcctgcatccgcgcgaatatcctca

SEQ ID NO: 109785 - DNA, 582 bp, Zea Mays
catcattgcattcacgagaggatggctcctggcccttgtcatgctttcaagcgtccctccgattgccattgccggtgcaattgtttcaaagttgatgacagggctctccacccgaatgcaagcaaactacagtgatgctggaaacgtggtggagcaaactcttggtgccattaggacggtttgtgctattagctagcaaacacttcttccttttttgttttgtctattcatttactatcatcaccagtaacttcctgatatatatcctgcttacctggtttatctgtccatgcttatctgaaggttgtttcattcaatggcgagaatcaggctataacaaaatataacatgttcataagaaaggcgtaccggtcttctctgcaagaaggtgctgtaaatgcccttggattcggttctgtgatagcaatcttattttcaagttatggcttggctgtttggtatggatctaagctgatagtcgagcgaggttacaatggtggcatggtcatttctgttatcatgtctgtcatgatcggagcaatgtaagatttctgttatcatttaaaattttcttaaacgaac

SEQ ID NO: 109786 - DNA, 465 bp, Zea Mays
ctctggggtgtgctactgatgcatatttaatctggatgctccgttgttcgcagaaatcaaagaattcagagctagtgaagttggatcctaggtcggttatgatgctatttggtatcccaaacctgaatattatatcatgtatgaattccactgcctgcctgaagttagagaagcaatgggtttgtattctatccatttggtaaatttatcaatggcaaccaacacgtgagtatagcctccctgagctttcttgaagggtccaatcgtgtccagtccccagcatgcaaatggccatgttacaggtatggtctgcagttgttgtgctggtaaatgctgttgctttgacaagtattggcaagcttcacatctctggactaactcggctgcatcactctttgccgtcggccagtagaaaccagacctgaagactttcccaaccagagttctggatgctgtgtgtattcc

SEQ ID NO: 109787 - DNA, 509 bp, Zea Mays
ctttgggcctgaattgattcgagaagcggaagaacaagttcgtataattcgagagaatttgggagtggctcaaaccaggcaaaagagctacgcagataatagaagaagaccactggaatttgaagaaggagattatgtgtacctcaaggtgtcaccacttcgtggaatgaggagattcaaagtcaagggcaaattgtcccctcgctacattggacccttcttgatctttagaagagttggggagatggcataccaactcgagctacctgctactctatcggatgtgcataacgtgttccacgtgtctcaacttaagaagtgtctccgtgtccctgaggaacagttaccaatggaagagctcagtgttcagggtgatttgacttacacggagtatccgatcaagattcttgacacattgactcgggtcacgagaaataaggtgataaagatgtgcaaagtgcaatggagtcaccacggtgaagatgaagcaacgtgggagagagaggaag

SEQ ID NO: 109788 - DNA, 1119 bp, Zea Mays
caaacacaagaaaacaaaacatgccgtccaagtcaccgcattttgctcaggggctaggaagcgagcaccatgttacactctcaaactcgtttgtcatttcacgaccacattctttcccttaaaatgctttgatgtctggatccgtcccgaggcacatctacaccctagaaggccctaccgggtgcgactatgataactcaagatgactgatcataaggacactctagcgaggccttaagagaaaagatagtggcatagactttgacccaaagacaaccaaactcaacaaacacaaagcacaaagcatcatttagttcaacattcaagtttatttacaaatctaaaacaaaaaaataaagcttaagggagctggggttaggtgcgtcgtaggaaaagcccacgtcaactcgcctcgctattaactgagcgtgagggatgacctaggcttcggtccaatccaactcctcttcgatgcgatagatggcaaaaccctccacgatcacaaccaggttgatcttatcaaactgagagaccatctgctaaagggccatactgctcacgaggaacgcgccctctaggatgacgtgttccacatggcccgacaacatccctagccgctcggttagtgggaccgtggccggcaccggaagagaaatatgcgcacaagccataactatagctaaccgaatagcgtgaagctccacgctctgctctgagagtgaatccttggcttgaagccgagcggtgatgacgacgtcacacacaattaagagcttgcgcttctcgtctttcaccaccttctaggcttcccgagctgaatataacatcttttggagaaacaagaaacttgagtaacctaagatagagaccaatcaaactcaatctaactcccagaagggcacacctccaaatgccttgcgttctcgcaagagctccacgtctaacccctccaggtgagcgttagcagaatttagcactaacttggcgtattcgacacactaggttgatttcgacagagctccctaaaggcaggacctctcttcctggagacggtctgtgtcaccccgtgtatcgttttactgcgtgcacaggcgcgtcacctttgctcgacgcttctca

SEQ ID NO: 109789 - DNA, 557 bp, Zea Mays
aatgattgctcttgcgcaatgaagaaactagaaaaattaggaaatctgttgtttgacatttttcaaatagagtgttagtataaagcacccactaagcccccaaaccttagaaaatcaccattaaataaccattaggtatccttggttgcagattggcatagaagcataatattgcccataaacatcagcaaaaataagttatagggcaaaagccacatctacacaagggttgtagtttaaagtaccctctctgccctagactatgtcatttttgtacatagatgaccacttccattttgcaccccaaatttttagaggtgcttaagtaagccaacaagaagccactgtattttttataggatttttggaaatttctaaattcgaagcgtagttcaacataaaagcccttaaggataaaaggggagaaaaaaattcttgatcctagtatgcaccatagacatgtacaaatatagatatatgaatatgctgcattcatactcatgcatttgcatcccttagattgcaatctcgcggacggagagtacgtcttggtccat

SEQ ID NO: 109790 - DNA, 791 bp, Zea Mays
catgggttaagcatcgctgtatcactcggtatcaagaaactgatggtatatggtgactcgctagtggtcataagccagataaacaaagattgggactgctcgactgactccatgggcaaatactacgcagctgtgcgaaaactggaggacaaattcgaaggattagagttccatcatgtggaaagagaccgcaaggtagcaacagacgcgttgtcaaagctgggatctagtcgggcccaggctccacctgggatcttcgtccaagaaatatcacaaccaagcatccttttaggtcaggcagaagagtgcaacaccttgagccaaccagagttggaccccaacgacttgagagagcatatcatcagatatataaaaaatgaagaagagccaaccagagttgtctgcatcgcgaggcagtcgtcccattacaccatcatagggggcctactgtatagaagaggtgtggcaggagtcctcatgaaatgcattcattcggttgctgggaagcaattgttggatgaaatccatgctgggcagtgtggaatacatgcagcgtcaaggactctggtcgagaaggctttcagatctggtttctattggccaacggcgaaaagcgatgctgccgagttagtccagaagtgtgaagcatgccaattcctatcaaagcaacaacacttgcccgcgcagcagctgcggaccattcctgtaacatggacgtttgcatgctgggggctagacatgatcggacctttcaagaaagctcagggaggctatactcatgtactagttgc

SEQ ID NO: 109791 - DNA, 902 bp, Zea Mays
tttatttgttgctatggaaggatttgatgaaacatttgaagtttcttccaaaggagagaacaagaatcgcaaagggcttcttaactggttcaaacttcgggtatacaaatcagacaccgtataatccactgcattggcaattcccagtatagtgacagttaagtacaccatgtagcatttcatctagcaactgatacccaatactcctatggctgtatatgtgataccatctaatgaagatttaattctaaggaatgtaaatttctgaagtgtgttagatatatacaagaacataaaaagtaaacagattgctagaaaaggtctcaactcatcaattattctagggctttggacaatttggaaccacagaaatagatgcgtatttgatggtctttttcctaacttggaaacagccatcagaagagcaaaggaagaaagagaaatgtgggagctggctggtgccaagagtttggccctccttactgccccaatcccggtgattggctcgtagtgttttttagtttgtttagatggatcttctcaggtttctgagttttagacctccgtaagggagtctttgtaccttgtctgtttttcagaccttcttttccttcttcttaatataacggggcgcagttcttctgtgcttttcgagaaaaaaagtaagcagattgcattcttttgtcgtgtatagaactctgcttactgacatttacatgctgaactgtaaccagaaacatgacggtggttctaatgctccaagcttaggtggtgaccaatctagcctgaggaaagcattggctgccccttggacacccgtagaaattggacttaattctcaaacagagcaagagatgtctaattctcccgagaatctatcagctaacctactgagcattgac

SEQ ID NO: 109792 - DNA, 487 bp, Zea Mays
gtaaatctctgtcaagcacggagtaaacagttaatgttattttcaaaataactgatatggtgacaacaagcatactgagagctttgatgatgcaaagagctgactgccatgtacaatttttattcagttcaggccttgctagatgtctctcttgcaaccagataacaatgtactgaatcattaatcaaatagcatccatattatttttacctgagccattctaaccaagctttcatatacagcagtatctccatgtggatgaaacttacctagtacctgaaaaattagggggaaattaacaatgaaataccaaatagaaagaatggtatcacccaaagctgcagtatcattgaacaaaattatagccaactaatacaaaatccagcttgcatacctcaccaacaactctggcacattttctgaatggcctacgagacgcaaggcccatctcatgcatggcatagctgcagacagagtttagaaatca

SEQ ID NO: 109793 - DNA, 470 bp, Zea Mays
ctaatgttatttgaatggaaaagcaatatgtgcaaattgcaaccaaaaatggtttcttggattgaagagaggaaaaggagattgcacagaacaaaacagagcaataagggtgagagtgggaactgaactctactgctagcacacataattcacatagctcagctcggaacaaaaaaacaatcaaatgcagtagtagtagatcagtaagttgtaggatgtggagcagacacggatgagtccgacagtgtacaacaatggaggggcgcacgaagaaagctaatagtaaaaaaagatatctctaatctgagaaagcgcgttggaaaaaatagttagtacctgtgagaactaagaagcgacaatgtgaaagctgaggtagcacgaagagggaggtagtgaagcgcggagcctagccgcctgtgacagtgtcgcaacaaagatgacgcgccatctaggctttattttctttttcc

SEQ ID NO: 109794 - DNA, 727 bp, Zea Mays
acataatggaaaagtccacaaatagtgcgagaactcatcgagaatgagtaaataatacttatagctagaaatgttgattataggcgatgtccatacatcatagagtatcagataaaaaatgcctgctgccctagaagaggaggtggggaatgggagcctaacatggtgacctaaccgacaagcatgacataggtgctcaaaagatcccctacaaccagaaacagaggtactactggagagcttggacatcacgtcacgcccagggtggtcgagatgatgatgccaagtcacaaaggaggcggccgctgcaagaacaggcggggcaaaggtcgatgtaggggaagcaggcaggcgaagcgtgtagaggggcccgaggctgtcacaccaagcgagaaggttcctggtggcaagatccttcacagacagacaaaacgggtcaaactccatagaacaagagttgtcagtagtgaactgatggacggaaagaagattttgaatgatgttgggggcgacaaggacgttggttaaacagaatggatcgggaaggaccgcatcacctactgacgtgacgggtagggcagattcgtttccaacaacgatgaaagaaggaagggaggggtgggggagtggtggaagatagatatacctgcgtcctgggtggtgtggtaggaggcgccagagtcagccacccagtcagagatcgaggtgggcggggccaatgtcatcg

SEQ ID NO: 109795 - DNA, 1199 bp, Zea Mays
ggatttttaaagacttacctagaaatattctttcattcttacctcatcactttctggtagtcccttatcttgtgaaggcagggtaacagagtgcaatatataggaagttagggatcaacgaaagttgattccataattattagaatatggatgcatcatgttaagaatatactaataaatcttcccctcttatggagacatggcgcgtacaaggaaaacaacacgcaaatctactggaccttttggcgtgccacgacatcagctagcccccagacataaagggagtagtagtggcagtaatgacccaattggagacctgaagctagggtggaacaacttcggtcagagctacgtcacaggaatagggcatgggagcaggacatccagcgtatagctgaattgtcagttgacgtcagccgcttgcaatatgagatttcagaacgggattcggccattgattgagccgtcaactcgcgttcgatcgcttgggaccacgaagcaaaagctcaagctcgtgtggcagagcttagtgcggccctcgatagcctgcaagtgtactgtaatactttacatgaagaagtacatgtactgtatgctcgactgcacctggacatgccttcagatgttgctatagtgggagctagaccatcgggtacagtaaatgaaggaccttatgtgggagttggacctttttaggccccctccttccatgaaccttgctgacgaacggtctcctgcagcaggaaatgaagcaacaaaggatgacaaagactagaataatatagtttagatattatacttatgtagaattagtaatgaagtcaagttgtacgctggagtctgtataattattacattttggtaatgtaatatgatggtgtatgctggcatgttatattttttccaaatgtttctttgcctcagatgccatcacggactcgcgcacatgatggtgcggggacttcccgtgatagggaagatactcctaaaccgccactagtaccactgactttagccgaggctatcgctgccctggtcaatgccaccactgataatacgcgcttcttgcgcgaaatggcgggcaatcagttccaacagcacggtgggagagctcctcttcaaggaccgtgtgagactacatatctagaattttctgagactcgacccccgctcttcatcaaagcagaagaacctttaga

SEQ ID NO: 109796 - DNA, 436 bp, Zea Mays
aggcaaaggggcacagagagctcgaaggtggaagggcaccgtgagggggagagaagtaagacatggcagctactcgaagggtgaacccctttttaaaggcagatttcctcgctcgcgccccaaagcatcacgggcaaggtctcccccgatgcgcaccacggttcccatcctatgacatgggggccaggcctcacatgtcatacaagctggcccgaagcgcgaagaaggcgaatcgtcacacaaggagcgtgcaaccgccctgcggttatacgcccttccatcttcgccacaaccagcggtcaagaaggcgaaccgccgcacaaggagcatgcaaccgccccacggttgtgtgccccctcggcttcgaccagtggtccaacctctggcatgggggcccaggcccacatgtcatgcacccagcgcgctggtttctagg

SEQ ID NO: 109797 - DNA, 420 bp, Zea Mays
gcgggatcgggtgataggcaagggcagtagctagctgcatgtgcgctggggtccacaagacagtaggtgagaggcgtgggcgttgggtgtggggctcacagagcacggcaccgaggtgggacgggaaaaccatttgaaacgtgttatttggaatgtgctatttatctatcaacaaatttgttccaaaaaatccatcaatacgtgctacggcctacgactacgattatggataattaatataaatataagttttggggtaagaaaaagataagaggagagcgatctataggccccatatatactttttgcattcgatgatttaaaaactgataattttttttgaagaaatatgttgatacataaatagcattatccttattattttcaatattcttcaagttcaaggtgatactagtcatg

SEQ ID NO: 109798 - DNA, 351 bp, Zea Mays
aagtgggagaggagggaaggcttgtgtatgctcaacaagtgatccaaatggccaagagaggcacccaagccctgaacacttcatatttatgccgccttctcacatactagccattaataggcatttccacgaattctgcatattcgcataaagtccatagttcaaatcctggacggttcgcacctgaaaatcaatagctagttttgcattaaatgcactatcaaagctatcagaaaagtgactcgcggatgatccaccattcaaggcccagacggttcacagtgcacaaactgagacacacaataactatgtagactggcttttattcaaaagttagtaccactgatggtc

SEQ ID NO: 109799 - DNA, 1032 bp, Zea Mays
gaataactgactccagaaaatacttgtaaatattttatcccgatcactgacaatagacctcggaagaccatgcaagcggaccacctgatccaaaacaacttgggccacctgagcagcagtgaaagggtgtttcagagctataaaatgggcgtacttcgagaaacgatccaccaccaccaagattgtgtcatagccactggacttgggtagtttctctatgaaatccattgcaatatcttgccaagcaccttgaggaaccggtagtggttgcaataaaccagccggatggactcgctctcctttggccttttgacaaatttgacactgatggacaaaatcctccacatcagtcttcatacctttccaaacaaacaacttcttcagtagctgataagtggcgtgcactcctgagtgaccacccgtcgcactatcatgcaatgctgccaccagcttcgtcctgagagcagaattttggccaacccaaatcaaactgcccttcctgatgacgccttgggagagagagtagccctgttcatctgggctatggacacacaaccgagccaaaagtgactgcgcagccgggtcagtcacatatgaattcataacttcttggacccagagaggttgaacctcactgactgctgtcaatgtcatcacacagcccacacgagacagcgcatcagctactttgttctctttaccctgcttgtaaacgactttgaactgcagccccataagctttgccatggctttatgttgcaactccgagtgaagctcctgactacccaaaaaactgagagccttgtgatcagttcggatttcaaactcgctgcgctgcaaataatgacgccaacgatccacagccataatcagggcaataaactccttctcataaatcgacagcttctgattagtaacgcccaatgccttactcaagaaagctataggccgctcctgctgcatcaacactgctcctaccccatcatcacaggcgtcagtctcaacagcaaaaggtatgttaaagtcaggtaa

SEQ ID NO: 109800 - DNA, 704 bp, Zea Mays
cacaatagataatgacttttggtagcattgacaatacaaccacaaatatgttgaggctacaaggaactttgacaggggtgcgaggcatgtctaaagcattcaaaatacacgttagtgtggtgataaacatttggcaacccaggggtcatgccaatcttcaaacagaacctagcaaagccaacaaagcgaccttcgagctagtccattgccatgagtggtagaggaggttgtgccttcagcggaaggaattcacaaagtggtcaatcgtgaagactttattgtgtattctgtggagaagacaatggccacacaaccaagtcttgcagtattaatattcagaagcaaaaagagctagaagctacaaagaaaggcccacaaccaaaatatgtgtgccatgcatcatcgcactgcccaccaacatatgtgccacaacacatccaatattagggttttgatgtttatcctttggattcaagtccatctatgcatcgacattcaaatcatcagaaggcttaacatcctcatctcccaggcccaacccaacacgactaagtacccttcaatcaaccacgacatccaatctaagagcccaagctgatagaaagaaagtctcaaaagttcgcacagtcaacaacatggtaccactagccaaacatacgttcccaataatgggagggtcaagttttgaaccagacaataagaaa

SEQ ID NO: 109801 - DNA, 450 bp, Zea Mays
gaataaattcaacacgacttgagggaccccaatggcacgatccttaattgacacaggcgggatcactatggcctacattaccccctaagactccacccagtctcaaattaaccttcatactatcatggatattacccaatgactttatctaaaccaagcataaggtaaccacttatatctcgcaggtgatagtaaatcacccgacttctactgtctaagcaggcctaagcattttgagcgtacttaactaaccaggtagcaaggataggataaacaaaggtaatcaaggataaatgcagcaattgtctccaaacaactacaacctaatgcaacaaacatagggaggaggtaaataaattaattattgcaaactgtaggaatcagatgctagggcttgtctttatcgaaggaactggggcggtgctcaacctcctcagcgagaacctcctg

SEQ ID NO: 109802 - DNA, 309 bp, Zea Mays
gttggctcatatattttcttgcttaataaaaaacgaacgctcattcaggatgttgcagtgttccatgccacacccctccttttgtgctttgctcacttcatgttcgcaacaatgattaatagcctaggtaactatccgtattttataaatcttgatgctaacgttagtttattggtttgcttcttcacaaaaagaattattagtttgattgctgcttaaatacatgaacattattgaggagtaacttcagatttcatctgtattaaaatgatccttggttagaaatattggatcatggctctatactct

SEQ ID NO: 109803 - DNA, 498 bp, Zea Mays
gcaacaagtaccactgcctcctccaccaccaccagttccaccccgtgataagcatagggagttcatgagtcataagccacctacattcgctagctcacctgatctactggacgcggatgattggctgaagtccgttgagaagatgttgaatattgcacaatgcactgaccgggagaaggttttgtatgcttctggacgtctgacgggtcctgctgctgactggtgggattcatatactgctgcccacgatgctgctgatactatcacttgggcagaattcagtacacagttccagaattatcatataccagctggattgatgaagattaagaagaaggaatttctgtcgctgaagcaaggaagtatgtcagtcagtgagtactgcgacaagtttatccagttatccagatatgcccctgatgaagttgctgaagatgagaggaagcaggagcattttattgaaggacttaatggacctttgcagtatgctctagtggc

SEQ ID NO: 109804 - DNA, 456 bp, Zea Mays
gcttccatcgttcaccaagcactctgtaagcaacacaaaaacaaagatggtattagattaaacatccctcccttccctaccatcaagtgacactcatctcagtggctgatgaatacagaatacaaactgaaattgaatacaatacacaaactgaaattggtaatgttgaatacataatgcaaactgaaagtgacatggatacactagctgacctacttttgcatacagggtgtgctgaaactgaaattggtaatttatggtgaattatacaggagtgttgcatacaactggggttatatggtctaccctgctacaacatttaagcatgcatttgactacaagccagcaaatatatacatagagctgcatataacagtaacatgaaggggaacaatttagcacaataaagcctacctaaggagcatgatcctagcagcagctcttcactaatttgta

SEQ ID NO: 109805 - DNA, 523 bp, Zea Mays
gtcagccatggccaacagggtcaccgtcgcaagcgtcatcgccgcggtgggcatcgtcgccgtgatcggcaccatggccacggtgaccagcgccgacgacaacgatggcaacatgctctccagcgtgaaggtctccacggtgtgcgccttcacgcggtacccggagaagtgcgagcagagcctcaagcatgtcgtgagcgacacctccagcccggaggacgtcttccgggacgcgctcaacgtggcgctggacgaggtctccaccgccttccagcggtccgcgcacattggcaaggacgcccaggacaaactcagcaggaacgccatggacgtgtgcaagaagctcctggacgacgccaccgaggacctcagggccctggcacgggtcaagcccgcggacgtggtgcgccacgtcaaggacctccgggtctgggtctccggtatcatgacctacgtctacacctgcgccgacgggttcgagaagcccgagctcaaggaggccatggacaaggtgctgcagaac

SEQ ID NO: 109806 - DNA, 582 bp, Zea Mays
ctggtttaggtcggagccctagtcagtgtagtgctgatcgtggtattgctcagagtgtgttacagtttggtgcttgtgtgttgttgtgttttgaagatgggggttttcttacccttttatagcctaaggttagactttacaatgagaacttgtattatgtcggggttgagttcgacctcctgctttcgtgcggcgtagccctacggtgtcgtctgctaagtcgtccatcgccgtacccctggtatggcgtcgtgtcttctccgttcgtcatacgggtttctgtagctattctgatactaacgtagtggtgcttggtgggtcccactgagtcggctcatggtgagttttagggacgccttcagtacaacttcatattccgtcatccccaatgtgtcaccttccatcatgcgtaggcatacgcatggtacggcatattgccctgtcccttctggcatatgggtcactgtagagatcccgatgccgaggtccccacaactagggttgactggtcccaccagtcagcgaggatactctccagaacgcgatttggcgtcgtgcttgacagaggcccttcaatactgc

SEQ ID NO: 109807 - DNA, 561 bp, Zea Mays
cgcgcagggttaagggttaatgggccaacagtgaggaaaacggcccaagcgcaagtctgctcttttttttcttttcagttttctattttttttcttttgaattctatttgaaatttataatttcacacgagattcaaatttaggatttgagttcaaatgcacatacaaaaattcagcatgaaatgcaattgtatttttatattaaatactttatttattcgagaatgtctccaatatgcaacatatacacacattgtttgaagtcaaattaaaagtatattcaaaagttcatattcatctatttttataggaaagattttctaatgcacaatcttttattagtagattgtttacctaattctacatagtttactacggcagtcattcatattggaccttttatttaaccacttgtttcaaaacataactattttcacttcagaatatttttttcctaaattacccaaaatgatattttggggtgttacaaatcctacccctcttaacagaaatctcgtcctcgagatttgtaaggaaagagatgtaaaaagctttatttat

SEQ ID NO: 109808 - DNA, 881 bp, Zea Mays
ccctaatgtgctgctgcagagttctgcttcccaagactctgatcattgcccattaattctgggtcttcgagataataaatcagggagtcgacgttttcattttgaggctttttggcctaaattggagggatttcatgatattgtacgcgatgcctgggactcagttggaacagcgaactgtcctttcctcactcttcactataaactgaagaagacagccaggagattgcaagcttggagtgataggcaggttggtcacattagatctcaactagctttggcaaaagaaatttcacataagctggaaattgctcaagatgaaagggtgttgactccggatgaattttggctgaaaggcaagcttaaaaaacattctttgcttttatcctccctgaagcgtactatggctaggatgagatcaaggattttgtggctcaaggatggtgatgccaacacaaaattcttccacctgcatgccaaacaccgtaagagaaagaattttattgctacgttggttgatggggatgatatccttactagtcatagggacaaggctgcagcagtggatggtttcttttcaaatttaattggttcatgctgcgagagagagcaagcagtggatttggaggcccttggcctttctcagcatgatttggctgcgcttgaggctccctgttcggaaagggaaatatgggaaaccattaagcttttaccttccgataaagctccggggccggatggatttactggctgtttttataagtcctgctggaccgttatcaaatctgatatcatggctgcaattcaagctatctggaataataactttgttaattttgacaagttgaattctgcttacattaccttgatcccaaaaaaag

SEQ ID NO: 109809 - DNA, 549 bp, Zea Mays
gtcaagcaagggctcaccaatggcggacgtctgcccctggccgcaccaatccgcctgcacaccctacaatgtcttcactggaggtgagtcccttctcctgtgaggatattgtctctactttgtgatgggccgctctggtacgcaaaaccgatgatggctcgtcgttgccggtggcacaaccgccgtcaacttgtgcaccgccgtggaactcactcctggccgctcagatgatcgggggaagaagagagagttgcggtggctgtgaacctttgatctgtgttcgaacgacccggactagatcacataggatgggggttgtggtcgttggatccacagtggacgcacacgattagatctgggatccaacggtccattgtgcgtactggttcacttaaaaaccctatgtaatctggaccgctcagatcagatctagcggccgagatccaccgataccctttcagccgtgttctttttccaaaggagtccctcgggttaatacaaatcaacccgcagtccaccctgaagaaaatctatgtcttggggattttt

SEQ ID NO: 109810 - DNA, 721 bp, Zea Mays
tttgatgtagggtattatctctctagagaacctaaactagtataaatctattgtattcttgcacatttactttttgttctacatcacactaaaacctccatatacaaatctactatcaagaaatcctcgacaaggttttaccaaccatcatgcaagatgtgaatggctaacacactcaccccacatggatgccaatgagtatatcattaccctcaacctagaaaatacaatttaggacctcgctagcattacactaatacaggtccccttccacaaacacgtaccttttagccgggcaagagatacgctctgcaataatattatcactgggtaggaattgtttttcaagtaccccccaaatcttatagacccatgtgtcttgttctacctaaacatttctagctagatttgaggccttagggacctgggtcatcattgttggtggcagtccatttgaatgcaacattgtcgaggacacatgtgctcgcttgtccatggggtccccatcactcaaagtagcaagttaagtggtagatttaggaagccatagcacgaaggtccccgcatacactagtgcctgagttgaagcaagtgtgtagagatcatctgctatcgtgttttctgcccaagtagtatacctataatgcacaacattaaatgggagctctaactacttgattttgacggtatatacctttagatgcgttattatacgccaaaa

SEQ ID NO: 109811 - DNA, 428 bp, Zea Mays
gatatcttgaaatccctttcaaggatagtatcaagggatggcgcttggagtggtttattgttgagaaccacggaagttctctccccccacggtcggggagacagccggacgttcgcactccgagttggaccgagtcccccacggatcaggaggtggatgaggcaagggctttgctagctgaagttggactgctgaaggagaggggtctgactgcagaggctatggttgctgattttgtcttcaagaacattcagccgttgaaggacatggcatacccggcttatctgtaccaaggtctagctgactcaactcgggttaccaacagaagaattcccactgtagatttggtgaaccgacttgagatgattcttagaggcaaggtatcaaatgttggtgccccagtggcatactcagcctagaacctgccc

SEQ ID NO: 109812 - DNA, 504 bp, Zea Mays
ctcacatctactgatgttcttaagtgtcagccatcgcagttggtcacccaacttctccagtctcttagttaatacccctcgcttgtcctttcccactcttggtctatcagcatgaacacacatgacgttcacctttgctatcgaccactacctccggacaccacacacatgcacataataagccaagagacatgttgcaaaaactcatgcctcggttactctgcatgaattaacccaagatgttactccattgacaatcacttatcacaaacctaaatcataaaggcatatatcaatcttgtgtttgcacacaggaagttaagcacatttacctcaacaaccaatccgtataagacgactaaattgattcattgtccatttttcatttttttcgttccttcacttcagtatatatagaactagagtattccagtgacactgtccattgcactttgagcttgtttctttgtgccttctcatctaaggttcttgtattgaagtgtt

SEQ ID NO: 109813 - DNA, 1199 bp, Zea Mays
aaagattgtagacgtcagaccctttgtgaagatgtctgcatactgagaggtagtcggcgcatgaagaacacgaacagcccctgtggcgaccttgtcacgaacaaagtgcaaatcgatctcgatgtgcttagtgcgttgatgttgcactgggtccgtcgagagataaatagcactaatgttgtcacaatagaccagagtagcacgacgtattgggtggcgtagttcatccaacagctggcgtaaccaagtccgtaacaggagagcggtacaactgaaggccatgatccaaggtgccacgaatataccgaagaatgcgtttgaccaaggcgagatgaggctcacgagggtcatgcatgaagagacacacctgctgcacagcatatgcaatatctggacgagtgaaagtcaagtactacagcgcaccggccaggccacgataatgagtagcatcaacaacaggagcaccatcagaagagagcttagcgcatgtatcaaccggagtactgcatgacttgcagtcagacatccctgcgcgctcaagaatgtcctgcatatattgtctctgtgacaaaaataaacctccgttgtgctgggtgacagatacacctagaaaatgatggagattgcccagatccttcatagagaactccgttgtgagagcatcaataatacgacgaagtagcagtgtagaagaagcagtcaacacaatgtcatccacatagagcagaaggtatgttgtgtccgtgccgtgtctgtatataaacaaagatgtatctgaacgagcaccaacaaaaccaagagtccaaatgtgagaggcaaaccgactgtaccaggcacatggagcttgcttcaagccatacaatgacttgttcaggcgacagacatgatccggaagggcagaatcaacaaattcggagggttgctcacaatagaccgtctcagtcagcgtaccatgcaagaaggcatttttcacatcaagttgatgaataggccaattatgagataatccaactgatagaacagtgcgaatggtagctggcttcaccacatgactgaatgtttcaccaaaatcaaccccaggctgctgagtaaaaccacgaagtacccaacgagctttataacggtcaagcgagccatctgaatgaaatttggggcgataaacccatttacctgtcaccacgttgacacctctagggcgc

SEQ ID NO: 109814 - DNA, 511 bp, Zea Mays
ctcagtcacttccatgggagcaagacaatccaaactagcttcctgaccctcaagaccgcgctccaaggtcgatgaggcgcgggacgctgcccgagatgaccccaacccggcgtcgagtacatcaacacaaacatccatcgcgccaccatctgccagctctgataacagatcttctggaaccatgtcttcaagagtttgatcaaagttcgccagagataattcttgtagaccaatgagggcagacaaagcaggagaaggaacaccactactttccccactggctatgtagcgccgactgttcttctgaatcagagggatttcatcttcttcttcctcctcatcttcattagcaacacggacagtacacccattggggtcagcgtcagacaggtcacacccattggaatcagcttcagtaaattcaggcacgggcacttcctcagcagcaggagcagaaggaccagcgtcccgatccaagctagacactcggcgaagacgtctcttcttcttt

SEQ ID NO: 109815 - DNA, 818 bp, Zea Mays
caggagtcctctatttctgcttcaaggactgcaatctcacaatcaatataatcacatttattgatgttctttatttccttttgcaccataaagaactgttcgcgggccttctgtagttcacaccgaagcttcatccaatcctcatcggatttcagcggcgcggttgccttgccatagttcttgggtttatgcattggtgcagtggaagtatccaagttatcaatagcaaacaggaccttttcttcctcctttctttgagctccatacgcgccaagtttcactttaaggccatcaattttgcttctcaactcagtttcagattcacgtgctcttcttcttgcggcagatagttcatttttgcgagtttggagatgattgaaccgttctttcttctgattcattgattcaaagctggcatccaacctggactctgcaggacttttggtcttcaaaaccatgttccaacatgatgctgcaggcaagaaatacttgccttcaaaagcaattatcttctcctgtgattctgacagcacagacttaaggacagtgatgtcttcctgaagacgctgtgcgcctagatactgaagctcaattcttgaataaagttctgtggccttaccactagccatttctagtagcttaaaatattttactgcatcctgagtagacacaaccttatcttggacaagctccagcttactccgaacaatctgcagcacatctttcaaagctacaattatggagtcatgaacatgtttcacttcaggattctcagctgcttcactcatttcagcatctttctcgcccaataaaatatc

SEQ ID NO: 109816 - DNA, 519 bp, Zea Mays
attttctcatgaacgtgtttcataccctcatcacttctttgtgcataattatcctttgcagaagaatcgactccagcttcaagtgatttaaggttccatgttgaattatccccaggtttaacttctccatttcatggcataatgtaatgtcagaagtcttcatcgtaagacaatgacaggaagccttgcgacttagtgcatctgccactacattggccttgcctgggtgatagtgaatttccaattcgtagtccttaatcagttcaagccatctcctctgcctcatgtttagttctgattgggtaaaaatgtacttcaagcttttatgatatgtatagatatgatagatattccccagcagataatgacgccatattttcagggcatgaaccacaacagctaattctaggtcatgagttggataatgttcctcatgccggcgcaactgtcttgaggcatacgctataactcggccctcttgcatcaagacacaacctaaaccactgcctgatgcgtcac

SEQ ID NO: 109817 - DNA, 578 bp, Zea Mays
gttacaatgtgtcgagtttaacaccagtccatttgatattgcatctgaaaagtaaactattttggagtaatctgcataagaacatttctgaaattatctagtgccggtatgctccaatgggcaactatgagtcccaatgacccatcacccatagtaggataaattctaccgaaagaatctggtttgagggtacgttacatcacattgactcgcttggccagcgaccagggttccaaatgatgtcatcagtgtgctgttttgaattccacgattgggatcttgaagggcaaaaggacagatccagtgccgagaggttgcttcgaaccacgagctggtgattcagtaagacagctctcaccactgattctgatcttgaaggaatctccaaaaaggaatagattgagctccggcaaatcagcactgtgtaattcctccaaaggatttcaaattcagacattcatcgcttctaccatatactagtgttatatccatgtggttgtgaataatctcaaagaaacaatctgaattccttttgatagccatgtcaaaggatgttcccatttaacttgcctcttcta

SEQ ID NO: 109818 - DNA, 340 bp, Zea Mays
tactcaaagccaacattcagctatattcagacaaaagtgacagccaccattcaactaacattcaagcaaaatacagagccaacattcagttaatattcactgcaaatggatctatacaggtggctttcgcttgcaatttcgcaacacataaaattctcatattcttcatttgtaggttgcactgtactaggtaaaatatcttgaaattgctaaaagaaaatatcttgaaatctagctagagagcagacaattgaaagagctcgacatggactgcagaaaacaaaattttggaccacaaattcacttgggatttttggaccacaaattcacttgggaattt

SEQ ID NO: 109819 - DNA, 278 bp, Zea Mays
catgatcaccctccttgaactctagcagtcttctccgggtatcaacatagcttttctgcctggattgtgcagttctcaaattctcccttatttgatggacttgttcctctgcctcttgtataatctctggtccaaagaattgcctttcaccagtttgatcccaatacagtgaagtcttgcacttcctgtcatacaaagcctcaaacggtgacattttcaaagtggcctggtagctattattgtaagagaactccgcacacggtaaactcttatcccaa

SEQ ID NO: 109820 - DNA, 524 bp, Zea Mays
ccaaagtcaagcaccatgttaatgaaaatggattccatcattcaaacggaattctgaaactgtgttcatcaagcatcagaatgctgcaatgttgtttccctttgacaactatataaaagcaactactacacacccccaggaaaatataaatcaccttgccacccattggatacaaagttttagccttttagagcacgagcacagtaagcaccaacgggttccaacctatgacaaccctctgcaggcactcaatccatgcatattgtaccataatgtactaagctaaattcagagcatgattaccaccaatcactaaggggccgtttaagagaccttcaacttcatcttctacgaagagaatcactaacacgtaaaatgccaaccgatttgggtggggatacagagataatcacttctccatttacaataggagctagaagtaaaaaaaaaaaaaaaaaactgttgcactctgctccctgttacgttctggtggggatgatcagagaatcaattctcatcagctc

SEQ ID NO: 109821 - DNA, 375 bp, Zea Mays
tcggcccactacaccctcatagggggcgcactgtacagaaggggtgcgactggagtcctcatgaagtgcatttcctcaactactgggaagcagctactggatgaaatccacgccggacagtgcggagtacacgcaacatccagaactctggttgggaaagttttcagatctggtttctattggccaacgacgaagagtgatgccgccgagttagtccggaggtgtgaagcttgccaattcttgtcaaagcaacaacacttacctgcacagcagctgcagatcatccctataacatggtcatttgcatgctgggggctggacatgatcggacccttcaagaaagctcagggaggttatacccacgtgctggttgcc

SEQ ID NO: 109822 - DNA, 273 bp, Zea Mays
aagattttgaagttgtaaaggcaaagcaagaaataagtgaatggacaagttcaagattgcaaaagaatgtggaggagcttcgtgaatccaaggagagatgttatgaaaaatccttggattgccaaaagaagctgaaagacagttttgcaaaggtgggtgcatactcatcggagaaaaaatttattcgaggcgaccccgaaggagtcattcaatggatcagcgaagaggttgaagcttttgaagaaatacttagcgaccatggggatttttgtg

SEQ ID NO: 109823 - DNA, 372 bp, Zea Mays
cgagcggcgagaaatcgggttccggtgaacctgtaccggccgaataactcaactacaccgaatttaacccctaataaccatttcccctcgatcaattgcacgatctgagctctaaatcatcctgtccacggagacagcgtgaactacagatgaacagaagcgttctcggagatctagcgcggtctagcttaattgaacgggacgaagagcatcaggaaacataagggcactgaaacaggagagcagagagcatgaacggactcggtacgagctagccacagcgatgttacttcttgcggtgtttcggaccgatttgggggaaatcccaaattggggctctctggtgaatgatttgggacacgagtgggtgtg

SEQ ID NO: 109824 - DNA, 385 bp, Zea Mays
agaaaatcgtcgttgatcgctccattttgtggtcgggcttcatcacatcttcatcaccggtgagtagcctagacgtgttgcacctgttcgttcgagtgttggagcactggattggccggtgacttgctccggcgagcatcgccgccacagccatgtcctgctgccatatttgagtccggtggaaggggggaaacaggtccgttcggtccgcaactgacggataggatttgatctagggttgtccgttcgtggggcagatcgggaccgtcggttggtagatggacgaatgagattagaaactagaatactctttggatagttagatcattgtcgtcaatgatacgatagaaggtgcagatgaaatcatgtcatggggggcatctcg

SEQ ID NO: 109825 - DNA, 591 bp, Zea Mays
cggggagcaacaaggtgtaccatgatctcagatctctatattggtggactagaatgaaaagggaaattgccaagtacatatccgagtgtgacacttgccagagaattaaggctagtcacttgaaagcagcaggccctttgcaaccccttcccataccatcttggaaatgggaggacatttgcatggacttcatagtgggattacccaatacctccagacaccatgattctatttgggttatcgtggacagattgaccaagactgctcatttcttgccagtgcacaccacccacaagacagagaagtacgctgaaatttacgttgatcagatagtaagactgcatggtattccaaagaccattatatctgacagaggagcactgtttgtggcatgcttttgggagaagctgcaagaatcacttgggacccaagtaatccgaagctcagcttatcacccacaaacagatggccagacagaaagggaaaatcagattttggaagacatgttgcgagcatgtgcactacattatggaaaggattgggacaagtgtctgtctttggcagagttttcttacaataatagctatcagt

SEQ ID NO: 109826 - DNA, 430 bp, Zea Mays
atcttggtctgtagaatgagtaccggcattggtaggtaaaatacgtggctatgtgtgtaatagagaatgtgcatggcgttcctcggttgcctatgaggtgtttgtctcgtttctaatgatgaatgtgttcctgcaataaaattttgcatacctcgttgttgttacctcctaattcttatgattgcgtgtggtggttggtgttgtgtattatctcatatgtgcacgctctcggttgatttatttaaaataagactactagtatagtactcgcacgttgcgacagcacacacatattaaactgataaaaacaaatattacattttgttttagctaaaatgccgaaaaaagtatgagttgaaaagtagccagattcaattttttataactcgctcggtcgatcgtcctactttagttagcaaggtggtattat

SEQ ID NO: 109827 - DNA, 592 bp, Zea Mays
cgagcactactcccggagcttgctgagcctcctgagcatcgacgtgattaactcgtgcccttccttgatactgggtcttgttctgctagctgatggaggagggcgccttgggggcggatgcgaaggtattcttggggccattcaccgagttggagtaggcaggtcctgatggcttcagctggggacagttgttcttgaagtgactgggatcttcgcagtgccaacatgcatttgccgggggttggttgcttgcaactgagagggcatgaaaggagctctgactctgctgactgaaccgtgacggggtgggtctagctggtctactgaagcttggtcccttgggtggaaatccaaaggatcgagttttctggtgccgatcttgctgctgagcccggaggacttggaatttcctcttgagatggcctttttcttcctcctttgccctttccacttgcatggctttgttggagaggtgagagaaactgaggaagtcttggttggccaggatggtcttgagttctggcctgagtcccttcagaaagcgggccatcttcatgacttcggtactgacatcatctggcgcgtagcaggc

SEQ ID NO: 109828 - DNA, 386 bp, Zea Mays
gttatgttattttaatttcggataaaatgacatgttttattttaaatagagtgaataagaaatgttgatgtgatgttgaagtgattgtaggcttacgataagtactgtacgttagagtgttgtagtagatacatatcgacaatagtaaaatcgtacgtaggtgatgtggtgatagatatagaccatgtgcattggaaccagccttagccgtgaccaataacaatagctacgtgacagcgagaaattcttcaaaagctcaaatgtgcatgggtgtctaaggtagtgtttggttcaccgaaatgtaatgtaaatagattatgcagggaaatggagactgacatgattgttgtttggttaagctctctctaagactatctcgagcatac

SEQ ID NO: 109829 - DNA, 433 bp, Zea Mays
gtgaattgattacggcgtggagcaatcgcggtgaatggcgatctccacggcgaggacgtccagccacgtcgcagcgcaagtgggtacggcgactgggcacaacagtgctccgacttcatctgtatgcaagatcttttcaccggcgaccgttatccgcatgccagagcgcacgaatcgcagcactggcaaggatcgcgacgccaattcaccggcggtgagatacactgaacctgatcttgttcagtcactgtaccatcgaaatcattcatcagagcgcctgacagagcaacttgcaatgctttgttctcaaatttttatgtagtaactcaataatccgtctgtggcaaagttgatcttctacaatccagcttgaattttgttatagtaaccagaaccaaatactcactggatcctactcaaaattgctcccaaa

SEQ ID NO: 109830 - DNA, 422 bp, Zea Mays
ctgacacctgcaaagaatgactcagttttcctttgtagatgaagcctctgcagattgtgcactaatctgcttctacttcctaatgtaatagtccctcgcccacggaagcatcttgtcaacgtccgcactcatgaacctttcatctctgtcttccagttaattactcatcatcatttcttggagttgaatctctctcttttgtagctcagtctgtgtctcaagcagttgcagttgcctttcactcttggctacctctattgcctctttcatctctagaatttcaagttgtctttcactctaagctttctcagcctggtcctgcctctcttcttaagcatgatggtccatagacattttctacaaaactttgtagcatgcaaacatggcttgtggctcttctcttttgttgaggacaaatcaac

SEQ ID NO: 109831 - DNA, 309 bp, Zea Mays
tacaaagttgaatttcagttcagcctaccatccccaaactgatgggcagacagagaggacaaatcaagtactggaggatatgttaagagcttgtgctcttaaacatggtggtagttgggataagagcttaccatatgtggagttctcttataataatagttaccaggccagtctgaagatgtcaccatttgaggctttatatggcaggaagtgcaggactcctctatattgggatcagactagagaaagacagttctttggacctgaacttatacaagaggcagaagaacaagtgcaaatgataagaga

SEQ ID NO: 109832 - DNA, 588 bp, Zea Mays
ccgctcttaaattgggataggaaattggagatttcagataacgggcatagggtaaacaccaaggtaagatcgagagatgagaaaggtggaggcaataagaaacaaaagcacaacaaaggacgggattacaaattcgcgagccaaagaagaggatacgaccaagagaaagaaggtatgagatggaagaggggcaattttaaagggcaggtacgaaacaaacatcaatataggatatagaggtgtcaagggtacatatgataataattaaaagaataacaaagggtatagttaaggcaagactcgtgaagtgacaaagtggagaaaacaatcaagggtaagataggtaaggttccaacagaagggttgatgtaaagattccttaccgagggagataaaatgatcgttcatggattgttaagaaacaagggtagtcaagggcatgttgaatgaaatatcttaaacagacattgggttataaaggtaagcatagaaagataagagtatgaaagatttcaaggagatgagcataccaataccaagagacaagaaattgccaaaagatagcgacttaacaacagaggaggaaag

SEQ ID NO: 109833 - DNA, 761 bp, Zea Mays
aagtgttagtcggtataactctatagcgactgatagtacgttgctataacggtttataccgactgtaagtaagtcgttatagctaggttgtggtatagtgttattccctgttgtccattatccaaagtatggtttctaggccaaatttaaggattactgtttatattacagaaaatgacataggaaagaaacgagtaaaaaagaaggaaacaaattctttcagctacttgctgttcgatttacttccacatctaggatttattgttctttttttccacagcaccccccgggcatgtctcactggaacttttacaaatttgggtttagggtacataaaaggtatgtttttttacaccatcaagttgttgattctttgtcactttaaattgctattgatgtgtaaaaagagttgattatatgttctgcataaattgctagaatcctttgtggctacaaaagaattgaatcaattgattatatgttcgttgatgaggtaaactaaaattagtttaagctgcttccattcgcactggttgtctgctacatggcgcgtagtgattttacagttatttttcttgaactaagtttagatgctccgcgtcttatatgtactgtttgtttctgctcttttatcgaagcacgtggagtgatacctctgcacctcagtggctttatcggcgaggcttggttgctgaggtaattagcattagttttgatctactttccttcgtgctggttgttcactaatagactaatgtttg

SEQ ID NO: 109834 - DNA, 512 bp, Zea Mays
cttgtctacccttccatagaaaagctttcctcaacttgtcgatagccttgatgaaccattttggtaccttcatgttaatgagcgcatagataggaatggaagacataacaaaccggacccaagtagttctccctgccatgttcataagggctgctttccagcctggcagcttatttccaatcttctctatccatggcagaagcgctgatctgggaagctttctgttggagataggcagtctcaaatacgtacatggaaaatcagctttaatacaagatagagccaactctgcaacctctgcctgctcgcgatcacattgaataggaatgacacaacttttctgcaggttagtgtgcaagcccgaggcttccccaaatttactgagaatagctctcgacaattgtagatcaccatcagatggcttgagaaagaggactacatcatccgcataaagagagagccgctgaatagaacgcccatcagagaggggttgaagaaggcctagatcacta

SEQ ID NO: 109835 - DNA, 378 bp, Zea Mays
cacctttttcgtgggcgagccagaacgtcggtggaaacaaccctgatatggggactccccctccaaccgagcccaaagaatagaggtctcaagaggaggtccgaacactcctcaagcatgtgatgtccaataggtggagagctccccatgatagagagagcccatcacctgtcgttgaatgaccgcatcggggaattgttgggtgctatgtcacgaccgacgtcaagcaccaacgacataaccattagggtccccatgtagggtcgatccaaggcatgatacgacatgcgaaatacctagacgtgaggtgaggtgctcatggagataaagaagtcgagggatcgtgtggataccaccctatagacacgcagactagag

SEQ ID NO: 109836 - DNA, 1169 bp, Zea Mays
gttgccattttttcgaagatcacgtctataagaagggggaacaaagcgagctcgcatctcctcttttaacgcatcccatgtttgtggtgcagcacgtgtgttaactagttcattccaccaaatgatagcaaaatctctaaattcactagtggcttgtctaaccctatgctgctcaggaataagatgggaattaaatttttgttctaccgtcatctcccagtctaagtaagtttcagcatcataagaacccatgaacggtggaatagagaacttaatcttagcaaatggatcatggtctggttgaggattatgatgacgacgtctaccattacctcccataccttgtcgattacgtgcgaggcgttgtcgcagcggtgcataaacatcgtcgtcatcgtcgtcgttgtccacaggagagtgagctagggctggagttggtggtgggggacgagcctccagtacgtccatgcgtgtaacaagttcagcaactcatcgatcaagctgctcataggatgtcgaggcagagtcctggtattttttaaaagcttcagtcatcgtgtgcatcatctccttcaattccatttgagagacacactcatcgtcgttaagtttaggccccttgtccttgtccatttgattctttggtcctgtcattgttagcacaaaacagagacaaaaaggcaacaaataatgtgaaccctacaactatctctcaggggtggtggtggagggggtggaatacaaattatgaagcgtcttaccccgctcttacaacattcttaccagtactacaggtggcaaatggtgaccggtgtgattgtccaacgagcgtgggtgtgattccaaaggagtacctgttctgctcgagagaaaattggagctatgggaaggctgactaaatatatatatgtggcacacaagtcagtaacagatagcaatgctgaataagtgttccaagtactcgccctagttgctggcctagaaaatgtaatagaacagttggacaaaagcacaagaaaggaggtacaagtatctagtgggaatggcagttctataaatagggcagattttttagcactagtagaaatcaaaggcgcgtttccaaaggagtagcatcaaaagaactcgaaatattctgaattttttaccactgatccaaaaaaacaaag

SEQ ID NO: 109837 - DNA, 547 bp, Zea Mays
ggatttggggtcggggcatggcttgcctgtgaggagccgctgccctgtgcgcttgctcctccatggtcgcggctgagggaagaagaagacgtgatgtccatttaatcataaagtgacagttaggattagctgacagatgtccatctggtgggactgattctggaccgttggatcgggtgttgatggataggattagattgagtgtaccttttcatcacgttagaacctggatcgtcgatccttgatccgtgggctgaaatttcatacctcttcatagtctaatctggaccgcaaggaatggatcagacagttctggtgggtcgataccctttcggccctctctattgcaaatgagtccctgaacttattactaaataacccgccatccgtgtggctgtagtatgagtcttgagaatgttttggttaagcccctgagtttcctttgttttatacgcgcagtccagtgaccaaggaaagtgagaaaaacatcatggaaattgatttatagtacaaaaataattagagaaacttgtataattcatagaaa

SEQ ID NO: 109838 - DNA, 506 bp, Zea Mays
cagcacagcgttgatgaattggcctcggacttgaaccatgtaagcattgctagcatctgcaatgagccaatgatcgtcggttttttttttttccatttttcagctaacaaacctgcaaccactatgtagtgtaggctgacttgcattgctttgtttggtcccatatggctagtttcaagattccaaagggcagtgcaaaggaaacaaatcacgggaggcaaactttaaaacgaggtatatgaacatagaaggttttaccgctgaggctcatgaccatggtgaaaccatccaatgcttcataaaaattgaaggtactagaaattctttttacagtttcatattctattctgaacttcagtctagtgaagcaactaaaccttgaattctggcagaattcaccgtaaggttcctgagcttctacagatctctagtggcaaaaaactcgaatagaggcagtgctcaatgaagaacaactcgtcgcttgggtctacagatccccttctggg

SEQ ID NO: 109839 - DNA, 574 bp, Zea Mays
ataatattttttatgaagtccaagtgatcagactgctcccaatataatatacaacacatgtgatgctctttctgtcttttggatcaccagcaaagtaactatcactatacccaaccaaaatgacttttagttcaacatcccttacatatcttcacccatacccactagttccttttaaacacattagaatatgtttcacagtagcccaatgttccttgcttgggacctccataaatcaactgacaacacctactgcatatgcatggtcaagtctagtgttggcaatgtacttgagattcccaattacattttgatatgtaatttatccacaacttcatcaccttccttggacttgtagagttgagccaagcttacataggtgttgcatgcgttacaatccatcattccaaaagacttgagtatcttaactgcatatgcactctgactcaaagtggttccactacctccttgcttcacttcaattcccatgtaatagctgaggagaccaagatcactcatactaaatcttctcttcatctcttgcttaaaatgattaatgacactaacatctggc

SEQ ID NO: 109840 - DNA, 397 bp, Zea Mays
gagtggggttgggtccgtcagccgtagtagtggaagcaggctcgattggggccgctggtggagttggctcgagaggaacccaatcaacatcgtcgtgctcctcctccacaaagatggtctatcccatctgatctggacctgtaggctcaaagacagcggatggacaaggtgcagtctcatcaaatgtaacctcacaagtctccataatgtggttagtctctaggttaagaacacgataagcatgagaatgtaatgcataacccataaaaaccccatcagaagaccgtgactcaatcttgtccagattaccctattttagtacaaagcatctgcagccaaataccctaaaatgactgaccttgggtggccgtccaaatcgcagctcataagaagtttt

SEQ ID NO: 109841 - DNA, 325 bp, Zea Mays
gcgccagacagcaggttgttgtcttcagatgaactatggctgctgcagaaattgaaacagcactgccttgtccttgcttctttggagaggacagttgcccgtttgcgttcccggttgcactactttagtgatggagatggcaacacaaaaaaatttcacttacaggctcgcctccgcaagaagagaaattttatttcccatttggagaatgaagggaggacagtcaccagccatgaacaaatgcaggaggttttggatgattttttctccaattctttgggttctaatatctagagaccgtattctcttaatctggctgcttgcc

SEQ ID NO: 109842 - DNA, 367 bp, Zea Mays
actcactcggcaacgactatggacgaaagtttttttttcgtttgttgttaggctcggtttaacactgtaacaatgttaatacgaagagaccaaaggaggttctggtaccataatacctgagaattgtttcgtctcctttctagaggattatttggatgaagaaaacatcgtccttcatgcacctctctgactgcacgggggcggagaccggagaggatgagaatccatggattccttgcagctggacagagagaagatgcacctcggacccactaatgggccgcgcgggcccgtgcctcgtactaatggcgggacgactttgccaggtcgctagcccatgtgcgcctatacgcggaccgcaggcggc

SEQ ID NO: 109843 - DNA, 914 bp, Zea Mays
ccctgatctaagtgttgcaattttttcgaagatcacgtctataagaagggggaacaaagcgagctcgcatctcctcttttaacacattccatgtttgtggtgcagcacgtgtgttaacaagttcattccaacaaatgatagcaaaatctttaaattcactagtggcttgtctaaccctatgctgctcaggaacaagatgagaattaaatttttgttctaccgtcatctcccagtctaagtaagtttcagcatcataaaaacccatgaatggtggaatagagaacttaatcttagcaaatggatcattgtctcgttcaggattatgatgacgacgtctaccattacctcccataccttgtcgattacgtgcgaggcgtcgtcgcagcggtgcataaacatcaccgtcgtcgtcgtccataggagagagcagtactgcaccaatagctgcggctggagttggtggtgggggacgagcctccagtacgtccatgcgtgtaacaagttcagcaactcgtcgatcaagctgctcataggttgtcgccgtagagtcctggtattctttaaaagcttcagtcatcgcgcgcatcatctccttcaattctagctgagagacacactcatcgtcgttaagcttaggtcccttctccttgtccatttggttctttggtcctgtcattgttagcacaaaacagagacaaaaaggcaacaaacaatgtgaaccctacaactatctctcatggtggtggtggtggtagaacacaagttatgaagcgtcttaccccactcttacaaggttcttaccagcactgcaggtggcaaacggtgaccagtgtgattgtccaacgagcgtgggtgtgattacaaaggagtacccattctgctcgagagaaagctagagctatgggaaggctgac

SEQ ID NO: 109844 - DNA, 316 bp, Zea Mays
ctcatttgtagggattgtaacctgtacggcttttgtaacccgctgattttatattttgattacggatctgaagaagttataagaaggaatacattatgtttggggtggtgcaagttacctggaagtgagcattttttatactgtacatgagaaaagttatgggccatgagagtagcatggaattgtgctatatggttgtgagttatgccattatcttcatttctgggtctagaaatttctgaaatgagcaccaagagatgccagtacagtgatatggaaaccattgaattgctgggtttgaagatttcacatgaac

SEQ ID NO: 109845 - DNA, 379 bp, Zea Mays
gaacaaagtgttggcattcatagccatatgatacattgtactagttgtgtaaacatttagcatcactagttagtcattcaatgtgcgatgcacattgatggcaggtgtcaatttggggtacatggagcaccccttttggtttgataagggtttagtcgatcacaacgatattagaacctcgatgtagatacaaagtactctatgttaacgacaaagagcaacgacaaagagcatagcatgggatcatgtaatgcataggatacaatgatctacagaggtttgggccactagagcgtaacaccctacatactctgagtggcttgtttgcattgcatgggggtgaaaattgctgagtgttgcttgtgcatgaaaaatgtcc

SEQ ID NO: 109846 - DNA, 373 bp, Zea Mays
ccgatctgaagtgactcatactttgtgtgcctcaaaataatgtcttagcttacgcgaagccataatgacggtgtatgctatcttttctaactctgtcatattgcacttggagcttgtaagtacctcggagacaaaatataccgggcattggtgggtcttgccctctctggtcctttcttggaccaaggttgcattgggtgaagctgcgatatagagtagcagtggtaaaactgggtctaggttggttaatgttgccagatcagacatatattgcttcaaagactcaaaggttgcagcttgttctggccccaaggtgaagtcctttgcaccacgtaccgttttgaggaaaggaaggcttcgctcagtggatcgc

SEQ ID NO: 109847 - DNA, 277 bp, Zea Mays
ggactatgcatgtaccaaaggttcattgtcttaccattccacatttgaatcggacaatatatcgacgatcagtaggcaggtggaaagtatcccggcatcattggacgaataagcgatgcttgctacatcatctttcgggtcgttttattcggccgttttgttttagcgggtgaccagggtttctttgttcgcccatcacatagaactaccttcttgctagcatatttgcagagcaattgatcaaaactagggcctgctttgaccagctgaccatgtg

SEQ ID NO: 109848 - DNA, 356 bp, Zea Mays
tggaaactgtaaatggcttcttattatctaccggtagtgaactctgtaaatggctcaagcatgcatggtgcttaagcatactttgcactttcttattatctatcaggaaactgtaaatggcttctacaatacagcaagcacgcaagtttctggaaacagaaactgggaacagcaagcacgcaagtttctgggaacacaagtttctgggaacacaagttactcggtcaagcaagtagttctgggaacactagtttctgggaaattgttcagcaagcatggttatgggaacataatctgggaacaataaaacagtttattacacccaaatgtgacgtgttttataatgccaaaagtct

SEQ ID NO: 109849 - DNA, 324 bp, Zea Mays
gaattgttgtgttgtctggttttgaggctcaacgaccaaaatcctcatgggtaccgtacgcaccccacatccttgacatgtgccccaccgcccccaaccacgttgacgatatatgatccacttctccatgtccttgcgtctgtcattgttcctaggtgtcagtcgccatggctactcatctggcttctctaggtcctcgatcaagacccaatgttcgtccttcatcgcttttgatccctcgacatgaacccatatgaacttcgtcattgaccattgtctccagactccacacctgcacatcataaaccaaaagacatgttacac

SEQ ID NO: 109850 - DNA, 506 bp, Zea Mays
ctctctggccgcatcatctttggcttcggctggcccgactgtaggaaccttcggcaccacaatcgatccttcagtgctctacgcagcgggagcagcttgttttgcttcggcagaagaggaggtcccttcaccaaattcaggcactacggtcgtttcaatatatcgaggccggtgggttaaaacctttattttcttgcccttcggcacagctggggtggccgaagcggtagttttcctctttttccttgccttttcaaggggtagccgtagttaggatatatgaagccaattgcatcaaaaaccttgttcaaccttttcttgccccgacccccgaaggctgcggacaaggcatcatcttcggccctggaatatgtcccaagctgctcgtcgctagtagcttcaatgcatttcaaccaatcgtcatttggttcgtcgaacttccctctgaatctaaaggtatatttcaatcgaattaatccaccttcgcaggattcagcagtggtctc

SEQ ID NO: 109851 - DNA, 385 bp, Zea Mays
tggggtagctcgtcaagtagggtacccagaagaagcatggtcgaaacaggtatccaatgggttgagcgtacattggagaatagtgatgattgctatgacatgtttcgcatgcggcgcactgtgttttgtcgtttgcatgatacgttagtgcataattatggtctgcaaccaagttggggagtaagtacaaaggaagcggttgcaattttcttgtgggcatgcgggggtccacaatcttttagatagattaggaacaagtttggtcactcgttggaaacaattagccgcaaatttagcgaagtccttaacgcaatttataggatgtcttcaaacgtcatcaagcctaaggacacacatttcaatgagattcatcctaggctgcgag

SEQ ID NO: 109852 - DNA, 1002 bp, Zea Mays
gatttacatcgcattcaatccaaggacttggaacgaattattgacctactaggattatgatgcttgcgcaaacttggacggaggcaacccgaaatggctggtcgacatgaacaacgtccacggcggcgttccctaagctacggcgtgatagcattcaattgaccatgactgggagcttcactagcagtaaggaatgctaaaacatgaacccatgaggcatgaactggcctaagaatggctggccacgacgcgatgcctcacagtggcgacggtgatcatatttggaggaaattccgagttctcgggccacaatggatggattgaagtgaggagtggtgcactgggcgtgtaacaagagggcggaatagggagggcactcaatttatagacgtcggctacaggtgctctgaattttggacggagatgagctaacggtggtgaagaggtgagtcaccggagctcgtttaccatggcgctcaatagggtaagaactcagggcaataactggccatccaccacgacttactacgacgtggtacgatagtgtatggcgtggcacgatcggagtaaacgacggtcatgatggcggtggtcacgtgggcacgtcgcggggcaagtgggtacgatgagaccagctgaatccactccccctcagatcttttcatcctcgcggtaacatctcacccgaatcgagcacgaatcgatgcggccaacccaaatcaccatgcggacatcgttggtagcaagattccgtgacctgcgatctttttcagtctactgtaccatgctgactccattaagtgcacctgatagagcaacttgaggggaatttttcttcgatcttcattcaacgaactaccaattcgactataccaaagttgttcccctatataccagcttcaactgttatagagatctgggtcatttactcactagatcaagcaccacttggctccaaagtcaatccaatacaactgacagtatgatttcaaattactgctt

SEQ ID NO: 109853 - DNA, 942 bp, Zea Mays
gcgactggcctgaccgtcgactagatgtttagggagtgcttggcaacttcccttaggatctctgcatgtccacgagctaccaagcgaagatgtcgcagttagcctagagggagtcgatgagcgtgctttcctatcgtcggagagtgttgccccgatgtgaacatgcttggaggtgtcatttgcgttaatcgggacttcctttgtatgctcggcggatttgaaggtgtcggagctggctttgggagcatttgaggcaccttggggcaatcttttgaagctcggccaactcccttgttgcgaccagtgttgaggcgagctcgcaagtgtaggtggtcttgaatgaggcggatgatgtgatgattttgtgcggaccaggcatcttcagctttaggtacttgtagttagggacgaccataaacttggcgtggtatggcctcacgagaatggcgttgtaggaccccgggaagtccaccaccttaaattgtaatcaatcgatgcggaagttggggggtcaccaaacatgacaagtaaggtgatacgctcaagtgggtaggcctggtggcccagtatgatgccgtggaatggcgtcgagctgggacacagcatggagcgtgcgatcctcaagtcgtcgaaggtttcaatgtaaatgatgtttaggtcgcttcccccatccatgagcaccttagagaggcgcttcgagcccacaattggctcggtgacaagggggtaagtcccaggatgcggggtcatgtccgggtggtcgtggcagtcgaagacaattggaaagtccaaccacccgaggtattgcgggacggcaggctccgccatgtgcacctcgtgttgggccaccttaaggcggtgattgtcgtcataggccttagtcccaccgaagatcatgagacatcccgtcggctcaggaaaatcttccacgggggccttttg

SEQ ID NO: 109854 - DNA, 729 bp, Zea Mays
ttttctctctctctctctctttctttatttctcccaagaggagcagtacgtatgtgggcccggtgaacgaatttctctggttttttctctgaaccacatgataccctgatgaatagaaaacctgcaaaaaaatctaccccctccgagggctccatttttcttttcatctccggctcaaagggagagggggagaaaaaaggtagatacagaagggaaagcagcaggcttgcattgcacaggatatatagtgattaaatagaaaaaaatggcgaaaatttgaaaaacacaaagatatactagtagctgatgtgcttgggaacaagggactgagaaaaataattgaagaacacgctctccgctttggtacttggtatccttttttgttttgttttgttttttgggggttcctagggcgtagtacacatatatatgtatgctaacaacaatgcctttgtttttgtgctaaataaacactgatgaactgtacagtactacatgacgatctatcaaacttgggagacagaggcagccccacagcagctttggggggtcctccacagcacatgctagctgtggtttagaataatgctaaaagcagctttagggcaagcaaactgctgctgctccaatccattgcagtcccttcccttttctcttctcttcttcccatggatggataggttgtcttgagaattattcaggtactaccaggccaccggtgtgtggatg

SEQ ID NO: 109855 - DNA, 499 bp, Zea Mays
ggaactctggatagattaactagaggaatgttgctattgtagccctaaaaactgtacgataaacctatgtacttccaagacaatgaccctagcggcaagcggcaacctttcgacgagaaatattccaagaaacactagtaaagtacccaaaaggatactttactggtaacttaacaactttgtctggaaagcagagctaagaggttaatatattcatcttggaactgttgtgcttcagcaagagggatttaaaacccggtgaactcaaagctgacaaaggggtggacgacaaggaatactttttttttcctgaagttttgcttaaacacgaggagtgcatgtgcatgtgcagactcatgcttcaacgcccatgcaacttcatttgtcttcgttgatgtctcgctcccgatagaagtggaaacaaaatctcgtcggctgataggttatctcaaagaaattagcaaagatataagtaaccgcatcatagctgtgacttgaa

SEQ ID NO: 109856 - DNA, 708 bp, Zea Mays
gagaaagttccactacataaaatatagttttgtcagatacgaagctagagcacttacaaagatagagtgcaacacaaacatacctatacgcctctcccgctctgcagcttctgcaactctcctcgcttcccctgaagctcggtgagtttcttcttcattttgtctgatagcttcgtctgctatctcccttccaccattcatccacacttcaaagtaaaatttcctgccaagggcagtagcctcagatgaaggtaccttaatatcattcgctgaaactgagaattctggctaaattacagcctttgcatgtttgcatccagctttttcaaggagtgagacggctcctcgagcgccagcaaaggcacaaaaatctcctctatcactaagaatttcatcaaaagcttcagcttcgccaccaatccatcagataaccccgtcaggatcaccacatataaagttctgctagtagagaatgcgccaagttttgcaaaactatttttcaacttattgcaacattccatagcaacattgtagcactcctcttttacctaatgaagctcctcaacatttttttgaactcttaaccgttcagtatcagatatctcacgttttgcttgttcgacattaaaattttcagtgatttcatcgagcttcttctctagtccttgcacttcagactgtgcaatcccacttgaatagatagagcat

SEQ ID NO: 109857 - DNA, 335 bp, Zea Mays
ttaacatatatgacatgagtaattttaataataaaaacagtatttctcatgacattttgtgcatacaaccattttatatccatcaatcatgtgttcaaaattttagttttatgacacgtttcgagaatccaagatatttagctcactcctaagaaagcaaaacctagtctcatcaaggtgttttgtgaagatatcggctagttgattttcggtgctcacatgaaacaattcaatatctcctttggcttcatggtctctcaagaaatgatgtctaatgtcaatgtgtttggttctagagtgttgcacatgattgtttgcaagttttatggcactct

SEQ ID NO: 109858 - DNA, 793 bp, Zea Mays
acgagataggcgatgtcctgttttgtgtaggcgtgcgaggctgggttgacgtgatagataacatctcacttggtgcagacattttctccgtgcgatgcaacttcccagcgctctgcctaaggcgggagccgtttgccgaaccgacaggatctccgctcagggcccgaggcggccaggagttggagctgcggatcctcccacaccatggttgtggtgggcccatctaccaggcaccgctctacctcctagtgtttgtgtatataaatagaggaagggtcccttgggtcggtaacacttaacatcttcttgcacccttgcctccatttttgccctaaagccttcctgccctcgcgctctctgcctgttcgagtgctctgcctgctctctttttctcctagcttggagatctgctttgcctcgatccacttggtgaatttgtccacgacaaagaggaaatgggtgaagccctcgggcgccttcttgaggggccccaaccaagtcaagtccctagacaacgaaggtctaggtgacagatatggtttgcagggctttgtgctagtatgtgtgtctgccgtggataatactggtagcccccacaagtacggacaatttgctcagcatccgccatggcggtcgaccagtagaaaccttgcctgaaggccttctcgacgagagatttgggggccacgtggtgcccgcacgtccctccatgtatgtctgcgagcaactatcgtccctcttcgacgaggatgcatttctgcttgatcctttaggcactctttttgtagagtgc

SEQ ID NO: 109859 - DNA, 343 bp, Zea Mays
caccgtggtgcatgtagtaggggtttacaagcacggcgggagaggggaggtccccaagtccctggagatgattgaggcaagtgccaatatctaagagaaagtggaggagtgagtgttcgtctgcgtgtgttgtggacatcgtccctggagtgaccactgccctatttatacacgaaggggagtgtccgtagtgtaaccgagtgttgtattcgaaggagggatgccttagcgtttgcaagtcgacgtgacggtgaactgtgctgttgacccacgcctgctgatttcccgtagagaacagatgcagagaccaaggggttgtccgtacgcttgagcccgaggaaga

SEQ ID NO: 109860 - DNA, 408 bp, Zea Mays
caaccccttcttctataattgtaggtaacgacaccactcttcctgttacctcaataggtgatacggttttcccgaccccttttaccttaataacattctttgtgctccccacatagttcaaaatctttctttctattcatcgctatactactgacaatacttgttccatggaatttgatcattttggtgtttctgtgaaggacctcacctctcggagagagatcattagcaatagtgctggtacctctcggagggagatcattaggtgcaatagtgctggtccactccaccattcggtttccagacctgcttaccactccctcccacaccttgacgattgtctctggttctacgtggcatcgacgtcttggacaccccggccttgatgtcctcgccaaacttcgcagc

SEQ ID NO: 109861 - DNA, 441 bp, Zea Mays
ctagaggggttcaaagttactgctgcctccttgaatctgaaagggagggtagcccattggtttcaagtgtttcgagatactattgaattgtttgattggtctcagttcaaaactgcagtactgactgaatttgaggtatccacacattcagataagatgttagagttgctaactctaaaacagacagggtctattatggattataaggtacattttgaaaaactggtctatcatataaagctgtttgacaaggccatcagtgagacttttcttgtggcacaattttcataaccaacgatcgtggagatcgtcgtcaggaacttccagaggagacgaggaagaagattcagagcagaagaatttgggtgtaagtatttctgttcttcgctgccctcttctatcagagttacttcgttttatactttacactagagcctactg

SEQ ID NO: 109862 - DNA, 400 bp, Zea Mays
ctgaaacttacaacaggctcaagatcgtggtgaacaagatctgaagctatggaagtacaagatagatggatcatgatgtcgttcatctcatgctaaggttatttactgttattgatcctcatcttataaatcttattcgtgagaatcccaggtataccaagataacacctgaggaaattatcggaaaattcataagcaggcgcatgatggtgaaggaggctaggtactttgatgacattgccaacagaccacttcctctctacgagccgcagcccgttgctctcaaagaaacaaacatcaaggaggtgctacctaataaggtggcacaagtggaggctaccgggctaaatgaagacgaaatggcgcttgtgatcaagcgtttcaagattgcattgaaggg

SEQ ID NO: 109863 - DNA, 442 bp, Zea Mays
ctgaagtggtagatggatctatggagcgactagagcgggcgaagtgggaggtggagtggtagcagtggcgggtgtagatggagcggaggagcgaggtcgagacgcgagacgacggacccggtaggcaatctgatctgatgatatctgtagttgtccacctctctctgcctgctctgttgttgctgccgctccaagagcttctcgggctgctctatccaaacaccgcttcttgtggccttcctgctgctataagtacatggtcttccctttgacctgcctaaaggggcgaggaggatcctcgtcgtctcctccccctggcgctgacacattctttgtgcgcaccatcctgaccagagtgctacaaagaagagtgaaagactaagcacaagtagatagcagctgaggagatcatagtcgaagtaataattacctggaaacctca

SEQ ID NO: 109864 - DNA, 404 bp, Zea Mays
ctcttatcctcctctctcgtaccgtcgtctttatcgtggcctctatgacagtcaccttccactgttgtggcctctcttgttgtctttctcgtctccggtgatctatccaccacctgattctgcacatctcctctcggatctcatcctccccatctcttatcctatcgtactaacatactcccatcttccctaaacccttgatctcatcgattactgttagttagggtggtgctcctgtcgtagcggatcatcatctctacctctctagctctaggccccggttgtgcaggtatgtttcaaaaaccaaacccatatatctctacgtcaaaatcctggatccctaatccaatcttgttttatgtttgccattggttgcaaattgtcggttgatgcatgtgtcgtga

SEQ ID NO: 109865 - DNA, 654 bp, Zea Mays
ggcgagggctgcctaggcgtctttgtcattcgatggtgagctgggacgagtgtttttcttgggaggcgtcgtgggtgttgtcttcatcgcaggaacagtgggcgccaaatgttgggcactaacacacgtgggcgtgctgttaggtggacccaagcacttggaaagcaggtgagatctcaggtacgcgacaagacaaaatttggggaactgtagcatctcgttatgcgtgtcacaccccgctatatgacaggggtatttataggcttgtccaggggtaggtggtccaaagtacaatcctatccccgactaccacctatatcctagggacatcccatgtaactgagtaattaaagtgctactcgtacaacagacggtgcgcaccagataatgcactcgcactctacgttgaatggtgggcccttgtagatgtcttctggtggactggtggcgtatagggtcgacatgtagccttcgtccctagccttcgcatcatcgcttccttcgctgcacctggcggaatgaagtcgtttagtcaacgtaatggcgaaggcctcagtcattgtcaacctattgtggtcgtccgctagatcagagaccattcacttgtggatccctcgtcaacgtatgctgcttgagtcgagaaccccttcgccg

SEQ ID NO: 109866 - DNA, 631 bp, Zea Mays
accccatttcaactacatggggacaaaaccataaaggaaaaaagagtacaacctagctcttttagtgatcatgtccatctccaccaccaacacaagtcgatccttcttcttgtgcatcaagatacatgtttgccatttagctctttcagatcctttgttctcaacgcagtgttgctgccgaacagctgcttgctcccaatccttggccagggacagcatctccacatgttctagtgttagacttcgacgtcattcctcgatccacctgccacataaactaaaagctgactcagaagaaatagtggatacaggcacagttaagacatctttagctagaattgataaaattggataggttcttttatgatctcgccaccaactaactacactaaatgaatcatcaaactcagtaagaggatcactatctagataagatgataactcagaaattgtgctagaaataggtgtgttaaaaacagttccagtagaaacagatggtgatgatgatggattagtcctcacaaacctattccatgaagacgatacattaccaggtccaatagttgcaggttggggtctttgcaaacgtacagaaccaaatttagactcatatttggcatatagaattgac

SEQ ID NO: 109867 - DNA, 353 bp, Zea Mays
cctacgcatccctgctactggaggacatccaaaactaccaccagcagagcgccagcgctgccaccgccactgccactccagcgccgaccttggcgctcccagcgtgcgtgtcgaatgccttctcgatccttgaagctgtcgccaacctcaactcctcgtcgcccgacaacaagagcttcgagctggagaggtcggtcaacgacaaggaatccttcgtcaacgggaggtacggcggcaatggtgcgagcaccaccctcgtggtggagtcggaggtcggcgtgaaggacgacctcatggagccgagcatgcacaagtacgtctccgtgcgtgacatccgtggggagaggagggag

SEQ ID NO: 109868 - DNA, 705 bp, Zea Mays
ggacaacaattctagggtggtggagggtgtaggcttatggtacggaaccaggctaagtggctacctagctccggaccacccctgagaacgtggtcctttcccctggttggaggtccctagctattcgatcctcgttcaacatcaaatggggccccaaactaagcgacaagctagttacatgatcacaacagaagttaggaaccacgtgagggctagaggaaacaatatatgtaaattaaagcaggaaaatgattgaattgagagcaaattcttccttcataaatgaatttgtaagagttaggcgatggacgccagagattgggtttatgagggtggacctcaccgagtacaaaagaactgtgcgatggattctagagaccgggtttatgagggcggacctcaccggctggatcacaggtaaacactatcctattacgaaggaagagttcactctcatgctaccttttcgatgaatggtgcaggcgccctgccaactgcccgaatgatgatgggcgtcagacttcttcgattatgcggcgacttgggccgtcctcgtaagtgtcgaggttggagcttggctggtggtcgacgatggcaacctcgtacgccacgaggctcgactgatgatcatcgtggtggaccacacagatcttggcgctgcgcttgcaaccacttgcacgcccgatgtcgacgagctatcacgga

SEQ ID NO: 109869 - DNA, 288 bp, Zea Mays
ggcatgccttgtgtttgaccatcccttgttggttcgcgacatatagaaacaatactgtctacgacatgttcttatgtttgcttgcgctttagcttatagctgatgcaaattcttgttgttctaaagtcattgttaaggcctaatagtttattgatatttgttgccgttaggtcaaaggggcatatcctgtcttggattgggagtttcggaccgctacttagatgatcaagaccatatcttgtctttagtcttccacctccatatttctcctcatgtaaagcattaaca

SEQ ID NO: 109870 - DNA, 496 bp, Zea Mays
ttcaggcaaagtctgttctatagcctcttcctctgctgcattttcttcaatttccgagggttttttctcagcaggctctgaaggtccagcttcggcactagcctggctcactgcagcttcaacttcggccggttttgtttcagcttcgatttgcatttttgaagcctcgacaattttcactgaaggagtagagcttgaagcctttactgattctagcacatctagtacacttgccatcctttttcttttgggagttgccgcaagacctttttgtgccttcggcactgtcacttctgccgaagggcttaaaacttctaatatttttgttccttcgatttttggctcgtcagttttaccagtctttggctcagctaactcggctgagggtaccttcggcattacattcaaatctttagccttctgtgtaggggagatgggctcctttggtttagcagttgaagaagtttctccgccaaattcaggcaccacggccgat

SEQ ID NO: 109871 - DNA, 457 bp, Zea Mays
ggactcagcagtggtctccttcggcatctcccagctatccacaagtggccacactctgtaggctatgtgctcttgaattatgtcccttgtgccaatgaaagcacaaacattgctaaaagccttctgacatgcttcgacgtcactttcaatagccaccttcggcctttggaggccgaagcgagaccagatggggcgctggataatttccttaatatcctctctttcaatcagattatttttaacataaaaccattcctccatccaggccccgggccatcttttccggtatgttggcaccaggtagcttgcattagagcgagcaatgaatccgtaacaaccaaagttgttgtgatactattctttgccaatggccttcgtctcgtacaaaagttcatgcatactgcaaaaacacttcgcgctcggttccagcccttggcttcttacagcccaaacaaac

SEQ ID NO: 109872 - DNA, 553 bp, Zea Mays
ttcaaaaattggtctgcctctccaaataaggttagtaaactgacaattgtctcaatttcctcttttttggcttaacaaacaaagcagtgtcatcagcatacaacgaaatcctgaggatgggcgagtgattccccagcttgctcaaagctccagactctgcagcaatcttctggattttttgcaacgggtcgatcgccaatacaaaaagaaggggggagagagggttgccctgcctgaggcctctgccatggtgtataggaggattaggtaccccattaacggttactcttgaggatgacgtataaaggattgtagaaatccagtcaatccacctcacaggaaaacctaagctgccgagtaaggatatcaagtagtcccatcgcacagagtcaaatgcctttgcaatgtccagcttgatgaatagagttggtgagttgttacgctggaaacgcctaatcgtgcttctcacatcaaggaagttctcatggatgctccatgatttaataaaggcactttgaaaaggcaagataatctcattcattcttggagccaa

SEQ ID NO: 109873 - DNA, 337 bp, Zea Mays
caagaatatgaaaatgatgatgaatggtcggcgttgagttgaaccatggcaaggtgggacatgtcttgaatgttgtagttctctagctaattaagtatcgtgtatacctgatagcaagtcgtgaacataaccatagaaaccccttataatatgtgggtgtagtaagctaagtactttattatgaccgattttctcgtggattcggggtagaggtggtacaaggtagatgagatggcattaccttcatacctttcaaaccatttgtgtgcatacgtgataggattggggaatggttgagacatcgatgtatcccttatgtattgataggttgtatgag

SEQ ID NO: 109874 - DNA, 298 bp, Zea Mays
gaagaagtccacccgatagatgctgaagtttggacagtattctatgatggatcatggggaacctttggcgcaagtgcagcagtgattctaatctcaccatcaaaaatcaaaacctgctatgcagctaggatggagttcaattgcataaacaacattgcagaatacgaagcggtccttttggggcttcaaaagcttaaggccatggggataataagagcagtgcttaaatctgactctcaagtaatcataggacaggttgacaaaagcagtaaggaaagggatccgaagcttgaaaaat

SEQ ID NO: 109875 - DNA, 1958 bp, Zea Mays
tggaggagctccgctcccgccggcgcgtccgggtctcggcgaagtaattctccctgcacacctacaactttatgtatatcgccggtaccattttttggagccagtgcattgcttgagctgcatgtacggttgaaccctgaatttctgtcaggacatctgaccttttgccattgtgagtggctggctgcacactcaacctcttgattccccccctccgttggtgcatggggaacaggaactgctgtcaactatttcaccataatgtgcctactcttgtgtttacttcaaaaattcatttctataattttgtctatggcgagaattccagaaagcatataacaatgtatgtcggtagatgggcataaaatgaggtaatttaggcacatctcaatgaaagttctatccgagttccatcttcatttaataggttgctatataagcatttctaatgacatgacagcatttccaagaagtgagagaagatttgagtttaatataaataaactctcttggcttgatcaccaactctaatagagtcatggaattagatgtacatacgaaacaatagaataaagccatgcattgagagtgatcgtttcatctatatttcattgcattttagctggtgtggcattcatggaaacaacgttatgaaactctccattaggatggctttcaacaagctaatccaatatcacagccatttatgtgggtaatatacgatgatgctccccattacatggtgttttctcctcttcttactttcattttgaaagatttttatcgtaatttctgaaatggttcatatggctattaaaattggttatcactatttcatttcttctaacaataaaactcactgaaatttactgttggaatttcttattctacttcaggataggattgcagggcacgaaggaattgcctgacaataagatagtcaagagaacattacagaaaggattgctgcttgaatttcagaaagatcctgagagatctttgcttgctgtagttgaaaggcctgatggaaagaaaaactggatggtgactgatcaggtcgtttttgaacggatagctattgcttgtccagttgactatccagtttagttaatttatacctgaacatacatatattgttgttatgggttctctggtgacatgacttttacttttgtatagaatggtgtcatgtcttcgataaagccccagcaggttacatatgttgtacctggtatcatgaattttgactattcaaaaatagacgaatttcttgagaaaacgcaaaatcttttggtaagtattgctgcatgagctgtacatgtgtataatgtgcttcaggatggtcataatatttgttaacaggacccaactattttagaatgtgcttggatggagctgtctgagaaggataaatcaataacagttgaggaatttgcagaggtcagaggctcttcaaatttgtttgattccctaacttttttctttcacatactcatatgttttttgtgatttcctcagatagtgtatggtaccaaggagtctttggaaagctactgtgcacatctcttgttgtcaagggatgtagtgtattttgtcaaggtagagagcagagattattccatgtaccaacctcgttcacctgctcaggtatatttttctagatatatgtgtgagtaaatcatgttaatattttagatgattttgacaaataagattgcacatcttttattgtggtaccatttcagggtactgtgtctagttgttcttgtgataactggaagtttatgtccatggggcagggccacctgtagtgcagtcaatctatacaaactttaattcttcctggaagaacatatttttggggtcatatatttgttttcatcttattcatctagcttcacaattgagtgctatatactatgtaacgcccaatattgcaatctggcatgtgtctttag

SEQ ID NO: 109876 - DNA, 307 bp, Zea Mays
tacacatcaaatggcttgctgctatcgggttgcgctaacaccggtgctgtggtcagatgttgccttaatgtgtggaaagcatcttcgcacttctgaccccaaacaaacttggctcccttcttcaacgattcagtcatgggctttgcaattcgagagaaatccggaatgaatcttcgataataaccagccaatcccaaaaaacttcgaatctgacggacagttgtcggcggcttccagttcattacctcttgcaccttatcgggatcaacaactatgcctgcctgagagatagtgtgacccaagaatt

SEQ ID NO: 109877 - DNA, 354 bp, Zea Mays
aatacaaggcaaaacaaactcctaagaaaatcaggtgttatgagtgtggaaaagaaggacattttgcccacaactgcaaagccacaccaccaactcccttgccaaagcactcaagaccatttgctttcaatgctcattatgtactaagaaaagtagcaaatggaaaagtcaaagtaacattcctaggtccaccaagcaagagtagacctacacaaatttgggttgcaaagtccttgattgagagttattggtccaatgcaatatagggcccccacgattgaagcttgatttatttgtccatgtaggtgaactacaagaccggtgggagccattgggtgattgacagtggatgca

SEQ ID NO: 109878 - DNA, 421 bp, Zea Mays
gtttgcgtgttgtcccgcgtcccaaaaacacagatctaaggaccggtgcactcacaggacaacagtgtcatgtatatgagtgaggtagggtgtcggttttttttttccgcacaaacgtgagaagtttaccttttatcttacgcaaaatgcctaggggctgtcttacctccatgggttgagtttttttatgctgtcatgggtaaaaacttcaaaatgcaagcacaccgcccttttactaaagtgtcaattatcagagacctggtacataatacatacccgaagatatgtgtatcattttaaaaccccatcgccgatgattgtgtccattatttggggctcacctggggctggtaaagcaaaacaagggccgtcctactcataaattattgttcttattcttgcccgtctgcctgatattgat

SEQ ID NO: 109879 - DNA, 321 bp, Zea Mays
gtgcctactgtccacggtccagcctgaatacctccacaggcatctgtgacccgtaagtccactccactccgctccagtcatatccgccgcccaagcaatgatataatgatatatgcatcgccattgcagctacaactaccagccgccgcccgggaaccctaaccacacctgcggagccgccgacatctgggccgatgtggtcacgacagatgacatcttctgccccgctggattctactgccccagcactatacagaagctcccttgtagtagtgggtaatcctgtctacctaatgtcgtttccctgcatatcttcttctt

SEQ ID NO: 109880 - DNA, 371 bp, Zea Mays
cgatggttggggagcaccgaaaggaaaagaaaggggaacattgtcgtcctggtttgggtgagatggtggccttgttcctttcagtataaccattaaggtaaagccatgcatgggagaaaaaaagttttggtactcggatcccacgatagtgagatcacaaaaaccatactagtgggtaaagtgtacacctctacgtagagtagggatggcaaaggggaattctccgttaaggaatagctccccatccccgtccccacgacgaaaagatttccccataacgatccccacgaacgcttgtgggggcgtttcttccccatccccgttccctgcaggtacaaatccccgatgaggatccccgtgcccacttaaat

SEQ ID NO: 109881 - DNA, 512 bp, Zea Mays
tgccgactatattctaaaataatgttcatatatgaaggccattaattgttttaatatatagatttcaaatgaagagaagaaaaagtatgcatgttctacacgaaacacggaggatgttccgatgcctgaatcatctgtttcacataagcggaaacgagggcgacgaggtcccaatcagatgaaagaaggtgcagttatgtacgtaacaaaactcaatgcagagggtttcctgaagaaccacttgacgtggttacaaagtttcgaaattcatgcgggtctactgttagagatatagtgccaatcacatttcagaaatggaaggatttagatgaagacacccgcaataagctatcggctaagttgtctgagtcattcaaggtcccaaaaggcatagaggatgcagtaaggaagtcgatgctctctgctatggtcaagatgtttcgtgggtggaagaccgagatgaataaggattttgttaagaagaataaggttcctccgcccaagaaaatggg

SEQ ID NO: 109882 - DNA, 406 bp, Zea Mays
ctactccagaatgatgcaaagatataccactaaaaagattttgggaaactattcttcttatttcgaagaaatataaggttacatacggtgtcaaacgtattggatggtcacatgacatttatatgtggtgacattcaattcgacctgatgctccaatcgaattaaaagggtaattacttaaaattattatgtcatatatatagatgttatgtttataatttcataatataacaaagttggcaactttttcagtcttaatactggtcattttgctctgcatattatggagtggtgggacagtggtttaagagcgcaacttagtatggtgagaataatagcatatatgtaatttgtagttaaggataatattacttataacatttctttacatgatggtgcgactctg

SEQ ID NO: 109883 - DNA, 422 bp, Zea Mays
ctggcggatataatctcagtgtttctacctttcgttgttttttcatcgtggaggagttgaccaagagtgagtcgcttagggtttcggcttcgccctaccttctcctcttttcggactatgtagtgttgtcgttgtgcccagctccctcccatgaccccaaggccaaggtttgtatcttgtctttgcctttatttatctccatgcctggttgagttgaccgagtgagtcttgtagggttcctcttcgggcaaccttttcggttcttcctcctccgtttatactgtggagtgtcattatcgtgcccatctccctcgggtgacctagcaaaggtatgtttcctaatctccattgtcgcctaccccgactttaggtcatctcctttcgtttgtttgactaagaagcaccacctctaatgcagttca

SEQ ID NO: 109884 - DNA, 395 bp, Zea Mays
tggtaatggtaggattccaatagagaggtgttttaaagctcctgccgaagaacaatggtgatgtgatggagagtaatgattgcaaggtggatgaagacactggggacgataggatttcaatgaagaacactaaggtggttgatctgcaagccacatctggccatgtgatcaacaagcttgaaatgaagaagccaagggaaggacggcgtatcaacaaacataagcaagatctcaggaacaagataaaacatttgcttttagataatgggtgaaaattgacgtaaggcagaggaaaaacgaagattatgaagactcagtctatgtttctcctaacgagactggctattggtgcagttttccaagaacagtttcaaaatatgggtcactcatctaaa

SEQ ID NO: 109885 - DNA, 284 bp, Zea Mays
tctctgacggcctcgctgaaggtgtcccaccatgctaaggtcattcccgaaagctgatgagcagccagttgaacacgctgattttcggggcatccgatggcttccagtttcctcttgatcgtgcgtagccagtcatctgcatcgagggcattgctggaccccgcgaacgtgggagtcttgagtctcaaaaattctcccatcctgtcctgtggtcttccaccacctgggcgctggttttccagacttctagtgaggacttcaatgagtcgggtttgattggctag

SEQ ID NO: 109886 - DNA, 636 bp, Zea Mays
aacagatcataatttacaatttaacactaatttatttttttctatttatatggattaacagatgattggttgtgaggggctcaagagattttatttgcatgacggatgcaaagattattttttccccacgagcaagcagcacttgtggcgtccacccggaagagcgccactgcgcgagcaaacacaaaaatacaaatgaacgatcgcctctaatctggaagagatagacttatccaaaagaaactgccgtagcgttaattataatagaaagaaagcggtggatatactagaattacctacctacccgcgtccaaaagcagtataccgccaaagaaaagcagcggcaggacaggactgcctagattcgtgaaggctaccaaacccaactcacagttccaagttccaacccgcaaaccaaacatcgccgtgcatattgcatactgccctccccccgccatctgcatgtgtccaaaacagaggcgccaccgccagcccgcagccgcagctcccagccttccaccccaccccaggtttccagaacctacaggaagcatggcgggccgaacccgacccgacccaacccaacccgggacgcagatggggccagtgtcttgccggggcaccaaagtatcgtac

SEQ ID NO: 109887 - DNA, 598 bp, Zea Mays
tgtcgtaaatatacaattgaatgaaccttggaggagatccatcgtctggtaacaaagttccaatacgatggtgaacttggccgcaaaatttaaaaagaggtggaccacgaccatcattgacagagttatctatttgtgctcccattgatgtaaaagcaaatagacaattgtgctgtctaatattgcgaatgaattttctcgatgtggcatcaccatcaaatcttgcaagagatgctaaaggcttaggtcgaggcttgaagggaggaatgctgatttttccacctttgcagcagttgctgtatctcatagatgaatcctgttgattactcctgaccctttcagcataccagaacacagcatgacaataagagcattcgtaatctggtgttccgtagtatgacctatttgggtatgaggctgtgcagtgaaatgattgtgtattagttatattttttaaattttttagaagtagtaactttattcgctctgacatttgagagagaatatgtgcataccttttaatgcttccacatattcggttgtgaactgtccagtatggaaattcgtcaatgttttagctgccaaccctattgttttt

SEQ ID NO: 109888 - DNA, 338 bp, Zea Mays
gccgaatgagaccccacacaccagtaaccggccttgggccaaaagccaacagcaactagatcaccaacaacaataagtccacaaataacaagaattaggcacagttgggtgaaggcccccttgcactcaagaaaagcctcaacaaccagaaggaagggggaaggtaggtaaatgccgaggcagtgggagaggatttggctaagagcgaaaccatattgcgcttccacggtgaagacatcaggcattcaaccaatgaattccctatcacaaaagaggccaaggaaagaatggtgagatctatcccagaaagattgccactccctccaccaccacaaaac

SEQ ID NO: 109889 - DNA, 783 bp, Zea Mays
gtgcacgatacaaagtctttaccaaaagacaaatccgcgcaaaagtcgcctaagggtgcagccagacacacacaataagtgcacggccacgaagtctttactaaaagacaaatccatgcaaaagtcgcctaagggtgcaaccggacagtcacaacacacacgaatttcccatctcattcaacaacatcgcactggcaagcgaagggtaaccggccacattacacaacaataaacaatagtcacaaattacattcacatatcgagggatcaccaaccccatcgcacaaataaatacaatcgcactttctcccctccctctttattgcgagctgggggagggcagcgttttcactcactaccgcaagacaagagtgagggcagcaaacatactacatcggctcagccttcgggataaggcccgcctcctgaatattaaacaacatcattttcaactcctcacccttaaaaagattcaacagatccccctcaccaatgctcgtcccaaacgacaaggacatcaaatctcgttggccaccccgatctacccgaaggcgggttcgctccatccccatccgacggtgcctaccacttcgcgacatctctccaacgctatgcctcgacactacttttcgtcgacgacgatcggtcctcacgccagccgggggatccaacgcttcgcgcacatccaggcgcggcgaggactccgccgcggccacatctaacgcagcaaaataatccaaatcttcatgcgatgactcttcagtccaggaaaacgggctccca

SEQ ID NO: 109890 - DNA, 618 bp, Zea Mays
ctcattttgcacctcatcatcctcctcatcaacaaccatttcaatatctatttccattctgatagcttcggttaagtctatctcaaatcgcccttctacccatcttcttggaagaactctccatcatatgtgtccgggtctaagttataatcttcatcgttaggaacaggtaatctaccgtgcagcgataccttatacacaacatcccaacccttaagatgttctttcgtttggcacgcatatgggaaataatacacttgtgtggccagttgggccacgatatagacatcgtctcctgataaggtggaatcttgtcgaatttcgactatcccaagattagaatgtgtccctctcgtcacttgagggtcaaaccaatgacatttgaatatcactggagcaagaggtttggaaccatgaaaattgagttcatatatttcttcgattcgtccaaaataatcgaccttgtcaaggccgggcgtcaagactccagaacatattgtttttcaattgggccgactttggtcgtagtttgttgtgcaaaaacggtatccattgacgtcatacctagaatatttcttgaccctataagcaaagtcgttggctacttgtctcaactcg

SEQ ID NO: 109891 - DNA, 394 bp, Zea Mays
catcgacgtgctggaggaggagcggttaaatatggtaattcagtcggccagataccagcagaccttgaggcgctacctttgacaaagttgcgtggcatcaatccttcacagtgggagacttggtcctccgccgagtactaacgggggagggacgacacaaactgtgaccaccatgggaaggaccatttgtcgttgcagagctcacacggccaggatcctatcggctcactcagatggacggcaccgaagtggggaattcatggaatattgagaacctcaggaaattctacccctagcaatacctcgaaagtctcagggacaagttgtattatgtaggcagaatgtttcatcatcaataaagctttcatcttccaaggcattcaagttcttgatt

SEQ ID NO: 109892 - DNA, 339 bp, Zea Mays
ttgaagtttttcttgaacttaaaatgatagggcagccgaacaagttcattctttttcttctctcctttgagcttcggcataccccattcctttaacgttgggtgggaataccctgttagctaagtactcctgaactaaatccctagtaccaatatgttcagacacaactctaaattcgcccacagcatctgggcatgatgcccccggcgtcatgttgcactgaggcctagtcaacccgaaggttagcttcagcgggctctgaactagcttctcctttttttcatcaatcttaacataaaaccattcagttttccaactggttggccacttggtgcggta

SEQ ID NO: 109893 - DNA, 308 bp, Zea Mays
ggcaccttggactctatccaaaccatgctatatgaagtgtaggatgatatgaatagtagggagggctattaccggctcagaccgcgagttgaagccggtcctcggcatagtgtggccccagcagcggtgacaaggtacgctgacaaatccagccgcgctcgacacaactttggggttgaggaggtcgctagcaccctcgggtagccctcccgacttcaatcacgaaggttgagggtgcctccaaccgcaaatcaccgacgacgccgaccacttctcccttccccgattaccgtatgccctctctccct

SEQ ID NO: 109894 - DNA, 300 bp, Zea Mays
tcagcacaaaggctgaaatcaaagctagtccctctagaaagaggcaaatggctcaacacaactagcaaaaactccaagaaggcccaattctcctccccctgtcacaatactcccaaaaatctctcccagagaccaatagctccaaataacacatctctcccccttggatgagaggaagcccgaaagaccaaatttctcccccttgatagaggaaccaggaaatctcaaaatctctcccccttgttgacaagtgaactcatcaagcacaaacaagggtagaaagaaaaacttcccctcgac

SEQ ID NO: 109895 - DNA, 662 bp, Zea Mays
tatcgtattctagctccttaggtgttgggttggactttgtaataccgtgttttgaatacaatgaatttagcaaaaccaaagttttttgagcattggatactacactctgcaaagaagttctctcccaagtggttatcactactcctacatgtatattttcccatactcatatgcagacatgctttccccagtctattcatgtgccatcaatattccaccactgctaccaaagtcgaaaccattaatgatgatatcgacaccgcccataaacaacatataatgagacgtcaaggagacaaagatcggtacatatgccttccttgcatataaaattgattctccaatccatctcaacaaccctagtatgtgaaggatatcttgtgacagctctctcctctaccaacctagtttcccatgctactccatcttctctgctctctatttacaccgcatcgacctcctcacctcgtgtgcctctcgggttagcatcacctctcaaccttttgacgctgattgtctacctctaggactaatgccacctccttgacttccacgcctctcgtacctcacatgctagtgctacctcctcgcctctcgtggctcccgagccaacactaaatccctttgtcttatgcctcttggtcgatttaagacaaccccac

SEQ ID NO: 109896 - DNA, 667 bp, Zea Mays
aagcctattttgtgggaaagacctctaacctatcactaacatatctattatgtggttatctaacttatctgttacaaccatatcctatatattaggaactctaacaaactcgaaaccaaatatgttacatgatagatctaatctggtacttatctgttacaatcctatcttaggtggatggttacatgacagatctaatctgatacttatctgttacaatcatatcctatctgttaggaactctaacttatctcttttattccaataatattgttgttaatttgtactaatcatattagaccttcaatttagataaatcttagaatatattttaattttaatttttgggtgttatacgcgggtaaaaggagtattttgttaaatatcttattgtgatatcctaatttgtatcgactttacctaaaggacgtcgtgtacaaacaaatcaaccaaacatacatcgacccattatattagtatatttctaatttctgctttctattttaaatttaaaattcaagtctaatttagagttaatttaaaatttctatttcaagctaaattgcaccaaacaaaaactcaaaatgaatgtaaaacatttttattaattaatttatccatttaagcaaatgaaaattagtaggaataattcatgtaagatgtttta

SEQ ID NO: 109897 - DNA, 382 bp, Zea Mays
aatcaatccaaacttgattatttagcaaattgtccattcaatcatcttatagcaagcaacatatgcatatatatccaattcaatcaactcatatgcattcaaatgaatttgatcaacaaatattatactttatatacctcatgatcatccaatagcaagtttgaacttaacttatttgcaatcattcataatttatccaacttgaataaagcacttgtatttggtagaatttggacttcacttattattgacttggcattgggatagaatttatttagtcttcaacacttaattcaacatatgatgattaaatgaatattattgaatcaagcctccaacgcccaaggtacctgttcataatcatccatgttttgatggtacc

SEQ ID NO: 109898 - DNA, 468 bp, Zea Mays
aacgacatgtcgattactgcgtagccttcgcatctcggtacccacctctctcctcgaacggatgtacgacacgggtggctccggggcgacgccgtagcgaaggccttggtcggtgtcgattgtttaggggcctatgcttgacttcatccactgttacggtcggtcgcagagtcgaaggcccttcgcccacggtcctacgtactggttagttgagaacgataaggggaagccttcgctccatgatcgagatcacgatcggcctccgcctaacagtagcccccctgagggaatggttcatccggatggaccattctcgaagtctcttgatctagaagggaacgaacactgcccttgatcatctggtgaactgcctcgagggggccgctatatgtgacagttgaaaaaccgacgatgtactgttgcgtagtgtggtaggtataaattacaatctgcctcattactaggtta

SEQ ID NO: 109899 - DNA, 346 bp, Zea Mays
tgaacatccatggaagtatgagagggagaacccactcggacaccctcgggggctgggtcatagctcgcgctacccatccgagccggatcatctccgacaacaccctcgggggctgggcaagcgctagcgccatccttgagggccgagccctctgtaacagccacctctaaggctgaaggaccttcaaccactttcatgggagcagagcaatccagaccagcctcctgacccttaagaccgtgctccaaggtcgatgaggcacgggacgctgctcgggataactccaacccagcatcaggcacatcagcgcaaacttccatcattccaccatctgccggctctgaca

SEQ ID NO: 109900 - DNA, 402 bp, Zea Mays
gaagtttagaggatgctgctgaagactgccttagtcgtccaatgtttgcaaccgcactatcgtgtcatcggctcgtcgttatatgtttggtgattgttgtgtatttcctctatggcatggtcgtaattacgcgcgccaatgctcaggcacatcgacaagccacttcggctagattgtccactgtaaagtaccagccgtatatcatcaattcaccagcgtcacaattagctggcttaatagcccctcttttcgtccattccgaccgctgtgcacacaccaacggcagcgaatgcgtcacgtacattcatatatacagaaacaagaacctttgctttgcgtcccaaacacaagaggacaaccttaaccgtcaagcaaagaccgcgaagaaaaacggcatcaaaa

SEQ ID NO: 109901 - DNA, 432 bp, Zea Mays
gttttcaaaagcatcctcattttaagataaacaaatatattgtgaaaacaaccttgttcactccgcccaagcgtgaagacaaaacaaggatatcaaagtcagttggctctctttcctaagatgattgaacaaagccactgaacatacttcattgagaagcgaagctagaagtgaatgaaggcatatcgattcattcttgggatgcaaagcctctccaccaaagattatgtattgagaagaagcctaaagtatgtgtttagtataaaatgaccaaatttcccttgtatgaggaaatgatcgtaattcatttacttaggggtatttttgactttgtatatggaataaaaaaagatgatgccctctataaatatccctatgatatgtactattaaattacatataaaacaacttgatcaagttgattttgttaac

SEQ ID NO: 109902 - DNA, 381 bp, Zea Mays
gtgaattgccgtgaagtggtaggcgtcatcgtagtgagatggagagtggtcgtcttcgcgtggacgggactggtaaacgggaattgttgtcctcgccgattggggcgagtgtaggtgaaggggagctgcgaaatctttttgagggtgaggaattgaggataatgttgttcaactacagggagatgggtatcatcccgaaggttgagccattgtaatatatgatgccctcgctgtgtgtatgtaaccgtaatttgtatgataaagctgcgcgccttcgttgatatgagtcttttgtgaaagacttcgatctttacgtagttattgtgctgttccggctgcacccttaggcgacttttgcacggagagcattgtttggaaaag

SEQ ID NO: 109903 - DNA, 897 bp, Zea Mays
ggcggtggtgccggtagaaggcagggcctaccctggggaggccgagtgcctcggcgccgtccaggactgcctcgctgcggcttcggtacggttcgcgtccgttcttgcctttgaggaataaatgttattccagtttctgctttgatcagaatgtacagttcatgatctactcgcctactcctactcccgaaatttggtgttttcttggatagtgctatgcttttgtttgcgagagtttgatgattttcgtgttttttacaccagtctgtcaaattggtgggaatcggcgagcttttcttgataagtagttctttttgaatgattgataaatagttttttctttggttccatctgtttggatgttcttgataaggaatttgctatatagaccggaaactccttttccatttaatcctgggtttatctttggctccatcagtttggatgttcttgataaggattttggcatggaattgtaattgcaactcattttccttcaatgtttgcactgttaggttgtacaatactctgcaacacagtcgctaagtcaaagcacacatcttcgtcctgtatttaagcttgtggactatggtgtggtgttgaaatgccttaagaaattacctggagcttctgtgcaagaaataccttctagcacaaagagaattattcagaatatacctaggtatcacgtccaaaagtgggcttctgatgaagaagtacatgagcttctcaagaaactgccacagcaaataaaagatgcgcttttacccttccaacttgaaggagtgatgtttgggcttcgaaggcgtggacgttgcctaattgcagatgagatggggctcggcaagactctccaggtgggcatatagcatggattcttgcatagtgcaatccttg

SEQ ID NO: 109904 - DNA, 327 bp, Zea Mays
tggagaaatgcacttgtaccatgtgtgttaccttaaccttgcctgaatcattgatccactgaatgtggtatggatgtggccgtggacgtgtggtcaggccaagcttcttgaccaaatctgaactcaccaaattattgcagcttccaccatcaataataacacgtgcacgtcgattctcgatggtgaagaaagtttggaacaaattatggcgttgctgcttctctgatgatttaggctgagaactaagaacacgctgcaccatgatgcttcgaaggttcaccgtagcatcaacattaagcatggcatcatcattagcagcaacatcac

SEQ ID NO: 109905 - DNA, 460 bp, Zea Mays
cgaaaaagatggtaattgttattaccttgctggcggtgttggtgtggcataccttctatgttttgatgaaggcggcgacgtaggcgcaaatctctggtggccgcttaatcataattaccttcttcatcaaacaccgcatcatcgggaagtcgtggacgaggaggtggtggtggtggtgcttgttgttgcgtctccaacacagcaagtctgtcgacgatctgggacaatcgtcgatccaacctctcgtaagtcttgccaaggttcatgtcaatgaaggcatcatgcactgacttgtggaccgtctcctccatttgctccttcaggagattgttttttgcctcaagatcttggcggctaacacattcatcgaagtctgtagggatccttgcttcttcttcgtcgcctaccatcaaaacacaaaaacaggaaacaaacggtgacggttatccctaataatttc

SEQ ID NO: 109906 - DNA, 779 bp, Zea Mays
gcaagatctggcctggtattttactaggtatctaaggctcccaactaaactcctataccttgttccatcaaccggtggtgcaacactctccttgctcaatttaattctaggctccattggaataacaaaagggttacaaccattaagccttgctttctccataatgctcttggcataagcagatttactgagagttattttaattttggcttgatgtacctcaatgcccaaacagaaacttggcagcccgagatcactcattttaaacttggccttcatcggattattgaaatcttcaattgatgcagccaccaactattacaaggccatctatttctggaagcttaacactgcctacattactatggtgcccaaaaaagatggggctgagcaagttaaggacttcaggccaattagcctcgtccacagcattgcaaaactgattacaaaaatcctcgcgaaccgactggcaccaaggctgaatgaattggtttccctaaatcaaagtgcattcattaaggggcgattcatcgaagacaacttcatgctagtacaacatacatcaagactgtttcatcaacaaagattgtcccggctgctcctcaaacttgatatcaccaaggcctttgactcagtctcctggccctttttaattgaagtcatgcagcagcttgggtttggacagatctggagggacatggtttgtggtctccttgcttcctccaccacacaagtcatgctcaatgggtttcctggacaacaaattcagcatagaagag

SEQ ID NO: 109907 - DNA, 365 bp, Zea Mays
aacgtttgtaacctatatatttatcctaaaatcatactatgagttatttatcataataacgatgttgttggagatgagggcgatgccagcgaaccctaggtcgttgcgacaaaggccgaaggtacacacgatgaccactgccatcgcaaggagacgtcggtacgcaggcgaggcgaagcaggctccaaacctaatgcaactatatatattagcgacggtcgaggcaaacaacgtggttggcgtgtgtgaaaccttaggatgcgtttggttggatgcacaaggtgggatggaacggggccaccacattttttacactgtttggatgggggtcacatgggggcgaagtgaaccccagagcatttttc

SEQ ID NO: 109908 - DNA, 504 bp, Zea Mays
acaatatgctcactttgaattatgttgagtgtggcactattaaatatgtcgtgactcaaggtgctcgctagacacgattcatttagtcatttatagtgcagttcctccgtcatcagcatcccttatctcgcgagcataaaaaaacaagagaaaaaacttcatctcgtctcacccaaaacaacacacattgtcgtttgtggtctctgcctctctcctcagccctcgtcacatcaccgcttgtcgtctctaggaagatatcctagatgcaccacgataggtgtaccgtcatcacacgtttaaatccacgtgaggtgtatccgtcgggtccactgtactaataggaaggacaccgctacacatctaacttgacattggtttggtttgatccagaggtgtgcagactacctgtgcattggtccatgtttgtctccctttggtatgatataaagatctatgattttggatcgtgtttaaataaataatgctttaataatgcatatcttt

SEQ ID NO: 109909 - DNA, 591 bp, Zea Mays
ggatgacatagcgtatatccggtgccgaatgggtggggtaagaacatggttcgctgcctaggtgaggatctgtcagtagccttcctcgttcgaggtacgcagcaggtcattggtggtttgagatagaacctcgccgacttcactcggcgtgttcagggctcgagcgaagttgggcagtagattcttgggatggagtgggttcttgcgtcaaagcttggattcatgttccactcgctcccactcgtgctcctaggcgttgctacaatcgcgacatcgggagttgcggtgctcgctgagcgccttgtcgtcagtagtctcccctacttcagatgcctcatctcgggatatgggctaagcgagatcctgttccctagcctcatggtgatgccgaatgttacgacgcctattcagacgttggcgtgcctcgcgctgagggggtcctctcccagtacaatgggctcgtcatcagagatgggtgtatcctctactcttccttggataaagaggacatccgagaagaaagagcttggggctacatcatgtgctccgtccgtctcccatgaaggcagagcagccagaacgattgttagt

SEQ ID NO: 109910 - DNA, 466 bp, Zea Mays
cgtgaattaaataatctctgagggtttatttgtagctgatgggggttatgtaatccacgtcggccttacacgttgactggcagcaataagctaactctcatcgatcgagcaaggtgccgatagtgattagtattttgagaggcgtgcccaagcctagctccgcacaaagcaataactcatgttggccaagttgtgcggccgacatggattacattttttgagaaacgtgtccaaccccgcgaagaaataactcccgtcggagtgctcactggccgacggcaataatgtttttgaaataactctcgttggctctgtgttgtggccgacggggattacgtttttaagaagtgtgcctgagcccaaccacacgtggatccctaactcccgttggccatacttggtggccggtcgggattgctaattttaaggagccgagtctgctcgaccgcttcccccagccgtcgcg

SEQ ID NO: 109911 - DNA, 641 bp, Zea Mays
cggagcaaactatccaaaccttggaagatatgttgcgtgcttgtgttctgtcttggaagggtagctgggaggatcatctcgcgttggctgagttcgcttataacgacagctactaggctagcatcaagatggcaccatatgaggccttatatggtaggcggtgtatctcccctttgtgctgggagactttgggagagagatctctagttggtcctgattgggttcagcagacatctaagaaggttcaggagaatattctgtccgctcagagccgtcagaagagttatgctgatgtgaggaggcaggacttggaatttgtagtgggtgatcaagttcttcttagggtatcacttactaaaggagttgttcggttcggtgtctttgggaagcttagcccgagatacattggatcattctctatcttggcctgggttggcagcttggcttatcgcttgcaatttccggattccatggcaggggtacacccggtatttcatgtctctatgttgaggaagtttttgcgggatctggaccatcaaatcaagctggaaccgattgctatgcagcaggatctgactctagagtgtcgcccagtgcgtatcttggagtcctcggagcgtgtcatgagaaggagatcaatt

SEQ ID NO: 109912 - DNA, 368 bp, Zea Mays
aagtattacaaaaaggcccaacaaaaaccccaaaacaattcaccaagtggggagtacactagagacattcaaaaaattctctaagtcgccaaaaccaccctagcccaaagatcaaaggtgttcacctttgtgctggcgccaaaaccacttggaccaaatagcaaaaagtggccaaattacccaaggcacatccctgaaaaatttgaattcaaaccgaggtcgtttgacatggtttgacatcagttttgtcgctggtgaatagtgcagatagacaagacttggcgcccgcatatctcacaagctagggcagatcttccattggaacttacacaaactagctaggcctaggtgccaggaagagatcttgc

SEQ ID NO: 109913 - DNA, 669 bp, Zea Mays
gtcttttaggtctcattgagctcttattcctctctggaacttgtttggagtgataaattatctctaggctgagttgttctcttttggagtgttttggtgtcccttgagatttggtgtgggttcaggaatcaagtcacggtattctcatgtagagaatttttagtggctcccattcaccccctctagtcgcctcaccgatccttcaatgactaaccatggtggctgacacgtaggaacactaatgggcatggggacatggaggagcggatcatgttgtcaacgcggttgcggactggtgggacatgtgtacaggacgtggaggacgcttatggagtacgctacccacagaaatttcagtagttgagcctcaaaaccacccagtgctacagtttgctggttttgccgggtttgggcttcaaaatccggcggtatggttctggtgggaatcaggggcagcacgtggcatcatcacgaagggtgcatggaggcggagcaacttcgtgaagagtgcatggccatcagataaaaaatccaggagttggtgcattttgcccccggctaagtggataagctatatgtatgtaggggtagtttagggaagtggaataactctataaatagaggagagggttggttgtttagtcatcccttgggcatttatctccttta

SEQ ID NO: 109914 - DNA, 432 bp, Zea Mays
ccattcttggcaaggctctttgaaatgtttcttgaacttgaagtgatagggcagtcgaacaagttcattctttttcttttctcctttaagcttcggcatattccattcctttaaagtcggaaatactctattggctaagtattcttgcaccaaatctctagtaccaatatgctcagacacaattcggaactcgcccatagcttctcggcatggtgaccctttcagcatgtcacataggggcctagttaacccgaaggttaggtccagcgggctctgaactaacttctccttcttctcgtcaaccttaacatagaaccattcattcttcaaaccggttggccatttggtgcgatagctgatcaccggagtcttcatatctttgcggtaagcaaaattgtaacagtcgaaattctcgtgtagcccatcttcttt

SEQ ID NO: 109915 - DNA, 800 bp, Zea Mays
gcagaaatatcttaggttcagcccccctcgccgacggtgatcttgcgctcggattcacgccggtcgccgtgattcgtgcctagcacgtagtagatatccatggggaggtaaaaagatctcgcgggggcgcggatttggtcgcggcagaagcttatcaccgtgcctatagccgtgcgacgtggccggaccgccggtgtcaccgtggaaactttggtgacctcggttatgccacgtcgtggctcgttactatgcggtagtaaccgtggcacatttaggattaaaatctttgagccgttgcaccggtgaacgccacgactaagccaccagtgttctcacctctctccgaccgccagcgtgccatctcaaattaacgggccaccgcctcgggtcctataaattgagcgtgccatcggctccgctaggtagtcacgcacccaatacaccaacccgtgcctcagatcgtccaccagagctccccaatttgagatttcccccaaatcggtcaagaacaccgcgcgtgtgagctcgtcgtggccagctctcaacaggtccgatcatgccctcctcgctcttgttttagcatccttgcgtgcttgtgatgcttctcgaccccgccaattgagttagaacccataggatcaccgggaacgcttcgagttgtccgttgatcgcgctgtcaccgtgggcagagagattaggggctagaaccttgaaattggttgaggggaaatggttattaggggtcaaattaggtgtcaaccactccagagcaccgatcattgcgtatctttgccggtaca

SEQ ID NO: 109916 - DNA, 612 bp, Zea Mays
gtttatttcgttcttacattatgaaaacactatatagcagttattgtaaaaccttcaacacctaatgttcatttaatgttataagtttagacaaaaaaataaagttttaggtggattaatagtcatgttctaatcttctcgtcggattgatatagtcctcctgactttcaccctcctccttagtccagtccttcctattcaatttgacgtcatccgaaccagtctgccacgatgctgaccaccactacctccttcctgacgctcgacgtcgttcgatcccaaaccctcctgacaccctcacctcacttgttatcgtcacgacgccgacacgtctcgcaggcccgatctcgctcgtcgcgacgatacaacccttcctcggcggtcggatagacattctacatgggagtacggcttcgattcagtcggcaaaaaacttaacgacatgtttgattcttatgtttatatagtttttcttttaacttgtatcgtgtattgatataaaatttgattttatataacattagtttttcgatattgtttgattttgtcatgtggttttttggccccccatcaattctcatcatgccccccactctatataggaaagggaaa

SEQ ID NO: 109917 - DNA, 407 bp, Zea Mays
gcaaaacaaaacgttgaacgggaagggaaactcgtgtcgtcggttatccaatttccatcctttctgtttcaacaaagaaaacgtttaggtatcggtcataatgtttttatacctttcaccgctgttacgctagaaatccaaggttccacacgagctcctgttctacgacgtggtgacaggaccgctaggggattggctccaggtgtaggtagggtcaagtccgcaggggtcatgaggctttcacataatatccttagtagaaagccacccgctaaggtttccacgttagtattggtgaccctctagacgaggtaacatagccaagactatcaccccatgttaacatgagttgccaccaaaccattgccgcctcatcttgcccatctttcaggtagggttgctaagca

SEQ ID NO: 109918 - DNA, 551 bp, Zea Mays
gcagatatttattcttgattgtcacttgattcaaagcgcgataatccacacataaccgcttgcttttatccttcttctcaacaaacaataccggggaagcccatggagaactgataggcctaatgaaacccttagcatgtagatcatccaattaccacttcaattcaacctgctcctttggggccattcgatacggagccttatgaataggctgtgtacccggaatcagcttaatctcaaaagctgcatcacgctccggaggaatgcctggaagctctgccggaaacacgtcagcaaagtcacacaccaccctcatgtcctgcacccgcaaggcagcctaaccctccaccaccatggagaaaaagattcccaacttccttgactggcgatctggaagcaattgcgcccacaaggataacgtgaactttggggaacatcccaagaataccacctccctacccaacggcgactgcaataacattgtcttccataaacaggatataactgcgcgatactgggataaccaatccatacccaagataacatcgaat

SEQ ID NO: 109919 - DNA, 684 bp, Zea Mays
gcggacctgtggaacatgtacggaagagtccttcctgcttttttaaatattagagaatacagatgtattataacctacactaaatgtcactaattaatggccatacatatatatatatacatccactataccactaaagtagccgaaaccaacaggaattcttctggggaacctataaaaaggacacgctattagattgcaggtcagatcaatgtgcaagacagcttaataagttgtcaacattagcttaaattaacaatgccatgatcattgggagagaatgcaaacagaacatatattagttaataaattatagcccatagactttatacacagacaaaaaaggatatgcaaggtcagatcaataatgtgcaagatgcatatatatacggcatgtccgatcagaaaacctctctctctctctccattattcgactagccaagtcaatgcgatcaaatcaaacggcctaaaacttggtcggtctttgtgtgcatgggagctagcggcctgccagttgttagatttcaatatttcatgtttgtttgtaactttgtacggttcgccatgcatatcgtctgactaagctaataagaccatatatacgcaagctagtcaaataattaagtaaaccctgcattcacagtgtatgtaaaccatatataaacagctgttgacacgtcgat

SEQ ID NO: 109920 - DNA, 485 bp, Zea Mays
caacgacgccgaaggccatcgcatcgtcaacctcatcatgactgaagattggcgggccccagtaaccctgtttctgcaaggatattaccacccaagtgacatcaatgaggccaaacgcctcaagcaccaaagccgggacttcgtactagtcaggggctagctatacaagaaggggatcagtcagcccatgctaaaatgcgtgaccgaaaccgaaggcattcaaatccttcgcgaagtccacagcggaacttgcggctcccactctaggcctagggccctcgctgccaaggtgatccgtcaaggattctactggctcgcgataatctgcgccgcaaatcgagtcacgaggtcttgcgaagcatgccagaagttttctccccgctcgagcaacccttcacagttcaccaagctgatcgcccacacatggccacttcaacgctgggggctggatattgtcggaccactacctatggctcaagggaacc

SEQ ID NO: 109921 - DNA, 363 bp, Zea Mays
cgatgtgtcgtcctcagactgtgtggctgcggtggtcgtagttttccgcctgcgctcgccgtgcccgtggagctcctccaggtgccgcttcttgcaggcgtgggaacgacggagaagctgactggcatccagcgaggcgaagagcacccaccaagcatgtgcactccttatctctcttcctttcctactatttggctctccatattcagatttgagagtcgattttacaagtgtattatgcctactaactaagatttttttccaaaaaatattggttgtgcatgtgtacacccatgtccttcactgctccgttcgactctaccaacaggggatgcccctggcgtaattgaatgtactctcttc

SEQ ID NO: 109922 - DNA, 735 bp, Zea Mays
ttggccaatatctacctcgacatattgaaccctttgtccctctacttctatccgtgataatagatctctatttttccccatgataaaactttactcctaactcaattcataatatttggttgtatcatttatccttgcttcactagtttatggtgaccctatttcactcttgtcaatgaacaaatatgtcttgcctaactccttgttatttctgatttgattcctttattttataatctctctttcttattcccaaccttgtctctcctttaaaaaacgatgttaaactgttctctttttggttgatcatatagcatcgagttgtgttatgctagtgtgtttgagttcctgttagctgtctttgtgaccgtgtttgatttgcttctttgtaatgattgttggtgtattgtgtgacttctgtccacattgacatcagttactaggtaaaaccttaggtagttgggttctctctattctttatagtatgtcctagctcaatctttctgtcccttccttccttcctatatccatacagatgtcagaccttggaatgtcaactacaagtgatgtcactaagtgcaaagaatacattgtgttggcaactcctccagcaaaatctcagatggaacagttcaagaaggtgcatgcacagtttctgcaagcaacatctcaagtggcagctagactccaacaagttgatttagcagaatttatagcacctgagcagactaccgg

SEQ ID NO: 109923 - DNA, 669 bp, Zea Mays
gtttgcgcccctgatcaaggcatggatctaaaaaaggggaaggaggagggatagactcaaacttgtgtctccaagcaagttagagaacatatctaacattcttctctttgttctctaatttattgttctttaatttttctaggtttgacctttgacaagtttacatattaagaccaatgtattatagtgaccagctatgtgccaccgaactcattgactataacatgcctgcttgcctcaaaatcaaataactttgtctatggttgtttctatagcccctagatctagaatcatatgctttcgtttcatcccatattggctatgtgttgtttaaacgcgcaggatggaaggtattttgtgaggtatccactagcatctgtcagatactaatatgcttaactttattggtctgattctggatcttctcctcaccaacatatctactcctttaaagcatgagtttccaccatcatgcatcgtcatgcgtcacacgcgtagatctattccttcctcctctcccctacccaaccaacaaaaagagataatcatgcttctagataaaacttatcttatcagaaataaaaaacttgctacaaatcctagcctcgagcttgcaggcaagcacctccctcaccgcgcccaacacaaagaagttgtgttgtcctctcc

SEQ ID NO: 109924 - DNA, 621 bp, Zea Mays
ttttctgttcatcagcagaaggatcggatggattggctcggcaagggcgcctcgggcgagtaccagcaggtttctgagtatctaaggtcgtaccagcctctgggaggggcgccaccaccaatgccccagcaggagcagcgtcagaagagtcctcagccagcaaatcaagcatggcatttatcttcgcatcactagggttcaggggcacctcaaaatagacctgccgttcatcatcaggaattcccccgagtgtggcaaccaaggcactaacttcttcagcagagggccgcactctaaggcccaaactgccgtcagtagcaggaggattcgacacaaaaagagtgaaggctttgggaggaggcaagttccaagctgagaatgccacgggggcaccaacatttgacactttgcctttaaggatcatctcaagtcggctcaccaggtccgtagagagaattcttctgttagtgacccaagttgagtcagctaggcctcgatacagataagctgggtatgccctgtcttttaacggctgaatattcttgaagacaaaatcagcaaccacggcttcagcggtcagacccctctctttcagcaatccaacttcagcaagcaaagcac

SEQ ID NO: 109925 - DNA, 282 bp, Zea Mays
gttgaaatttgatccagtactctgcaaatgtggtattgaagctaagtatggattagttccttctgagcttggtgttggatatttttgtggacatatggtcgattacgatgaggttggtatttatttatttgtttgcaccagctgtaatgttatagcggtacttactattttttgtaggagacgaggaaatgcagttgggagagttacgacgacaaaggagaggtgatgcgcacaatagagtccaagagactaatgggacagaagatgcgttgtggatctcag

SEQ ID NO: 109926 - DNA, 433 bp, Zea Mays
tctctttcccaagttgcttcatcttcaccgtggtgactccattgaactttgcacatctttataaccttattcctcgtgactcgagtcagtgtatcaagaatcttgatggggtactctgcataagtcaggtcatcttgaacattaaggtcctccattggtaactgtttttcaggcaccctgagacatttcttcagctgagatacatgaaaaacattatgaacatccgcaagatgatccggtaactccaattggtatgcaacctctcccactcgctttaagattaagaagggtccaataaagcgaggggacaactttcctttgactttgaatcttctcatacctctgagtggtgacactttcaaatagacataatcaccctccttaaactcaagcagtctcctccgggtgtcagcatagcttttctgtcttgact

SEQ ID NO: 109927 - DNA, 506 bp, Zea Mays
attttggtgtagtgcatggtcggttggaagagaagagaaaagtgggaaaataagcaacagacgatcagaagatgtgtgaagacaccaacgaggcaagcggtctatttatagaggctggaagcaaccgctcatttcctaccacggtcatcgaagagtcgcaagtatttaataagcaattcaaatcgtctggaagcaagtcaggcagcagacgctgcttcgcgtaacacgacaccatttggactaaggtcaactgcttggacgatatgattacaccccgcggtcacgtcaaattactactcaaggacagtttgctaaatgctcggcgtaccaaaatgtccctcggtcacacccattgggggggacgtccaagaattttcaatagattttcccaagcagtcacatccgtacagtatacgcaatgaatgtatcaagacagaagaaagatatcgatggagatcagaggaaagccaaatatagctgctgaagtacaagtctaatcaacagaa

SEQ ID NO: 109928 - DNA, 735 bp, Zea Mays
caaacacagaggtttggggtgccccaatccgtgtgctacagaatcccataagggtatggtgtcattccccacatctgatgtggcacatatggtggggtgggtatgcataggtatgtggataaactagtggatactgggatggaggtgtccatgctggtgtgtttggtactagttggacaatatttcagaccgatttattcacccttgtattttaagatgacccaattgctttcgcccaacactcttgggtaagcgattgaggtcgctttactggccggtcatgggtccatacccttttgatgacatatttggatagtaaatgatcaaaagttgggccgactttaattagccaactaggtgcctttgcagaattttgattccacgtacctatttcgggtcgtcgtggcttgaaggtacatagtcgcttttgtccttggatgctactggaccatccttttcgagctgcctggaccgtccgacgaggatctggaatgtctgcgctgtccagtcggactgtccatgatgtgcagatcagacgactgagcctgggcggccacctgcatctgcttcccaacattgtcaaatctgatggtgatttttaacgtctccttgccgtttggggtcttctcagcaccaacctccctgtaaaagatttttgtattttcatcgagggcttgagggtcgctgatgattatgctcttacatgtatccttattggccacatccgcccgaaac

SEQ ID NO: 109929 - DNA, 515 bp, Zea Mays
cggtgtttggtttttatgtccaagcctagacatcggcctggtgcactctgccacccggccggagctgggcctcctctctccgatgatttgggaaggtaggggaagtcgcattatgactttttctaccttccaatggacttcagaaaggaggccaacaagggctacgccttcgtgaacctcacctcatcggaggtggcctattgaccgtgggtggccccctagaggcccaccacatgcaccggtggcgtttcaagggtagcgctaagacctacgccaccccctacgtcaaactaccactaggctcgatgacgccagacctaactcgttcagggtagccacttacggccaccgtcaagctttacatttagctatcgccaaggtagaatggggtactgcttacccttttagtctaaaggtaagtaatgtttgcatagtctaggttagccccataccttttgtctgtaagatagcatgagaatgtactcttcctctgtaataggacaacattaatttgt

SEQ ID NO: 109930 - DNA, 352 bp, Zea Mays
aaacaactgaattctgaatccgatggaaaacataaagtgcattggaacatgtaggattagagtggttgatagatacagaagaaagacagagctaaaaggcactcgcgccaccatagtatgtatgttcatatcacaagactgtctggaatgccttagccttttctggtttttcctcttcacgtgcagcaaacatgccctgtgtcaaaactagatcaagattcaagatccagaccacagatttgctttcaccccctattaccatcataaaagcctagtgacagaggaaaactcaaaggtttaactagttgcactgagactggatatgtccggtggctggcacatgtgcaagcaa

SEQ ID NO: 109931 - DNA, 438 bp, Zea Mays
ggagttactacgtcggggtagaatgaagtgtttactcctagtgaaacatgttcgtcggtatttacctcggtcatctgagctttctggtcggaatctttaagtttgactacatgtgggcgtagagggacctaggcatcatcattgcacatacccctgaaatttgtagcctaagccttggagcgacacgtcgtgttgcgggtcctgtagatcgtcaggggactcaggcctaggcccgatagaccataagtgggtcgaaggcctataacctcatggtcatgagtggggttctagctcgagtttgcatgtcatgagtgaaaggaggaccgacttcccccgtgccgggtgcggaatccacttgagtagcttcctctcggctcgctcgacccctttctggctttgcctcgccctacaacgggcttggtgcctcggggttactcg

SEQ ID NO: 109932 - DNA, 476 bp, Zea Mays
gccagtttgaagatgtcaccgtttgaggctttatatggcagaaagtgtaggactccactgtattgggatcaaactggtgaaaggcagttgtttgggcctgagattatacaagaagcagaagaacaagtctagcaaataagggagaatttgagaactgcacaatccaggcagaaaagctatgctgatacccggagaagactgctagagtttaaggagggagattatgtctatttgaaagtgtcaccactcaggggtatgagaagatttaaagtcaaaggaaagttgtcccctcgctttattggacccttcttaatattaaagcgagtgggagaggtggcatgtcaattggagttaccagatcatcttacggatgttcatgatgtctttcatgtatctcagctaaagaaatgtctcagggtacctgaagagcagttaccaatggaggaccttagtgttcaagatgatctgacttatgc

SEQ ID NO: 109933 - DNA, 406 bp, Zea Mays
cggccttggctgaggttaaagaagcaatgggtttgaattctatccatttagtgaatttgtcgatcgctaccagtacatgagtgtatcctccctaagctttcttgaaaggaccaatcatatccagtccccagcatgcgaatggcaagttactagtatggtctgcagttgctgtgctggtagatgttgttgctttgacaagtactggcaagcttcgcacctctgaactaactcggctgcatcgtttttcgttgttggccaatagaatcccaacctgaagaccttcccgactagtgtcttggatgttgcgtgtattccacattgcccagcatggacttcatctagaagttgcttccctgtagatgagagaatgcatttcatgaggacacccgatgcgcctcttctgtat

SEQ ID NO: 109934 - DNA, 823 bp, Zea Mays
taccactgctttttctaatcccttacaagcatctgtgcaaattgctagttgaggcatgtctcctatagctctacgcaactgcttcataaaccgaacgcagttatcctctggttcagattgtattaatccaaatgcaacaggatacatccagttatgaccgtctatatctgttactgatgccaattggtcattccacctaccatttagtgcagttgagtttacactaagataactagataaggcctacatcctgctaaaaaaccctcaatgcaaggaacaagtgcacaataaaatcgagttagaggggcgacctatctttggttagcaactcgaacagccgaaatatgtaaacaaaaccacatagcagaatagattatataccttaggttcatgtcccaagagttggagttgggttccatgtccatatctggcatagcaccacctctccaagggcaatggatcacagatttagagccaacatcacaaaatctattggttcatgcatccaaaaaaacaagggattttagaaatcgaaggaggataacagaaaatgagggaatacaactggaacaccattcttacctcaaatgatcaaatctgctgcctgtgggcttggaggagaaccaaatgttgagttatgcgtgcttgagtgtccaaccctctatgcgccgcgggggggggggggggggggggaactcaaggcttgttcatttttagtccaagcaaacagaggcaagatgaccttatcttgacctaaggatagagctgtcttttcccgtggctggagatctgtaaaagaacaagttgatggattatatgaggc

SEQ ID NO: 109935 - DNA, 443 bp, Zea Mays
attaagccttggtgccatgaaagattttgagaaaatttgatccgaagtcgggctgtcaggtcaccttaagtctgaactttcagtgacagtgagattggatgaacttagggctcgattttgagtaagatcctgtgactttttgtgggtgcacaatataacaaaggtaaagctggtttattaagcttcaactttgatacagggtgatggttgggtcaccatataaaatgtggagcaaattgaccccaaacctgctttgtcagtcgtcctgatgaacaatcacgatggtgcagtgcacacaaataccagcaggttcagagtatctcgccgccgatgacccttcaccgtgattggtgcttctcgccacgattcgtgcttcaggtctgtggattgagctcgtcggtgaaaagatcacgccgcggataggtccgggacactgtggccac

SEQ ID NO: 109936 - DNA, 439 bp, Zea Mays
ggagacacgcagatctttaatgacagagtccttgcttgacaccagctgcctgatccgcaggatctcatcctgggatacttgcagttcatggcgatgatgatctagatctgccatggtgaagcggtggctcctctccaagatggttagagaattgcaggcgtcacgatataaccaatccagattgtcgcgagaagctgcaagtgctcttttctcctccttcagacaagaatcaactctcaaatatccagaaatcagtaaaagcacaacatatccaattaagtaaatttaccttgttaactgccctttcagagtcaagttgagcattaagagaggaattcaagtaatttgcgtcgtctaaagaagcagaaacccgggccaggtcgatctgaccttgggaatatctctcctcaagctcagaataccgccgggttgagtcggt

SEQ ID NO: 109937 - DNA, 396 bp, Zea Mays
caacgaagcagctttaacgacgaaggaagaagacgggcgagtgtgggcgtacgcgagcgcacgggtccggttgttttctgggagtgcatacatgcaggatatcgagggactattcctatactagaacagctctgatctatttggatccaaaccaaacatccatattactagaacggagcggctctgtcctaacaaactctagaaccaaacactacctaagctcatgattcttcgcatgcttacatgctacaaggtaaagagtttggtgggcccaaataggggggtcgatcgaactgcggggggttaggttgaccttgtgcatggccaatgggttctcctcccttagtggggacaatctaggtagcttccatgttgtgtatgtactaaagattgttt

SEQ ID NO: 109938 - DNA, 425 bp, Zea Mays
ccagggccccattcgttcacgcttcggcatcaggagaccttcgatcgcgggtgaaaacgaaacacaagcatgtttgatggccttcaacacagtgtgcacctacattgacactagaggtttggttcaagagcacattggttttaaggtatggcctcttgttaatgattgggaaatgccgaaggagaccactctcggttctagcgaaggtggcctggtttacctgaaatacacctatcgctatagaagtcagtttgacgagctgaatgatgactaacttgaagccgttgaggcgaccaatgatgagctgctaggggcttatacgaaggcagaggatgaagctatgaacactgcttttagtgctcgaaggaaaaggagactaaatagagtgtttgatgtgattggattcatttacccttactactgtt

SEQ ID NO: 109939 - DNA, 595 bp, Zea Mays
ctgaacatgtggcacgcggaagtgaatagttgcatgaaaatagatatcataattgcatgctgtagtggcctcgatatagatagcttgcttgaagagatggctatatactagaaacacatatttagttgagttccgccagggattgcaacttaagatgtcatgataacacatgaggatatttggttcaccaatgtgtagcacagtagcactgcaacaaacaacatatgttccaaagtttactatctatcgatgttcattttgtagcactagatataatccgttcataaggaaaatggattgctccgatcgctttcagttgttagactgtctctaacaagactctgtaaaaggtcctctccgctaaatgtagcaaacaaagttgtccggtacgcctccaacaagaacctatacaacgcccgttaaattgtagggtgcattcatcatccgccaaatgtagcggacacatgaaagctctctatccactgttcgctcccacatcgtctccgttcgctcgctccctcgtcggttcggcatccacacatcgctcctctgctcccttcgtagcgtgcttgcgtcaaagaagacaaaggacggg

SEQ ID NO: 109940 - DNA, 590 bp, Zea Mays
aaagaaaaaaggaaacaacagattcactaaccaaggtaggaggccttcagatcttctatctgtttttgaagcagtagagggttccactgcatcaaagatgaaacttggtcggggacaggagcgccacaagatttcagttgggcagacacataatcgaagacatcctgcaatttcaaaaatcggcaagagaaccagtttgctaacatgaacagtaagaagcaaaagtcgactcacttggagattggagagaaataggggaagacccaaagctggaagcatcgacacactgcctattgaggggcatcagcaggaacaatgttgagagcacgactcggagacgcctcggcttcatcagcaggcagcgggttcctatcatccggatcactagcctctaaggtgaccggaccgacgagagcaccatatacatttgtcaccacgagttcctcagactgaaccagtggtgatccaatgtgaacgtccatagaagcagccgaagaggagcctaacccgacaccctcgggggttgggtcgcccttagcaccaccctcgggggctgggtcctccttagcggctattggtcacttgttctc

SEQ ID NO: 109941 - DNA, 618 bp, Zea Mays
gttttgtaccgaaaatatatatcgatcaagtcgtttaataaaagcaacatatcacacatacttgcaaatcagcgagtaaatttttagaatagttcatagccatcggttaggaactttatacaaaagaatgttggctctatgtttgcttatgcgaaagaatgttgtcgcttctctttcctacaggagggtgaaataatttttgccaccaacgtcgcatcagaggtgtcagtagcctcagtgtgctagtcacccctcaagatggcctcactagcatcaaaatgttcactgacgagttgacagcattctcggctgggattgtactctctcttttgttagctaagctcgggcaaattcctccggcatcaacgtcagcacgatggttcgcgtaactaaacatgttcccagtccacaaaactcacaggtagatttatagtagttaattatttgcttgaacaaactgatgcggatggcattgattgttggttttaatagtggcatatcatcctaaccatttaactagctatgtccaacacattacatgattgttggttttaaatacgcccgccggagctgcgccccacccttcgccgctagagctgcacagttaatgcaccggtg

SEQ ID NO: 109942 - DNA, 361 bp, Zea Mays
tggaatgacggaaaggagtgagccactagtgcatactgcagaggtccattaagtccttcgatgaagtgttcctgcttcctctcatcctcagccacttctccggtgcatatcttgagagctgaatgaatctgtcacggtactcactgactgacatgctcccctgcttcagcgtcagaaattccttcttcttgatctccatcagtccaacaagaatgtgatattttctgaactgagttcctaggtgatagtatcagcagcatcgtgagcagcggtgtaagaatcccaccaattagcagcaggaccagtaagtcgaccagaagcatatagaaccttctcccggtcagagaattgtgcaataatc

SEQ ID NO: 109943 - DNA, 285 bp, Zea Mays
catctgtggagtggtcatctgttgaacaaacatcgcactcgtcaattgctgcatcaattctggtggagaattcgatagcatttgagacatcaggtctttatctctttcttagcctcctccttaaaataatctgccatatgttccttgtatcgatcatgttttttatacagaccttcctactatggttcgaatacttccttccatccttccttagatgaggttcctcgtacacaaccaggatgcttagggttaccgagaccagccgttacaaactgcttcattatg

SEQ ID NO: 109944 - DNA, 578 bp, Zea Mays
tgagaatggacttgcttatgctacggccttattttgcagaggtgacagtatttgagaaggagaaggagttgaggtattctgtggatttgcaaaggagaactttacaaaaaaaattaagttttcgcatgacttaggcttctacgtgttaaaggaacatgtgtgacaaattttatgtcaaaataataaaaaactttttgagagtggtacaaactactaacttcatgtaggatgtgatgaaactatataggagatgtgcccatttgtgaaccatgtctacacgaattttcacgaaatcctttgaaatttttatgttaaccttccatgaccataatatggagccacaccaaatttcacgagtttttgaacatgtttgctatttatttatttattttcaactatacctttaaattatgtaatatggtgaataattcaaaaaaaaattaagttttcgcatgacttaggcttctacgtgttaaaggaacatgtgtgacaaattttatgtcaaaataataaaaaactttttgagagtggtacaaactactaacttcatgtaggatgtgatgaaactatataggaga

SEQ ID NO: 109945 - DNA, 297 bp, Zea Mays
ttctatggttgggttagctcttatgctcacagttgagttgttctaatgcactaatttaggtttaagtgcgtgaggggagaacaaggtttataggagtaggatccaatttttcactagtgttaactggttaagtgaccgtccttaggttagctcaacttaaggttagacttcgttaggttagattaacctattaggttggatcagatctagaataaattgatatgactattttagactagataagatctaaatagattttgggttagctcatggttgttattctagagtggaataaat

SEQ ID NO: 109946 - DNA, 782 bp, Zea Mays
tgtcaccttcggcaattctgcctctgccggaggacttagaatttttggcagcatcactgttttttccaactttggctctctggccgcatcatctttggcttcggctgaccctactataggcaccttcggcactacaatagatccttcagcgctccgagtggcgggagcagcttgtttcactttggcagcggaggaggtcccttcaccaaattcaggcactacggccgtttcaatatatcgtggccgatgggtcaaaacctttattttcttgcccttcggcacaacagtggtggccgaagcggcagtttttctcttttttccttgcctttgcaaggggtagcagtaatcagggtatatgaagccaattgcatcaaaaaccctgttcaatcttttcttgccccgacccccgaatgctaaggataaagcatcatcttcggctctggtatatgccccaagtaactcgtcgctaatagcctcaatacttttcagccaatcgtcatttggctcgtcaaaccggtccctgaatctgaaggtatatttcaatcgaactaatccaccttcgatggacccggcagcagtctccttcggcatctcctagttatccacaagtggccacactctataggctatgtgctcttggattatgtctctcgtgccaatgtatgcacagacattgctgaaagcctttcgacacatttcggcatcactttcaatcgccaccctcggccttcgaaggccgaagcgagaccagatggggcgctagataatttctttattgtcct

SEQ ID NO: 109947 - DNA, 343 bp, Zea Mays
ggaaggggttgcagtagacctgcaggcttctgatgctctaccttagttcgctggcaagtgtcgcaccgggccacatactgtgctatctcctgcttcattcctctccaccaatatctggtcttgaggtctaggtacatcttggtggtccctaggttgatagagtaggctgagttgtgagcttcgtcaagcagaacttcttgtgcctgtccttttggtacgcacagacggtttctgaaccaaaggactccttcatctgtcctaaagtccgggagttgttctttgcgagttccctctataagacctaccatcttagtgtccaggtgctgacggccgccattgtcgt

SEQ ID NO: 109948 - DNA, 280 bp, Zea Mays
tgatagaaacaatgtgcaatgaaattcttgggaactacacgatgaaagaagatcagctgatgacagctgccttcagcacccgtgaaaatgaagattgaaacgggtgatggatgctttgaactttgagtatccagattacgacagacttgacaaaggggccggaggagcgaaaagaaaaatgattgttagcattttgaataggcaggccattcggtccatcaaggaggaccagagggctgtcaagaagcaaaaacattctagcggagccaaaggattcggc

SEQ ID NO: 109949 - DNA, 522 bp, Zea Mays
cctcatttcttaatattacgaccaattcatttaagtttatactttttggttaatatgtctataaacttattggtatcccgatcatttttatactctttgttattctgttattcacgaagcatattgcgcattcatcacatttctggtcatatagtttacgtattatacgattatcatacaggttatatacgatgttttattagtgccaattatgcaacattagtaaggaatatatgctatatttattagatttcaacaaccaattgtatataaatcatttgtcactcatgcaatgtttattgcaaaaaaattattcgtatcacatacaacatactaatcactgcctgactcactgctatcgaaatcaattgcgtgtttttttgatgttgttgtctcattccaatgaggagtgttacttccacccttgtttctagatccaggaggtcgtcctctcttacgtccagcaaggctagccaatcgtaatctattctcctccaatgacaaacatgtcctattgttgtg

SEQ ID NO: 109950 - DNA, 561 bp, Zea Mays
ctgctgtcgtcacgtcttcctgcgccatcggtcataaggcattgtaataagcctcgagtagccacgcgtgttcctcaaaatagccaatgatgatgcccgatgctcgatgctgataatgtttgatgcgagagaaggggagaagtgaatcgtaggacggaacctcgacaatttatttatcttcatatttaaactttacttttgtgtctatgttgcagaataatatctttttatcctaaattataattcgttgacctccagatttatcctcaagaactcgacgaaggaatatggcatttaggggtatcttgagttctctccttgtcacgtactattatgtttggttgctcatgggattagcatatagaagaaaatgtctgagttagaaagaaggttaagaaatagagagtgtaggatggagaatttaaatgaactcattcgtgagagtgatagaaaatgtattagtgagcttcgtatggttagaagaactttctttattttgtgtgagatgcttagagatgttggtgggctaaaggccacacacaatatgaccctagaggagat

SEQ ID NO: 109951 - DNA, 532 bp, Zea Mays
cattgacgatatcttggtatactcgaagagcgaagttgagcatgccaagcatttacacatagtgctccaacgtctgagagaccactgcctatatgccaaattgtttaagtgtgatttttggctaagggaaattaaatttttgggacacaccatctccgaggagggaatttctattgacccatacaaggtacatgaggtgatgaactagaagcctgctaccaccgtccatcaaattcagagttttttgggattagctggatattaccgtcgattcattccaaatttctcgagaatcgcgaaacccatgactgagctattaaaaaagggagtaaagtttgagtgggtcagaagtgcaaagaggcttttcatacccttagacaacacttgactaccgcaccagtgttagcacaaccagataatgccaagccatttgaagtgtattgtgatgcttcaggtactggattaggttgtgttctaatgcaagacaactgtgtcatcatctatgcatcttgagcactgcggccacatgagc

SEQ ID NO: 109952 - DNA, 325 bp, Zea Mays
caatgcttaactctagccgacccatccccatccatgtgacttactcccttacttgcagtcacgacaaatgacttccgcgccctgctgcccctcttccatgttgaaatttatgtcaactttgccttgtgctttcttgaacttaaaccacgtattgttagatgtttgaattgtttattcttgttggtttgtaaggtggcatggtactttgttaccatctttttaccatagaatcaccgaccaatactaactatatgctggtgctgtgtgcgtttccagcaatatcactttcaatttcatttctttaaaagatatatgaaaataaaac

SEQ ID NO: 109953 - DNA, 424 bp, Zea Mays
attttgatggattggacgacaacatgattaagagactaacatgaacgatatgatcttgtggagagtttaatctcatgttgtttattgtattgggtgcaaatagggacaagcatattctgaagataacaaaaaagacataatttgattaatatcaattggtaaataatttgttgtagtaatagcaggaaaaaatagaaaatgaggtagcttgcagcttgcttgctcctcatgatgtcccaagcctctccgccagttgcttgccttctgctccggtggatcggttagatgacaatgtgagcgcacagatgagaatgaacaatgttctcgggaaatgagagaaagaagagaaaaataaggggaaaagtagtcgaagaaattaattaaacaagaaaacgcgcttatcatctttaacccctaagagcat

SEQ ID NO: 109954 - DNA, 538 bp, Zea Mays
cttcacccaaaggaagaaaggtaaaagcaaaggtatgggaactctttttcccatcaatggttattcactctaaattatcttattctacctatgtgaagaatagattctttattggacttgatttttgctaagtatgcattcaatcttgttctcataaatgcactagtccattagaatctatttcatgcctttgctatacatattctcatattgatttacttctaagtaatgattaataaattcaatgtgaagaagtaaatttcctatgattgattaaaatgtttaaaaggtgcatattcctttttcttaaaagatgtgcactaatgataagaagtttacttcatgtctatgtgacttatggatgatgaattgttttttcctatctgaagaaatcatccttcatcatatacttccttatgctattaacatctttcttgagtattttcaataagtttggaaggaaaaagagacaactacaaagggaggacactcacatgaaagagaaggacatcaagaacaacaacacctacttggacaa

SEQ ID NO: 109955 - DNA, 602 bp, Zea Mays
gtttcttcacagctcgagattccataccggccggaaaacgcaacggctatgcttcttcgttgcacaacacctatttctaccctgaacgaccatttcccttcactcaattgcaaggttctagctcacaatcactctgtccatggtgatggcgcaaactgaggacaatctgtggtgttcccggtgatctatcgtagtctagttcaattggccgggccactaagcatctatagcacatagggatgttgaaacgagagcaaggaagacatgaacggacctgtagagagctagccacggtgagctcactcccggtagagttttgactgatttgggggaaatcccaaattggagcactatggtggacgatctaaggcacgggctggtgtgttgggtgcgcgactacctagcggagctgatggcatgctcaatttatagggcccgagggcggtggctcttgaatttagcatggcgcgttggcggcaggagaggaagaaggttactggcgcaaatgattcgtggcccgcaccgtggcgtgacatctggcgatgaacaaacaggttaaggtgattcactgcaacgcggtagagcacctaggaacgtggcac

SEQ ID NO: 109956 - DNA, 724 bp, Zea Mays
cagcgagtgagagaactcaatgacgccatagttgttccgcgtctgcgcggttgtctaggatgccatggaagaccgtggtgcatgctaggaattgtgggcaacttggtcgaagcatctgcaagcttagggagcccgggcagcaaggaaattctcgccagtgatgtcggccaccacggtgccgctcggtggcatgggctgtgcgactgtcctcagtattccaggtaatacttccacgctcggttcgtcgttgtgtcctccacgtaaatccagcaaacacaaccaagggggggggcttgggaacatcgggttgcagctcgtcggtgtgaaggccaccgaactaggatgcgccactgtgttcctggtgtccggagaaagaagatgagaccgtagccatcgatcggctagcggatggtcaggattagatcgtcgccctactatttgtctgaacgtcgtggatcttcgatctaacggatatcatggcgtaccggttcgattttatgccggtctaatctggcgcgtttggtgttgatccaacggcctaaatcgttacgtaccccttcaccgtggaatttttgtttaagagtccctgactttattgaaaattaacccgccatccacctagttcaaagaaccttgcgattgggtcctgttttattcagaatagcccatgtactctttagaaatgttatctgcagtccacagggtattaagtactataaaatac

SEQ ID NO: 109957 - DNA, 381 bp, Zea Mays
cgataactctcctccggttaattcaccttgatggtgatttgcctcacaaagaggttcatcttgatgatgaagttcctagcaatgcatgcaatatcattgtgatgggaatatgggacaatgaatctttcgtttttgggaaatgatgaagatcattattaaatgtgggatacaaatttgtcgacacctatattgcgtctctaagttgcatatggatccaatacaaattcctaggaaccagtgcatgaagctctcttatcgggtcatcgataaatgcaatcacggttgaaccaagaatcacaaagtgaaagtcgcgagcttgaagttcggacatttatgggcactcttgaaataatgtgtggtgaatgtgaggtccaagtgatc

SEQ ID NO: 109958 - DNA, 531 bp, Zea Mays
gacgcttcggcagctgttaatttctccgtggtgtcgctgcgctagcggaatttctcgtcgtacctcatcgccgccgctggggccgctctgcaccatggactggcttcaactcgcgatatgagccggtaatagcccttccctgctgttcatagtatcccgcacttcgtctagcacggttcgggttgggtccttggcgtcgggatgaccattgggacgctgctccgacgatgcgccgccgtgcagtgtttctatgccgtcggtcggtgagacgaaggtagcgggtaggttattaactgtccgatcttccacgggtggctgagattagaagctaagtaccggttcgaccagggcgattggcgaccgttgatccgaaatcccgtggtggagattagatccgggagttatttaatcctagccgttaacctagaatcggatggccagcaccgtgtcccagctctctggatgtagcgatctaatctgggccgttcgtgtttgatctggcggcccatgtgcaacggtaccccttcgcgg

SEQ ID NO: 109959 - DNA, 684 bp, Zea Mays
cgcgtgcagttaggctctgcaatttcgtgcgtatgcagtcagagagcaatttcgagatcgtgcgcgtgcagcaatagctatcctctgcaatttccatgcgtgcagtagtcagagagaaacctcctacatcttaattggttttctgtatggaacttagttcatgtatatatgtgatgtgtctagccatcttaaaacatcgttttctgtatggaacttagtgtacttggctgaaaaaagctgtaagagctatccaatagccatgggttctgttgctagccgcatcaattagtggttgggtacggccattaattgaagaccactgcaccgcatatatgtgagactgattgacaagcaaaatacacatatatagtttgttggagagggacctgacgagttttttgctattatagtatttgttttaacaggcttctctattatggtattcttaactccatcttctctctaatagtatttagaattgatcccatacgtctaaatagtattctgatctttttcttttttattttaattgtacttcttattatttctcttctcaactgaccatattacccatgtctaatctccatacgtgtacatggaattccttcaaccaaatgatgagtcacacggacaatagacattatcaggttcataggaacactactgagttgcaaattctgaaac

SEQ ID NO: 109960 - DNA, 326 bp, Zea Mays
accatgtcaagaccctggcccaggccgaagctgccttcgccatggatgatacaaaggatccctcggctgaagcaagtttaatgggcgggaaattttacaatgacatctgggtaaatggtggccgagagatggctcatgaaattatgaagaaaagtgagaaagacatccatgacgcctgagtacaagcaaaacaagatgaagaagctgcagagcgcgaaagacgcataggtattgtttcgcggcatgtagcttcgacattcgtttttgtggctttggactgactaattttgtccactgtagctgaattatctccgccaccggaactg

SEQ ID NO: 109961 - DNA, 484 bp, Zea Mays
tatattgccacccttgcgcaatatctaccttgatatattgaattctttgtctccctacttttctacttgataatgcctctctacttttctccttatcactttctccctaactcactttataaccttggttgtatcatttatcctcactttaatagttcatggttatcttatttcattcttggtcaccaacaaatatgttttgtctaactccttgataattcttacccaactccttgactttataatatctttcttattccaaaccttgtctcaccttttgttctggttgaatgagtagaattggattgggttgtgttggtatgcttgaattcattgtcctttgtgttcatgtttgatttgcttctttgaaatgattgttggtgtattgtgtgacttttgtccacaatgacatcaattagctaggtaaaaccgtagatagttgggttctctctactctttatagtctgtcttagctcaatctctt

SEQ ID NO: 109962 - DNA, 974 bp, Zea Mays
cctaagtcatttggttcacaaatgtgtggacttgtaagccaaatatttgattttggacttatttgcaaaagagtcacatttgaactcttttgactaagtctaatttcagtgcattgtgctcatctttgtgaccttgtaacttctaaacaaaggagattttgccctaggtcaccacatcaagtttgtagctcaatcataggagaacaactttgcttaaggttgtgagctcatttgttaagaaaaatccagagataattaagctcaaagcttggctgtcaggctggtttattctgaaattcagacttacagtgtaataaagccatctttggggttgaattcaaccatgatctagttatcaaatgagctcagtcactatagtcgatttgtagctggtatgtagccctataactttggtacagaaagcttgctcggttactacacaaaattgggagtaaataaccctgcaaatcactctgtcaggtcggctgatgatcttcgccatggtacagtgacaaaagatctgaggtgccgtgcatctcaccgtcggtgactcgccgccgcgattcgtgtcgccaccgttccaatttgggctcggtaaggaacggataacgccggagttagataacgcatacgtggcaccatttctcgagtccagccggagacctcaccggcagccaccgtgacccagtgactttgccgcggtgtcacccatgccgcgatctccctcactgtgtcttctaccaacgtggtaagcatgcgctagcaaagctatccggggccggagatcgtctgccgggtcgccgtggctataaatagcacggtggtccacggtggggtatgaacttcgcacaaacggtgagtttattgatgcctaaattcgcactatctctgccccctccttccaaattggttgagcacggtaaaactagagtcccttgtcgtcgtatagcctcaatccccgccctcaatttcac

SEQ ID NO: 109963 - DNA, 598 bp, Zea Mays
agacaatggcagcctagaagtcaaggcaatgctagaagacctcatacgcaaggctcagcgcctggacactgagacaacaagtcttgcggagaggactcgcaaagaacaactcccggacctcaggacagatgaagaaggaatcctttggttcagaaaccgactgtgtgtaccaaaaggagaggcatgagaagtcctgctcgacaaagctcacaactcagcctactctatccacccagggaccaccaagatgtacctatacctcaagaccagatactggtggagaggaatgaaaaaggagatagcaaagtatgtggcccggtgcgacacttgctagcgaactaaggcagagcatcagaagcctgtaggtctactacaacccctcccagtacccaaatggaagtgggaagaaataggcatggatttcgtaaccggactgcctcggacccaaaaagggaatgattctatctgggttataatcgaccgtcttaccaaggtagctcatttcatcccagtaaaaactacctttggaggagccacccttgcccggatatatcgtaaagaaatagttagattccatggtattccatggaagatagtg

SEQ ID NO: 109964 - DNA, 755 bp, Zea Mays
gcctcgcaccgtgtccggcctcgtcgggtctccaattctaggtacggaaacctcagccatgtccgtctcgtttagcgctatgtgtaggactagttaatcggagtatggtgcgctggggcctgtgaatggcatcgtcgacggtggttctcgtcgccgccgcgcggtggggtattttggccggagggaagacgatgtgtggtggtcggtcaatcaatggatcaacggtccagatcatgtcgcattgtaggagggttctgtgtccactggatgtcaatcggacggtccaggatgaatctagagcattttaaatcagcgccgcagatcgcgaatccaaggggcctcgtgtgcgtaccggttcgggataaaatcaatctaatccacaccgttcgcgtctgatccaatggccgagatctgactgtaccccttcgcgggtacactttacaaaagaaaccttacgtttttaggatttagaacccgcagtccatggaccctattctctgagtctcggtaaacttacgccaaaacccctgatgtttccaaaaagtgacgcccagtccagaggataataaaaaccgagaaatgattatagaatttagtttttaatacaaaaacaattctagaaacttgtaaaatgcatagaaaatttattttagctccaaattgaaccattataatttctaaaattttgtaatattattatctatcatttagtgtctctgttttgacttgaaaacagttagaaaattaatttatca

SEQ ID NO: 109965 - DNA, 687 bp, Zea Mays
attgtgtttgctatgtaggtggtgaatcttgtttcaaactccttcttcatagtctttagacgctcctcaacttcttcgtatatctttccctttaacacttcattgtctttcccgattctgaaagtgtggctttccttgcatatcagtattgggttgagatacccaatccttttatcggcactagcaccggacttggtaccgtaaaggatctcctgttgatcatgttgcattctacaagtcacacgtgcatgtgtcagatattgaaaatttatacggctcactaataataataacacatatatgtggaaatatgagcaacacttaaagtgcaaacaccgtcacaagttgtatgtcgagtctgtgaaggttcatcatgaaccacatgtcctcgactgcaacaaaggcctttggtccaaaccaataaaagcatggtctggtatatgcacactaatggcgtcaatgccaactgatgatgcccacatgtaccagtcatgcaaccttttaataccagctaggacattcctcagtttctcaaaaggtatagatatctgcccatcacatattgtttaggcacaagtttataatctgccttagttgggatctttatttatgcgcccattgcctcagccttttttgcaggcttctcgtgctcggccaaatcaaccgtatgtgacatgaggtccggtg

SEQ ID NO: 109966 - DNA, 349 bp, Zea Mays
gtatccttttggaccaaattggaaggctttcatgacattgtccaggctgcatgggattcagttcaaccttccagacgcccttttctgactctagaggcaaagctgaaagaggcaacaagaaaattgcagagttggagtgacaggcaggtgggacatgcttcgcaattagctttggcaagggacttactgcataagctagaaattgctcaagatgacagggctcttactccggctgaaacctggcttaaaaacaggctcaagaaacattccttgatgacggcgtcctttaaaagaacaatggcaaggttgagatctaggatttcacagctgaaggagggatatgccaata

SEQ ID NO: 109967 - DNA, 398 bp, Zea Mays
gttaaggcaagaatagtttgggtaagaaagtttatagtgggaaagaactccgtgttgagcggcaatgcaactgaaggttgggtttgacctctttcctttcttgacgaggttgatcctttcttctccggtcttgagctcattgattcgaggtcagtgtatatcatcagagttacccgagtatggttaagatggatatgggtgagatagactagataagatctacttaatttattttagaatagatcatgcttgttacacttttatgagataagcaaattggtgggggtaagtatgctgattaggacaagatgagtctccaagagtaagatagaatcttctgagattggtcagatctattaggataggatagaatcttttcgagataagatggatctatt

SEQ ID NO: 109968 - DNA, 397 bp, Zea Mays
gagcgctgcaaattgtggtgtagcatcctcacatcgatggggacacgtaccctaggagcatcacaagatctcaccgagcgtgcccgtggcggtggcgggctctaacggtggaggtagaagtgtggattgctcgtcggagttcaacaagtgctcccgtccgccccacgcccggttctatgtgcacgtcgtcgcgatttccgatacgaacccccttttcatagtttagcgttgatccccgctttgtttggatgggtcccgcgtagagaatcaagcaccgtatcgatgtcgagtcatcaccggcggtgtttcgccatatgggggcggcggcgccgccattcaaaccgagaagggtgaggaagaacggtgtatgccattgatgagcgagcgaatggctggg

SEQ ID NO: 109969 - DNA, 276 bp, Zea Mays
acatcagtatgtatactttattgaggaatcgaatgactttgttcgaacgtgaacagaccgaattaaaacaacgtttgggctacacatattattttcttggactttgaaataggaaaccgaatcatctaataattattctggtttcggttagttcgggtttggtttatttaaacagtctgcccttagtagcatctctatcgaactcatagagatcgctcgaataagagcgaaatacttcggtgacctttccaattccccttaatcaattaattttaa

SEQ ID NO: 109970 - DNA, 332 bp, Zea Mays
ctatatcacggtcaggtggcatacctggtaattcctccggaaatacgtctgggtattcgcacactactttgatattttccaagggcttttcttccaagtgattgatcactgttttccctttttcatctgttgacttgtctatgttaacttggattctttcaccttgaggacttgtcaacataattgttccattggcacactgtatcactccatcacaacttttcaaccagttgcatccaagaatcacatcaatcccgttggatcctaggaccactaggtcgactgtaaaatctattccctgaatcttgatattaacatgggggcatgagtgt

SEQ ID NO: 109971 - DNA, 663 bp, Zea Mays
gcagaatggaggagggtgttttgattcagttcagtagctgaaaccagatttagtgtttcttttgtcaggcattggagttctcttctgtctgatctaaggagttttaagttaagacctctgtagtaaagtgttagagggtgggtttatgaacaattctccttaagtttggtttccctgttgctgttagaaactgtgagatccaagaggttagaaactgtgagtcccaagagggtaacagatgggatgcagtttggacagtgggcaataggttcagttagtgcagtgcgaagtggatttctaaaaaatgattttaccactgttgtgccttgttgtttctggtcgaagggagtaagtggatgggcattggcatttgtgggtaggataagtattgagtactcaaatacctgaagctaaagagatttaaagtctatccacacagatgactcacctgttgtgtgcttcctatcaaaacaccagcgcccctttagcttttacctcacggtggcttgatcctgcgtgtacttgggtgctggggctgtgtgtccatgtgcatgaaatatttggactcaacacatgcgtcgtgataaggacaacagtagcagagcctccttgctctatcctgttatcatggccaacagtgcactagccccgttttcatgtaat

SEQ ID NO: 109972 - DNA, 295 bp, Zea Mays
gtgcagcacttgcagcagtagcagcggtagagcaggcagagcggggtggccagttgcagatctcctcagaccaaattgcctacagagttcgtcgcctcacgtcttggcctcgctcctccgctccccctacacccgccacagctactactccacctccctgcaccagctcctgtcgctctagagccatccaccacttccgccatacccaccacctccaccactcctgcttccactgttccccctcctgctcccatttccgctccacccattccaccaccccgcttcagggagcgag

SEQ ID NO: 109973 - DNA, 325 bp, Zea Mays
ccctggcctggcggggtcgcgcttagccagccgttgcaggtctcctccgtttaaaacagggcacctagctgttttggtgagaaaccctagattgattggagttggatgttctggagtggcgaggaaccctagattgattggagttagatggatgcttgctcgttttgttagttcctttaccgtccctcaaatccaaacattccttcctaggactggcacggtgctccagttcatctaaagcaatttgtcttttgggtaatactggtttgtgttcgttttttccaaaactgtctggggttcagtttcagctgaacctgctgtccgc

SEQ ID NO: 109974 - DNA, 588 bp, Zea Mays
aaattcaactttcctttcaggtggcatgcctggtaactcttcatgaaacacatcagggaattccgacacaattctaattttctcaatcggattggcctccttatcatctattaataaatggtgacaggctccttcttctagttcaggcaagtacagcttggttactacttcttttccggatggagacattaacttgactgttctcttgtcacaactgacagtggcttggtttatgtgtagccaattcatccctaggatgacatctaacccttgagtacccattactactaggttagcggggaagtctataccccttatttcaatccttagattcggacaaatcctatcggactgaacttttcccccaactgaattaactcttaaaggtggaatcattgattctatggggatgttatgtgcttctacccaagatgtagaaacaaaagaatgcgtggcaccagtgtcaaataatacttttgctggatgggattcgactggaaacatacctactaccacatcctgagcatcctagattgcttcggcctccaggtggttcacctttccacagttgtaggcctgaccacggtt

SEQ ID NO: 109975 - DNA, 442 bp, Zea Mays
gaaaagttaagtccgataggatttgtccgaatctaaggattgaaataagggggatagccctccccgctagcctagtagtaatgggaactcaagggttagatgtcatcctagggatgaattggctacacagaaaccaagccactgtcagttgtgacaagaggacagttaagttggtgtcccaatccggaaaggaggtagtaaccaagctatacttacctgaattagaagaaggagcctatcaccatttatcagtagatgacaaggagtccaatccaattgaggcaattaggattgtgttggaattccctgatgtattccccgaagagttaccaggtatgccacctgaaaggaaagttgaatttgccatagagcttatcccaggcaccgcccctatttccaagagagcttatcgagtgtccggaccagagttggtggaactcaa

SEQ ID NO: 109976 - DNA, 392 bp, Zea Mays
caggaaggcagagtgattgcttatggctcaaggcagttgaggaagcatgaggggaattacccaactcatgatcttgaattggctgcggtggtttttgctctaaagtcgtggaggcattacctttatggcgaggcttgtgacatttacaccgatcataaaagtcttaagtatatttttactcagaaggagctgaatttgaggcagtgtcggtggctggaattgattaaagattatgatttgtccattcattatcacccggggaaggctaatgtagtggctgatgcccttagcgggtccggggttccaaaggtggccttgtcgttgatcgctgatctagaccgtttggggatcgctttgtgttatttcggcaccgctagcgaggagactcggat

SEQ ID NO: 109977 - DNA, 367 bp, Zea Mays
tcggtatggattatgaaaagattgatgtgtgcaaaaataattttatgtttttcatgaaggagcatgcgggagagaaaaaatgtctaaaatgtggacaatctagatttgtggaagttgttaatgatgagggtgacaaggtgatgacagatgttgcacataagcagcttcgatacttgccactaactcctcgagtgaaacggttgtttctatctaaaaaaccgctatgcatgtgcgatggcacaaagaaggtgtccgtgataacgatgacctaatcgtgcacccttcagatggggatgcttggaaggctctcaacacgtttgatccagactttgcagctaatccgaggaatgttcgaatcggcctcgcg

SEQ ID NO: 109978 - DNA, 536 bp, Zea Mays
gcatatgcacaccctggaggagcctcatctcactgctctcaagcggatcatgcgctacctctatggctccctcgactacggccttctactccgaccctccccgacgtcgaagctcgtggtctacaccgacactgactgggctggctatcccgacaccaacgtcgtctcctaggccgccaagtgtcaacctgtggggagggaagaaacttcattacccttttttgttatactgatgaattgtaatttgacccatgacccatctagcatgggacaaaaatattcccgggcacatatagcgcaagctctcctcaacaaagaagaaacgagcgagtaacttataagcacgggacctcaaactgaaggttcccaatgttatgtttcgaattagcaacaactgagttgaatctaactgctaaatgtgtgcttgctttactgcaggctctggccacacggataaaccctatcacaaagattgagaaatccagcgtagtggtaggggccggcgcacgtactcggggcaagcgagcatatgccaa

SEQ ID NO: 109979 - DNA, 290 bp, Zea Mays
tttagttaatgcttgaggtagatcagaaatttctgtttaaattaaaacagggttatgcaaccatcggatggttaaggtagctgcataaggccgagttggtcggttacccttaatttagtgccgagtgaatcacattagaacaggtggatagggtctaatccatgttacaagtattaactaacctgtttgagtgggtcacattgggttagttcagattagatggaaactagattagtttagcataactagatttgactaaataagacctaattaattttggatcagattag

SEQ ID NO: 109980 - DNA, 532 bp, Zea Mays
catggaggggacctgggcttcaggcggatcccgtccttgaagtagggcttctagggctgcaatcctagcatgggcatcctccagctccaagtgcaccctagagagattcagggtgacactgtccaggtcggtgttgagaccggccactacaccagctagggtgttgaggcgatcctcaccagctccacctggaacaatgctgatatggcttcctccactcagacatagaggaagatggcagaacctcatgtcatgcagctgctgctggtaggtgtggctgagagactatagagttcgtctggtagcattgctgaccgatgaagcgtaggtggatagcggtgtcagggactcatgagctgatagagtcctgaaccctctatcccctgcatccataaccctgacgtgaatgcgagtgatgtagtagcaagcccggggagtgatacacctagcccaggtggggttggccgaggcccaacaaattagggttgcccagagcccaacagttcattaagcacacccaactcagggaaag

SEQ ID NO: 109981 - DNA, 674 bp, Zea Mays
cattgctgactagcggttgcggaccattgagccgaggtccattgcaccacccgcaaggtctggtgcgccagctggctcaggtgcccgaaaacatcgcctctgcacaaacggttcggtgcaccagaaacaaccctacttgttttcttcaagcttcttcacttgggcttgtttctagtcttatgtctttgactttgcttgatacttgtaggtcttctatgtgtcttctaatgtcttcttcgaggtgttgattcctcattgccttattataagtcacttttgcatcatgcaaactacaaacataaacactagcaaacacattagtttacaaggttgaccatcaaacaccaaaaatgacatagttaaatgggtcgaggtccattttctataatcaacatcgtactctacttcgtacgagtttcgtgtgtcgtgtgtcatgtgcgaagcacgcatagatccgttttctcccttaggtgtcgcctaataacaagataatataagccttacctcttacatgcacaaaccaccacgaacgcttcctcctcctcgctgtcgtcgtcatatattaacccgcaacttctcatatcgcctccctcaccctagatcttccgcaccaccatagatgacatcgacctccccctgttgacccagcatctcaaaccgctgccgcaactctc

SEQ ID NO: 109982 - DNA, 499 bp, Zea Mays
agatggctcttcatcctctttcttcatagccctctttctcttttccctggccccagtattggccaagggatcctcgtaatctgggtattcaaacccaatggcatccattaccctattcaatcaaagtttcccttggcctccaaaagcaaatttcatgtctttgtgctccctagctaggtagttgccgcacatctccttgcacttctcttgaatatactttaaccagctagccgaaggagatttacatgtggactgctccatgaaatcaaaagctaaggtaacaatcccttcatcacttccttcggcagcttccacctagtctgagttggataaatattctacgtgagagcttcttgaatcaggtctcgagacccaatcttcttcacaacctcaccaaaagccttgaggcattgttcagcaacttcgcttgccatgcactttggccatttcacagcaaagcttatcttcaaattgctcattaccatccactgaagtcttc

SEQ ID NO: 109983 - DNA, 845 bp, Zea Mays
gcttacaaaggtgatagtttgtcttggtattcagaatgatatccataaaggatatgatgaatctgtgatagattcgaaaatttcagatcattaatgaccatcagtaatgaattgtcatttccaactggttatggttggagtcaggaagttttgcacgctcctgacttgtgattaactgcatgtactgcatgtacgagttcccctatggtttttagtacgtgggaatccgtgaaagatttcccatgcgtacattgggtatgttcccaatctcaccaccgcagcgtacatatatgggcacacagaaaactggggatctatgtgagaattcattctccgtcgatcattaagttttagaatctcttcatgagaatctatttacggctcgtacgcttgctcgaatcatgagctattccaggcattagggggagatttcgagtaccaaaattaatgccaggaaattataatgaatgcagtaagcattcaggctcaggatcacgtactaaaactaaacctttaggttcgaatgatttgcaagaagttgcaaattgactgccatgtgcatttactatgaggtgtcactcaaattaatcttatgtggaagtgccagaaagagtggttacatggaaaaccacttaactccttattgcaacgacgttgtaaataagagggggagaagtatggacacaaactgggattaagatgcttgcaagcagctgaagggtaggccttctgagatagtaaatgcagaccatctattcgttggtaaccaacctagtgttggtggacacctaaaggatattgattatcctgtgaatggaatatattcacaacctagctcagtgcgc

SEQ ID NO: 109984 - DNA, 512 bp, Zea Mays
tcagaaagaaagtcttcgacaagaatgagaaattcgcaggaaaatggatcagagaactgccatatgtagtctggagcctgagaactcaacccagccgagctctgcatggaaatacccccttctttatggtttatggttcggaggcagtgctacctgccgatctcaagttaggggcaccaaggttaatctttgataacatagcagaagctgaagctactaggctagaagatgttgacgtactcgaagaggagcgactaaatatggtgattcaatcagcgcgataccagcaaactctgaggcgctatcatgataaggccatacggtgtcgatccttcgcagtgggagatctcgtcctccgccgaattctaacgggggaaggacggcataaattgtcacctctatgggaaggaccattcatagtagcagaagtcactcggccgggatcatatcgcctcactcagatggacggaacagaaattgggaactcatggaacatagaacatctcaggaag

SEQ ID NO: 109985 - DNA, 287 bp, Zea Mays
ttttgcttactaatagaatcccaatgtgtgatatcttttatgccaaaatggctttcatgcattatattatatatcttcgggttacttcgggtaaaactttatgcacgaggagagagcagaaaattaacttatctgtgtttaattgtatttcaatttaatttcccagatttccaagcactatagagcttgatatagttgttatggccacttggcgatatataaatatgatgccacacaacacagtcaaataaaatataaagccaaataaaattgtttacgaaggttgc

SEQ ID NO: 109986 - DNA, 598 bp, Zea Mays
gggaatttaggtgggtgcagtgggagaaaaggtcatcatagtggttgtcaagggtgtggagatatctggccatgtagactatggtggggtcatcatcattaggatctctccctgacaaggcctaaattcttttcctccaggtaggggtatttttgttgctgggtggaaagtaacgaaggggtgtctcggagacttccctgctgtagttttggcatagatggcggagggctttttgggcaacattttggcaagtgtctgggaagcggtgtccagtggcggtgacttgtaagggagggtgatttgggtagtttcgactttctcccaggtagactgccatagagcatttctcaattccattctcacggtattccttccagacgtactacggcttcttgcggatccccatgcgaagcacgcaactccgtaaaagatgagggaatccttccacctctgagcagtaggatgtcctaatgacaaaggagccttccatctggtagcaagagaagaagggttggttaatatcggggggaggagagaagattctttttagagggtaagaggtctttttctttttaaggcaagcttttaaggtcgggct

SEQ ID NO: 109987 - DNA, 479 bp, Zea Mays
tgtgctatctgtagggtcgtgcgtagtcgtagccctggtaaggcacatcgtctcgctcattcatcatatgggtccctgtagcgagtctgctactaacatcttcgtagtagtatgcagtgggtcccgtgggtcaatcccatggcacgatagcaagtagcgtagctttcctgtcatcatgggcctgccttacttgccaacgtgcgtaggcatacacccagtatggtgtatccgttacatcttttcaaatattctgggtactgtagacattctgatgctgagatcccttcaactgggattgactagtcctatctactggtggtggttcgcctgagacggtatgtggcgaggtgtcgtctgactttcgttagagaccttcggacgccgtacctaaggcccatatgtagtttggtgatgacccgtcttgtcccattggtgtaggctcgtctcattgggtagaccttctcttacactagtctcta

SEQ ID NO: 109988 - DNA, 695 bp, Zea Mays
aacaagaggacagtgggcatgaacggacctgaaacgctttggccatggcgaggtcacaccgcttggtgttcttgggtgatttgggggaaatcccaaattggggagttctagtggatgattcgaggcacgggttgctctactgggtgcacaattacttagcggagcaggcggggtcggcaatttacaggctcccacaacggtggcgtccaatttcgtgaagatgcgctggcggccgaaggggaagaaggttactggcgctcgggattagtggctttcaccgtggcaagctccccggcgaccaccggacgagctaacgtgagtcacgacggtgaggttaatgtgccagggcacatggcgcaaggtcgcgaagtggctatctctggtgaacccatccaaatcaaccgtggtttgctcgggtacggtggccggagtaaaatagtggccggagtgtatcctcagcgtgatatttacggacccccggtgttatccaactgatccgagcgcgaatcaccaacagtgagcacgaatccgagcgcacggctcatcggcggtgaggggatctgaacctgatcctatctgtttactgtaccatgggattgttcttcagtcagcttgatagaccaagtttggggtgaatttcctcctgattttacatgccaacaagaccattgttctgtagcaaagttgtagcctaa

SEQ ID NO: 109989 - DNA, 479 bp, Zea Mays
cacttcccacaagatgaaaggaaagccatcgcgagaaagggaatcagaactgaaacgagtgtctcctccactggcgggggtgggtgaattcatctgcggaagggaatcaaaggtaaagattatggtggaaggaaaaagaaaaaaaaagagcccggatggttttaaagaaagtgggttagctcaagttttaattcctctttgtgtttaatatgcatgcatgctgggagtaacgtttcctctccaaataatagggtgctcttagggcatccttaaatatctaagtactggcccatggggcctaattaataagccacctatccctccctctatgcctaaggcctttcgtcctaggtctagcggtctagtcctgacgatccgtagcagtttctaggcaagttttaatttttgaaaatggtattcatggtttattgtccctctctgtggtggaatttgctccgataccagctgtggcagaacca

SEQ ID NO: 109990 - DNA, 792 bp, Zea Mays
gaaatataccttcagattcagagagaagtttgatgaaccaaacgatgactggttgaaatgcattgaagctaccagcgacgagctgcttgggacatattcgaaggccgaagatgatgccttgtccgcggcctttgggggtcgaggcaagaaaagattgaatagggtgtttgatgcaattggcttcttataccctgattatcactacccattgtgaatgcaagggaagaaaagaaaaagtgccgcttcggccaccactgttgtgccgaagggtaagaaaatgaaggttctgacccaccggtcgcgatatattgaaccggccgtagtgcctgaatttggtgaagggacctcttcaactgtcgaagcaaaacaagctgctcccactgtgcaaagcgttgaagaattgattgtagtaccgaaggtgcctacagtcaggctagccgaagccaaggatgatatggctagagagccagaagtggaaaaaacaatgatgatgccaaagattttgagcccaccggcagcggtagaattgccgaagatgataaaggctcctgccacaactcccaaaaggaggaggatggccagcgtgctagacgctgttaaggagaccacaaaagccttgacccctgctcttactaaggaagttgccgaagctatcaaagtccaagccgaagacgaagctgggcctttagtgcccattaagacgaaggctgctgcgcctgaagataaagctgagcagcaaacttcggatactggcatggcagcggggaaagataagatagaaaaaataaaatc

SEQ ID NO: 109991 - DNA, 305 bp, Zea Mays
tatgcgtggcgcaaagtctatcgggaaaaagtagcatcagattatttgtcggtaaatgaatgtcatgatatcctacagcgaaaaaataattaacgagcgagcgtgagtaggaatcgaactcgtgaccctttgcaaaaagagaagacatatatctaataactagtgaggattattcactctattctcggtactattcattataaaattgtacacgttaactattgaagggcaacaactcacttgcaatgtaacgacgtgagctggctggctgtggattgaaaaaatgtgaactcgtttaatttttc

SEQ ID NO: 109992 - DNA, 404 bp, Zea Mays
cccaccttgatgttgtcgtacatctgccacttaaaacctcccttctcccctatcaattcgagagtggtgttttacataccccgtgcttggccataacctcatctttgccacgtgcaaatgttgtcttaactccattctttgttgtactcatacccttggttcaaatatacctttacctcttcccttacacccttttatgttatcctcttcaacccttgtaatacctatatttttaccatgacatttactttgatctagcctttggagccttctcctttccatccttagttcaagagcggtgctttaccatctcgcccttgattgttttccccagtgtcgccttgcaagctttgtcctaatttgatccttggatgtgtttttggttgccattcctattacctttg

SEQ ID NO: 109993 - DNA, 522 bp, Zea Mays
acggtaaaatcgaaggttctagccagataaatcataggtctagggttggtaaaatctgtgctcttggtaaaatagcatgttctagccaggtaaatcataggtcttgggttggtaaaatctgggttctgccaaaatggaccagctcctccccagccaaaagacagaacaactccaagtcatagttctagaaatctgaatccttcaagacgcgctgaagtgggcatatcaagccagcccaaaaacttgaacacgcgctgaaaataacacactaatgtggaacaacactggctccttcacactttgtacaatcagttcagttcagtcaaaagctcccataacagtccacaacaagcctaaaaagatttccagaagatttgcaaaaacaaaagtagtggtgcaaatgtggtccgagatattaaataaaacaaagtcaatccattcactcttactcattcttagtgatactttcaattggttcaattctaagtaacctatgcacaagtcatctcaattgcaaactag

SEQ ID NO: 109994 - DNA, 531 bp, Zea Mays
catagactgtaaagtgtaatccaataaaagctgaatgggagggtgaggagataaatagtcacattttgaaaataattctagcacaaatcaggctaccagcataacagggaaacaaaccacataagcggacattatggcatctaaaaccatgcagtcacttcaaacaacgcaaaaacaaaaacagcatacgctcaaatcaattatcaggagctaacagatcttgttgcatagtaaacgacacaaagaacataaaccgtaatttatatattcgcaacacgaacgattggtctatccatgtttgtgtttattgcgagtcatacaacgtcgacattgaatagcagtcagaaaaactgaaccctctttacatatcggataatcagatgaaaaaaatggtgttgcactacaaaaactgtggcacattaccactgcataataagaagagctggtactgtggtgcttaatatccatgatacaaggatacaaaataaaaaaaagaatatgacattgaaatcacttgatgtgccaatgcta

SEQ ID NO: 109995 - DNA, 569 bp, Zea Mays
ctcgaatggatcaatttggaattagtatgaattttctagggattaaacaagttttaatgattatttttacattaaaaatcactttccatatttattcatctaatttaactgttctctggactgcgcacataaaatacagaagctcgggtgggtctctgcgcaaatagttccaagactcagaacactatacgcagtactgcgggttgattttcattttccccgatggctctttagcgaaattcctcgccgaaagggtacgtgggcaatctgtccgttggatctccaccggacaatcgagattagaaccgatacttacgcgaaccggtatgaaatcttggttgttggatcaaaaatccatggcaggggactcccccacaccatgatctaataccagtcattcgatctagatgggcggccaagatcttatgtgcccaagcgttatctacattctaatctaagccatcagatgcgaatccaatgacccgcgtaggttttacccttctccagccggagcagggcgacggacatgagcacacggcggagccctcccaccggcgaactaagaatcg

SEQ ID NO: 109996 - DNA, 535 bp, Zea Mays
caggctcagaaatctacctttccaaccaacaagtcttttgtccattttttctatcattgggcaccaaagagacttactgactttcttattatcaattgggactccaagatatttcatcggaagacttcccacaggacaagtgaaaatgtcagcatacagatcaataaactctttagcttcccctaagcagaagatttcacttttgtgaaaattaattttcagccccgacatatgttcgaatagacagaggataaatttaagatttctagcaccttccaaacaatcttgaattaaaaaaatagtatcatcagcatattgaaggcaacaacaaccattttgaatgatgtgcggaataagaccacgaatcaaacctctttcttgagctttttgaataatgcaagccagaccatcatcaacaaggttaaacaacaagggcgaaaaaggatcaccctgtctaacacctttatgagttgcaaaatatggaccaatcaaatcattagttttgatagccactttgccacctctgacagttttc

SEQ ID NO: 109997 - DNA, 402 bp, Zea Mays
atctgaggcacagttgaaccagatgtgctcgagtgatctggtgaagggagtcgattgcggagagataacttcggacgtggcagcatcccgtgaacccagccgtgcgtggccggagatatcccacaggcggtcgccgtggctcggtcacttccgccgtggtgtcacccatgcctcgttttccccttactgtgcctcttctctacgtggtaaccatgtgtgaacaatgcaatctgcggccgctgatcgttagccggaccgccgtgcctataaatagcgccatggaccaccgcgaggcactcacaatttcaccagtgaacttggtagaagccaaaattcgcactgccttctccacctctccccaaattgagtgtgcacggtgaatcggtagccctttgcgatcgt

SEQ ID NO: 109998 - DNA, 413 bp, Zea Mays
cactattgagcttctagtcaaaacgccatggcatcaaacgcggtggagtagaggatgttgagcctgctacctccatccctaagaactttacacagtcataccgtgccaatgatggggttgacgataagcgtgtatcaaccatgctggggaaggtgcctagaacagtcgaaccgatcgaaagcaatggtgtggttggaccaactgaggaagatcgaggctactagccgagcgttgaacacctcaagttgttcgagtttctgacttctcttcgaagcgtagtggtcgtaccccccaaatatcagtaggcaaccagcttcgacgaggaaaatggggcttcttctccttggctcttcgtccttccagggctcggaccccgtcctgggtggtgtctccttgcttaggaacttcctaag

SEQ ID NO: 109999 - DNA, 488 bp, Zea Mays
gaagacttcatcctaggcatgtcaggtcaatccataactctaatgccaacgatgaaagggccaacaatgcttaaagcagccatcatagctcatagccttcaggcatgcagcagacttcttacagaccactagctctaagaggcagaggaggaagaagcttcagtggaggaaggttcggtaatcaacccaggaagttgtactacctcttctgtggcgaggacaagggccacacaacaaggacgtgtcaggtcacaatttagaagcaaaaggaaattgttgaagccgaggcgcgacagacccagccgaagcaagtcctccatactgctttgtgctactctccattcatcccagaatatgtaggcaaccaatagactatgacttctgtagcttcaacaagtcactcccaagctcctgggctcaattaccaccacccccaccaatggcacctgccccaaaccatgatcatcagccagaagggcaccttcggc

SEQ ID NO: 110000 - DNA, 368 bp, Zea Mays
ttaaattgtgatttaggaacctttttaccaaactgttggagatgctcttagtacggagggagtattttgttaagctacatagatatgtgcagttataagatttaaattgttggtcaattcattattaggaatgaggagatagagatgagacttgaaaaggtgaagctcattggcatcgagttggcacgagcttaatggcgagctctattattgaacgtcttctcaccgatctagtgtaggggcataacgaaatggcaggcgatgataccaaaccttggtactacccaatcatgcatggtgttgcacccattgcatagccattcaaccaaaggccgtcatgggcggcagtgctggactgctggccgaac

SEQ ID NO: 110001 - DNA, 740 bp, Zea Mays
ggaagaaaatgctgatgaagaggaagactacaacactctagtcccatcaaagcccagccacttagattttgaaaaatctaccgtctctgaggccaatgtgccgatgatgatgaagctcggttacttcggggagacagagaagaagcttcttcgttttgccggcgaagaaaccatcccagagccaaaagatgacaaagtggtagttttcaaaggcttttttaaagctggattgtggtttccacttcatgagatgattggggaagttttgaataattatgaaatttatcttcattagctgactcctaacactatcgttaggctcagcatcttcatttgggcccttcgaagccagagaatggatccaaatgctaaagccttctgccgagtacatgagctacattatcagacgaaggccagagaagatgggcttcatgagaattttggctgttacaactttgcttaccgcaaggatatgaaggccctggtgctaagctaccgcaccaagtggccaactggctggaaaagtgagtggttctatgttaaagctgatgagaagaaaagggcgaagctgaagacgttagtactgagcccgctgagtttgagctacgggttgactaggcccttgtggcgtatgtcgtcggggtcaccatgccaacaggctgtggcagaatttagagttgtgactgagcagatcagtactagagatctggtgcaagaattcttagcatatggggtatttc

SEQ ID NO: 110002 - DNA, 598 bp, Zea Mays
tgttgagccaggtaaagtgctagaccgaagattggttaagaaggggaatgcaaccattactcaggttctggttaggtggaccagtccatctccagatcttgcaacatgggaagattaccatgtcttgaaggctcgttttctagctgttcttgcttgaggagaagcaagatttgaagggggatgtaaggcctggtgatattgctaccttttggtgttagggtttgggtagtattttgataatattttgtttgtaatccattagtggaataatgaccggtttctagaagtagaaaggggtattacactatcgtggtagtaggtgagttcatccgtccaatctgtgccactggaagagaggacagggaggagtggaggtgcgacgaccaatggtggtggcggcgacggctggaagaggagagcaaggagaatgagagaggatgaagcatgaatcgggctgtgtgacgggagagcaggtatttttaattggaccactgtttattttgagaaatcggagggtgtttttgcgaaccaagtctcgagatgtgtcagtatatgtataacgtgtttggtttgaggaataagttagtctattatcttc

SEQ ID NO: 110003 - DNA, 576 bp, Zea Mays
cgagtagcggaatcaacctgaaacattatctataagtaaatcatcattagagtcatccgtcacgcaatcctcaacgacaacgtcgttccacttgcttaattgtcctgcatcaccctcttctacctttctcttgtagaaagcgacttctacttcatcggcagtctgggaaaatagctggtccttagcatccgcttcatcagccttctgctttgtaataagcggcctctgcttcatcggcggcccgagacataaactcatcctcctgctgttgcgcatgtaatcttgcctcaactagcgcgatgagctcactcaaccttgacgtgttgtcatccttctccatcaacttcaacaccacatttgcatagtacaggaccagactcgcactcttccggacactcattctttttattctcctttgtctctgcctctcgccaatgtcgtgtaggaccatacaactactctatgaaattacacttacgtttgtcgtatgctacaaaagaatacattagtgaatttgtgaaaaagttgacaaaattgtggacatatgttatgcacttacataattaatgtctggac

SEQ ID NO: 110004 - DNA, 385 bp, Zea Mays
acacccactttgatgaccttttctcccattgcacccacctaaactcctgggtagaaagcctagagcaacgaatcaaggaactgaaggaagagaatgcagcccgccaaaacagtcttgagatggcagaaggcgaggaagccaacactcatgaggcatacaggaccctgaagaaggactattccaggaagctaaagaggttcgccctagtcaagaagaattggaaacgtttcaaaaaccaaggatgccagactgacctagaggaggagtccccagcagcgttgccttccctagggctagataacctttcagatgtcgagaaagtatccctagctagccttgacgagattctcaatgaatttggggacactttagtagtagacgctca

SEQ ID NO: 110005 - DNA, 871 bp, Zea Mays
aatttttcttaactaaaagaacccaagcctctattgactttctccaaaccaattggtgaaagttgcagctcaacattcacatttaatccaccagaccaccacacacctagggcatcagagaaacatacttgaacatcacttactattttactaactaagagcaagaaagtagcaagtgttactcagaacatgagccctttatacgcatagtcgaatctcagatgtgaaaacgtaaactcaatgaacaagcattatccattaaccaagctcgaaatgcatctggcatccgatccgctgtcaaataatgtttatgaagcaaaacgatagaggattcaggcatcctgcaatagcgcaaaatggcagaggactaaggcatgcattgagtgaacggcacacaggattgagtcagtaacaggcacaacagtaatagttccgttgtcatcagcctatgcggccttgtccaaacttagactacagaaacacattgacacattatacataatgttggcatggtcttagcagttcgtacttaacagtagcaccgtcagcagcctatatggctttgtccaaacttagactacacaaacacattgtacttaatagtgtgatttttgctgaatatttctcctgtatatttaacacagaaatagtcaaataagtcaattaaccagggtccaggggtcaatttcagtgttccacacagctcaaatttgaggagagtgaggtgcagcaacagagaaactaatggttcaatagaagagcccctacacggttacatgtgcatagcacagtgtcaaaaaaataatggatgtacagacaacagaccatgctataaacaggtagcatgaaaggcagaatgatactaaccttt

SEQ ID NO: 110006 - DNA, 1127 bp, Zea Mays
tggttccataatcgtaggtcatgcatgcatcatatttaaactacactaagtaatcttcccctcttatagagacatggcacgcacaaagactaaccagcggaaggcgaccaggctttagggtgtaccaatagtgggattaatgatcccataggggatctagaggctagagttgaacgtctaacgatggaattgtgccatggacgcagagagcgtgcgcgtgatagtcgctgcatcgttgagtttttagtagaggttgaacgtttgcagtgggagattgtggagcgggatagggctattggctgggctataaattcatgatctatagcctaggattgtgaggcgactgcccgagcccgggtggaagagctaagcgtagccctggaaaatctacaagggtataataatgctctgcacgaggaagtgcacgtgttgtatgaccagctacatccgaacgtttcaccggaagttgcgacgatgggagctagtgcatcaggagcagctggcggaggaccttatggggagttggatctctttggagcccctccttccatgaacatcgtgcatgatcgttctcccgaagctagcagtggagcgggagcagccaaagatgtggatgactagattactatagaagtcctcgacatgaggggaccagtagtgggattaatgatcccataggggatctagaggctagagttgaacgtctaacgatggaattgtgccatggacgcagagagcgtgcgcatgatagtcgctgcatcattgagtttttagtagaggttgaacgtttgcagcgggagattgtggagcgggataggggtattggctgggctataaattcatgatctatagcctaggattgtgaggcggctgcccgagcccgggtggaagagctaagcgtagccctggaaaatctacaagggtataataatgctctgcacgaggaagtgcatgtgctgtatgaccagctacatccgaacgtttcaccggaagttgcgacgatgggagctggtgcatcaggagcagcttgcggaggaccttatggggagttggatctctttggagcccctccttccatgaacaccgtgcatgatcgttctcccgaagctagcagtggagcgggagca

SEQ ID NO: 110007 - DNA, 452 bp, Zea Mays
tgggtattcgcaaaaaagaagaaaaaagtgtgaaacggatgctgcgataccaaagtgcaaagatccgctactacactccggcgatcgagtcttaagcccactgttgcgaccagtcttaaggcccggtccagtatatatggatagaaaccacaagtcgcagtctcgccgagtagcgtatagcgtaacgtgtaataactagctagacagctagtataggtttcttgtgtggatggccatggcctcgacctcgatacaaagttattaaataaataaaaaaggaactctacgtctctactactagatcccacgtctccacgatgactcgactccgctccgctcgcatgtttcctcctttgctcccgtgtagtgtatagcctcgacatccatccgtatcgtgtccgccccaacctaagcttaagctaagcttctccaaatccggcactagtggccct

SEQ ID NO: 110008 - DNA, 533 bp, Zea Mays
ggagttaccacaacattcattgacattgcactgttgtgctgttaaaaaatttaaccatagccgaagctttatgcattgcactttcgagcgaacacttcatcgtttaaggttaacttcgtcagacgggttagcttcgtcaaacggtaaaaaaccgtcaaaatggccagagtgtgatcaactgcaagggtgtctcgtgaggagggcgaaacagaggccgctgaaacggcaccgattttagaagtaatgaaacgatcaggtctggttgtgggcgacgaaggtgcttctaatgccgaagcggaacagactgtggttgaagatgaaaatgttgaagagagtgaagaagactacagtattctgatcccaacgaagcctagtcatctagattttgaaaaatctactgtgacggaagatgacatgcctatgatgatgaaattgggctattttggagaggcggagagtaaacttattcgatttgctggagaagagaccatcccagagccaaagaaggatgaagttgtcattttcaagagctt

SEQ ID NO: 110009 - DNA, 844 bp, Zea Mays
cctccagcccttgccacgccttttcttttgtatctcgtgggccatggcttgcagtgcagcctatagcgtgcactgcaggacagcgtgtctggcgtcttggcctgcttacaccgacacgtgactctctgttggctgctgcatactcgccttgttgccggcaccgcgaccggggctgcagccgaggtagtcccaggttcaaatccgtccctgttggcagatgttggaaccaatgtttacaagtcgggcgaccagctggtcgagctagagcagcgaccaggcgcctaatcgcgattagggcgacgattaggtcgattaatcggtcctggtcgacctctggtcgtccgttagtcgtcctatagatttatggacatatgtatatgtatataacttatattaactatataagcactgcatttctgcaataatataggcataattagtagcatactagcagtaattcagtaaaagtgtaaaactgaatccatccaaagtccaaactgaaagtaatataggtactgcagggtgactgctcaaacagaggtaatctgaactcagggtgactgctcaaacagaggtctgcaggtgcaccttcaggtgctagtgctaccagtggtaatagagggaagggagactgggagataatcagagaagggagagcaggtgctaccttcagatgatgagctcatcttcaattcttgactaggtgacagacgtcggagcactggggtactggacgccggtggcagacgctggacggctggagcacttggagcagagacgtcggcagaaaccagagatgacagaggagaggagtagggtttactggtggctgggagggttactg

SEQ ID NO: 110010 - DNA, 372 bp, Zea Mays
cggcctctgcgttggagatgctgaaggcgacgacgggtagaatctctagggttcggccgccgcggtggagaagaaacagacgacggcgataatgctagggttcggccgccgcgtgcgttacgggtgaggtgagctgaataactgcgtgctcgtgggtggattcgtgggcccgatacacgtactctgctgggcgaaatctacgcgaagacccatggatcgacacgtggattactgtttcgtaaacggaaacataagacatcgtaatatcaatattttgtgtggggactagtacggctgcccagattgcgggaacacaatcttctcgtgggcccggatgcccgaaacacgcgcataccagaagtgtataaactg

SEQ ID NO: 110011 - DNA, 563 bp, Zea Mays
gctttactttcattaagcccgaccagaaatgcgaatccccaagtttccactcaacctgagacaaaggttttgagcctacatatttattgtggagaagttgttgctacattccatcagaggtgagtagtttgtacatccatttactaagaagggcagtattcatcgtattcaactctaggatttcaagtcccccttgatccttaggttgacacagaatatcccatttgacaagtctgtatttccttttgttatcattcccctgccaaaagaatcttaagcggtaatagtcgagcttcctacagactcctttaggaaggaggaagaaggacatcatatacatcggtaagctactaagtactgacctaatcacggtcaagcgtcctctgatagacatgtttttcctctccagctgctaaggttcttttcaaagcgctcttcaactttagcccaatccctaattcttattttttttgaaatggattggaataccaaggtagctgatggaagtttccttggcttacatccaaagagttctgtgtattgttctaatttctcttgggcag

SEQ ID NO: 110012 - DNA, 556 bp, Zea Mays
tgagtaaatgtaaatgtataaataatgagagggatgggaacatgacaatgttttctcgaggtatcggagagcctacactccccactagtactcattggagcacctgtgcaagggtattgctccacatcgattcaagcaagaaccaagtgctcactatgtgagagggataggaacatgatgaatcgcccacaacaactcacaccataagtttggtcacccacaagttgtaccaagtgataaccaaactgctaaaacaccaccaagccatctaggttatgtcgatcaccatgactaacaagcataaattctcacttgacccaaaaagcctaatgaggaaggtggatgcacactttctactctgtatgcactaattaggtccttaatcttgcgattatcgaatattaatcacctcattaggcaagaactcctccttgctctctaatgtgtttcttcagctaaacaagtgagcaaaagagccttaatggatatatagccccaaggcaaggaactaaatgttgcccctacactcaacattcatgctgacactagacatgtc

SEQ ID NO: 110013 - DNA, 313 bp, Zea Mays
tgcttagcgagtctctgtcttcgaaaggttctatcattaaagacctctgtgcctcgaagaagctagtgtcacatgagttagagattgttcgccgagacatcaaggtcttggaggatgtctatgaaatcatgaaggtgtggtgcaacaaggaaatggacaagacagtccgagctggccgcatcttgatgaaaagacccgacatcgtggttcctgatggggatggaaacggtcggtaaacactaaaaccattatcgttttcatattttttatcgaaaacaaaatcgaaaacggtaactctagaaacggaaacgat

SEQ ID NO: 110014 - DNA, 613 bp, Zea Mays
gctgggcacgtgtcaacaccatccttggggtccaagttctctgcggtagccacctctaaggttgatgggcccttagctacttccataggaccaggacgatccaagtcagtctcccgaccctcgagatcgcgctctaaggtcgacgaagcacgggatgacctcaacccagcatcaagcacatcagcacaaacctccatcacaccatcatccactggctctgataacaaatcctctggaaccatatcctcaagagtctgatcaaaattggccagggacagttcttgcagaccaatgagagcacacaaagcaggagaaagaactccactactttcaccgctagcgatgaactgccgactgtttttccgagtcaaaggaacttcatcttcttcctcctcgtcgtccacattagcaacacaggcagcacccccactgggatcagcaacagatggagcacccccattgggatcagcaacagatggagcacccccattgggatcagcaatagatggagcactcacattgggattaaaaacagattgggtacacccattggggtcagcgttagtaaattcagtcataggcacttcttcagcagcaggaaccgaggtaccaa

SEQ ID NO: 110015 - DNA, 496 bp, Zea Mays
gtcagcctgacagcctgaatttgagtgggattatctcccatttcttctcaacaactttgtttgcattcttaaacaaaattgttcacctaggataggtctacaagtttgatgtggtaacctagggcaaaaaccttagaatttgaaagttacaaagccctaaagttgagcttataacactgattttcagacttagagtgaaatcacaatttggggtctttttgcaaattagtccaaaacctagggtttagcttgcaaatcttcatgaatgtgaaccatatgacttaacattgtagtttttacactttagtccaaatgtgcactacttttgcacataggcccctagggtttggatttggggttttccagggttccaattagggtttctggtatctcaggggtataaatgtggttcaattcatttttgggagcattttatgactattccactaaagcttttgggttttctcaatttgggttatgctttacccctttaaac

SEQ ID NO: 110016 - DNA, 565 bp, Zea Mays
gtgatggtcatcaagcacaaaaaacaatataataaatggtttaaggccatttccctttcatgcacgtattgggctttagcgagggggggtccaagccgaagttggtagcacagtatcacctatgatagtggtcgtgcttcaagggtcggtcagcttatcaatgggctcgttcgtatccccaatatctgacggttcaccatgcagtgtagtccatccatagtgtcgtttcctatatccgtacgagaggaatgagtgcttcatggttgatttagacgtaatggatgtggatgttagtcagaataggaacaacctccattcccctccatgttgtggcgaccgttatgatgacgaaggctaatcatggagtggtcatcctcattcttttgatcgttgacccgtgtgtggtttgtttgtgcctgtgtctagtttggtcatccccttaggctaggcacgattcgcctgacccctaggttgacttagggctcgttcaaccctttttcgttttgcccaacccctaggcgtccttgcttcacatcgggactaggggcaaacattagcggtttac

SEQ ID NO: 110017 - DNA, 676 bp, Zea Mays
cacgcccgggtttgcccttatatactcgcgggctgaggaagccgagtcaaccctgtgggctgcgaacgctcgtttggaggaggcgaactcggacctttggcgggagcacgaggcggctggaggtaggcatcctcttctttgatcgcacctttgttagcctttggcgcttatgatcgctccacgatctctcctttgcagacctccaaaagaacttctttgaggcccatgatgctatgaaggcagacgaggaggcaaagaaggcggcggaggatgaagtgtgcaacctttcgattgcctttgacgatgccattacgatgcaagttcaggcgcaaacttcgttgaaggagcacagcgccgaactgcagaagctccacctagccacaagcgaggtgtgtgaccacctctctcctacaccaccaacccatgcgcctttgatagaccgactgttggcgctgctcgagcacgtggagcatgtggtcttggaaggggcattcaacatgggtagtctagctttagggcagatggtttccaacttcgacgagatcgatgttggtgtgatcgcggtgggctttgctgcatgccgaagcaacgaggaactagatagtatcgaagagcaggtgcgccctagcgctcgctcgctcacaaaccaggccgacgtgaagatgcttctaacggg

SEQ ID NO: 110018 - DNA, 313 bp, Zea Mays
ttcactaatgacatttccagtcacagcatgttgcagtccttgccagccccattgagtccatatggctatggcaggagccttttacttccatatcagtctctggcaaacactgggagggcctcaagatttggttcccctgccttgcaaactagaagagaagctgaggatgcaaagtggttcgataagatggtgatcaatttggatgacgacaagcttttcatttccatactgaccactgctaaagcaaaaagaatagtcgggaagagcaaatatgcaatctttcagatcacaggccacaggaacaatccatata

SEQ ID NO: 110019 - DNA, 462 bp, Zea Mays
tcaccggattgcctcagtccaatcggtctaattgcatcttagtggtggtggacaagttttctaagtatgctcactttcttcccttggctcatccctttacagctcttttagtggctaaactatatttgtcagaagtctatcggctacatgggttgccagctgctatgatttcagacagggacccggtctttacgagtcacttgtggcaagaactgttcaaaatggctggtactcagttatgcttaagcagtgcatatcaccctcagtcggatggacaaacagagcgagtgaatcagtgtctggagacgtatcttcactgttttgtccactcttctcccaagaaatgggcgcactggctgccgttggctgagttttggtataatacttgtcctcactcggctcttggaacttctccgtttgaagtgttgtatggccactcgcctatacattttgggcttgttg

SEQ ID NO: 110020 - DNA, 466 bp, Zea Mays
gggagcccgtatatatgtttccaatggtaaatcttactagtggatggcgcgcgcccgcgcgttgtaaaatttcattctagaatacttctaggtagagaagcgacaaccaaacctaaatttgattctagaatacttctaggcaaagtataactgtatctctgttgacacatctgacatagattgtttctcaattttaaacagccttaaaacatgtgaattgaagaatactactattgcatcacggtatgtgcaagctactttctacaaaagaagtgccaagacgtccatgtggaaacagagttcagtaagttgtcttaaacagagtgatggcgaccaattagctcattcttctcccgacattgatgcaagacataatatatgtatatgaaacccatatgtgattatcccatgatatttcccataaactgatgctgaacagaatgtataaaatatcaacatttatgtt

SEQ ID NO: 110021 - DNA, 406 bp, Zea Mays
ggattgcagagaagagcttctgtagtttcatgatggtcgacaacaccatcaatatcaaagttgaggcactaatgaacccatcaagtcgacttatgtagggaggatccttcatgcttggaggtcggcgtgctctgttcatgatgcaatattgggggagtgacatgtgtagaatgatcatgttccgcgggctcatgtgggtagatgatgtgacgtccctaggtcattgcgcacctaagtcgaggtgtgggtagaaggttggcctgtgggaaccatggtatgtgggcccacgaagtcaaattcattcggtggaggccacaatggcgagggctatgtgatattcctaagcctcctatgacatggctcatagtttgagttgctggagcatgtgtcagagatagcagctgaa

SEQ ID NO: 110022 - DNA, 341 bp, Zea Mays
taagagactgaagtatcgcgacgagagcaggatcaatagctggtggggctgcaggggcagcactggaactacccgcctcatgatcatgtgagcgaggaggcacaggaggcggtggcggaatcccaaggtccttatcatcatctgaagatgtgtcagcaactgcaccctgggtctcaaactgtctgaaggtctcatcctcaacccgaacatttgatactggatctggcacaggggctgggtcctcaggggatggacgataggaaccaaactgaaggcgagaggcctcgagggtgccctggaactgaggaggcctaatcagttgtgcaaatatgtgacaaaga

SEQ ID NO: 110023 - DNA, 384 bp, Zea Mays
ggatctgaggagttagaggatgtaggtggcttgtgactcataaactcccggtgcttatccctaggcggagctgaaggtggtggaggtggtagttgatgttgtttctgtcgttcttagcgcatttcttgatgttcttgccacatttcctgtcgttcttgacgaatctgtgcttgcatttccgtcattgtgttggccatttgttgtagtaatcgcatttgagtattagtcacatcatcaacaggcgggggatttggaggaggattcatttctggttccgggttagctacaacccttcttcgacgaattcgtgctggtagatcgacacctcctaccctcctagtattaaccatctgggttaaggacatatgttaaggtagttttgca

SEQ ID NO: 110024 - DNA, 739 bp, Zea Mays
ggatccttgatcggtgcttggttggagtctaaatacacatcctgcagcacgggcaagtcgcaaatggatagcaaagttggcacgggcgcttgccgagggaattctaagtgtcgatcttatctggtcggactttcctaggggagttctagtcatcttgctgtgagatctactctgatctgagagcaggaagcacggatctgttatcttgcatctccgatgcagaatctgtgcgtggttgaatctagatagtgaaacactacttgcccttgtgactgataaatcggtagtgatggtaaaagcctcatgaatctctgattgcattgcctaacagactcgagcaatttctgcagaagtattttagaaggaacagcaagagatttgctttgagttttattagatgatagaaaaaaaatactccaatgcagagttaggctgaccttttgaagaacaaccttcttcgtttgctgatctaagagggacttgttaccttctttatggcaagtaggggtgtcatttggtacatttataaagtgtttggtttgaggaatcaacccattttagatggtgtgatgcatcattagtccatttttcaaatttagtggaatgaggtaatgctagatcaactcaatttattttacaaactaaacaaaaaactaaagaatgagatgatgaactattttattccacaaaccaaacatgcccctagtgtttttcctgttagtattcctatagttctgat

SEQ ID NO: 110025 - DNA, 595 bp, Zea Mays
gtttggagccgcgaccgtggcgagcatctcctccatgggaactgcatcaggttgcgcttgagagttgtagtactggcgggcggcggtgagagtagcctccagcacgccggcgtcgcgcagggcgcatggtccaaacccgtgaaacggacagtaaccatgcgggtaagtccctcccatttgtgacactgatgcaggtacttgtgtggatgttgctgtcgccggcggtggagggggaaccaccactggtggtgctcgacgacggcgagatgaactgcgattatggctgcggcgatttggaatccagactccggtggcaccggtgttaaccaagttcatcattaccctgtgaatggcaaagccaatccgattgtcgtcgaggattccttcacggaatgcgcggaggaactccctgatgacggcatgacggattgcctgaacgatacgtcgaagagtaatcattggcattgtacttacggtattccttcaatcttcttcacgtgttcttctgttccgcgtggttttcctttcttcgcgttcttctgttcttctgttccgtgatgtttcctccgtccaaaactcggtggttgagtctatg

SEQ ID NO: 110026 - DNA, 570 bp, Zea Mays
ctacaccctcataggggacgcactgtacagaaggggtgcaataggagtcctcatgaagtgcatccctcggttactgggagacaactgctagatgagattcacgctgcacagtgcggaatacacgcagcatccagaactctggttgggaaggtcttcaggtctggtttctactggccgacagcaaagagtgatatagccgagttagtccagcgatgtgaagcttgccaattcttatcaaagcaacaatatttaccagtacaacaactgtagaccataccagtaacatggccatttgcatgctggggactggacatgattggacccttcaagaaagctcagggaggctacactcacgtgttggtcaccattgataaattcaccaaatggatagaatacaaacccattgcttctctaacttcagccaaggcagttgaattcatacaagatataatattcaggtttgggataccgaatagcatcataaccgacctagggtccaatttcactagctctgaattctttgatttctacgaacaacggagcatccagatcaaatatgcgtcagtagca

SEQ ID NO: 110027 - DNA, 505 bp, Zea Mays
ggacagtattaagggatggtgtcttgattggttcatcgtggaaaatcatggcaaatccctcccccctcggtcagggaggtaaccagatgttcgcacgcccagctgggttgaatctcccaccttttcagagataattgaggccaaagtgctacttgctgaagtctgcttattgaaggataggggtctaactgctgaggtcgtggtcgctaactttgtcttcaagaacattcaacccttgaaggacagagtttatctcgcttatttgtatactggcatcaatgattccacccgattcacaaacagacagattcccaatgagggtttgctgagtcgattggatatgattctgaggggtagggtctcaaatgttggtgctcctttagcttactctgcgtggaacctgccttcagatagactattctctgaatttgtctccaaccctcctgctcgtgatggtaacccgggccatagagtgcgaccctcccccgaggatattgaaaccttg

SEQ ID NO: 110028 - DNA, 454 bp, Zea Mays
gctggccagatcctgatgaagaggcctggtgttgtggtgcctaatgaccttgtggctgacgtacttgttgcgtcggctacttcaagtaacccttctgcttctggtgatcctgtagataaggttcctcgtgatgatgctcctgcacagtaatcgtggagtgaaagcaaacattgatttgttcaaacagaaaacaattgtcattgagatgacatttttctatttgattgtgttgcccgacttaaggcgttcccgacttaaactaattgctgcgctaccagggtttagtaatcaccctaagccatgtgtgagcatgtcgcaccgacttaaggcgtttccgacataagccgattgctccgttagtagggtggaatcaccttagtcatgtatgtgtgggcatgtcgcatcaattgaaggcgtttccgacttaagccgattgctccgttagtatggtata

SEQ ID NO: 110029 - DNA, 620 bp, Zea Mays
gcaaatcgcaattgcatctttcagttgccggacaagatcaatgatcaaatgtatacgattgatccatatgtgtgccaggtgaaagatccatattgagtgacacactcgcggtgtacgggcgcggggatggacgcgccgatacccgggcatccgtggagacgctcggctctccgtgtgtttagttttcccgttgatatatatgcatcagaaaacgtcgcaagttttagaacgacacaaattccagttcatagtgtgaggtccaatttccgtcttccacaacggtgatcgccggactgtggccttcctaacaattggcattgaagctaggttgggaggtccagcatgtcgacgccctccctgactccacctcgttgccgaccatggaggcgtcgacgatgacaggacgacaacagcgagcgagtggtggaaaggatgatggagcggatcaccttaacgagactggccatgtaccccatcttgaccaagaccaactacaacgactgggcctgctcatgaagatgaagttgcaagccctgtgtctctggcgcgcaatcgatctcgacgatcatgtcagtgagctggaggccctgatggcgctcgacgccctctgcagtgcagct

SEQ ID NO: 110030 - DNA, 326 bp, Zea Mays
taaacaagtgagtaccaagacttgcgagtaaagttgtacaacctccgcagagtgtcataaaactagttaatcaatcatgctcacggtcaagagagggcttggtgtcctcacaaattagtgttttagttttcaaaaccttaaaacttcatcatgtgacttggtgatgtgttcactatgagatgcggtagatggtcctttgtgagatacaacagatgatctgtgagatgcaacggatgatccattgtgtgatgcaatggatgtgttttcgaaactttcaccatgagacttggcgaatggttcaccgtaggatgcaatggatgtgtttt

SEQ ID NO: 110031 - DNA, 365 bp, Zea Mays
cttgaagtgactcggctgttacctctataacgccaacgtcgccaaaaaccgttcggctattacccccgaaggcaccagcaacaagccagacagttctttttccacgaaaatgcagacagaattaaagtgcaacacatcaatggcaagtcattgctcaagagttatttctaagaacaacggccgcattggatacaaacacaaattgtcggtcagctataaagaagcaaggcaaatacaaaggatgtgcacaagatcaagcccgaagttcactacattatataaggggggaatttcttacacaaagcaaaaggccgactcattatgagccgggtttcttcccccttttcgacaaattacattactac

SEQ ID NO: 110032 - DNA, 633 bp, Zea Mays
tttgttggattctcaggagttggatgaattcatcaaggatgatgaatttattccttcccctacccaagaaaaaaagaaaatgcatcttagtaatgtcgaggaggctagcaagattgctggtgctaaaaaaggtggatctatggaaggtgaggtggcagaaggtgttagaaggagcagcagactggaatcatctgaggaaatgaaaattgctgataaagctgctacaagagctattgctaaagatgctttcatcaacaaaggtacgtcttacaatcctttctctgttctgaatactgataatgctgttctcatggatgtggctcacaaaaattggagttgatttaggttcttcttttaatgatgctgtggaaaatttaaacctgattaaatctttagagttatctaggaaaaatttagttgttcaatctgttaggattaatgttgataattccaatgttgattgcattgtttctgatgctgataataatattcataatgatagtctggatgataatttttctgatcttgacgatgttatgatccttagaaaaggtcgtaaaattcagcacaggaaaaaaactgtgaggaaaaaataataataaggctggtaaatctcccaatagtaggaaaatc

SEQ ID NO: 110033 - DNA, 333 bp, Zea Mays
gttttcttcatcactagctggtgctctagtcttaacatgagactacgagtagtatcacatagtgtaagtatggtgcttagattatggaggtaccttggattgtggctagccctccgaatagttgtggtaatggcaggtggtgacaaccctatttacctatgtattcctccacgttggtgctagttattaaatcatagggctcgttgtgctttgtgcctaatcaatcctctaggcgagtttagagcaggtacgccctgaagtgttcgtgcatcctaccctaatcttggtttatctgtatcatcaaagtatgttgctagagtattgcttgaatag

SEQ ID NO: 110034 - DNA, 337 bp, Zea Mays
aatctgtgaaaacgcctccttctgccaaagcttctggcagcaaaactgaagatgtcatagagatgaccactacctgtacttctgctcccaaaaatcttatgaaagaaagccttccagagaaaccctcgacacctgctcccgaagcatcttccatgagtgatttgagtttcattatgcgacatgcttcgggaaaacaactatcagcagagcaagttgccgaaaccgaacattatgctaaagagctgaagttgtaacaaccctggtgttactgtcactaacacttgagcataacatcatgagcattagcatatcatgtctttgtcacacctagagtgca

SEQ ID NO: 110035 - DNA, 461 bp, Zea Mays
cacggagtatacgcctgtgtagttgtagaccccaaggccaatccagtcaacggtgatgttgctcggggcaaagaagatggccttccacgtctgctactgttgtgctcttgttacctatgccctggatcacatctcacctctgccttttataggccaaggcatacatgagcctgttacaaacatcccatggtcggaccttgtcatacgctttatgtccttcgatgtctttgcagatgggtgaactcctgtagatgactcttccttcttctagggtcctgtagcggcactgtggctaccattacgtatcatctcatcttacggtcgttttaccttccgtcctttgtttactttcttggtgagggagttgttggtctgacgttagcccccatgtcgtgttaggtgtcacatttgtgcaggcacatctccccctgtcccgttattcaatcacacgccttcactaa

SEQ ID NO: 110036 - DNA, 367 bp, Zea Mays
ctttttttacagcgtgcttaaatgtggagggctagaaaaggaattatggtttaaactttaaactcggacaccatggttctcagttgaatacatctatccacgaccatgttcctgctagaagccacagaggactaggcaagccttataacgctcaagggagccatcaaggcgagtcttaaccttatagacctacttacatgtgataggagatacacatgatggacaaagaacaggtttccatgtgtcggtatgctcaggagcaacaacctactcagccatcgcttgctgccattcctgatgaagaatagaatcacgataagacgttgccttagaaagaacagtaacatcaaaacccaaaggagagtac

SEQ ID NO: 110037 - DNA, 310 bp, Zea Mays
actcgatattacataacaggatacattacccattatacaaaagttcaacctattatacaacagtacaacctacaatacactactctacatttattacaccattagtcctgctttccattactcttggcgacctcattgtcaggtgtgggagtccagacatcaaccaacctcaaggaaggagggggctcaaaaaggtctaactccccacccagcgcgcgtcccgcaacgtgagagggtccggcttccgcctcagcagggtgtgcaggcacactagggtgtaattgtgagtatagtacatggacttcctcat

SEQ ID NO: 110038 - DNA, 533 bp, Zea Mays
tgcattgacagtgttaataattaatgtggtataggtaaaaaaatccgtgatagaagggcaacatttggcaacagcaacaaccactaattgcaattgatgggcaaaacaatgtatataaaatgcatagggattttcatccaatacccatcgttgtagcccatggaattcacctctcatatttgatgccccatcatgggcaaaacaatcatgtctttgttgtttgaatagataacagtaaaaacagaaggcagcatctttggtaacactatactctaaccaattatggttcttgaaccatgaatcatgaaaacttctttgtcggtgtcccatttttttaggatatatatggccaattggttgacatggaccctgtaacaaatactctcttctaacagcatccctaatgttaacatcgtattcatcaattggttttctaagcccaggatcaacaactatatcgaatacctgctcagaaggtggaatttcttgctcttgttcatctgaagttggatttagtactgcctcaacagtag

SEQ ID NO: 110039 - DNA, 366 bp, Zea Mays
cattattctcccctccagctctcacaattgaaatatcacgaaagtatctccctctcattgcttcgatctgcccttgtttaatagtagattttccgaagacaacatggcttggtctccagggccgatcttcggcatcttaatttccactttctacatcaaaactctcactatcgctggagttttcagatatttcagccaacatctcatttgcaatcttctttgtgttggttttttccatagcttcgtaaaatccggccagcgccggatcaacaatcttcttctcatcaaccatttagtcgatggttgctagaatgccgaagctcaaaatccaattaaactcgatgaaccaagaaaggttaaaatgac

SEQ ID NO: 110040 - DNA, 779 bp, Zea Mays
aaaggcaaaggaaaaaacatcatcattggtgatcctcgcacatcgaatatatcataaggaggaaatgctcagaaagcttcagacaaaaagactaacaagtccggaggtgtcggggggcaggctcagtcgaacagtcgagcaaaggtctctgccttgagcatcgctaactgtccggcacctgcacgaggacggttcgatgctcatgcagatggtccagccaaccaagccgggcagtccacccatggacagaggcaccagtctccacacaaagcaaaaaagggatgcaggggcaaaacacatgcaacacacatggtcggctagtcaaagtcaaccctacttttgatcaattgctctccaagtatgctagcaagaaggccgttctacgcaataggctagcaaagaaaccccgaacaaagagaccgaataagatagccaaaaggtgacgcaacatacatcgcctattcatccaacagtgccagcatactttccacccacctattcatcatcgatgcattatcctgttcagatatggaatggtacgacgatgaacccatggtacgtgcatactccctttgtctattcaggctgggtggcacccccattctattccgtttgatctattagtcaaacggtcatggccgagaaagatgcaatccgaaacgacctttatgcattggggctttattgaatgatcactatattggattgaaaagtcgatgacttgcatcaggcttagttcatatgcttttacttcgtcaacctccaccaaaaggcaaggg

SEQ ID NO: 110041 - DNA, 628 bp, Zea Mays
attttttggtacgcgtgcacacacaaatttatgtattttaactaaatatagtttttgtacatgtatttgcagatcataaattcttacatatagttattgatagcacaagaacatatgaagcagcgtcctggtggtacagtccacatagagattacatttgtcagtgaattttttaaacgagatgctggtgatgatcgagaatttgatgatatatactgtgaaactagcgaaagatctcaagttgagcgaagggtattattatatcttcaacatgacatggtaacaaaataatttactatatatatatatatatgagtttagttataaaatcatcgtatgatacttatgaaactaatatatatataagtatttggcaggtgttcatacctataaacattcgtgaacttcactggtatcttgttgtgcttaacgccaaaagacgagacatgcaagtactcgattcactgggttcttcattgggtcataaagatctcgattgtgttgtgagtaaatgaaactcgttactaattttgtttgtggttatgagtaatttgttgatgtgatttactaattttgtttgtagctaaagggtttgcaaaagcaaatagatggtgtgtcgcattacatg

SEQ ID NO: 110042 - DNA, 633 bp, Zea Mays
aaactttattaatggagattactctgttcttaacaagaatcaagagaaggggagggtgaaaggtggttggttcagtaaaacactgaagatcaaaacactgtaaatatctaaagaacactgataaagatgtgaggcactgtagaactggatgtgttcgagtgatctggtgaagggaatcgattgcggggagataacttcagacgtggcaccatcccgcgaacctagccgtgcgtggccggacatattccaccggtggtcgccgtggctcggtcacttcctccgcggtgtcgctcatgcctcgcttcccccttattgtgcatcttccttacatggtaaccattcgtgaacaatgcaattcgcggccaccgatcgttagtcggaccgccgtgcctataaatagcgccatgaaccacggcgtggcactcacaacttcatcagtgagcacgattgaagccaaatttctgcaaacaaagtctttgatttttgacgctttgagtaggtcgaagaacttctgaacctccggtgtaggtgaatcatgatgatctggtgccagttcaggctgcagatcctcaagcatctggtccatcctatcaacatcatcttcaccatcatcaacttctacttctgttgctc

SEQ ID NO: 110043 - DNA, 411 bp, Zea Mays
gtttgtgcctagtggtgccttctgataaatgatgagagggaaaagacatggaaggccactagtggcattggtgttaggtacatcagagcttagtaacgaaggtgcatcgggaaggagtcaatcaagaaagagagcatgaggtggtggtcaagaagaaggaattaatcaatcggtttagagggcatgtcgtgacgtggagaaaacaaagaaatgtagtcagagtaggctggcgacaagaagaaaacaaagtagtggagtggagtcacatgtggaaagataaatcagggtagtgtagtaaaagggggtgcggtggtgagaatacagacgagtgagttgggttttgatatatttatttatatgagaaatcgaggtgcgggccacattgagacaaagactaaacatgaccttaga

SEQ ID NO: 110044 - DNA, 520 bp, Zea Mays
aagagtgattggttccttacaaccgatacgactcagggagttgaacacggtttgaactgtcgtttgcgcatgtttgtgtatgtagggaacctattcggagcacgtcaataccttcttgattgggtataagtcagatgacacactagacgaaccttgaagcctagtcgtacgccaggatctaggtcattgaccatgggattggggcccaccaatagtcttgggagcctcccagctcctcgtgtcgcctgccatatctcgccagtgggttttgggtggcaacacattctagcacgcctagtgggaccatctatgttaacatatgcgacattggctgcctagatagcaaacactcagacgaacatgtctggactagtgcaagaccggcccatcacgtatgaagagctgcctccagaacaccgagcaaagtatgatcaatcaaaggtctttttgataccgacctcatcggttctttcgagaggacccacaactataacatcatgtggaaggggttctcgcccga

SEQ ID NO: 110045 - DNA, 283 bp, Zea Mays
gtgctacggtagcgataaggagataagcgtgcttaagttcaaggaggacgattagatggattaatctgttttaccctaccttcctgttactcatccttaactaatgttgttaggggtcatgattcaatatattcccttcaacttttaataaatcacttttcccttcttagtgctgatttactacaatgcatgcatgcttgaatgaatgtcctctcatcaaccataggggtgctcctagggcatcccttctatcctagggttggcctatatgggctacttttat

SEQ ID NO: 110046 - DNA, 570 bp, Zea Mays
atattggcaaattggaattttgtgaacattgtgtatttggcaaatagaagagagtctgtttctctttatctactcactgcaccaaaggtatccttgattatattcattctgatctttggggtcgggctcatcattcttctattggaggttgtgattatatgatcacttttattgatgatttctctcgcaaagtctgggtttattttctgaagcataaaaatgatgctctcactgcattcaagcaatgtaaagctttagtgaaaaatcagactggtagaaaaatcaagaaattgagaaccgataatggattagaattttgcaatagtgagtttaattctctttgtgctgatcatggtattgctagacacaagactgttccaggtactccctagcagaatggtattgctgaaagaatgaatcgtactattctggaatgtgttcgttgcatgctttctatgctgtttatgggataagcatggtttgtgggtggaagctgctaatgtcgcctgctatttgattaatcgctctcccaattcagctattgattttaaaattctagaagaggtatgg

SEQ ID NO: 110047 - DNA, 382 bp, Zea Mays
ggactattctcatatctcagcacaagaatagagaaagagagggagagagagagtaccagatgcagttgtaccttagaaggagaagtgtaggtgaaaactgcaagttgttgtaagtttgaaaaggacttagtctgtcaaaacgcaagctgtatttggaagcagtagcagcaaccaaaccttcctcgtcggcgcccatatagaaggcgagcccaggtgctcaggtcgtgttatctggtgtcgtggtcgtatggcacctagccactactggcgaatcacttgtctctttccatcaatcgtgagccattagtgctggaagagctctaggggcagaccaacccaccacattatgcaaaacaactctcacatgaaaaccatagcctag

SEQ ID NO: 110048 - DNA, 621 bp, Zea Mays
cagatgctacaactgtggcgatcccgaccacttcgttgtcagctgccccaagaagggaaaatcggagtctggcccgcgcgaccatcactctggtcggtgcaagggcaagtacaagtccaagggaggattcaacaaggaggcgctcaagaagaagtaccttcagaaggcaaagatcaaggagcgtgccttcctcgcctccctcagcgacctcgaccacgactccaatgatgttgtatcttcatcgagtgacgaggagactgagaggagggtcgaggacaagctgaacaggctatgcttgatcgccgacaccgcaggaggcttctgcaccatggcacttggtgaggacacggttggcatcggcggcgacaaagacatcggtgacgacactacttctgatgtactacctttcgtcgatgatctcgccactgagatagaagagttgaacgatgctttggctagtcaggataagttgcttaggtaggctgctcgtgagaggagagagtttagatccaagtacgagagcacgcttagggaacttgagtctgctagagcttcagttgtggtgtccgacgagactgaatgtgatgagtgcgctctacacatgtcgaacatcaccacttt

SEQ ID NO: 110049 - DNA, 884 bp, Zea Mays
aagcgcagatagaaataggggagggagggaagcaaaacgttcaagcagctccaaaagaaataagtggcaaaaggagatagaaaagagggaggcaaatggagctgggagacggaaaagactggcagtaaaactgtagagccgattagacaaaaggagaaaaaagaaatgaaaaaaaatttgggaaaaatgaatccaatgattttagtcgaactagatatttagccgaagcagcaagctcgaagatactgtattccaatttgtagacaaagctgactagaccacaaacaaatagatctggcagtgtcaagcctgttccacatcttacaaatgtgtagggaggatgggaatcacgttgcaaatcataacgcgtgtaagcttttccaggagacaacatgaacaacgggagaaagaaaagggggagacgatggagctaggagacggaaaatacgggcaacaaaaaccacagagccaaccaaacaaaagttggagaaaccatagccgacgaagaaatcgacggatctcaccaaaccatcagtcaccaaagcggacgatgcagcgaggataaaagcgatggaagacgagacgacttggagagggaagaggtagagggagcaaggaagaagagagacgaagcagcagtatcgaggagacgtggccatagtgaaagcatctgctagaagtcttgagaagcgaagggagtttccttgaggccagcagagcagtgttgtacacgacacggagacagcgacaaatggaagccattgattgtcgatcgagcggcgaggaaattttctgtcgacgtagataggcctatatgcgccgttttgaaccggctttgtaatatagaaatagaatgctccactgctatgccattttccttattc

SEQ ID NO: 110050 - DNA, 279 bp, Zea Mays
gttgcgccatgcttttgtctgggcttggtatttgtttagggcctgtagggcgaagacgcggtctccatcgatgaggtccttcgaagtgggctcgtccacgtcggggacagctgacgggactgtccatggggacccaagttttatttcttgtggggtcatggcctccgatccatataggaggcggaaaggggtgaacccagtcgccctgcactcagtcgtgtttaatgcccagactgcttcaggtaacaactcggcccacttgccttttttattgtcgag

SEQ ID NO: 110051 - DNA, 638 bp, Zea Mays
tgcagaggggtgtctagagcccttctgtgaggcagtgtctctaagggagccatatgagtggttcgccttgaagtttcctccttctgcttatgtcttatccaggacgtttgatcgccttacacctctggcaaaacccgttgtgatctacagggcctcgttgtgctttgaaggaataagtgtttgaacatgaatgtctttggaatccttcatgttgtaccttccacatttggcgcacgtctagttaggagtgtgcatcgagcggttagagaaccataaatctgttagccctgcatagagattcatgatactttcataccattgcattgtaaagtcttattaggactcttcaatctaggctcatctagcttagagggactagggtcaagggcgacttggttggaatacccaggtcacggccactcggggcggttggactgacttagtcagggttagacctgatcatggctcacccgacccaaccaacccaaaccacccgcccgaaaaaaacctggcctgacccgacccaaccaatgcaacgggcgggtatgtgccataatttttgacacaaaacccgacccaacccgaaaacccgatccaaagccaaaacctcgatcctacctgacacgtcaaacaaagag

SEQ ID NO: 110052 - DNA, 440 bp, Zea Mays
aaggaatacattatgtgaataattaatgctgacagcacacatgagtagaggcatataggcggagccgttcagattccctccgccttagtaacacatgagtaatcagcgggagtcatgatgactgcagtccatgcagtatttgataggcagtgaccctttttttggtaacgcgtggtaacgcgcgagtaatggtgagtcattgtccttgctatggtaacgtgtgagtaacagcacagcccatgcaacgtggactgggcgcgccgcctgtcactggaatggacaggcgcacgtcttatccgtaataaatgcaaagacgcgtgtagcccagaggctttatgctaggctccgcccgttggcttacgccacgcgcagtaggccacgtggcctgggcggggagcaggagtgtatgtgataaggtccggatcccaccaggtcaggtg

SEQ ID NO: 110053 - DNA, 591 bp, Zea Mays
agacacgtgcaacgcaagcgtgaaagaatttgaaacaaagtttaggaaccagatccgatttcaagaattagagtttgggcaagacgtcgagggctcaacccaaacgatactggattcgatgttccgaagattaccaaaggctgaattttaaaagaaatagatttggaaaaatttagacagacggaggcagacacgatatcaaaatcgtgataaacgaggttgattaaaaattagtgacctttacattcatagctatcacgtgttaacgtccgcactagtggtcgagcagacgataaacacctgggtgttacaattggaatattggagaagatcggcataggcggccacagtatcagaggacgccggacgctagcaccaccgtgatctttgtggttgctacttctccgctgatgtgctactacattcgctccatctagtattcttaggtgaaggactgaaggtatgatccgctgcctaactttttgcctcccatgtgatcttgcatgttcatctaatttttattttttttctttgacttgcattaatcaagccaacgccgttgaagcagcatccgttcacatttgaatttcg

SEQ ID NO: 110054 - DNA, 404 bp, Zea Mays
cacgtacgttatatatcgcgctaaagctagctaggcagcttggaggcaaacaaaggttacgcatcgcatggtcctgctcacatgctttgcaagtacgtacgtactccgtatatttttcgagacgaaagcgtcgatgaactaattaatgtattcgccctctcatcagcagttcagccgacttcagcattcagcaactcggcgagatgcgaatccgtgttggtgtggcaagctgtgtgcgcggcgccgtcaggttgtgtagcgcctgcagaatccagagaagcaaagggggcgagatccgatccgcttgctcgtcgcgcctttccgtgcaaaatcctgtactgaaatggatggcagctcttccgcgtagtatagtgcgtgtgcgtgcatgaggctggggacatggg

SEQ ID NO: 110055 - DNA, 744 bp, Zea Mays
ccttttcaaacgaaatttgctctgtggttttttcttctgttgccttttcttcaaattccacaggcttcgtctcaggaggcactgagggccccgccttggtttcagcctgggttgttgtagcttcaacatctattagcttagtatcagctttgggttgcgttttgtcagcttcggcaaccttccctttgggagtgagacttgtggagtcggttgtctccagtacatctaatacatttaccatcctccttctcctaggagttatggcagaactcttttgtgccctcagcactgttgcttctgttgaaggacttaaagtctctgccatctttgttacctcttcagttgttgacctttcagccttatctttgtcaaccttcatttcaactagctcaaccaaaggtgccttcggcattatagccggttctttagccctctgcatcggaggagcggtttctcttgattcagcacctgaagaagcctccccaccaaactcaggcaccacggccggttcaatataacgtggccggtgggtaagtaccttcatctttttgcccgcagccttcggcataggttcagccgaggcgaccagagcagcagctttcctcttcttcccttgcccccacagcgggtagcagtagtcggggtagacgagccaatagcgtcaaaaactctgttcaatctcttctttcctcgacttccgaaggctgtggataatgcattatcttctgccttggaatatgatcc

SEQ ID NO: 110056 - DNA, 326 bp, Zea Mays
gagagactctagggccctgcgacacgaaaagtcacgcaacgaagttcactttattactttaggaaagcagcaccgaggcacgatacatcgcgatcaacgtgcgtcacgcacgatgtaatgagctgacaccctaatcacaacatgactggccacctcgttgtgaccttccagcgggtcttctcgcccttcatccaaaagcaaatctccctcatcagcagcgccaccacagctcccatgtgaacgccgaaatcgatgatatcctagatgcggcacgaagcagcttgatctcgacctcggtggccgcttgcgctgcgcgggaaacatcg

SEQ ID NO: 110057 - DNA, 1179 bp, Zea Mays
atatggagcaatccttctggaacataatgctcctggaatgctagcttgaattcctcccaagtaacctgatgcccggctggttggattgctgcaaaatttgcccaccaagtactggcagaccctctcagctgttgtgcgacaaacaacggtttttgtgtctccgtgcatcgaatcaacccaaacttttgttccataactctcacccattcgtcagcttctaaaggttcttctgctttgatgaagagcgggggtcgagtctcagagaattctaaatatgtagtatcacgcggtccttgaggaggagctcttcctccgtgctgttggaactgattgcccgccatctcgcgcaagaagtgtgtattatcagcggtggcattgaccagagcagcgatagcctcggccaaagtcggtggtactggtggcgggttaggagtatcctccctaccgcgggaagtccccgcaccatcatgtgcacgagtccttgatggcatctgaggcaaagaaacatttggaaacaatataacatgccagcatacaccatcatattacattaccaaaatgtaataattatatagactccaacgtacaactcgactttattacttattttacataggcataatacttagactgtactattctagtcttcttcatcctttgttgctccatttcctgttgcaggagaccgttcgtcagcaaggttcatggaaggagggggcctaaaaaggtccaactcctcatcaggtccttcagtcactgctcccgacagtccggctcccattgcagcaacgtcggaaggcatgtccgggtgcagtcaagcatacaatacatgtacttctttatgtaaagtatttcagtacacttgcatgcttttgagggacgcactaagctctgtcacatgagctagagcttttgtttcgcggtcccaagcgatcgaacgtgagttgacggcccaatcaatggcagaatcccgttctgaaatctcgtactgtaagcggctgacatcagctaacaattccgctatacggtgactgtcctactcccgtgccctgttcctgtggcgtaactctgaccaaagttgttccaccctggcttccaggtctccaattgggtcattactgccactactacttccttcgtgcctggaagctaactgatgtcgtggcacgccaaaaggtc

SEQ ID NO: 110058 - DNA, 721 bp, Zea Mays
caacagagactgatggcgtcttaattatctgtcaaaatttgagtttcccttccaagctagaaagggcccaaggttccacgcaactcttatctacctattgggacgggtgtgagggttgatgttagagtcgctgagcctagtagctaccttggaagtggcgaccatttttccctacctttgtgttgggctcgggcccctgcagcaagaatgcggcccgttctgggttaggcatagggtgcctgccataaggtgtatgttgctctccatcggccatcaacatataggcacagtataactttagcaagaagtatagttctaaactttatcaagaggaaacaaacagagccttattttagctcctaggatccaaacataccctatatattgctcaacacaaggttatttcccagctagataggctttagcctaggaacaaaactaatcattcccttccttcaataattaagaaaatgataaataatttagatagagtcataccataaaagaaagcaagcaatccactgcatcaaataatctttcttcttttatgggatcccccacaagattggaagagaactttgataacaacaacaatgcctatatagaaactgaacttattaggggttaatagaagaaaatctaagaagcactcattaacacatgacagtttatgcatatgtacggtcgttgcttagaaaatgccatgcaacaactcatggat

SEQ ID NO: 110059 - DNA, 720 bp, Zea Mays
ttgaggcaaaatgtaaagcaaaagaaacaaaaattacaatagatatgctttgaactcttgacccagcccctctgatgcttcagtagatatgtttggattctggaacggtgttgttgactattcgagcttcagactcttccctcacatcacgctgctattgatcttgatattacctctgaggttgctgattgtaagatgtagatggaactggtgcaggtgattgaggtatggcccacctagctagagagtgacttgctgaggcgactgaagctgtggactatggaagtggctgttggttgcgtacatactctgggatgtatggagagtagtacgaagcagtgtgaagaacttgcttcggctgattttaccgtgcttcggcttcagctatttccttctgtttttgtatcgtgacttggtaagtccttgttgtgtgtcccttatactctccatagaacagacagaatagtcttcttggctgagagttgtatcttcctccgaagctctggcctcctctgcctcttgggggcggcggtctaaaggaactctggtgcgtccctattgattgggaattactctgctgcccttgattatgttgttcttgtcttcactttagcctagattgtggattgttctaatatgtcttggattaaatcttccctcgaagcccctggacatctcagagaacttgtaagctttctctcttcttcgtcgaaaatcatt

SEQ ID NO: 110060 - DNA, 461 bp, Zea Mays
aagattgatcggcacctgtatgcattgtggaaaaatgcaatagtgttctgaagctttgccaaagcaggggataaacatatgtgtgagacatttatgtcatttctgtcaggaagaacttcaagtgcgccaacaaccaaggatatccactgtgcactaactggagtgttcaatttatacacataagttcttttttaaggatcttccttactagagaccttctaagatcagaaaacagaacataactaacatgcacagaaaagaaatgaactgtaataccaagtgtattaaagctaaaagagcttccttgttacttcacaaaagttagttcttcaaaaacaaggaaattaatattttccctccagatctcttgatcaagactgaacgcatacctggtaaagcaagtcaccattgctgacagcaatgaaatccatgctaactgtaaattctagatcaaatctgag

SEQ ID NO: 110061 - DNA, 312 bp, Zea Mays
ggcttttaactttatgttttatttttaaaacttcaaatttatctatgttttctatcgcagccgaactatctcctcccctggagtccttcgaaccactggccgaagcagaggcaaaagaatcatccgaacttattagcgttgccgaaactattttggacgaagtcgttactcaattgttgaccgaagctgcagacaaagttttgaaggaagaataatagcatatcgtaaaaacattgctggaatgttaatgtaacatttgctggaccatgcctgtaatatttgatgctcataaacttttaatgtaatgtataa

SEQ ID NO: 110062 - DNA, 461 bp, Zea Mays
agtgcggggtacatgcagcatccaggactttggttgggaaggtctttaggtctggtttctactggtcgacggaaaaagtgatgcagccgagttagtacagagatgtgaagcttgccaatttttatcaaagcatcagcatttgccagcacagcaactacagaccatacccgtaacatggccatttgcatgctggggactggacatgattggacagttcaagaaagctcagggaggctacactcacatgttggtcgccattgacaaattcactaaatggatagaatacaaacccattacttctctaacttcagccaaggcagtggaattcatacaagatataatattcaggtttgggataccgaatagcatcataaccgacctggggttcaatttcactagctctgaattctttgttttctgcgaacaacggaacatccagatcaaatatgcgtcagtagcac

SEQ ID NO: 110063 - DNA, 501 bp, Zea Mays
aaaacccccactctaataagagcttcgggggtaatctgatgaaggtatatctcaaatgttttcaaaacatcgactaacatcttatgaagcgggaaatgaagcccagctttcatgaagctcctaaagactaccacttcatcgctttctagcaagggaacaatgtcctctcccccatccctcactaaagatacatcatgaaagtatttccccttcatcacttcaatctaatcttgcttgatggtggatttccaaaaaacaacgtggctaggtctccacggccaatcttcggtaatctcattctctcacaatatcgaagatttcactatcgcttgaatcaccagatagcccagccaagatttcgttggtgatcttctctacattggtcctttccatggcttcgtagaagccagtgagtgtggggtcagtgattttcttgtctttagccatttcagtgatggtcgcgtccgaaagccaaagctcacaaaggaaactaaacaacaa

SEQ ID NO: 110064 - DNA, 349 bp, Zea Mays
ccccgcagagccgaaccgccaggagctaagccccatgcgtccgttcttcctctgtgttatggagcttcaatgcgtcagttacttcctctctccatgaatgtcgccacgtttcacctgcctcccgcgtaccgcgttgttgactcccctactcgcattcgtttcctctgcgctcgtacctcttcttattcctctagtgccgacggtttctacctcggccataaatggcagccgcccttctccttcacctgcccagcgccgttactccttccctcgctctataaatcttactatcgcagcatcgcggaaccggtccacttccattcttcgtgccctcagcctcctgttcgtg

SEQ ID NO: 110065 - DNA, 652 bp, Zea Mays
gtagtatggggatggaaccgtcctgtgatggctgccacacgccgagcgtgggtccatggtgcctaggccaagcgcaccctttgtccgatttctgtcattcacacatatcccctcgggaagctcttttaggtttcttcgaggggagagtcgctctcctctgaccttgtcagcgtgggaaaggactcatcaagctacgaacgagttatccaagtgagattcgaccttcctatggtagggttaggtcttggtgagtggttccactggggcgctcgacccgttggggcatctcattgagtccttccttatttgatcatgtgtcagccctttggttggtttggccgatcaaagatgggccccatggccaccacgtcatccgggtttctgcaagagaatgtgaggtacgaccttggacgtgcatgcatgcaaatgacctatgggctggtcacctagcttgcgacacactaggagcttgcctggtccacccctcactctacttgtggattttctaggtgagcactagtttttacctgatcggcgtagggtagttatgccataccaggcatatgtcaacaacacggtaaaggatgacgtagggctcatgacgacaggaggagccgcgcttcatacgaccacaccgtgaggctgatccatg

SEQ ID NO: 110066 - DNA, 741 bp, Zea Mays
gacgtgttgtcgaagctaggatccagtcgagctcagatcccacccagagttttcgtccaggaagtgtcacgcccaagcattcccacatatcaggcggaagagtgcaacactttgagccagccagagtcagactctaatgactagagagagcctatcatcaggtatataaagaatgaggaagaaccggatgataaggctacagcagaacgcatcgcaagacagtcggcccactacaccctcatagggggcacactgtacagaaggggtgcaacaggagtcctcatgaagtgcatttcctcgattactaggagacagctattggaagagattcacgccgaacagtgtggaatacacgcaacattcagaactctagttggaaaagtcttcaggtccggtttctattggccaacaacaaagagtgatgcagtcgagttagtctagagatgtgaagcttgccaattcttgtcaaagcaacaacatttaccagcacagcagctgcagaccatacctataacatggccatttgcgtgttggggattagacatgattggatccttcaagaaagctcagggaggttatactcacgtgctggtcgccatcgataaattcaccaaatggatagagtacaaacccattgcttctctaacttcagccaaggcagtggaattcatacaagatataatattcagatttgggataccaaatagcatcataactgaagtggggaattcatggaatata

SEQ ID NO: 110067 - DNA, 480 bp, Zea Mays
cccaaacacaaaccaaccagcacgactcctgaaagcctgatcgcactccactgaccgcctcacctcctctggaggagaccaaaaggccgagcacaccagcaccaacccagaacagagagagagagagagagagagagattactaaaaggctcgcgagcaggttagtcaaaacgtacttgtagctcgcgccggcagcccggcaccaatcaccggaggacagcgcttccctctccctgcgtggctatatcttcttcgacagtgggagagacagagagagacaacacccacacgctcgggatcggagaacgcgcacaggcactttccatcccccgatcaaatcgtcatcatgtgcaacgccgccgggacagattccttgccggcgccggcgcccccgctcggctctctcaaggcctccgcgcaccagctcctccaccccgtcgacggcgaccaagccaacgcccatgcactgcagctctccaa

SEQ ID NO: 110068 - DNA, 609 bp, Zea Mays
aaatcgaagtcagctgaaagtcaagagtctgaatgcctttgaaaacaaaagctttattgatgatgaggtcccccgattacagagtacaatgtttcttcgagaattttttaggcctcgctagggatagaactttctgatatgctctatgttccatgggttccccacttctgtgccatccatttgagtaagccggtatgatcctagccgagtgacctctgatacaatgaatggaccttcccatagtggtgacaacttgtgacatccttcccccgttagaattcggtgaaggaccaagtctcccactgcaaaggaccagtggcgcacgactttatcacgatagcgcctcaaggtctgctggtacctagccgactgaattactgtgttcaatcgttcttcctccagtacatcaatatcttctagcctggtagcttctgctttagctatgttttcgaaaaccaacctcggcgccccgaatattaggtcggcgggcagcactgcctctgactcataaaccatgaagaacgaggtatttccatgcagtgctcgactgggttgagttctcagactccaaaccatgtatggcagctctctgatccactttcctgcaag

SEQ ID NO: 110069 - DNA, 366 bp, Zea Mays
gactaactcggccgcataactctttgctgttggccagtaaaaacctgacctgaagaccttcccaaccagggtcctggatgctgcgtgtactccacattgcccagcatggacctcatccagaagttgctttccagtagctgagagaatgcatttcatgaggacttctgatgcgccccttctgtatagtgtttccccaatgagtgtatagtgagctgactgtcttgcgatgcgctcggctgcattcttgtcatctagctcctcctcattctttatatatttgatgatcggcccccctccagtcatcagaatctgactctggttggctcagagtattacattcctctactcgatccagtgaaatgcttg

SEQ ID NO: 110070 - DNA, 585 bp, Zea Mays
taaaggttaaggtttagggttttggatttagggttatgcttaagggttatggttaagggttaagggttagggttagggttagtgtatttgttaatatgaatttaattattgcttatattaatatgtgttaatatgtatttaattgttgcttatgtatatattgctcaatgagttctccggtcaaggaccaaggattaaggcccgaccacatggacaagagtgttgctcaagaacaatctagtggtgaaggatatgaaacacctagtgacccttgtcctagcatagatagggtcgctcgccatgagttgcaacgtgaccctacttatgatccacgagagtgtgaggtaaagtacacatccttaattttgagtgtgtacctaattagctgatttcacaatgtctattacacatgcatgatttcttgtgcattttattacatgaataggaggtcttgtctcaatatcgtgcgatactcgatggagttgcgacacgataccaagatgtactggaacagacccaagatgcaccataacaggtcgagacaaccatcgagaggtcaaggagatggaagtagagcgattggaa

SEQ ID NO: 110071 - DNA, 400 bp, Zea Mays
gtctgggatttgacggctggaaaactcatgcatgatttttgtcttcatgaaggtccagtcaactgcttagatgttcacccctatgagtttttattggctacaggtaaatttaggccctatatactcacacaggatgttgatttactaaaataagatttctattatttttattgaggacctattactccctcatgcttcttatttgtacatcacctgtagatctaagtaacatattccatattgtccttttcaaaacctttgcaggttcagttgataagactgttaaattttgggaccttgaaacttttgagttgatcggttcttctggacccgaggtaccatatctatttataacgactcacaaaattaattgttcatatccccagttgaagctattcta

SEQ ID NO: 110072 - DNA, 555 bp, Zea Mays
atcctctctcgcccgagcagtgctcaggccacccagttctcagctcctctctctggctctctctgctctctgcgatttctcggtgatcaccgaggtgctccggcgaggctctgctccagcttgtgcctgccctcctctctagtgaccatcccatgattccctctctctctgatttcatcagtatgaagctctcagccatcccatttccacctttttgtgcccatttcgaatccttgtccaaatcagtgaatccaaatgcatttgagtgtctctgggtgtatgttaaagcttccctgcaggtttccatctccatttgggaggtttcaaaccataaaatagccatttcacctcaaacccaataccccgcacgccaagtgttcggtgaaatgcctaaaccagctaaaattgctcaaatcgatcctagatttttccagcaccttcatatcacctcaagtagcatattcgccaaatttcacgccaatccgatatcgcaggcaccagtttttcacaaatccccatttatagctattgaatccgagccgagtgctacaaatc

SEQ ID NO: 110073 - DNA, 302 bp, Zea Mays
ctcagtgttctttcggcgttctgttagtatccaatcggcctttatatgtagcttctgccattaggctttgcttaactctaccagtgagtgtctgatgctgatacatatgttctagtttgttgccaatttgtcgagttaaataacaaatactgaccactcacaagttctcaactagatgcagttgatttatataaggacagtttatatactaccttcaagacatgtgaaacgatctagcatgatgctactgtacacagaagaatctatatctacttgtgaactttgccttttggaaattaagt

SEQ ID NO: 110074 - DNA, 544 bp, Zea Mays
gacgaactccgttgtacacctcgcccactaaggagtggacacggatcactcagagaagggaagtgaatgttccatacaggggaaggaaaacacaacgagcaatcctcccaacacctcctcccttaaaggaggatgagaagaaacacaccaccgtacctgctcctttctaccccgacgttctcttcattcatgggagattggagtcatcacccatctctgatgatgaacccactgtgctgggggaagaacctccgtagcgcgatgctcagcgatggagaaacaagcaccgaaacgtgcaacgacatcacgaagccagagaatgggacccaactcaacccgtctcttgggacgaagccttagagatgggggaaacccccgacgaaagaacacgtcgagaacgacgcaactcccaccgccatgatcgccgtcaggctcaagaacgagagcgggaactaactgaacatgatgctagactccgatggaagaatccacttctcgcccgaaacttgtaccccgacttcgcccgagcattgaacacgccgag

SEQ ID NO: 110075 - DNA, 674 bp, Zea Mays
ggaggacctcgccgacctcgagagctcagtggcctggaaggatgctgcggtggagtcaggagcggaggagcaatccttgcttcaagaaggcggcgctgagggtcctgcagcagcgagtgcttctgagcaggttgaaagaatgtaataggaatagtctgacagtgttcgctttgtgcatgatactgaagatcgattgttgcgcaggttccggcgtctaggcctacgcaagcaaaccgtgatgataacacgaatgatgatattttggtgggtggaaatgtagtgattcttagtagtgacgcatctgatgtatctgatgttgggtcgtggtcttcgaaaggtgaaaagttggggagcccgtttgcttggatagatgacgaatctttggaagatgatttagattattttgtggcgttagatttagctgcagcggagtctccgttgagggtcgccccccttgaggcgccggcgacttcgggcggtgtagcccctggtgaaccataggggcaaaaaaagattaggatatcgaaacaaagtgtcggaatggtaggagagtcttcgcaatgtattggagtctcccgaagacatcgccgaatgggaatggagagatcgtgccttcggattggaccgcggttggatcaagggacccgtcgtgtcatactggcgccgacggccag

SEQ ID NO: 110076 - DNA, 654 bp, Zea Mays
gcaatgttgagcatcttctcaattgcttttagacaatcatcagcatctagtggatctagcgagctggcgaaggtcggtggcttatggctcataaactcccggtgcttatcacgaggtggaactggcggtggtggtggaggcaatggtacttgttgttgttgctgctgttgctgaaattgctgctgcagctgctgttgcgccctcctctcctggcgtatctcttctctctcctggcgcaactcctggcgtatctcttctctttcctgacgcatctcctggcgttcttgctgcatctgggcacgcatatcagccatagtgtccaccatttgctgcatcaccgtcatctgagctgcaatcagtggatcaactccgcctagtggaggattaggaggattcatctctgttggttgtggctgaggttgtctatatatccaccgagtgtgtcgattaggaggcaaatcaattccaccacccctcctggtattgaccatctgagttagatacatatggtaagagagagtagcagacaaggcagtaattacgaatcgtgttactttgggggatttattagctaagcatattaatgttctacctaccatagctaatttattaccttatggtggtacatgctaagatgtccatatataatatctc

SEQ ID NO: 110077 - DNA, 487 bp, Zea Mays
tcccaagttttgtcgcatcaacgagaaataaggtctgttatccagttgatgacataacaaggccagtgaggtgcacactagttataagatatggtattaacaataatcacatgaagaaattaggaacagacgttgcgatcccaggacgtaagtttcatggaagcgacatactagatgattattgtagggtagaagtgacggcggtcgtttaaggatccgaggacgacatggtagacatccctgggcccgaaggaatcgagacacttggacaagccatcaaaaatttcatcttttggcctcgaagggatgtcgaattggttgatccaccaacgtcgtcgttgtctcatccccaaccatctctgcctcctcaaactttagtacctgtacatccatcatcacctccacaatcttcacatgttgctcctcatcctttttctaacccaccgtctccgccacaagcatcaacatttaggacaccaccaccttc

SEQ ID NO: 110078 - DNA, 301 bp, Zea Mays
atgaattgatgagctgagatccacaacgcatcttctgtcccattagtttcttggactttattgtatgcaccacctcttctttcttgtcgtatctctcccaaactgtattttctcgtctcctacacaaaagacggtaagtacaggtgcaacattacagctgatgtaatcaaaaagaaataccaacctcattgtaatctaccatatgtccacaaaaatagccaacaccaagctcggaagaaactaatccatacttagttccaataccacatttgcagagtactggatcagacttcaactcttc

SEQ ID NO: 110079 - DNA, 468 bp, Zea Mays
gcttaattgaacgagtcgaggagcatcaagggcatgtaagggtgttgaaacaagagagcagaggtcatgatcggacctggagcacactggccacagtgagaccctctttacggcgatggaaagctgatttgggggaaataagcaattcgggggctctggtgagtacttggaggcacgagtgggtatgttgggtgcacaattacatagcggagccgagggtgtgctcaatttgtagtacccttgagcggtgacccatgaatttgagatggcgcggtggcggctagagagaaaagggtgcactagcgcaagcaattggtggctttcaccgtggcgagctcaccgacgatgaacgggtgggctaaggtgactcactgtgacgtggttaaagcaccaaagcacgtggtgcaaggtcatgaggtggctaactccggtgagtctatccaaagcggccgtgactcaggcgggtac

SEQ ID NO: 110080 - DNA, 877 bp, Zea Mays
tcaaggactatgatttggaagtgcattaccatccgggcaaggccaatgttgtggcagatgccttgagcagaaaggcccagtgcaattgtatgagcatggatgcaagggttaccaccctgtgtgatgagttgtgcaagctgaacctggaagttgttcctttaggtgatttaaactatatatcggtagagcccacattacaagagcaaatagtcagggcccaggttgaagacaagggtgttcaggttatcaaagaaatgatcaagcgaaaggcggagaaatacaagtgcttccgtcaggactgcaagggaattctatggtttggagatcgattggttgttcccaaggaccctgctcagaaagaagatattggatgaagctcacctttccaaattctccatgcaccctggtagcaacaaaatgtatcatgatctcagatctttatattggtggaccagaatgaagagggaaattgccaagtacatatccgagtgtgacacctgccagaggattaaagctagtcatttgaaggcagcaggccctttgcaaccacttcccataccatcttggaaatgggaggacatttgcatggactttatcgtaggattgcccaatacctccaggcaccatgattccatttgggttattgtggacagattgaccaagactgctcatttcttaccagtgcataccacccacaagacagagaagtatgcaaaaatttatgttgatcaaatagtgcgattgcatggtattccaaagaccattgtatctgacagaggagcactgtttgtggcacgcttttgggagcagctgcaagaatcacttgggacccaggtaatgcgaagctcagcataccatccccaaacagatggccaga

SEQ ID NO: 110081 - DNA, 334 bp, Zea Mays
agggtccttgggaacaaccaatcgatctccaaaccatagaattcccttgctgtcctgacgaaagcacttgtatttctctgccttctgcttgatcatttctttgataacctgaacacccttgtcttcaatctgggccctgactatttgctcttgcaatgtgggctctaccgagatataacttaagtcacctgaagaaacaacttctaggttcaggttgcacaattcatcgcacagggtggtaactcttgcatccatgctcatacaattgcactgggcctttctgctcaaggcatctgctacatcattggctttgcccgggtggtaatgcacctcc

SEQ ID NO: 110082 - DNA, 392 bp, Zea Mays
gctgacaacacccgcttcctacgtgaaatggcgggacatcaactttagcaacaaggcgggagggcttatccgcaaggaccccgtgaaacttcgtacctggatttctcagaaacccgtcccccacgtttcgtcaaagctgaggatcctttcgaagctgacgaatgggtacgggtcattgagcagaaatttggactcatccgatgcacagagacccagaagccattgtttgcggctcagcagttaagacgccctgccagtacctgttggggaaattatgtggccattcagcctgccggacatcaagtcacatgggacgaatttaaattggcatttcgtgatcactacattccagaaggagtgctgcacatgaagcaggaagaattcatgagact

SEQ ID NO: 110083 - DNA, 513 bp, Zea Mays
gtttctctaacgctaaaattacaggcaagttttttctagaataatttggactacttataaagtgatcaaaaggaatacgattttcagtaataataactaatggtttggtctacttcgcacttctttctgttgcttacatgtatgttctttggtacttcttataggatgaggcaaataggtctggaggagtgggaattcatgcagtcagtggattggcctcagatccaactcttgactttttgatgcaacatggaataagttcaatgccaaaatctgtagtatatggttacactgcttctggctatggttttgttcaagacatgccctatgctttcatacatgagtttactagaacctctatggctggcaagatccgacgtttcaagcatggttacatgagtctgtgggataaacttagtcagtcattaccatttgaagttctttgtggcacggaggttctcagagtcaagcgtaacaactgtgtcgcaagtgtaattatcaagaacaacaatg

SEQ ID NO: 110084 - DNA, 711 bp, Zea Mays
cgaggattagggtgctgcttctgacacatccttagacgatgaggatctagggattccgccaccacctcctgtgccacctcgttcccatgatcacgaggctggtggctccagtgctgttcctccggctgctcttccagcaattgaccctgcattggctattattcttcaatctctcactcagcagcaggctcatctgctagtagagcatgcctgacaggcatctatctagcagcagatgtccgagcggatgttgtccatgttccagactattcaggacaaccaggacactcttcagcagcacctcttggtagacaggacagagcaccgggcgttcatgacttacatccttcagcacaccggtgttcatattccctagtgcagtctgctctaccttcttctcttcaggctgtagttgtgccagctatacagtcagtgccttcagctgttcaacacaccgcttaggccggtgaccctagatttctctacccaggtcgttggaccaggtagtgctcagccaccaatgcctctagcgtttgctgtcaccactcttgccatggttgtttctgtgactactccagctccagcagatcctacatcgcagccagcatccgagtcagcaccagctctagcctctaccacagatagtggatctgagactgattccgacaccttgctcgcgtttgcactgcttccttagcctcgacctgatgc

SEQ ID NO: 110085 - DNA, 445 bp, Zea Mays
gtttttccgggttacaacatattaggagatccaccctatatcctagttcaatagttggtgcgaaaagctaagcttacatgatcttcccatcctcctaacatgtttaattttgacccatctaaccctgagtagcagaggcagcactggccgcaggtgtagggggcactccggagtaagccgtgtccagactggaagctggctccatttcctcgagatcctcctcctcgctattttcgtttgcctccattgcttggtccatatcctagtggtgcatctctagatgagtgttggcctcatccagctcctcttgcacatcatggagttgattctctaggagttcaatggtgttgtcctagatttccacttgttgctctaactcttgggtgtggttgctcatttgctcaatcaggagatccttctccaccaactctgaagacagatcgac

SEQ ID NO: 110086 - DNA, 492 bp, Zea Mays
gttttttctgtctagggagggcgggttgaatagattagaacctaggggctcttgagctaaactacttggttgtcttatatacgggcgtgcctggattgttcatcgcaggatccatggtgcaaattaagacaagcgaagggttattggtgatctaatctccaccacccataacaggtatacgaccatgatctagctacatgaactgttatcttcttaatatggaccgcacattactgatttaacggctgccacgctctcacccccttcctctttctctagccaatcagacggtggcggcacgagtcacccagggtggcggcgccatggccgtcgtgcagtcacccactccctagtcccccaatctagccactaagaggtgcaaaacaacgagaatactacgacatgtcattagatagaggatttaattgctattgtgttgttgggttccctggccacggtggcgtgtggcttcacagcttcgggcgaggttcg

SEQ ID NO: 110087 - DNA, 822 bp, Zea Mays
tgtcattttgatggatgtggagccgtgatgatcccacgtggttcaggcatcttcagctttaggtatgtgtagtttggcacgaccatgaacttggcatagcacgagctctcgagtatggcgttgtaggatcctgggaagtctgccacctcaaaactacaagcgttcggtgcggaaatcggctcggacgccaaacgtgacggggagagtgattcgcccgagggggtaggcctggtggctgggtatgacgccacggaacggccccatgcttggtcgcaacatggagcgtgtgatccctagtccatagaaggtctcaatggacatgatgttgaggccacttccccgtccatcagcagcttggtgaggctcttagagcatatggctcgatgagagggtaggccccgggatgcgggatgctatcggggtggtcgcgacggtaaaaaacaatagaaaattccgaccaccgaaggtatcgtggaactgttaactctgttgtgtggacttctcaatgaatggccttgatgcggcacttatcgtcgtaggcctcggcaccatcgaagatcatgaggaaccctgttggcttggggaaatcatcagcggggacctcctgttctgttggttttgtcggttcctccggtcttgcctttttggcgggaggtttggagataaagcgctttaggagctcgcactcccagagcttgtgcctgatgggaaagccatggttttgacacagcgagtccatcagcttctggaaatggtcaccgccgttcttagccagtggccttggtggtcgacctacggtggcaacttcctcttcatcgcgcc

SEQ ID NO: 110088 - DNA, 347 bp, Zea Mays
ctcatgctcactctttctccctcatggagcgtacaaatgtccgaacatagttgatggatgtccttttggttccgcacacagttaaagacctttttcaaaaacatctaaagagtgtgcttttggcctttgcattccacttctaatagtatacctcatcaccaactaggttagagggacccttaggttttagaagtccttgtgtgttggctatatacacctcgctataaactcttgataagcatccatgtgaattttacaataaggaaagttgtctccctcaaacatgggatggggtccattcccatgggacatatttctcttgggcaaaaaccattgtccagtcaagc

SEQ ID NO: 110089 - DNA, 470 bp, Zea Mays
aaaactcccggacttgaatctgtagtggatgcattttgttaagtctgcacttttgtgttgtattgttttgtgtggcctacaactgaatgcacttttgtgtggcctacaactagatgcacttttgtgtgttttgctaagtctgcacttagacaggctgcagttatgtgttggtgttatggacaagagtctatatggacaatatgggttgctgttagagatctcttgttgttatgtgttgtatgaactgcactagtttggtatgtgaatctgaaccagttctgttctcagatttgtctatttgaactcagtggcatataggggatgaaactgtattatctgtataactgtgttagatgtcagctaacggtgatggcacacagataatggaaaatctaaactgatggtagttagcggatggctattttcctgatggcacacaggtaacggctgtagatttgagtggcttggaa

SEQ ID NO: 110090 - DNA, 417 bp, Zea Mays
gcgacctactcggaggataactcagaggaaaagcaaccgaaccctggaagaatagacacgctcgcagtagaagatgatagactcaaacaatatgtaagataggacatctatctagtcggctatataaggctgcagaggtacctttaccaaaaaggagtctctcactcacctttagatcgataggaactctttaattcacctccacaactacctgtaatctgcaaactcagagcaatccaatactcaacaccgcaaatgacatagggtgttacacattcacgtggcccgaacatgtttaaaccctatgttccgacttgcatccacgtgtaccatcaagcagcgatcaacatcgccgtcctcccagaagcactacgtgggctaccccttagtgcacagccgagactaaacaccgagaaa

SEQ ID NO: 110091 - DNA, 1109 bp, Zea Mays
gctggagcattatttttgtgtgtgtgaatttaaattcgcatctaaaaattggatttggatttaaactcttttctaaaaaaccaaaaaggttttttattcgtgtgctgattttctgatccagtcgttagaaccgtcttcctcgagttctattaggactttgttccttgtacgcgcacactatcagtgtttagtcccgacgacgcgctacggggtaacccacgtagagcttttgaaaggacgacaacgtcgattgctgctcgatgatacgtgtaggggcacatcggaacacgggggatttatataggttcgggttccgcaagtgcgtattaccctacgtcctatgtggtgctgagtattggattgctatgagttcgaagattacaagtgattgtgggatgtggaagatgaagttgtctatcaatttaatggagtgttctctctttcttgtaggggtacctttgcgaccttatatagctgactggagagatattcctttatagatcattgagtccactcgagtctacttcctgttgctacaagtattcctattctttcggtgcttggttgccttctctgggttatcatctgagtgatccggcgctcgaccacgctcgagacgtgtcttcagagttcaggtgaccccttcgcgggacacgcgaggtgatccctctatgggacacgcgaacggcgcaccaccggtatacccgtgcagtatccttcgagattttcagctacctcgcgcgccataacttccattagtttttgtcctacccaagcgaggccaactgtgcgccctattgggcgacttatcatgggcctctgaggcaacccaaggaatgtatgggtgccttagtggcacatgggatatctatctcccacaggcccccaaggctcaagcaaaattttgaggacaataggctcgagactccaagaatgaactctattatttgattgtctttgagtgcatcttctttcccatgttgtaagtaaacccaatggatgtagccctcgagctttgagttgagcaacaatcaactcgatggtccccgagatcttttcttcaaaggatcattttattggtctgattgtgagcaaattgagtttttcgc

SEQ ID NO: 110092 - DNA, 401 bp, Zea Mays
aaaagaactacagggaccatcatctgatgtaagcttgtgattttgctgggtaatcccttaaccgttgtcaggtggatatatctttaggacaactttgtggggacccacaggtctatatttggtcgataccttcttaaaacacatcttttgatgatatcgagtttctgttgtgtatgtttcataaagtcctgctgttgcccaggctgccaaattgtgtaatgtgctgtgtggtaggtttttgctacggcacaatgtgcatagagtactccctctgtaaaataaacacacttctaggtaatgaatgataagatcaatgctactaggaaattacctatgtacccctaaagttgatctaacatgtaactaatgtactttggaagtacagaaaggagaaaaattac

SEQ ID NO: 110093 - DNA, 976 bp, Zea Mays
cgtgttttgcgtatgcatacccggagggtctagagtaaggggttggacggtccgcgactgggccgagcggtttggggttatacctaaatagtctggtcatatatgacacttcttgggtggtctgcgcgtggcttatgtagggtcggatggtccgataaaggatgtcgaacaatccgtgaggtagccagacggttcgattatgttcagagctgattgcatgctaggcagcgactgctgcggtgatgctatgaacatattcatcggcataccatacaatgcctgggtctaggatgacccatttgtagctgatgtgttaggtgtgggtggctccgtattaggttcatgccagggaaaactaggggcaatagatttttcatacgaacatgatcaccctttaacagattcatttatatattgttttaattgacccctcgttgttctatgaaagccttaaaagattgatttgatttacatatagtgggagcccgatgcgaagttaggagagatgctacgatcttgccttgaccgatgatcttctaatggcgatccactatggagtgtgataggtacttttccttcgccttctcgcgtcgttcggcgagttatcgcaacactatttcctcttcacgcatcatgaggtcctgacagtgctgctgatcatcagtagggagtgcttccatggtcagcttgatgatgttggcggcagagacgttggcatgctctttataaccggcatttggaggccgatttttagtagatctaaacaccctaatgtcccagcggagtcgccaaaagtatgttggcgccgattttgtaccaaacactagaatgaatcacctggcagtgctctctacaggagtgcagacgatccacgacctcgctgcaggagtgactcctttgcgtgcttccagatggtccatgatggcaggtcttcttcacataaccctgaatcttgtctccctggagggaccccatc

SEQ ID NO: 110094 - DNA, 329 bp, Zea Mays
gagaaactcgtgggcatccagggcccaagccaggagatcattggacagctcgtcggcgagaacgcagcggagcggcggagggttgtcgccgttgttggatctggaggttcaggcaagaccacacttgccaaacaggtgtacgagaaaatcaggtgccaattctcttgtgcagcctttgtgtccgtgtcgcaaaagcccaacatgaatagcctcctgtgggagttgttatctcaaatcgggaaccatggtggagatttaggaatgatggcagtaggatattgcagtgacaaacaactgatcgacagactaagatcacatcttgaaaagca

SEQ ID NO: 110095 - DNA, 637 bp, Zea Mays
tgagtcactgtcgctcacctgcgcagcactaccgctgcctagcactaccgaccattagagcggcactaccgcttcgtctgttctatagttttgcttatggttttctacatattgttgtgtttgttttgttatagtattttgttgcagtcaatcaacactgtattgatatgcacaatgttctactgcttttcattgtcctgtggggtttgtgttgaagttgggatcaagtcacgatgctctcgagtagagaaatttttagtggctcccattcaccccctttggtcatctcatcggtccttcaattgattttggagctggttaaggatcaatacatcctaatcggttattgattgattgaaggtgacatggaacgaggtgttggcaaacctctattcttcaatgtgacaaattacccatactggaagatttgcatgtctgcgtgtctttagagtatcagctattaggtatgggagattttccttgatgctgctttcgaggttcatggtgctcgaattatgcctatgtagatagagttctgtgatttgaacaacaaagccagaaaagatttgttctcatgtctctcgtttgctgagtttgaacgagttgtacattgggtatgactaacaagatctagtcc

SEQ ID NO: 110096 - DNA, 1363 bp, Zea Mays
cctgcaaaactaagggtgcttactataccctactaacggagcaatcgacttaagtcggagacaccttaagtcggtgttacatgttcacgcaaacaaagcaaagggtgcttactataccttatcaccagaacaatcagcttaagttggaaacaacttaagacgatgttgcacatcctcgactaccaatcaaagaaggcgcgacatgcctcatcaacaaacatttagaaaataaattgttcaggaaatagactgctctcctacctaatcaacaagtattcaattttatgtttgtacaaagcatcacaaaggaccatctccaggaggaatattgcccacaggatcactagaagctagaggattgctcgaagtacccaatgcagcaagaacgtcagccacgatgtcatcaggtaccacaacgtcaggccttttcatcaagaggcgaccagctcggaccgccttgacatcgccttgttgcaccatgccttcatgatctcacggtcgtcctccaagaccttaatatctcggtgagcaacttataactcctgcgacactagcttcttcgaggcacaaagctctttaatggtagaatcttttgaagacagagactcgctgagcatcaacacctcatcctgggactctttcaggttgttcctcttgtgctccaactcatccatggtgaagcgatggctcctttctagggtggtaagggagctggtggcatcccggtacaatttatcaagattgtttcgggagtcaagaagtttttgcatctcctcctacgggtgggagaacctttggtaataggtcgaaagcatggaataagcaacttgaagctcctggcgagttacctcgtgggttttcttctccaaaataagctttgactgaagggaagaattcatggcacgggcgccatcaagagacatggtcacccgatcaagctctacctgaccttgagcacaactcacctcagcatcagaacaccatcgagtcaaagctgaagaaataattagcaaccactggtgatatgaacataaagaaatattaacaggaaacattgtcaaccaactaaccaccgttagcagatttcagatcatctatctgcttctgaagagaaagggggttccattgcgacaaggaagaaattttctcaggcacgggagcaccacatggtttcacctgagcagccaccaagtctaggacactctgcaggtacataagtctgcgaagggaacaccagttggtaaaaacaaggtagcacaggatgaagatacatgtaagttggacaggaacaagggaaaccccaaagcctgaagtgttggtgcgctcctagaataaaggacgccaatagaagccgcattatgag

SEQ ID NO: 110097 - DNA, 290 bp, Zea Mays
cgttcttgattgtgacctcattcagagcttgataatcgacacacattcttctggtgccatctttcttctccacgaataggacaggggaggcccaaggcgaggtgcttggccggatgtatcctttctctaacagctcatcaatctacttcttaagctcaaccaactctggtccagatactctgtaagctctcttaaagatgggggcagtgccaggaagaagctctatagcaaactcaacttttcgctctggtggcatacctggtaagtcctttgggaacacatctgggaac

SEQ ID NO: 110098 - DNA, 390 bp, Zea Mays
ccaggggatagttcaactcaaggaggatgaattctgggagctaactcaaggcgggagaacagtcagtgagtatgtgcacaagttcacagagttggcccgttacgcgcctgacgatgtcagcaccaagtccaagaagatggcccgttttctgaaaggactaagacccgagcttaagaccatcctcgccagccaagacttccttaacttttctcacctctccaacaaagctatccaagtggaaagggcaaaagaggaagaaaaagggcacctcaagaggaaattccaagttctccgagctcaacagcaagaacgtcaccagagagctcgaccctttgggcttccacctaggggaccaagcttcaataaaccatctggacccactccatcgcg

SEQ ID NO: 110099 - DNA, 420 bp, Zea Mays
gtaaaacgtacccgcgaaggggtatcggtggagatgagccattggatcccaaaccaccgggcgagattaaatcgtgcaccagatgatacggtaagttatatatgcctttggattactatcctacgacccacgggacaccatactacgatcagatctgatccgtccatcggtcaatcaacgatctggatgtaatataacgaatcggtatttaactgcatcccccaccatccgatccaaaacacacgactcctggcgcatcattccaacatctaatctggaccaaccctatgcgatccaacggtggacccgattcttcctccccgatgcgcccaggcggcggcggagcggccacagagacggtgatctcaccggagatacccgatttggcgccaccatgcatgtttcccccaaccaaatttg

SEQ ID NO: 110100 - DNA, 1692 bp, Zea Mays
caaatgcagggggagcccaagatatctactcaggaatgatgccagcttccccgggaaccacatgggcaaagattcgaccacatctgcatgacaacggatgggaaaaatttccgtcttattaagattaaacttaagccccgagcaacgactgaaagtttgcatgatactttggaggacgtcgagctcggcctcaactggtttgacaaaaatacccgcatcgttagcgtacaaagagcaattaagggttgccggtcgtggaacgatttgcgaaaggattcctgactggatcgcccgctcaataattctttgaaaaggatcgatggcgaggataaagagcataggggacaaggggtcaccttgccggagtcccctcaaatgggtaattctcctacccggctttccattcataagcacacgagaatatgatgaagcgaggagagcagcaatccaatttctccatttggcaccgaagccaagaatcgcaaggacttctaacaagtgagcccagctgacagaatcaaacgccttggaaatatcaagcttgatgaaaagtgcttcgcatttattcttgtgcaatttttggatgactctctgtacatatagaaagttgtcatgtatactcctccctttgatgaaggcattctgcgatctggacaccagctgctcaagcctaggttctaatctttctgctagtagctttgttagaaccttcactaagctgtttatcaaactaatcggcctgaaatcagcaaggcagagtgccccctctttttttggaaggagaacaatgtttgcttcattcgcaagatggagcttagaagtgcggtgattatagaatccaatgagagcattgaccaaatgtgtcttaacaatactccagcattttttatagaacaatccaatgtagccatcaggacctggagctttctgggaaggtattgcccgaataactttgtttatttcatcctcagaaaaggggtttctaagtcactcaagtctgaagcctcataaccaagaaaagactagttcaacgcctgctccctagctgagtgagatcctaacagatttttaaaatactgaaaagccacctcctccttatctgtatgggtcaaagcgataccagcgttagaatgcagctccccgatgaaattctttttccgcctaatattcgcatgaagatgaaaaaacctagtgttagcgtcccccaaacgcatccattttaagcaagaatgttgctttgctctagacttttgcatggcggctaggcccaacgatttatttttcaagaaacgaagaagctccaactctagcggaataagctgtctaaattcttgtgccttctctaaacacaataaggcaacttgaacaatggccagtcgcagttgcagattaccacaatgttgggacttccaaattttgatggctactgcaagacgtcgcatcttaatatgcattctcaaaatagcatcactggtgtgaactggctgattccagttgtgctccaccagatcaaggaaccccggcattgttgtccaaaaagcctcaaacctgaaacctcgatagaaatcaaaattgacgtccccttcaaggaatagtggtgaatggtctgagatgagggaggcgatcgcttgcaggtcggaacgtgggaacagatccaaccattcaagagtatttgatcatgcctcgtgtccc

SEQ ID NO: 110101 - DNA, 365 bp, Zea Mays
cagcgttggtgggtggcccgtcgtgccatggtgatgccacagccagctctaatgtctcggccgagatgagcaggtctgttagactcacgatatcacgctcacagtttcactccggccagcatcaaaactgatcgccgtcgtcgtcacagccgtgttctggttctcagttctgttcgtggtctgaggtctttcccctcggccaagtcaccttattacacgtatgtgtttacagggccacttaggctccaaattcacttggaccactcatctcccgaataacggatgttgggccgtctcactcgctgggctctcctgggcgccgtcccgtgatccacttctccattcagcatccttccagctccttc

SEQ ID NO: 110102 - DNA, 390 bp, Zea Mays
gtctcttggagataggtgtagtgtctggctgaaattctatggcaaactctatatctcaatctgggggcattctaggcagttcgttagggaagacatcggcatactcgcagaccactaggattttatctaagggcaattcaatcatggagaaagcacatgaacgtgcactcctttggttgggtaggtacagggtaaactgtccatagatcgggtaatggatctcaacggctcgggtcgtgacatctaatagaacttggtgtcgggtgaaccaatcagttcccaaaatgatgtctacctcctctaatgccaagatgataatattggttttaatggttgcacttcctagctgaatggggacctgctaatttagttgatgtgacacaactttgc

SEQ ID NO: 110103 - DNA, 427 bp, Zea Mays
ggattacctaaataggaacctaaataggaacgaactattgtttgcaattgaacggtgtcttactccttcgcacggcggtcgacgcccacagttcgcggtggcgaagcagaggtgagcgaccgaggaggcggcagagtaaagatgagcgcaaagcagggccaaggcgagcataaagattagaagaggtgagcggatgtccttagaggtgcggaggcgaagcgagcgagcgacagccaatagccgacgatagagaagcgagcaatttcacctgcctgtgcgagcatcggcgcaaccaagaagccaaacgggtgacgaagaagcgagcaactatgtctgtctgcgagcgacgacgtaacaaagaagctagacagatgtcagacgcgaagaaaggccatgggtcttggacctagtgctgctaatgggtcgg

SEQ ID NO: 110104 - DNA, 574 bp, Zea Mays
cgggtttgtctcactgccgaccacagagaaaagatcccgggtttgatgtgtccagagcacgcgtctcgatgccatcttctagtatgaggtagaggggttagttaggcacattttttcaattggagcattaggattagagttaaggatcaaggtgaacgtgctcggttttggttcaaaggctaaaaattcagaaatctgaatttcagatttccccattgaacctccacttgaatggcttgtttggagtttttaacaaactattttggccaagctttcataatctttattgtagcttatttagtgtatttcaattcttataattggcctaagccatgatttcaagtttttcatggtctttcatcccttttcttcttttctacttaattagcttaattagggtttcaacatttttcctctttttgaaaaacctcatttgttttagacatgattctttagatataaacttagtggatctttcattcttacattgatttggtgcttcatgctcactttggcttacatgaaatgatgggtcttgagttagcactgagaaaaaccataagtgacactgggg

SEQ ID NO: 110105 - DNA, 472 bp, Zea Mays
tgaagcggaggagccgccgatgcatcgcatgagaaagaattgggaggagcgcgatatggtggtgttcgggcagataagatctccaccgagggcaggctcaaatgagtccaaaggtgatattttcctttcccctcaaactgatccaaacttcagttattacacaatgttcagaacactccacttcttatctccacactgatattttgaatccctccatactgggatactttctacggctgaggcctctagaacctttgttgaccagcccaaccatatatcaactcgagcacactagagaaaccagcagggaggggaaagatcttcaatttccaattcagtaatgaactccactaaaacagccttactgtccagcacagcccagtccaaacttgatacttcccaattgggaggggcctctagatccttgtccatatacttcctccatatctccaactatacacacaagtgcaac

SEQ ID NO: 110106 - DNA, 755 bp, Zea Mays
attcttccatagaaagaagagggtacgtatctttaattaatttaaacaataaacctgtggacaagcaatataagcaataatttcacccaaaaacatgtttttaattactaattgtgtgtaatagcatatctctcctgttgtaaaagaaatctatgatgttatatataaaaaaggccattacattacaactgacaaactatagtagaaattatgcaatagcaattccaagcaaagaaaaataaaatgccataagaaccaacgaagcaaagagaaagatgtcaacaaatgtgttccggaaagctaatcacaaaaacttgtaaaagagatgtgcgaatgagcagcatggacggtattatgcaaacagttatgtctgaatctcaattggaaaaacacaatgctacaggaatgagcctttttaaaacatattgcagagatgaaaccaatgtttatagttcgaccaataattcagttgatgagcagtatgatcaatattagttgataaacacaatgtcaaaggagtcaacataaacataagatatagaacagaagccagtactcatagtatgatcaatagcgtaccatctaaaattttagaaatggaattgttattagtaggtaatgtttgtgtacaggtacgtgaaaaaaaggtaaaggggattaaataaactttttagtcatgaaaacatggcagaacgatatccgcacctgctttgcatggaccaaatatattaccggattttatgtcttgtaacaac

SEQ ID NO: 110107 - DNA, 327 bp, Zea Mays
ggaagaggtccatgtggagctacaccaccttcaagtgaggaatggtgtaatcttggaggatagttctgaggagattttagcaacaccgactccgttgtcagagtctcatgcctttgttgtgggtgtcccggatgattccggtgatgatgatgaagaagaagaaaacaatgataacatgaggatgtcaacaatgaacaagaagacaacttcgttggattgcggcttgtcgaggaatattacacttcaatgatcaagacgagacactttctaaacctgctgcaagatgtgctacatgcgttgggaacctatgttcgacctctatatgac

SEQ ID NO: 110108 - DNA, 797 bp, Zea Mays
tcctaattacttcaagaattgctgcgttctaaagacttgaaccattctaacacttttccatctgttagagttaaaacaaccaaattaggaccaataagtagacttactaattatatacaagttattttgtgcgctagaattaccatacacaattagtaacgcatctaccacaataatcttacccggcatacatatatatggatgcgctcttcacatagtaatttgcattttaacttggacatcacatgagcactactaatttttacctgcgaccacaaccatacgcatttggaccacaacaagcaattcatcgtgattatgagcttaaccaaaccatctaacaatttggctaactagagcaacgacatagccgttaaataacatacacgtcagcttgcctattatcgtcgcaatccgagacacaacatatactacaacatttttataaacacacagagtcacaagtattttcgcacatcgaccaatttatacgaaccgtaaaccactaatctccagatcgcaatcaccatgcatttacttcctgaattatgaacgcatagatgtttatcatacgaaccaagtatttcaatatttatcctaagacaactaactccattacacacttgtatctacttgacttacttgaagcgtctactcaaaattgtgagcacaatcatacactatacgcgacgcataattgaacgaacgcataatacgcatcgttacgactcaactcataaatatagagaagcgtcgactactttggtatgtcaccacctctctatataagccaaaac

SEQ ID NO: 110109 - DNA, 902 bp, Zea Mays
gtcggcaccagcaacgacaaggacatcggcgacgacactacttctgaggtactaccttccgccgatgatctcgctgctgaggtagaagagctgacgactgctttggctagtcaggataagttgcttaggcaggctgctcgtgataggagagagtttagatccaagtacgagagcacgcttagggaacttgagtctgctagagcttcagttgtggtgtccgacgagactgaatgtgatgagtacgctctacacatgtcgaacatcaccactttacagaccaagtacgccaccttgctagatgagcgcgacgagttgagatctaggtctagcttgttggatgcgtgtaccgtttgtcctagcttgcagactgagctagcagagagagacgctaggatagccttgcttgagaaggctagctcagtgagtgtccctgcacctgtgcagtgtgcactttgtgagggtttgcagtctgcccttgagtcctgcagacacgacaagacaaggattgaggaagaaaacacataccttcgatctgtcttgagttaggtgtcgtgcagtgagtcccagttgggcatgatggtcagtcagttcaagaggggaactggcggaccgaggttaggctttgctgctaaggatgggagtgtcgctcgctttgggaaggttggtgagtgcagtggtttgacaccttcagagaaaccttcacccactcccaagcttatcaaaatcacccctcctaagcctatcacccctatgagagatggtgtgattgaggagcctgtgagagcccctcctcagaaacaagtgtggcttccaaaacctaaccatctcaggaacacacttgacacccttcccgacatctctagtgatccccttcctagagcccctcagccatccaaaaagaa

SEQ ID NO: 110110 - DNA, 707 bp, Zea Mays
aaactgtaaccccatcaatttagtcattgccttgcgttgcaattcaaagtggagcacctgatctcccagaaaactgaggcactgatggccagtccttatttcaaactcagctctttgtaaacaagacctccatctatctactgccataatgagagccaagaattccttctcatatatagatagactagtcagttacccgtttgttactgcagtttctatattcagaatatttacaatatctattctttgttgaacacagatggttgtgagctccggtggttagaacctgggcgtgagaagagggagggcgatggttcgaacctcaacaccgcgctcatttttagacttttatttcatttcgctcactgcgctcgatggaggagacgactcacgaaggggaaactcccatttaaatttaaatatagtagagatgtttattcttacttccaagggccttgctcaaatatgccagtggtctaccttgctgcattaagactgtccctaaacccacatcacacgcatcagtttcaaccacaaaggacagtgtgaaatctggcaaagctagaacaggtgtggttgtcattgcccttttgagagtttcaaatgcaagatgtgcctcctctccccagtggaacttccctttctgcagcgatcttgtaaggggtttggcaatagtaccatagcccttaacaaactatctgtagcaa

SEQ ID NO: 110111 - DNA, 315 bp, Zea Mays
cggggcgtgcaacctggggatcccgcaacccagagtcacagtcagcagtcaacaacaagacacattacagataatcaaccatgctaaccagcaatcaggagcaggcaattcaaataaattggttagtgattatcttgcagaggatagacttgatgacaccagcgctggccgctttagagatgttcatgcctgcagaggacaccaccttagcagccgagagaaggaaacccaatgcaacattttttagatcaagcttgtgctataactaaattaggtcactccagagatgttcatgcccgtcgaggacaccacctt

SEQ ID NO: 110112 - DNA, 439 bp, Zea Mays
caatcccctctccacgttctcagcaccagtaggtaaccctctcccgagatcgctatttttttgccccgtcgtttagcaccgttgaatcatagattagggcatgaatgcatggcgctgttgctcaccggcgagcgcgcctccgcgaacagcctatgcatttcgctgctcgtcctcggtcagggaagaaagcctcttgtcgttagatcaacggttgggcggtttggatcaaatctaagggtagccaaataggggccgtttgatcgtgggcgaacagccgtgatcggatcgttgttatttaaaatctacaccgtcggattctgatatgtggatcccgtgcccgtaccggttcgtgtggttgtgcggtctaatccgagccattgatctacatctatgcggttcacattaagttataccccttcagccgactcttttgcatacg

SEQ ID NO: 110113 - DNA, 935 bp, Zea Mays
tttgaatgaatgataatgaatgtagagtgctagacatatgtacaaattatattcatagcctaattaattaatgtatgtttaatattgtcggtgtttcgaaccagctccgacaagaaaatttgtttgtgtgcgttccatggtccaaatggtgtgttcggtgggtgtaagatttatactggttccgggagaacacccctacatccattcttcggtggctcacgctattggcacctggttgctcaatgctcgtagttagggttacaagtgggcgagagagaagagctcctaaaaatctcttatgcatggctagatctaaggactacgggtctggtgctctctgctaagccttaagcgtcgtggtggttcgctccttggcctcggcctctgtggtcctctgggtcttctggtctggtcgtccgttcgtgtgtatgcctgtgttcgtatatggctctcctttctcatgttggccgacctccccctttttataggcaaaggtgggggttaactaccggtaccttctaaaggaaggagctacagtgttgtggtaaaacgggacgttctaccttggtaaagttgtgtttgtccgtatgtgtctcggtcgtctggtcttccctggtcgcgctctttatgatgggtgatgtgggcggcgaagagctccggcataatcattatcgtctctatgctacgccaacccctaaccttcaaccttcgtagcttgggcctgggctcgatagataatgagtggaccgtagacctaggggcccataggtaatgagtggaacgtggatcgactccctttgtggctcgatgtcaggtgcagttaatgaggacggtcacttatggcgggtcaatcccgagtcgagcatagaatccactagagtggattactcccgatccccctccccttccgactctgccttgtccaaccctaggct

SEQ ID NO: 110114 - DNA, 557 bp, Zea Mays
attaatatttttttatatcttcttgttataattcattgaccattctcacctaatgtaaccttctcctctttgttctactttttcatcttgagtaaatcaaaatggagaggggatcatgttaatttgattgtgttgccctattttggttcttgactgaatctcaacgggtgaccaaaaatcctacatagcctcaaacactaatcttgttctttgtattttcaatttcatgccattaaaaaaatttggagctatgaatttcaaacagcatccatgcagctagttatctaaccaaaataagatattccatttgttgcccattatggtgacaataggtaatgcaaacatgtagtcctattgggatgtactggcacctttagactagcccacactcaacctagtttggtcttctcaatccagggccagtgcatttgtagtgcccatcccatgattttgagattgtgaatgcctagctcaccaaggtcaattggtatcataaccttctcccatgcaactaaacaactgcccccattgatgtcactccttcccttccacaaaag

SEQ ID NO: 110115 - DNA, 376 bp, Zea Mays
tcttcaccctatcaagccattcttgagtcatatcatattgagcatccattgacagaatcatttctctaatattgtgaaccctgctcgaatgtcatctagatatactccctccgtctcaagatactaggcgcaactcaaaaaatacaaagaccaagaaaggcattaattactactcgttcctaaaaagcagcacggattccacctctaattaacacattttccgtcacatgcagttaaacggacaatttctcccgtccatgtatgcatgcttttaacagcgcacgaccacgcatgcaaacgttggcgcctaactcaatcagtattttttcatgcatgcagacgcaaattttttcaagcatgcaggcgcaaattttgc

SEQ ID NO: 110116 - DNA, 428 bp, Zea Mays
gtggaagtagagggtggttgtagccatcatagagttgtggtctgaaagtgctgcgtctccatcctagatgaacttgatcgcatttcgctgacgacggtagcttgccacggcatgatgaaacaccgtgttggagtcaccatccatcacaacacgtactttacttccttgtttcaagtattctgccttctcgagcagcaaggtgaccaggcggtcatggcacatgcaacgcaggtcgtcctccgacatggaaaggaggtgaccctcttcatgccagtcgaagagcatgatgaggaacttgcaatcatcgatggtcactgagcggttcttgtgaacgcgtgcccacgctttagctctccggcaaacctgtttaaggtcaacagcgagacccctagctacatcacattcgatagcaatagagggcaagcccg

SEQ ID NO: 110117 - DNA, 303 bp, Zea Mays
gttgtttggtacttcctagttatctattttggacttgagagctgactttcatcaaattttgttgaatgaaggcgaagaatacaaaacgacattacagatgcacttgggtcattatgagttcagggtcatggcttttggtctcatcgaggctcttggtacatttcaacggggctatgaatcagactttggctcctttgttcagcttgtcttctttatgacattttgatttacagtaagaccctggatgctcatatccaccatttgcaacaaagtcttttatcttttggcacaagaccagtggaa

SEQ ID NO: 110118 - DNA, 460 bp, Zea Mays
ggaacatgacagagagcataaatgcttaaaatgtgggaagtcgaggtacgtggagcttgtaaatgaagaaggggagaaggtggtggcaaaggttgtacataaacagcttcgatacatgtctctcactcttagactgaaatgctggtttctcttgaggaagaccgctatgcacatgaggtggcataaagattgtacgaacagacaagatgggttaatggtgcacccgtcagatggtgatgcatggaaggctcttaacaactttgatccagattttgccagcgatgcaagaaacgttcgtatcggcttggcaactgatggtttcacacctttcaatatgactgttgtgtcgtattcatgttggcctgtcattgccataccgtacaacattccacctgctctttgcataaaatatgagtttatatttctatatcttgttatacctaggcctaagcatcctgac

SEQ ID NO: 110119 - DNA, 478 bp, Zea Mays
ctaaaaacaaagtagcccgagattgatcatctaggttgcacacattcaacataaacaacaaagagagatatgtattgataagctatacatgaggtagacaaagtcaattcatcgcaatgaacacctctctgatggatccataaagtaataacataaggggggtaccataagacaaccaaggccccctagaatgtcgaaagatcttgaagaaagatttacttggcaccaagggtgctagaagatgtttagtcataaaaagggtaaaattgttaatagattatattttccaattagatagatagatcgctgagtttctcatgaccccctttgtttgaaacgtattctacaaaccattttcacatttcccagaagatcaaaggagtttccaataattgacctcgagtcggcatgaagacgtgcaaccgaggtatgttttctagaggttacaatgatcaacaaggggttgatctcataatca

SEQ ID NO: 110120 - DNA, 466 bp, Zea Mays
ctccattgggtttattgaaaccaagtcggatagttctttgtttatttgtcgccgagggtccgacactgcttatttgttgctctacatggacgacatcgtcctcactgcctcctctaccgagtttcttcgtcaagttattggggctctccagcatgagtttgcaatgacagacatgggtcagcttcaccatttcttgggcatctctgtcacatgctcaacgcatggcctgtttctttctcaacggcagtacactcaggatattttggagtgcgccgggatgagtgcgtgcaaaccttgtagcacgcctgttgatctccactccaaactatctgcagatggacctcctattggtgatgctactcagtaccacagtctggcaggagctcttcagtacctaacctttacacgtcctgaaattgcttttgtagttcagcagatttgcctctatatgcatgatcccagggag

SEQ ID NO: 110121 - DNA, 702 bp, Zea Mays
gtcaggagcacgattgttattaccttgctggcgatgtggcataccttctgtgttttgatgaagacgacgatggaggcgcaaatctctggtggccgcttcatcataattaccttcttcatcaatcactgcatcatcgggaagacgtggacgaggaggtggtggcggtgcttgttgttgcgtctccaacacagcaagtctgtcgacgatctgggacaatcgtcgatccagcctctcgtaagtcctaccaaggtccatgttaatgaaggcaccatgcactgacttgtggaccgtctcctccatttgctccttcaggagcttgttgtttgcctcaagatcttggtgcctaacacattcatcgaagtctgtagggattcttgcttcttcgtcgtcgcctgccatcgaaacacaaaaacaaaaaacaaacggtgaaggttatccctaataatctcactacacgctcctctcgggtggaacacaagaacacactctaatgtatcttaccaagctcttacaagtgtctgacgaaatacaagcaaagaatggtacaatcggaggctggttcgtgatacttaccaagtggtagtgaaaccgcgattgcaaggtcaaatctgtattgatcagaagatatagtatgtggagttgtaggacaggcacaatatgtatgtgaatgtggaacaaaatcgagtgcagattagcgaagtt

SEQ ID NO: 110122 - DNA, 510 bp, Zea Mays
tgatggaactgggtggatacctaggcgaagaagtgtgtgagggtggtgaacatgtcggacttcaaccgaagaggaaaagtccaaagaaaatgggaaaaatcatccaaaatcaccaagtagtatctgtaaccagaaagactgagtacaggggaggtccagagatcacaatgaaccagatcaaaagcctgctcagcccgagaagaagtagtaaatgggagacgagtatgtcggcttaactgacaagcatgacagaggccctcaaaatgtcccctactacatgaaggatctaagctattggtaagtttgctcatgacgttaggtcctgggtagccgagacgacgatgccaagtgatggcggaggtggtggagactaggacgggaggtggagacacgtcggtggtggaaggctggagcgtgtagaggggcctgacgctgtcacatcgggcgagaggggtccaagtggccagatccttcacagaaaaaccagaggggtcaaactcaatggaacaa

SEQ ID NO: 110123 - DNA, 365 bp, Zea Mays
gtcaggattcagcacccttaccgtttgccgccccatggtcgctttgattacggtacccctgactgcaggacccagataggtttggagccatagatcgatagagtcgtagtctgtaataatgcttaattcagtgtcttagtcttagtcagtctcagttagagttggtttggttatcatatgttttgatgcttgtcgtgatgaacttgtaatgaagttggatctttgtaatgattgtcatcaaggtgtgggcatcccctgcaacttggtgtagttattaataaagtcatatatttagttgggaaatccctttatttccactttcctctttatctgagaagctgtgtttgagagtcagtgaagatgat

SEQ ID NO: 110124 - DNA, 687 bp, Zea Mays
ttcttcccacttccatttgggtactgggaggggttgcagtatgcctgcaggcctctgatgttctgccttagttcgttgacaagtatcacactgggccacatactgagctatctcctttttcattcctcgccaccagtatctggtcttgaggtctatgtacatcttggtagagatgtactttagactcttgtgatctgtgaatatttgacatttgtttccaatcaggtagtgtctccatatttaaagagcatgcactatggctgctaattccaaatcatgggttggataattctgttcatgaggcttgagtaggaaagatgcataggcgatgactctctcattctgcataagtatgcatccaaaaccttgtcttgtagcatcacagaagatgacgaagctttggtggatgtctggcagtgtcaatactggcgcggtcgtgagtttcttctttatgacttggaaactttctgcacactttagggtcgacacaaacttattgtctttcttgaggagttcgatcatgggtcttgcaatgctggagaatcctttgataaaacagcggtaatatcccaccattcccaagaagcttcgaacttcactaacgttggatggttgcttccatttggatactacttctaccttggacggatccacttctatcccttctgctgtcaagatatgcccgag

SEQ ID NO: 110125 - DNA, 562 bp, Zea Mays
ttttggcctcctcattactctgaattggagcctttgttgtttcttactttgtcgggcgaaggcagctaggctatctccctttgtggtgaggtagtgtacattacattgcccaggggcaaagtccctctcgatgttctgagcagtttgttgatcgccctatattgttgttataccctaagggcctaggtcttcatgtagaggtataattcgtgaatggttgcctcaagcttgttgattgaacccctgcccatgatggcattgtagggtaaaccatgtatactatatcgaaggttatctgctcatttctcacaatgggggttgtatcaaaagatagggacaatttgatcttgcccagaggaaagatgcccttccctccgaaaccatacatagggttgtgagctggctgcagcaaattgtgattgatgcccatacgatcgaaggcatgaagaaagatgatgccagtttaactcctttatcgacgaggaccttatgtagatcatgtcctatcatattgcagtttatgaccgttgcgtccgaatgtggagcactgcggaggtccttg

SEQ ID NO: 110126 - DNA, 568 bp, Zea Mays
ggggtatcaccagattcggatcaaagagggtgacgagtataaaacagcatttcagacgcaccatggacattacaaatataaggtcatgtccttcggcctgacgggagcacctgccacatttcaggaattcatgaacaaaatcttagcttcattgttccaaaaatgtgtcatggtttttcttgatgatgtcttggtttacagcaggagcctgaccgagcatgtggatcatctggaccaagtgttcaagctgttggatcagcatcaactgaaactgaaacgttcgaaatgtcagttcgctcgagacagtctgaagttcttagggcacatagttagtgcagctgggctgtccatagaaccagccaagatacaagcaatacaagagtgaccacgtcccaccagtgtcaaagatgtaagaagtttcctcggcatggcaggttattatcgtaaatttgtccgcgatttcagcatcatcagtcgtcccttgtccaacttgctgcgtaaggataccatttttgcttggactgatgaaacagaggaatccttccgcactttgaaattgaccctggcc

SEQ ID NO: 110127 - DNA, 301 bp, Zea Mays
atgcatggggaatagcacgaagcagtatgcaggacatgcttcggttgattctgccgtgcttcggcttcaactattttcttttgcttctgaatcgtgacttggcatgtccttgttgtatgccccttatcttccccacagaataggcaaaacaaccttcttggttgggagctggtggcctgaaagagctttgttgtgtccctgacgattgagagcggtgttgatgcccttgagtgtgatttccgctgttgtcgcttgagctgggattatggatcgtcctgacatgcctagggtggagtcttcc

SEQ ID NO: 110128 - DNA, 362 bp, Zea Mays
gtatgtcaatatgccatctggttcatgttcacctgaaaatctgaagtttaggagtgaaccaaaatgaattaaggcagggaggctgtaaaatattgttttgcactggagtggagagtttgaaatagtgtgggataagaggtaagataggaaggctggaggcagcctgttatttgtgtttccctcgttaaaggccactccacttgatgtattttgcaacccttgtctgcgttgatttcatggtttctgtgagaaataatgtgtgtgttcaaaatataacactatggccgtaagaggcttaattgtatctcattttgtattgataaactagtaaaatcagtctcatacatttgtgcagaacatgt

SEQ ID NO: 110129 - DNA, 492 bp, Zea Mays
gcttagttcacattgaactcttccaaacttaaggaacttatcttcttctttgctctgcaatgaatactaatcaggagaccttcatcatcatacttataaaatggttggtcttctgaattattgcttaggtcatgctttgcagccttctttagtcggtctagacgcttgttgggacattcgtgaataatatgtccttcatttttgcagtagtagcaagcacctcatgctttgagttctttgcaagtcaacttcgcttgaccaacaggggatgagggttgattgggtgtctgtatcttatatagctgagcctgacttgattcttctgtttaggtatccatgtgtttcgtggcttttgcttgtggttgaggtggactaatcatgtatccaaacatttttctattccttttgctgtttttcattccattcatcagatatctttgtgactcatttttctcgttcatagttgttaaggtaggaatattgtcattggca

SEQ ID NO: 110130 - DNA, 570 bp, Zea Mays
cctgaatcacgctggccgcggggaggctaaactgcgcagtgttcttgagcagattgggggaaatccaaaattcgagttctctggtggggggtttgggatgcaggtggatgcagtagctgcgtgaatacttgacggagttgaggacgcgctcaatttatagaccccaaggtcggtagctctcaatttgaccgcgatgtgttggcagccgaagatagggaagaacacggtggccgtaaccgtggcagtcaccggtgtaacggcgcaaggagaatactcctaagggtgccacacttactaccgcgtagtaacaagcttcggcgtggcacagccaaggtcaccggcgcttccacggcgactccggtagtccggccacgtcgcagcgactatactcacggcgataaactccaattcgcgatcctatcccttccccgccgtgagatcttttctctgccgtagttatccaaccgccagtgaacacgaatcacggcggcggcgtgaatcttcgcatagggaggtcgcgtcgacgagcaagccacgctagcaacctgatccactttggtctactgtacc

SEQ ID NO: 110131 - DNA, 559 bp, Zea Mays
ctacaagattgggctccttcccaattgtccaaccatgacaccagggtcaaatgattgtggtttttttgtcgcaaacttccttcgctactacgattttgatgatggcgacttatcagaattttatactccggtatgttactaaattagtcttctaatcttgcatatattactccttcagatttaatcctagcattaatttgatattatggctatttcaggatgaaccattggaccaacgtgcctttgttctgcattaccttacctttcatcgcaacaacagggttgcccccttcctgcagaactgctgcctttcaagtatgctccaaggagacgccgctgtttgaaagccaagacctagatagcatagctgaacatgattccctgtgggatccacaaaactgtttatgttacttgttaagtccattatgtcaggcctctgatcatgtgtttgatactccgtgtgccacttatgttcaatgtgtctaatgtctatgctacttcgcatcagtttttatttgaagtgtgtcaaacataagtgttaccagaatgtctatttatg

SEQ ID NO: 110132 - DNA, 475 bp, Zea Mays
atatgtaattaggttgtccttcagagttcagaggttgttccaagaggagtcggggagaatgaaagtaaaaccttggactgtgaactctatcatctatacctcggttatcagcctcagccgattaacataattcttcccaggaaaagaggtctctcttatgaccatttcaccgaagatgtagcctaccgatcacatatcaatagccagggtatactctgagcagttgagctcgaattcaagtgctatgtaccacacaacttagttcatcatgaagtcagcttcagtcgtggtccttgccaacccaaagtcctccattttcagatcgcatttgacattcagcactcaacatcatgttgctcggcctgaggtccctgtataggacatttgcgagtggacgtacttgagtcctcgaagaaattggtagacgaaatactgccccgggtaaaactaaaagtaaggcaacccttacacacgg

SEQ ID NO: 110133 - DNA, 351 bp, Zea Mays
ggatgccgattagatgtgattgacgactatcgcgtcgttgatgtataacctgaaacgctactcgttgacaattactcgtcatcaacccgaaccacaagggagaaatcaaccttgtgttcgtagatgtcgtacaccattcccaagatatcttgtaatcaatattgtataatcacctcatgtacataacaacatccaagagagtttgacgaataaaataaaaggagttggcaatatgttgtttcttggttcattttaccatgtgttattattacatgcccttgatttcatcgtttttatccttctctagccttttcacctctaatggcaaggggagaaagcccccaccatttt

SEQ ID NO: 110134 - DNA, 599 bp, Zea Mays
ctttgttcataagcaaagcttctttgcacaaggtttctttaattcatcctcatcttaagtctcatcctgattctataaatattgtttgctttctcatcttgcttgggatattccgtattcacgtaatcctactgatccttctatggaataccacctttattctcttgtgttgaaccttttatgccttttactaagacatatgcttcatacttagtttcctatacaacacttgacaaactaattagtcctttaatagttttgtcattcaatccaccaaaatcagcgaaggtgttgatgcacttttaatgatgtattgtgtgtagtcagacatttgcatctagtagatcaatagagtgagtgaaaataggcaggtttcctcttagaaagtccccgcaccaatcacaaggtggatgtgttggctctgttttctgttgtgcctagtggataactgcaacaactaggcaaaagttattcatgacctcaatatggttctagatgatctactccagggtgaactacggtggatcaggtggtagattcagcaataagtttaggatccactagggtaagggtggcacgtctaggtccacatcgacatc

SEQ ID NO: 110135 - DNA, 514 bp, Zea Mays
ggcagctttggcagtattgttactttcatcttcggcagctccagtactttttctgctatcttttctggctctagctctttggctgggtctgcaataaatcccaataggcacaacaggaacagtctctatggctagggggttgttcccaccctttcacttaacttcggcacatcggccgtctcgatgcgcctgggtctacatgtcaaaactttgattttctttgacctcgacacaccagtagatgtcgaggtagcggctttccttttcctccattgctttcgggcgagatagaagtagtctgggtaaatgaaaccgataacatcaaacactctgttcaacctctttttgccgcgagcgccgaaggcacttgtcatagctttgtcttctgccttcgaatacgctccaagtatctcatcacttgttgcttctatggcatccaaccaatcatcatttggcttgtcaaactggttcctgaaccgaaaagtatacttcagataaaccaggccaccctggc

SEQ ID NO: 110136 - DNA, 827 bp, Zea Mays
ggaaggtgtttttcaccttgggctcaaaaagattgcaagcgatggtttcgtccacaacaaagcagttaatacaggagcgaaaaggtgaaattatattacaaggtattcacaaataagtacaatatttgttcatttacaatcttttgcaagagatcctaaattttctacagatagttacaaaaagaagttataagagtcttcagcccttcggaacaagcttcagcgccaccatcctgcggatagatgaaggtataaggtaatcggaaatttaataaaggaaaaccaaggtaaaaagacaagtaaaagtttcatactgaattgagcagtttcctagcttcatcgccagccagctcacacccgcccttagccaaatttgggtaataaatctgtttcctatgcttcaggcttcggctgggatatcaactatatctgacgttgaaagattgaaagttggcttgttaacctccttagcgtgagtgcatccagccttcataaatgtagcagttgtgccacgagaagctaccaaggcacgaaattcccgtgcccggtgataacttcatcaagagcttcaacttcattttcaatataatcaaaggccccggagatgtcttcggctgaagggttaatctcttcagaagcagctccaaccgatttgaatatccccttcaaccgattagcacaccgggtggccaagtcagcacacttgttctgaaggttctcaaaagcttcatgtaagtttgaatttctttcggtttcggctttgaccttcgcttcgagctcctttgtttcgcggttaaagcgtcgtgagctttcatccaaaatttttc

SEQ ID NO: 110137 - DNA, 385 bp, Zea Mays
gtctcgttgcttttatttatttcgatccgttgatgtttgattctgcgtccgtccgtgcgctgcttcgtgaatctgctgtgtcgcggcggcggcggaggaatccgcaccgccgtgcgtggggttggtagatctgttcatccctgcgtgtgtttccgccgctgaggcgttttcttcgtaattcttttcgggagtgctctgttacgctgcggagtgggtcgcacgctcttttctggatgcctatggtgttgacatgtgggcgtagggaagggccgaagcccgaaggggacagccttgagctttctgcttgttttttcgggtgctttttaaatatgttttttcacgcatttctggttcccttttcccccgcgtggtgttgtagatcgat

SEQ ID NO: 110138 - DNA, 615 bp, Zea Mays
actcgctctgcagcgctaggcgctagcacgaaatggagtcgaatcaaatcgagtcgagtctcccactccccaccccagcacgggaatgctcgactagatggagatgaaaccctagatgagagagaacacgcggcggcggcggcggcggccgggaggggaggggaggggaggggagggggagagcagcagcagcagtccagtagtgtagaagcaggaggtggtggtggggaaggaatgggatgatgaacgctatagcagtaacggacggaaaggttttgctaggctttgttacccttttagtttgggaccctagttgaggcctgaggtccgtgggattctacggttttgccacaagattttactctgtagagtggcttgtgcagcacgaggacagagaaccacgtacactgcacatgggcccaaacgcaacagaaaagcaggctcgtcgttttgcggtcagcactcgcacgggtccatttctttttcaaactccgtatatcagaaatttacgcaagcatttatcgcgtggtctgcctgctgaccggtgagaataacaggcacaatcgacacacggcacggcctgactggtggcgaatcggcccaacaaggcctcat

SEQ ID NO: 110139 - DNA, 503 bp, Zea Mays
agtgccgttaaacactaaggcccccttaggatattttaatttttgggcatagtgtctcgcttccaggacttcttgttcggataatttcttccccgaagcatgtcgaaaaatgtaatcaatatcttaaactagggctttagtgatagaaggttttgctttttctgccatactttgcactaaagtttgttgatcagccttgtcctcaggcgcgacaaccttcgtctcaatgggcgctgagggcccagcttcggcttcggcttggactttggcagcttcaggaattttcttagtaggggcggggcttaaggcctttgtggtctccagcacagcatccaacacgctggccatcctcctcttcttgggagttgcagtaggagccctttgcaccttcggcagttttgcctctgttggagggctcagaatttctggcattttcattgtttcttccacctttggctcttcggccttatcatccttagcttcgatcggcccgactgtaggca

SEQ ID NO: 110140 - DNA, 731 bp, Zea Mays
ccatcaaggggagatttagatagcatatctcataccttcacctcgaaaccccactgtaagtaatttagatccatcttttaaatcttacatagatcagtgggagcaacagttgaaacaatacatagacctgtcaattgaagaatccacgatacatatgaaaagtttattactattcctagctgtccacctcacgacgtcgtaattaaggcagcttcgccaagcacattggtagcaaatgggctttctcagtctgagccacattgtggtatgtcgatgaattcatacctaaggcaaccgctgccaccgcctctattgtatggtagaacggctctaagcacatccataccgtctaggtacgatcttgaaccattcgaccctccactagaccattcgataccttacgccggacaatctagagccacactgagcctgccacgtggctcgcaggtgatgtctagcacaaccagacaaaccagtcataaacgcggaccatctggtcccttcacggactgttcgacaccctatgttaaacaatacgaaaccacaccaagcctgccacgtggctcacaagtgatactcggcataaccgaacagtctatgtataatcccagaccattcagtcccttcgtggaccgtccggccacccaagtcgaaccatctaggtatgtctacgtagaacaaggtgatgcttacaacacagttttccatgcatctcagcaacactactttcc

SEQ ID NO: 110141 - DNA, 488 bp, Zea Mays
ccccgatgtgctctacacataccatcaagctatgatcgacgttgtcgtcctctcgaaagcgctacgcggtactcctcgtagcatgttgccggtactcgacaccgatagctagcgcgccaggtaggggacgcgatgtcgatttccattagctccatggttgtcgtcttcaacatctgagagcgcctagagggggtgaataggtgaccccgcaaaaacttaactaaaaacaacaaactgatatgaagtggttggacttgccaacttcataacaagctatcttcttgcctttcctttgaaatttgttgcttcctttggcatacttcttgaacgtcttgatgaacatagctgccacttcatgaagatcatcactggagctatcatcgtcacttgagatctcaatgactttcttgcatttgtaatccttgcttgaagaagacttctttaatggctcctgttcatttgcaaccaaagcatctatatcttttgcc

SEQ ID NO: 110142 - DNA, 400 bp, Zea Mays
gtgacaggtggattcgacacaaaaagggtgaaggctttgggaggaggcaggttccaggccgagtatgccactggggcaccaacatttgacaccttgcctcttaggatcatctcaagccggctcaccaagtctgcagagggaattcttctgttggtaatccgagttgagtcggctaggcctcgatacagataagccggatgcgccttgtctttcagcggctgaatattcttgaagacaaaatcagcaacaacagcttcaacagtcagacccctctccttcaacaatccgacttcagccagcaaagcacctgcctcagctacctcctgatctgtgggggactcggtccagctaggggtgcgaacatctggctgtcttcccgatcgaggggggagagagtttc

SEQ ID NO: 110143 - DNA, 662 bp, Zea Mays
aatgcgggcaatctggtggatggcgcgcttgtacccattggcatcacttgagatgtaggggctgacatagccctcgatcctgctattggcgatggcctccaccaagccgagggcgttaatgcgcttgccctcatgaggctgcagcgtcgagtgggaggaggaggagactatttcactacgggagggggggagagagtcagaatggggaggcgtcgttggttgattacaaagaaatataaaggggtcctattttgttgtccttgttcgatcacatgcctcgaatcttatctacggtgtttgttggcaagaagcgagaaagaaacagatcttcgtgcttcacgcatgatgatggaatgcttgtgacggtggaaactagtactttatatagtagagactggtcgagataacacaggctacttagaccatagtcaagccacataagcgcaagatcgtcgccaaaattaggggacggagggggacgaaacaggcagtgacgaggatatttaactatttgtcattcttacggacggcaactctttatatgtcactttcatgatgtatataacatatatgccactacttttgaaagattctatatttttaccacttttacctatgtggctcgccacgcacgccgacacgtcgtcgccatcatagattag

SEQ ID NO: 110144 - DNA, 644 bp, Zea Mays
caacaaaattataaatatctcaagtcaaacgatgagctcataagcaagaaccgagaacctttaaatcgattatttcaaaatcaactcaaagattgggggcttgtgggggaagtatatccctcaggtccactcaggggcgaaaactttgcccggggccacacgccagtcgcccctctatgacatcccatcgtgggccaagcaaatgggaatagtggaagcaggccgacccaagagcgtgatgggcccacacccgagctaatcgcggtttgggcatgatcgtgttgaggccgttcggttttcccgcgcccgccatcctcaaacaccagagatagctcggagcggaggcgccaggttttcctcgggacagtgaaggttgtttgctattaattaggagataagtaggaaaagtatgatcaacatgtttgcgggaagcaccctatggtcatgtatataaggccaagggggatccccttcattttcatctcacagctcggtagacaccacctgtaacaccactcatatacaaagccatcccagtaagtagggtattacgctcttcaaagcggccagaacctactgaaatccgcttgtctctctctctcgtgcccaagcacgaaccatcgagttacgatcctcgacactgt

SEQ ID NO: 110145 - DNA, 514 bp, Zea Mays
cacccaaccaaatcatttccacactcataacatcctctaaatccaccaaacaaattgcacccagacataacacaccttcaaaaccaatggattagatcgttggataaccccctctcacttacccactcaaatctaatggacaatattatttgaatcatccatcatcccttcaccgctagttgaaaagagctctaagactgcggtggatctaattttataggtggttttggttatcgcgcgtcagagaaggtatataggtggccccggtaccagagccgccagtggaaacaagttttcactggcggtttgcttaattaaactgctagttaaaatcgtctattttcattggcggttcaagtgactaaacgaccaatggaaatggatgattttcactggtggttttattaattgaaccgctagtgaaaacatttttcacatccggttaataaaatgaaccaccaatgatgtttttggtataagtatcacttctccccgatactccattgtttctcgc

SEQ ID NO: 110146 - DNA, 392 bp, Zea Mays
caattttcaaaacatgattggtcaagagttatccaagactgaaaaagaggagctaagagattatgctatatcttgcggctaccagccaggagcgttgctctttggtggtgttgacgaagagagcttaggatgcctccaggaccggactggagcgaaggttgtcagcactctatcgaagagtgttggctttccgaagcttgaggccgaccttagcagataccagcggcaacatatcaccggtagcttgttttattctaatttcaaggtaaagttcttaccttaactttttattatttttgagatgaaggttacttctgatgaaggttattttttcagagtctactactaagtaaaaccttgaggatgcaacaagacctcgacgacaagaaaaa

SEQ ID NO: 110147 - DNA, 479 bp, Zea Mays
ctcggatttgaaacaaaccggctaagtttgctcacagcaaatgagatgccaggcctggtaacgctagctaagtacatgagtgaatcaattatttgggaatatctcaattgatccctagatatcctttcatttttcttcaaaagcttactaggatcataaggtgttggagtaggttcacattcgctataaccaaagcgacttaaaaccttttccacataatgggattacacaagtgtgaccccaccattgccttctctcagtagcttaattttaagaataacatcagcttctcccaaatctttcatttcaactttattagacagaaagtcttttgtctctttaatcacctcaagaatgtcatcaacatacaggcataaaattactccctcgccccaccataccgataatatacacatttgtctgcttcgttcacaacaaagccgacagatgtcaaagttctatcgaacttttcatgccat

SEQ ID NO: 110148 - DNA, 390 bp, Zea Mays
aatgaatcttcggtaataactagctaatcccagaaaactccaaatctgacggacagtcgtgggtggcttccagtttatcacctcctgcaccttatcaggatcaacagctgtaccttcttgagagatagtgtgacccaataatttgatatcctttagccaaaaatcacattttgacaatttggcataaaggtggtgctctcgcagacgttgaagcactacatgcaaatgcccgacatgttcttcttcgttcttcgagtacaccaagatatcatcaataaaaaccactacgagcttgtccaattcagtcatgaaaacagaattcatcagatacatgaaatatgctagtgcattagttagcccgaaagacatcaccaagaattcatatagccc

SEQ ID NO: 110149 - DNA, 1946 bp, Zea Mays
cagggaccccccggtctcgaaacgccgacaactggatcatgagaaatctgtatatcactcaagttatcacataacagagtgtaggagtgtcacaaaagacaccaagatcagccaatagccaacgcagctaaataatttcagcagtggtagtagcaagagtccgaagttcggcttcagcactagaacgagatatggttgcttgcttcttggatttccaggcaataggagaggatccaagaagaatacaataacctacagtagaacaacggtcaacaagatcacttgcccaagtggcatcagaatacgcatgtagctgaagtgggctatcagaagcatagagtaaacatctggatcttgtcccgcgtaaatatcgaagcacacgaagcaaatgaccataatgaactgaggttggtgtggatacaaattggctcaacatatgaacatcatgagcaatattaggtctggtcgaagttttaaatgaatatccattggtgttgcaactgtgcgtgtatcagtaattccagagcgatcaagaagatcttgtatatacttggaccgagacaaataaaagccttttggagtttgatgaacttcaatgcctaagaaataactaagtggacccaaatcagacatctgaaattccttactaagatgctgcttgacatgagaaatatgttctgagttgtcacctgtaatcagcacatcatccacataatagaagtaaagtgcgtccttttggagagacatgaacaaacaatgtaggatcatgttcactagaagaaaaacctgcagccgtgatgacagagatgaatcgctcaaaccaagcacgaggagcttgtttcacccatacaatgcgcgatggagacgacaaacgtgccctgagggagtatcaaccctcagaggagggtgcatataaacttcttcatgtagatcaccattgagaaaaacatttttgacatccatctgggagatagtccaagaagatgaggctgcaactgcaatcaaggttcgaacaatagtcatatgcgcaacaggtgcaaaagtctcatcataatcaagttcttgagtctgttggaaaccacgagccacatgacgagctttatacctcaatggaaccatctgataggaacaacatgcgagggtaaaggaacgatatcccatgtaccagtgcgttcaagagcagccaattcatcaatcatagctagttgccactcaagaattccagaagcttcttgataagtagtgggttcaacaattgccacaccagctcgtggaaaaccatagcgatctggaggttcaatggtaccacgatcacgaagacgatatccctgactaaaaacatcattagactcattgttagtacaataatcgggtacaagattagtatcaggaccagccgtaggaatagagcgagaaccacgaatgtaggtttggatgataggtggtttggaagagtaagaagaagatcacgtggaggtggaaggtggtgttatgggaatgagaacatcagatgtggatgtagaaaatgatggttcagatgcaggaatggaaggaagacacatgaaataagtagattctgtgggataatatgaggagtgagtagactggttgtgaaagaagggacgattttcattgaaactcacatctctagaaattcgaatacggcgagtagatggattataacaacgatagcctttgtgttcaggtctgtatccaagaaatacacaccctacaacaaggttatattaagcgctaggcgttaggccactgcttagtgcctagagaggttaagcatagattaatcgtgcttaagcgtttataggaatataatatatatatatagttgcatagaaaaacagttttagctaggctcagatgaagacatcttatacaaagcatgtgcatgtactaattaagctttcaagtcaaagcatccgtcttaaaca

SEQ ID NO: 110150 - DNA, 734 bp, Zea Mays
agagattaaatttccttcatttagatcccacgaatactaaattagtcacatactggtcccctaacagaagaattccccacgtgtaatcgaggatcaggccctgttgcctattgccgggagtgctctaggcgccggccggtggaagcaagtacaaaggtccaatcaccgccgggtcacccgggagccctcgacggacgtggaaatgcccaatgggacgacgattccgggtccgtacttcgtagacgttaggtgagtggaggcacatcgcgccatcatacactgttgcttggtgccttatccgattcctagattgggggagctggttggcgggttgggaaggccgacgcggttgttaattgctagcgatcttcttctcttgattaatgaagaggccggtgccgtactcgctagtagtagttgagattgagcatagtgccagtggtatatacggacaggaacagtggagcgtcgctatgatgatgccattctctgcgccatcatggtttgtgttgtggtagttgaggcacacgcacggaagaggaggcgtacagcggctgtttgtaaaggaggacctgttggattcttttggataaggagatataattgggctgatcggcagcaccagcactgcagcagagagtattgcattttagatttggtgggccgttgggtttgtgcctattcgccagtccaacttttggaccattttctactctgatattacaattcagggc

SEQ ID NO: 110151 - DNA, 622 bp, Zea Mays
tgcgaaaccctagagatggtttgcaattcgaacagttagatggcattggcaatattgataagtttcgaaaaatgcgcaagtctaatcctcaagaaaaagaactggcattggagttcaccagctccccgtcagatcaaaatggtaagacctccagtttcacactttctgatgacacacatcagaaagaacaagagcaggactacagtgatggagatgtcgaagaaatatgtcagattctgtcttcttctgatgattggggctcaacgcaacaggcactggagacgagatcagtccattttagtcctagtcttgttgatgccattttgaaacgttgcaaaaggaatagttgtgctgctttgcaatttttctcttgggtttgtagacgtccttactacatgcctagtacgaaaacatacaatactgctatgaaacttgcgggttctgcaaaagattttaagcacatgtggtatctgtacagagaaatgttaaggaccggatgctccccaactgtggatacatggaatgtcatggtctgtcagtatggcaatgctggtctgtctgaaaaggccttgaatacattctgggacatgaagaagtgtgggtttctgcctgataaaactac

SEQ ID NO: 110152 - DNA, 355 bp, Zea Mays
tttagaggtaactccgtcatagcaaaagcacatgactgagtagaatcttgactgggcagaaacaaggtgaaactcccacatattggggaattgatttccatgatgcgactggctacatcaagcactacttggtgtctgatcatccaattagctcctagaataatatccacatttgccaaacccaaaacaagaagggcggttttgataatgtgtctccccagttgaataggcacactttggtttaattgattcgttgcagttttacccctaggtgtggctatcatgaatgacccttttgtgtgatagaaaggcagttgacatttagcactaaactttttgctaatgaaactatgag

SEQ ID NO: 110153 - DNA, 536 bp, Zea Mays
taccaacctgttgggggtggctaaacatagagaattcacactaaacttgggatcttgccacagggacatgggcgatctaggtgtattggacctccccatctcagaggatgaggtccggtctgcagttttctgcctaccttcagatagagctccgggtccggatggttttaccgggagattctataagtcatgctggcatatcattaaggacgatctgcttgcggctatcaatgccctccatcaaggtaattctcgggggttgtggctgttgaactcagcttatcttaccctcatccccaagaagactgatgccacaacagcggctgatttcagacccataagtctcattcatagttttgccaaattggtgaccaagattatggctaaccggttggctcctctcctgccaaggttagtggctgcaaatcagagtgcttttgtgaggggaaggtctatccacgataactatatgtttgttcagcactcgatcaagtcccttcatcggcgaaaggtctctagcctgtttttaaagcttg

SEQ ID NO: 110154 - DNA, 526 bp, Zea Mays
ccttcatagccactagctttgtggaaaagtatggcattccctctactcctctagagtttcctttggtcacccgaaccccagggtccgaccttctatgctagctaaaatgctcccaagtcagaatccttttaagtggggtagtattcctggcagacttaaccgtcttgccatcccaaggaattgatgtgatcttagggatggattggctaactaagcacaaaggcatcatcagttgcgcagacaagacagtcctcctcaccgaccgatagggaaagtcagtctcttgtcaggcacagccacccgccagtgacccaatgatgttcaatctagcaacggaaagtatatcagtagtagaagaattcatggacgtatttccagaagaattaccaggaatgccaccagaaagagaagtggagttctacatagatctgatccctggaacagcacccatcgcaaaaagaccataccgcatggctccaaccgagttagcagaactgaagcttcaaatcgtagatcttcagcaaaa

SEQ ID NO: 110155 - DNA, 528 bp, Zea Mays
tcttgacaataacatgtgccttgtcgtgatattaaatgtttgtcgaaatacctcattataggcagtactatacttgtagtcatgccggtgatgtagtaatgtcaagtggtttagaaagttgtcgtgctcttgttcttgttctaaaatttaaatgtcttagactaatgagtttagaattattaagtttctggtgtcgaactttaactaaggcacttcaagttttgtcttcttctaagatgtagatgcctcaggttgataagtttaagttgtggtaaggttaaggagatttagtgcttaagcatggttcacgagtgcttaatgtttgacttagatccgattaaataagaagcgtaattattatagttagtcttatgacgatagctagcgtttacttgtgattggttctaatgccttgctactcaatatttaatcctctaccgtgtaacattatttaataatgtacaagttgtttttaatttcatacatgtgcattatgcataccatataggtacgataattcatcacgtg

SEQ ID NO: 110156 - DNA, 324 bp, Zea Mays
cattattgggtaccataggatcataaacacgtgaataaataaacaggttcgtgttgcaaaaaacattataaactcctgcttgaaacacaacatgtggcacacaaaaatttgtggactcataaaagtttcatatgtcaaaccgaatatgacatagcaccagcttcaaataagtcttgctaatcacagaagtaaccatttaattatgccctaaggacaacaaactggaactgagcaaacaaattgtgcccccaaatctagggttggtatgatcacgggcggcagaccaatcccccatggatgcatcatccaggtccacgctaaata

SEQ ID NO: 110157 - DNA, 587 bp, Zea Mays
ctcgagagaaattggggaacatgtttcgagcgaggagagggttctctcgccagagcctagcgtcttgttcggctagctctcgctcccgatcttgagtctgtcggcgaccacggcggcaggagttacgtttttctcggtgtactcattcgtcgggagtttctcccacttccgaggcttcatcctaggacatgggctgcgccagatcctgttccccagcttcaagatgtcgctgcacgttccgacgtctatttcttcgtcgccgggcgtcacgctggggaagttcctccccttgcatggtaggctcatcgtcggagatgggcgctaattccaatctcccctcgatgaagaggatgtcagggtagaaaggagtcggcacgacagtgttcttcttcccatcgtcctttaagggtggaggtatcggaaaggtagcttgacgtgctctccttccctgactcgggatgtttattttcttcttccgagtgatccgtgtccactccttagtgggtgaggtggacaatggagtttttcaggttagtgaagccccgactgatcggtcttccttctcccgagggctcctgaatctcggt

SEQ ID NO: 110158 - DNA, 525 bp, Zea Mays
gaaaaatgctgagcagtctgttgtgtctgatcatcctagagacttaccttgcaatttgctattccgacgtcagctattagaaacagctcaccacctgtactcgtacgcacgccatcgccatgcatatcatcttcgtcatgcattgttagaagcaacggtggaatagtggtagaagaagtctcaaggaagaagaagaagggaggacgacataatctgtaggatttttgtgttcgtattgttcaagtttgcatccatacaatggcagccgccatttaactctctctcacagctctcctctaggctacacaaaaccctgtagacgagaactgggcctgtggacacggcttccccttcttgggcctgcttctgcgacttgggcttcattctcggaagagcggcacgccggctcaggagtagtgggcgtaacactccatcccccttggagacctgcttgcccccaagcaggtgcagcagggaattcttggcgaagccgagcgacatcttcccaagtggccacctcgtgag

SEQ ID NO: 110159 - DNA, 958 bp, Zea Mays
ataccgactaacagttcgacgggaattctctatttatagcaacagtcgtccgacgctaatttggtgttgtggtatagtggtggtttttttgacagcccggctgcagtgtcgtcaaaccccggtgagacctcactgtccctgcatgccttgtgtttgatgtaatgtcaaacctataaatcgatgtcgtttcttgcagccctctgtcgatgacgcgtccgctccttatcctagcacctcgttgtaacatggaatacagggagatccacaccgttttggcaatgccgcgcagatcccgtcacaccaacattaaaaggatgccaacacctctcgtcctccgctcatcctgttcgcatcctctgcaacgtccacttcctgtgtgcgcgccttccatttcatctggtgagtcccgagtacatcccgatcctaattcttttttgctatgtgtctgtgtgaacatcttgtggtttcagttgcaggctggcgatgccaccgcttaattttatagataagtttaacattggattgttctgacttcttgcactgatctgccatgaatcctgaaatgtagtcccatgtgtgccatatttcctccatgcatgattattaagtctgtgttcttgaagtttccaatctcacacgcatgattaatgtgtagttgaggtttaatctgttacaaaattaaattttagttttcaataatggttgctcacgcaagtagtagtttgtagaaatacacttattctattcatagtgtttttgcctggtattctaagagataagcactaccatttgtccttcagctaatgttcaagtaatctgaacactactataaattaatgcgcacatcagcttcttttctgtatttggcaatggacaatgaatgtggtagctgacctattcagtagtaacttattgtgttctcttaatatgctgcatcaatgcttaataaattattaac

SEQ ID NO: 110160 - DNA, 441 bp, Zea Mays
gtcatctgcgattcaagctcttgttatgttcagagaaatgtatccaaggtatcgcgatcaagagataaaaaaatgtattaaaggagcatctaaatttattgagagcaaacaacaaaaggatggcacatggtatttaaaatcatcttgtatattgtatgatgttatccatttctttaatgcacatagacaagaactaatttactaattacgtaataggtttggcacttggggtgtatgttacacttatgggacattatttgcagtgcaaggattagttgttgctggaagaacttatgaaaacagttcttctattaggaaagcatgtaggtttctattgtcaaagcagctaatcacgggtggatggggtgagacatatccgtctaatggaactgcggtaattcttaatttcccttacctaactatgtgtcttcttggtcattt

SEQ ID NO: 110161 - DNA, 718 bp, Zea Mays
ctgggatggtcgggggacagcaccagcttgtggggggtgcaagtttggagatgcgccatgggagaaaaaccgagtacctcgacatcccactcaaggacaacatcaaaggatggcgcctggaatggtttatcgtggacaatcacgggaattccctccctcggtcagggagacaaccagatgttcgcactccaagttggactgaatcccccacaggcctggaggtaactgaggcgggggctctgcttgccgaggttggattgttgaaggagaagggtctaactgccgaggctgtggttgccgattttgttttcaagaacattcagccactaaaagacagagcgtatccagcttatctgtatcgaggccttactgattcaacccgggttaccaacagaaggattcctgttgtggatttggtgagccggcttgagatgatactcagaggcaaggtgtctaatatcggtgctcctgttgcatactcagcctggaatctgcctccttccaaggccttcatcagttttgtgtcaaatcctcctactggtgatagcggtttgggccttagagtgcgaccttctcccgaagaggttgaggctttggttgcttcacttggcgaaatccccgacaatgagaggcaggttcatttcgaggtgcctttgaatccgagtgacgcagaaataagtgccatgctggacatgttggctgaagattcctctgatgc

SEQ ID NO: 110162 - DNA, 804 bp, Zea Mays
gtttgatccatagagctatgaaccatgctttgtgtagtacgtttaaagatcatagtacagtgaacaattttcctataaagatatggcttagtactatacacaattaggaataaagtacacctgaacttcctctatcagtcagtgagttcagttaactgacaggagtgcagagtgatgggggcaactttggatcaccacaactcttgttctatatattttcaaccatgagttgttatgcaaaagaggaagagctatgcatggagaatcactttggttaaaggggagaggtctgttattaagtgaaattgggtgatcaaggcagctaaatagggaggtatgcaaggaggtaatgttggctgattctgtaaatccagagaacggaacttggttttcagtgagttatagccaacttcagagccgcatatcttgtggtctgcacattttgagtcttggactttcatagtaaacctaaagagcgatggttggacaacaagtttgtttagaaaggcttgagctacccttatttggaatagtgagaaaagtggggctaaacaaaggggttcagacatacttgagcagttctgtgcacatcagaaaaatctgaagaaaatatcgtcgtagctgtagaatctaggggaagatgagagataagtgagaatcttggggggtataacttggacggattcactgctgtgatgtggtgtcaaacatgcccgacggataacccccagcagtgtccatccggtgtctgtctgtctaccttcgtgtcctcacgccatgttcatcacctcactgtggcgttaa

SEQ ID NO: 110163 - DNA, 321 bp, Zea Mays
gtgatcatgtggatgactccgcgatacggctgatcggcgaagtcttcttgttttggcgcttgggggtggtttgggtggtggatgttttgctgatgcgggggcagaggcggaagtggaggtggtacgacttgtacctcctgatggtgttggtatgcgtggttaggtggatgctgggtggggccgtggttgtatggttgtggtaggtggtgttgatatgtgtgcgcgacaacccgtgggttgtcggctagttgcgcccgagacattctgtccctggtggccttcgtttctgagcaatcccttgttgggtgtgcgcagtcttca

SEQ ID NO: 110164 - DNA, 507 bp, Zea Mays
attagatatatataaatacttttacaatgtgtggatggagatggtcaaatggtttgagcgtttccttgtctcaagctagctagctaggtctgctagcgatgatgaacacgaaatgtctgcaggagaaatttggtgacgaactgacgatatttatgagagagagagagaacgtctgacgatcccaaaataatgttgaatctgttggtcctagtccacctttgaggctttgacaaccatcgagctaagccggcgccggcgccggcgcatgcatgctttagcttttagagtagtgctagttgactgatgactgcgcggtgcaaacactaacaactacagctgcggctattggctttgcagccagcatggtctatgcgtggcggcgaattgaaggcatgttattagccagctcgcgagtgtacgcacatgcacgcccaattcctccttttcggctgaacgaactcttcgttgatgaagggaagtccatgccgcctgctcgatccttgtcat

SEQ ID NO: 110165 - DNA, 296 bp, Zea Mays
gttttggtaaagatgtaggtgaattgtgaacgagtcatttaacgtattaggcatgtcgtgtagtggtggtatgaaaaatgggttaggaatcgatcggctaaatgccaagttcggttagagttattttgttacttgggattgtagggtgaagtgatggcatgactacgtagccgtcaagtcatctatcatgtgactatgcttaagtgtgccttgctataagttagaataagtcgagtctctagaacgcggcaatttttgaagtaaatagaagctgaattttaataattgttgttttg

SEQ ID NO: 110166 - DNA, 1068 bp, Zea Mays
gcggatctgatgatccgtggtaacgtagttctcaacaggtttctcctaaaaatgaaaaaaaaacatgcgatagtgaaggtttaggtagataggtgatgccacgataggataggttggcgcaaaaggaactggaccttgttttagtgggccgtctgaacttgaaacgcaatctagaagtgccttgcgcccacaaggcacggaggcccaaatttcacgatcacgggccagtcgacattggcatgccatgagggcaaaaatgtaaattcagtatcgctagggcttgaagccctcctcgtccgctcgctcatgtggccgctatataacgggcgcccaatgacttgacactgccacgctccaccgccgccgccatgttgtttcttctccgtgtacagatttctctttcgacccttatgttctctctttcttctcgtttcaatatttggagcttttgttctgcgttggacgatgatgatttgctcatatataccatcaaactctgaacaatcatacgctatgttgattgcacaaagcttccgtgagtccgatgccatctggctctaatcctgtttttgtttatttgttttcttccattttctgtttctttgttttctgaattaattttttcccgaggcaataaattagagtctctgatgcgcttcttccaatagcgttttcagcgctgtacgttgccgagagtgattgggcgcagattctggcacgggacgtctctctgtatgtcttgtgcattctactcgcccttacagttatttgatccgcaagatccctcttctattctatcgttcaatacaaatatttcaagagacttgtgtttttttgcccttccgaacagtgtcttctgcactaaaagaaatatttgtgattttgatttgacccagatagtctacatattcaatgagtaaacgaaagtgaattaactcggcaataaattagagtctctgttgcgcttgtttcagtagcgtcttcagcgctgtacgttgcctagaacaattgggcaaagattctggcacttccatctattcttatggcttgtgcattcgacttcccgac

SEQ ID NO: 110167 - DNA, 477 bp, Zea Mays
acgctagagctccggtgagcgcgttccgaacaaccaaacgcggtagtgtttaaattggagctagggcgagtttcacttattcaccagatgatgggtacatgcttgaatttggacggagcgggtatgggaaagtgggttgtcgggagcgtgctctcagacgtgttctgcggcggcgaggtaaggttctcgatgccctatcgcgataatattcaatcggttgggccgacaagctatgttaacattcaaggatgctagaacatggcacagaggggaaggaacaaacctgggaatagttggtcacggtcgggtgcctcacggcggcgtaactgaccacgatggggaaaactgcaatttgtgagctctggtgggtaattggaagcgaggaagggtgcactaggcgcgtaaccagaaggcggatcagggagagcctttaatttatagtagctacatgagtgctttgtgaatttgggatgagaa

SEQ ID NO: 110168 - DNA, 812 bp, Zea Mays
gtgaattggttagtaacactgcacactgcacatgtttgtcatgcatgatgagtatctacgtttttccattagctttggaaatgggtgacgatcgaagaagggctatgtacgatggattcaacagtaacactctggggcactttgatgcatgggttaaggttgctgacgaattcgtggtgcgcacatttgctggggagcctcgtgtcgtaacctaatccgattggacaagtttgacctctcccttcatatttgcaaagatgactttggcgtgagcatggagaggtggatgctcctccggagtcgaacacagacaaggacatagaccaaatggaggacatgttagatgacacccgacatgagtatccaacactggagaccgaccgacccccgccagaggaagtgcaacagttttacaagttgctagaagccgcagatgcaaaagcgcacgagggcatcaacatgactatacttttggtcgtaacatgacttatggtgatgaagttaaagtacaacttctcaaataactgctacaacgatatcgtgaagctaattattgatctcatcccggctaaccataagataccagagaacttgtatcaatataaaaaaattgtcctgggtctcgacatgaactatgcgtgcgaaaataattgcatgttgttctggagggatcacgagaatgacacccattgcatgtactgcaacaaatcaaggtatgaagtggtggtggacgaggaatggattgaggttactacaaaagtcccggtgaagtagttgcagtacatgcctattacttcgtggcttaaaaagtt

SEQ ID NO: 110169 - DNA, 487 bp, Zea Mays
ttgaatcatcggtgtgccgtgcaattaagcacgcacggatgtacctcgctaggattcttgatgtgggagtaaccagcctgtctcctgcggctacccgcacctgcttgtggtgcttgagtgcctttgctatttactggagtctctactgcttcctttccaagtgacatgtgttcagttcccacttgagcttcttggttgcaatggcactgccattcatggtatgaacaatagatcctggtttcagaagatggtatggggttccatacagcacttttgtttgtcattcatcctatttgctggtaggatctgaaagattcagtgatccactcactcagtagtgtcacctcagatttatatgcgcaatcatgggacaagttcatcttcgttctttgtctccttttttcttgagatctttgatttgtcattatgatgaaattactttaggttgtaacttagacgatgggtaaatctgagagtgctatcaaat

SEQ ID NO: 110170 - DNA, 708 bp, Zea Mays
gccttggtcagtgcacaaaacctcttctcctccctataagctaccgatcttgtgtggggatcataggatttggcctattggttccaaagatatggagctctcaagtcgggtctgtctgcccgaggcaaatctttggttttgttgtgtctaggttccgaatcccagtgctatcttcagatatgtggtagaggggttagtttagcacatttcgttaatgggagctcagggttttgagatagggattaaggtgaacgcgctcgattttgagttagaggctaaaattcagaaatctgaatttttgatttctctaggaagcctccaattgaatggcttgtttgaggtttttaacaaactattttggccaaacttttataacctttattgtagcttagttagtgtgtttcaacttttataattggcctaagccatgattccatgtttttcatggtctttttaccccttttcttcctttctacttaagtagctcaattagggttgttctagggtttcaatatgatttaggcatgatctttaagataaaacacttagtgggacttttattctcaagttgattggtgtcttttgcccaatttggttcacatgaaataatggttcttgagttagcactgagagggactttgagaattacaggggtgttacagccttccccccttaaaagaatctcgtcccgacattcgggtcggagtc

SEQ ID NO: 110171 - DNA, 776 bp, Zea Mays
gtttcattgcatggaaatcaaagaaaaatgcccccaaagtcggtatgtcaggcaaagcaatggagtcattcagagtgaacagtcaactgaagaagatctttcttatcgctggtgtgtcgtgtgccgtgatccgtgcaatgctaaggacgacatctatgcggtgagcaaaaagatcaacaggagagtgaaaagatccgggggattgaattggggctctcccctgcggtgcccacttgatgacgatgtggccgagcggcggtaattttggtggctgagggcttcctcggttgcgccacaccagggaccaattcaccacatcgtcgtaacggtatagatggcaagttacccctccatgagctattgcgccgctacgcgccacgaagcatagactagtgaaagatctcaccaccgccgtgaacgttctcatccgaaattcacaaagcacgcgagtgatcactataaattgagtgccctccctgctccgcccctattgttacgcaccccgcgcatcactcctcacctcaattcatccaccgtagcccgagaattcggatttttccctcaaattagtcactgccgccgccgcaagacacctcattgtggccagcccttctcaagttagatcatgtccctctgagccatgttttagcatcctctagttctagtgaagctcacgggcttaaccgattgaacgctactgcattagggcatcaagaacatcgcatcaacgccgcaaagcactcccgagagcaccctcacgtcaaccagccctcccg

SEQ ID NO: 110172 - DNA, 450 bp, Zea Mays
ggagtacatcgcggctgccgcaatggcatgtgaggccgtctggctatagcgattgctggccgagctcatcggggggccagtccgcgcgccgaagctgaatgtggacaacaagtctgccatagcattgatggagaaccctgtgcaccatgaccgaagtaaacatatagacataaagttccatttcatccgggaatgctgtgacaggaagctaatcgacgtcgagtttgttggcatcgaactgcagctgagcgatattcttacgaaggcgctcggtcctactaggtttcaggagctccgtggtctgatcggcatgaaaagattaggctagagtctataggacgtaggaggagattgtttgaataagtcctaaagatagaatgtagaaattagccagcacgaatggagttgtcatgagattttgacatgtctgatatgcgttgcagacacttt

SEQ ID NO: 110173 - DNA, 908 bp, Zea Mays
ggcattcgaccacatcgaagtcaccgcgaggggcagcaccggcctccctcgcgtgcgacactccacacaaaagtctcctaagggtgcagccggactagcacaacaagtgcgaaaaatcgaagtcttttccaaaagactctctgtgcaaaagtcgcctaagggtgcagctggactagcacaacaagtgcgaaaaatcgaagtcttttccaaaagactcttcatgcaaaagtcgcccaagggtgcagccggactagcacaacaagtgcaaaaaatcgaagtcttttccaaaagactctccatgcaaaagtcgcctacgggtgcagccggaatactagtacgaaaaatcgaagtctttttctaaagaactccgcacagaagcctacgggaacagcctaatcaacgaaagcgcgcagcttcatcacacataattatggttacacacatacagcgagggcatcacacattacatcggctcaaccttcgggatgatacccatctccctatagttgaacaacattatcctcaattcctcactcgcaaacagacttcgcagctccccctcacccacactcgccccagccgacaaggacaacaattcccatttgccagtcccatccgcacgaagacgaccaccctccatctcaccatgatgacgcctttcaccacgcgacaactcacccactctccgtttcgccaccactcttcgccgccgacgcccagcactcgcacccggatgattcttagcacccatcacaagcggaggagtctccatcgcagccacatccactgccgcaaaataatccaagtcctcttccgaagacccctccatccacacaatcgaactcccagaatcatcagactcaaaaaacttagacacagaatcatcagaatcgccttcagcaaccacg

SEQ ID NO: 110174 - DNA, 449 bp, Zea Mays
ctagagtggtttatagttgataattatggaaattctctcccctcccggtcgggaagacagccagacgttcgcactccgagttggactgagtctcccacagatcaggaagtggctgaggcaggtgtgttgctggctgaagttggactgctgaaagagagaggtctaactgctgaagcggtggtcactgactttgtttttaagaacattcaaccactgaaagatagggcctatccggcatatctgtatcgagggctggccgactcaactcgggttaccaataggagaattccttctgtagacttggtaagccgacttgaaatgatcctcaggggtaaggttttaaatgttggtgctccagtggcatactcggcctggaacctacctcttcccaaagctttcaccctttttgtgtcgaatccgcctgtgactgatagcaatttgggccttag

SEQ ID NO: 110175 - DNA, 410 bp, Zea Mays
tggagtaaagaattcctgacttccttgaccgacaatccggaagcaattgcgacatcaaggataacgtgaactttggagaacttcccaagaatatcacctccctacccgacggtgcctgtaataacattgtcttccaaaaacaggatataaacgcgcgatactgagataaccaatccatacccaagataacatcgaatgcccccaaggaaatcacaacaagattggccgaaaagacctcatcagcaagaataacggaacacacctgacaaatagaacagctactaatggagccattagcagaactaaccacaattgggtaacccaacctctgcaccgaaagaccagcccgcgacacaaaattctctgaaacaaacgaatagctagtgccagagtcaaaaagagcatgggcc

SEQ ID NO: 110176 - DNA, 535 bp, Zea Mays
tccaaggtcgaatctatctccataattgtttcttctgtgtgggcgaccataccaaagttaagtcgttccatctcccaaaataactcttggggtatcgagtgagcaataaccatgttggcctggcctttacgacttaacgtgtcagccacaacatttgctttaccaggacggtactcaagatccaaatcgtagtcttgatcaactcaagtcatcttcgttgccttaagttgagatctttcttgtgtgaatatatactttaactcttatggtccgtgaagatgttgcacttatccccaatcatataccgcgtgattggttcccagatgcatccatgtagttgcatccgaggagtattaaagcacactttggttgtggcattcacgcatgcagtctcattggatgcaaaatgaacagctgagccgatctagaatccagtgagatgctccagccgagtgtccgcgcgcgtgaaagctcaaggcatgcaaccgagcaaataaaggcacacaaaaacgagacgcttcttgaggttcttttt

SEQ ID NO: 110177 - DNA, 672 bp, Zea Mays
cactaggtaaaaattcaaacaagttgtattgttatagtactttgcaaataggaccctgggtagggaacttaaccctaaacagggattaaaggggtaaaacttaaaccaaattgagaaaacctaaaggctttagggaaatagtcataaaatgtccccaaaaataaagttgaatcacatttatacccctgggataccaaaaacctcaattagaaccctggaaaaccctaactccaaaccctaggggcctatgtgcaaaattagtccacttttggactaaagtgcaaaaaccaagttgaataactatcttaagtcatttgggtcacaaatatgtgagtttgcaagttaaaccctgaattttggacctatttgcaaaaggaccctatttgtgttctaaagctaagtctgaaattcagtgttgtgagctcaactttggcaccttgcaacttttaaattctagggattttgccctaggtcaccacataaatgttgtaaagcaaacaaaggagaacaattttgctgaagagggcaagccatattcttgtgagaaatttggagataatcatgctcaaactttggctgtcaggctgatttggtctgaattttcagactaacagtgaactaccaccaacttcaagcccaatttcagacatgattcaatgactttttgtgaca

SEQ ID NO: 110178 - DNA, 657 bp, Zea Mays
ctctgagggtgttattggatgcatgggcaaagttacatggctcttcttacaggctccacgttggttcacagcatggcaaatcagttcacttggtcgatttatcccagccaaaatatcatacctgtccacaacactacaggagagggaacagataagaacttcagtgtggacatgctttaatgggaccagaattagatattttcagcagggggtggggcctctacaccccttttttcgtccaatacttatctctgttagtgctcattcgtggattacagcagggtgaagagatcttttcttcagcttcgatctgattctagattcagtgaactgaatcactctccttttctaccactgcatccccttccagtttacacccttgggtctcacaaatttcaatgataccagaccaacccagttggccaaacatgctccccaaccatagcactattaggttaatacaacaatccaaagtcgaagtcacacagaacaaaagttacaaatgctcaaagtgaacacaatccactaaatgtcgttttcagttaactgaaagaagctgccaggaagcactttggaacagatttactcccaagtttgtgtagctccaagctaagcacctctaagtaaagttgttcactaatacttggtctccaactt

SEQ ID NO: 110179 - DNA, 446 bp, Zea Mays
atctgattgacctaactagggatggcaacggataaactatccacggatagtttctctggacatccatatccgcgacttatatctgatatctgaacccatacccgttatccgctatggataaaaaacagtatccacatcggttacccgcgggtaacggatatccgcggacatatctatttgcccactacacatacaacatatttaaatccagcaaattctaggcgacagtcgcggatatattcgtttgcccactacacatacaacatatttaaatcctaacaacaattatacgtgcgtactgtacctgtactctaggcgacagtcgcagtaggagtgggagaggagagatagagagggtctggagcgagagcggccgagcgagggcttcgctggaagcctggaacctaggcttgtggccttatgggctgtggcctgtgggacgggag

SEQ ID NO: 110180 - DNA, 483 bp, Zea Mays
cacctttattgttgcgagatggtctcgatcggtgcatgatatgagagtattcaatgatgctttgcgcaagtacgacactatatcccctcatcctccacccggtacgattattttagcgcaacttaatttttttgttgtccgcacttcaaaactgtgtttctcataatttgtttggaaatttgcaggaaaattttaccttgtggacttagggtatccaaaccaaaagggctatcttgctccatacaaaggagtgaagtaccatttgccggagttcagagcaggaccacgcgcaactgggaaaaaggaggtattcaaccaattgtacactcatctcttcgtgatcacattgattgagcgttcttttggtgtcttgaagatgaagtgaagaatttcgttggacttgccaagttatccgatgctgaagcaatcaaaatgaatacgtacatgtgtggctctacgtaatttttattcgagacagcaaaa

SEQ ID NO: 110181 - DNA, 417 bp, Zea Mays
aaccatgtcaacacccattcaaattgattcagccggtggtagaattcgagccgatagcatttgcttgaatataagtgtggaaataaggggatagcatttcctgctaatctcatataatgggtactcagggaatagatgtcatcctagggatgaactggctagataagtatcaggcagttatcagttgtgataagaggacaacaaattgatgtccccactaggagaggaagtggtgaccgagttagtcctgcctgagccaaggaaaggaagttgttatcagatgactattgatagcagtgaagcagatccactcgagattatcaaggttgtgtccgagctcccagatgtgttcccaaaggacctaccaggtatgccacctgagcgaaaagttgagtttgccatagagcttctttctag

SEQ ID NO: 110182 - DNA, 469 bp, Zea Mays
atctcctttgcatatctttagtcatcctgtccagttgttttcccttagttgctgccctgggtctccttggtgctcgctgtgtaggagctacaaaatagaattcgcatttattgaataatgaaattgttttgtttcatgcaaatcagcaaaagagatgccatatttgactgaaaaaactataacttgccttcagtttcttcatctctagctacattgccttcagcatcacttgtactgtcatgagcagcagatgtcatgtcttcgtctgcagctctgctaaaatgatcagcaagtccaggtgtagtaggtctgtttggtatgtcatcattagcatcggttggttcatgtacattgtggccatctgtctctgtagagtgaagcctttttgaaggttgctcctctggttgtggacctgccctcactctcttgctgaacctaattcctggagccatgttggggtttgtcttct

SEQ ID NO: 110183 - DNA, 362 bp, Zea Mays
gtaaaatgaaaacgtataacaaagatcttctcatgagatttaatactgacaggattaatccactttatattaattttgagtagcaagagagatttaatctcctcgaacaagtcctcatagttgtggtatgcggagaagacgctgcctctgattggatcctctatcggaacacggatcactcttgccttgaccttagtcatagaatagagcacttttgcagtaacgttcgctatgttaactgaacagtggagacatctgaggacaccgcgcgcaacggaccgctctacagtactctatggcctccgcactgatcgcacatgtgttgtggtgccagccgagggcagtccactacatcgtgctcg

SEQ ID NO: 110184 - DNA, 290 bp, Zea Mays
aggaatatgatgaatggcttggccatgatggtgtcgtccccccggatgatgcgattgcaacctgataactcatgatgtacagagttgggtctgcactgccattatacttttggtaagtgcctgctctaaaattttgcggccaggggaggcctgaagctgtggtgcaagagggctccgttcatcaaggtaatttaacccttggaaagcagctagtgcgaaggctggcatgtgggggagacgagggtttatgttgaatgcgggggcgtgctgctggtggtaggggtccttgc

SEQ ID NO: 110185 - DNA, 412 bp, Zea Mays
tttgacttttaaggccgaacattcaccgcagcataaaaccagtgtcgcgaacgatccggcccctgagaccgaagggtctgctgtcacacaaagatcatctaattcctctgtgggagacataatagaggaattcagagatctcgacaaattaggacaggggtttacgtcggccgatcctttggaggaaattgatataggagatggtaaaactctaagaccgacttttgtgaataagaccctggagactgatcctagagatgaaatgatcagcctattgaaagaatattctgattgctttgcttagaattacactgagatgccgggattaagccatgagatagtagaacatcggctgcccattaagtccggttttagacctttcaagcagaaagctagaacatttcgtccagac

SEQ ID NO: 110186 - DNA, 395 bp, Zea Mays
cgaatctccggtacgatgctccccttctctctcccagttttcgctcgagaacaacgtcatctaatctctattggtgcggcacacagcagcctatctaggctggcgaggtgatcacagggcatctataaataagcaggatgatgattgaatcccaaccggctcctaacaattcgcttggttgttacagcctagaagcagctcgttccgacgggaatatatatctggctaacatgccccatctcgagtaaccgttctaggaaactagtgcgtcagggccgagcgcatagttagggccagactccgattcatgcgggagagctaagttgtggtccagccatgtagcaaaatgaacaaagtatggctgacacacaaaccatgagcatagcgtatgttcg

SEQ ID NO: 110187 - DNA, 434 bp, Zea Mays
tgccggtggagatttttactgttgatgatcccaatgggtgtgacccggctgatgctgaccccaatgggtgtgaccttgatgatgctgatcccaatgggtgcaatccggccagagctgatcccaatgggtgtgttgttcgtattattgacgaggatgaggaagaggaggaggaaatccccttaattcagaaaaacagttgtcgttatatagtcagtggggggagtagtggtgttccttctccagctttgtcttctctcgttggtctgcaagaattgtctctggcaaattttgatcagactctcgaagatatggtccctgaggatctgctgtccgagccgatagatggtggaatgatggaagtttgcgctgatatgcctgatgttgggttagagttatcccgagcagcgtctcgtgcctcatcgacctaggagcgc

SEQ ID NO: 110188 - DNA, 525 bp, Zea Mays
gccggtcacagcgtttggaagtgatcaacccatggccttgagggctcctttggaacaaaggaaatatgaaggatttttgaaggattccttccctacaagaaaaattcctgtgtgagtctttggaacacaggattcaatcctatcaaatcctttgaaattcctatggattgctttcctccatacaaattttggaggaaaataacaagaggtccaacctcttggaaactttcctatgactcttatctctctattcaaattcctgcacagcatccaaatgccaggtgagaaattttcgtgcattcccaattcatataggattgcaattcatagccaactctaatcctttgtttttcctatacctatgttttcacattcctgtgttccaaagggggcctgatttgtgccgtcgtgcactggagccgccgcccagatcacaccacaccctcctcttcgctcgctcgctcaatcgactggagattctttacagacaaccgtggtccctcactcgctctcgcttctcttcct

SEQ ID NO: 110189 - DNA, 839 bp, Zea Mays
ccaagacttccgagaattttgcaactccatcggcacgaaggcagtgttcgtctccgtctaacacccacaatccaacagagtagttgagcgcgccaacgacaagattttcagcgcaatcaagaaaaggctacaagacgacaaaaagggcaaatgggcggaccaactacccgaagtcatatgggcattaaacacaacagaatccagagcgactaggttcacacctttccgcttgatgtacggatccgaagcaatgacatcgcaagagctaaagcacggatccccacgagaagccccatagccacccctgacatcgacgaaccaacctctaaagacctcatagacggagactgtgtccttgctttagaggcactgagcaaataccaagcacagactaaggcatggggcaacagcactgtcatcccaagagagttcaaagaaggagacttagtactcaccagaaccaaaagaatagagtctcggggcaagcttgaacccaagtggaagcggccaaaacatccccgaatgcttacaggctcacctcaccatccggcaaagacttagagcattcgtggaacgtggataacctacgcaaattatttgtctagtcccaaggcctgagcgcctttgtaattcttataaaaaatgtcaatcaggcccacactcttttcctcccagggggtgaggtttttaacgaggcggagccatgtaataaactgccacaaaagcccccccccaaataaaaacaaggtcaaactagcaccacggctgcgggtgtcgaaaaagaccgcgacaccggtcttcggcatttgacgcataaacagtcaccgcaacaggcagcc

SEQ ID NO: 110190 - DNA, 339 bp, Zea Mays
cgcgctctaaggtcgacgaggcacgggatgacctcaacccagcatcaggcacagcagcgcaagtctctgttgcatcatcatccactggctctgataacaagtcctctgggaccatatcctcaagagtttgatcaaagttggccagggacagttcttgcagaccaataagggcagacaaagcaggagaaggaactccactacttccaccactggcgatgaactgccgactgtttttccgagttaaaggagcttcattttcttcctcctcatcttccacagtaacaacgcaagcagcacccccattgggatcagcaacagtttgggtacacccattggggt

SEQ ID NO: 110191 - DNA, 299 bp, Zea Mays
gggtggttgcattgtgagggctgattggggtgcggaagcagcgcaccgatcggtgtgcagggctaagtctggggagtggactaataagacgttgggtggtagcacactttgggggataagctaggttggtccaagtgatggaatctttggtccatcaccgtaggtgataaatagcgctgccatatatgcctaagtggtaatcatcccccaaggtgatggacctcatggtccatcagctagaataaaaggtccagctgaactaggccaaataattcatcacactatggcgcgcttaattg

SEQ ID NO: 110192 - DNA, 401 bp, Zea Mays
gtggatgcattcttctatacgagctcccctctagcatgtaacttgtgtaaaacctcaagatagtgagttatattttgtcttgattattgtacagggctacatgcatgttgtttcattactaagagagaggaaacatagcagtagcacacaagtttttcttgattattggtatattcagatcagtgctatattgctaagtttttttattattggtatactcagatcagcacttaaaagaatcacagacttaaatcacattgtagagagttatattcagatctgcacttgcttttttcatgcaatgtactcatagcagtagcacttaaatcatttcagtgactcattccatgacttaaatatatatttttagattacttctcgtttcttgctacatgtttacg

SEQ ID NO: 110193 - DNA, 536 bp, Zea Mays
aaaatgcttctaacaaccccctaattccacgccctgttgcacgtcgtcttgttttgttcatcgagcgactcgctcgcccgcccttgcaagctccaatcaagctccgcgccgtgccatccgcaacctcattgattggagcagtttctcggaagcttcttttaggtatatattcttagcctttttgagaacagtaccatagcctactaatagttgtttatcattattttcttttgttccaactttccttgatgtgccagatctccctcctaatgcatatggtcgcccagatctccctcccagtacactaacctaatattccaaaatatggcagactttattactgctgagttttagtgcagacgacctattgtactctgcacaacactgacaacatcaactacatgttgcaggtaccttgaaaaggagtagcgcttcttatctattgcagagctagcatggtcgcgtcttctaagtgatatacgcaagttgtccaggtatgtacagtttaacattgctacagagccccagcacatccc

SEQ ID NO: 110194 - DNA, 685 bp, Zea Mays
ctgattccctgtgttcctgctatagtaacatttttccaatgtctgtacccttcgatattgttgtaccagtgaggcaatgtgggcaaaccttgtggcttgtgccctcccacctgctatctggtggcattaccgaaagtagaactgctgtcatattatttataagtgattgtttattcttgcaggcatcaaaatgcgcaacattctactcaacatttttatgatcacttagtgcccttatgtcattaatgagttagtatctttttttttctcgaaaaaacgcaggaggactgcgttttagatatatattaagaagagagagacaaaggtctaagagaccaaaaaaacaacaacaacgcactccctatggaggccagtaacactcgtacatgaaaggatccataaaaacacccacacacactccttacaacaacctatgcagggggcagccaagaaggagagccctttggctccagcaatttcccagcctcttctttcctcatctgcatgctccataatcaaaggaaggctgggagaccctccataaaaaatgactctattacgatgcttccaaatcatccacgaccctaaaatgatgagggagtcaagaccttccctgaccagaccatttactgtctctgaaaccatctcccaccaatccataaaggaaactgcatctggctgtggg

SEQ ID NO: 110195 - DNA, 470 bp, Zea Mays
aagttctctagtgaagtatgaacccgatcaaacaagaaatcaaatcacagatcagaaatcccgagagtgatggggttttgttggggttttctcaaaaagaactcaaagataaatctgcttagatcacgaccaagaactacatcatatgagcccagatcaaccccaaataaaaaccctacttctccccaaatcaaccccaaatagaacccatatcaataggactcaaagttcctccataaaaccacaagagaaggggaagggagaaaccaagaacactaaactttagaaattctagcaagggtgcaaaactgaaactgagaagttatcaaaaccggtgggccgtacagatgacccttcctcaaattaaacttgtagaacacaatcacagtcaaagtataaaatcgttgtggatccttggctaaaaactacagtagtctagggatgggaaatatgagtactaaaaccctaag

SEQ ID NO: 110196 - DNA, 473 bp, Zea Mays
cttttgctcatgcatgactcacaagggcattgttcattgttcttgatacaacctttgtttgtacttggtccatctcttaaatggaagtgaaaatttattccttaatagtgaactgcatgaggaggtatatatgagatcaccttgtgggtacattgttccttacaacatagtttatcgtccccatcattcactttatggattgaaacaagttcctcatgcttggttttagtgcttttcctttgtgaccattgatgctagtttcattcgaatgctcatgatctcaccttgtttgttcatacttcatatagcgactgaacccttcctctttatgttgatgatatgatcattagtgatgatttgagtatatttcctttgtgaaggcacgtcttcgtgaataatttctcatgtttgatcttggcctttttgctactttcttactatatgtgtctctttcacctctaagggccttttta

SEQ ID NO: 110197 - DNA, 425 bp, Zea Mays
cgaaccccaaaacatgaagctcagatggtcgggcattgttatgatgggtatctatatgagggtggtctatggtgcatggtagtgggaacccttctacttccttgtacgccgggtggtactccatcctaggtgctggaatgctttagctttgatgggccaaaggtgggggatagtgctcctatggtgcagagtatgacttcgtgttgtaaacatggtgccattctctgtactagacatcaaacaatccttgatgtctcactggacggtccggtagggtaccggacggtacgcggtgggctaccggatggtccggtatagagttggacgatcctagattatactcacatggtctggtcgtgcctagatacgttgttgcatccattatgtgttatggaggcagcgactggcctagggatgagttcacc

SEQ ID NO: 110198 - DNA, 494 bp, Zea Mays
ccaggtcgtagttgttctgccggagtatatgcttgttcaggtcagcctgcatgaagcccagaccctccagctcacccatcagcttcccctccatgtggttgacgacctgttcaggcaagggcgttgctggaacaggagcaatactagctgctggagcacacatgtgaacataatcatcaacgacaggcgcagaggagctaacagggagcataggcagaggattgggcagggcaaaggcttcagatgcagtcacaccaccaggtattgaatccagtgaagactcggcagaaacatcagtggcaggaatttgcaccggtgcaactgttgttgggacagagagcatatcaccacgagcaggcctagattcctcaagtttcatggtttcctgaaagcttccagggcatctagggaaagattctgagaacacattgtttgtctcaatataaggtgtgaaaggcttgctgttcgcttctgggattccagggcatccatag

SEQ ID NO: 110199 - DNA, 882 bp, Zea Mays
ttcgtgtatcgctctgatgcaagacgccccgttcccacgtttcgcaagaaatggctaggatcttggatgaagcaatggttctatgttaataatgattttgttgagtgggaggatgtaaaagatataattcatcgtccatacgatctcgcttcggcatccgaaggccctcgatcatgaatagtgataatctccagcctgcctggtagccttcaacactatgtgcacttacattggcactagagacttggtccaagaacatatagctttcaaagtatggccccttgttaacgaataggaaatgctgaaggagaccactgatagctcaagcgaaggtggcctggtttatttaaaatatacataccgctacagaagttagtttggggagccggaagacaaatggctcgaggctattgaggcgaccgccgatgatttgttgggggcatatacgaaggctaaagacgaagccatgaatactgccttcggtgcccgcagaaagaaaatgttgaatagagtttttgacgttattggttctgtgtaccccaattactattttccggctcggaagcaaggggcgaagagaaggattacatcaactacccttgtactgcaccgaaacccaaaagaatgaagattgtaactcatcggccaaagtattttgttttggagagacctgctacaatgcgtgctgcaaaaggttcaaaggtagatgttgctgaatctgccaaagctaccctcttagctttggaggtaatagcctctgccacagctgaagctaccaccgctcaacttgagaagttaaaatcagaaagtttgaaaagtgacctgcagccgaagctgcaagtttctccagtactaccagagttgccaaggacaacaaatatt

SEQ ID NO: 110200 - DNA, 509 bp, Zea Mays
gggtgctagactgaatgtgcatgccctttttctgtctgctcgactactaatgcgatgcttaccatgtgagtcgtgcataagatgtacaacaacatatctttagctggtcggtcggcgatggctcgtttgggtggttttaggattggcggagtgttcaagattttcttgggtgcctccaatgcttcttgagtttagagggtccactggaatctatccacattcttgagaagtttgtagaatggcaagcctctctaaccgagtcgtgagatgaagcgactcagtgttgccatgcagccagtaagcttctggaccttcttttgtgatcatggcggttccatccttaggatggctttgattttctttgggttggccttgattccctagtgactgacgatgaactcgagtagcttcccggctggtacccagaacatgcacttgtctgggttaagcttctagcgatactgcctcaagctattgaagacctactagaggtcgtcgatgaagttctc

SEQ ID NO: 110201 - DNA, 586 bp, Zea Mays
agtgacattgatgaaagttactgggtgatctggatctggacgctgctaagcaaggggattgtagccttgaaggccgggctggcatacaatgttgtccatggactcttactgctagtgagtaagcagaccagctatgtgcaaatgtaacggtgcagtggcagcaggagcaagggtggatagtgatgctaaaaattcaacccagagaattaagcgttagaatgtttcaagagaattaaacaaagggctacatgtttgctcaaaacaaataacttaagagctcccctaaaaaacagcaaggactatagccaatgccagaaaccaaggactacaacagtcttggtcagaaaccaagatctgtttcgtggaagcaatttgcagctagaaaagcattttgcattgcagcgaattacaggtcaatgccatcctcaaaacaatgcaagatatagctagttgcctacttgcacagaaagatcatgtttttacacttctgcatttccattgaactacaggtgttggcccgtgacaggctcctgggatcttacaaggtactaatgcaaagccttttggcacccgcccccaaacaaag

SEQ ID NO: 110202 - DNA, 503 bp, Zea Mays
ctagtttcggtttcagcctacgatttggcttcagttggagcgactttctttgcaggagcagggctcagcgcctttgtagtctctagtacaacatccagcacattcaccatccttctcctcttgggagtcgcggcagaagccttttgcatctttggtagtgttgcctctattagaggactcaggttttctggcatttttgtcactcttttcacatgtggctctttggccttattatcttcagccttggctggctcaactgtagttatcttcggtactacacttggctctacagtactttgcataattggaactgtttcttttgctttggcagctgaataagtaccttcgccaaattcaggtatcacggctggttcaatataacacggtcggtgagtcataaccttcatcttcttgcccttcggctcagcagtgatggccgaagcagcaatttttcccgaagcagcaatctttctttttatcccttgccctcgcagcgggtagca

SEQ ID NO: 110203 - DNA, 538 bp, Zea Mays
gccgagaacaagagccaaaaccttatggataaaatggctgcgcttgagaaagagaatgaatatctcggtcactggctcaatgatgagaaggatgtcgccgttgaggcgaagatggaggccgaaactgcccgtgcggaggcccaagctgaccacaagcgcactaccgagctggagctcaaggtgaagggtatgcgcgcctaccacgagagagtggaggccaccacacgagtgggtgtggaccaggctcacacactttttgtggatgcttactacgacctaggtgcatagatggcccccttcgacaaatcagaaggggatgtggggactcgtttcctcgagtggctgcaggaggagctagagtctctcccatctatcgtgacgggtctaatgtcctatgtgtcgctcatgtcctgtgaaggggctacgaatgccttggcctgtgagggctgtagacacttcgaggcccatgaccggagcaacgaggactttgacgcttgtgtattcttggtcgaagacaacgtactgaagtgctcggctg

SEQ ID NO: 110204 - DNA, 975 bp, Zea Mays
gtcactgccgacttaagccgattgctccattagtagggtatagtggtcaccctaagtcgagtaagcgtgagcatgttgcaccgtcttaagtcattgtcgacttaagctgattgctctgttaatagggtatagtggtcaccctaagtcgagtcgtgagcatgttgcaccgtcttaagtcactatcgacttaagccgattgctccgttagtagggatagtggtcaccctaaatcgagtaagcgtgagcatgttgcaccgtcttaagtcattgccgacttaagccgaatgctctgttaatagggtatagtggtcaccctaagtcgagtaagtgtgagcatgttgcactgtcttaagtcattgccgacttaagtcgattgctctgttagtagggtatagtggtcaccctaagtcgagtaagcatgctgattgataataaacagttcgagtgcccttgaaatcttttcattgatgatgtattttccaattactgaatacattgttgttccgatagcttttgggatcttgttaagggtaaactttctgaggtgctctatattccacgaattccctatttcagtgccatccatttgagtaagccgatatgatcctggccgagtgacctccgctactacaaatggcccttcccatagtggtgacaatttatgtcgtccttcccccgttagaattcggcaaagaaccaagtctcccactacgaaagatcgatgtcgtacaaccttatcatgatagagcctcagggtttgctggtatctagctttactgtattcaatcgctcttcctccaatacgtcaatatcctctagtctggtagcctctgcctcaactatgttttcgaagaccagccttggtgccccaaacctgagatcggtaggttgcactacctccgaaccatagaccatgaagaaaggagtatttccatgcagagctcgactaggttgagttcttaagctccaaaccac

SEQ ID NO: 110205 - DNA, 831 bp, Zea Mays
cggatttggtaattgaacacaagcggtttgcagaggtgaggtttttaggttgcagctatcctactgacaagatggcttcttcatctaatccgtggcaccgacgtttgaaacgcatgtacgaggatgaacaagtgctacacatgcttcatgcatctaccgttgcagacggggaagaaaagccacatgtgcatagaggatcggttccaggtagacgtattattcatcgggataggtcttcaggttatgctaggcttgtggaagactactttgcagacatccctgtgtacaatgacgacattttcagacgacggtagtatcctggttaccattgtttcattttcgtggcaatatgatatgtaatgaagtgttctttttcagattccggatgacgaaatccatgttcgaacacataacagaagctctacaagtggtgaacccctacttcaggcaatcatacaatgcagcacatcaacccggatttcaccccatacaaaaggtaactgctgccattcgtatgttagcttatggtggaccagcagatagcctcgatgagtacttacggatgggggagagtactatcctagaaactgttgcccagttcacaaggtctatagtacacttatttggaccagaattccttaggaaaccaaacgcacatgacataacatctttgcttgacgttgcccaaaggagggggttttcgggaatgttagggagcatagattccatgcaggcagttgaattgctcgaagtgctggtactacgagccttctttgcacggtccctacccattggtcgcacaaaggtatcagacggtgaaccaaattcgtc

SEQ ID NO: 110206 - DNA, 559 bp, Zea Mays
gttgctttcaccataagagcaaaccaagttgacaactcagcctattgagtctaatttccttgggtacaatgttgaatataaggggtatcgttgttgggatccaattgctcaacagataaagacttctcgggatgtggtttttgatgagttccgtccttcttgtcctcgtccctcgtctgatgcttctttcacatcattggttgaccccatctgctttctgttcttttctaataccctacttctactataccggtttcacactcatcacaatcttgttctatggagtcttcttctttgattcttgattattccatgaagccttcggtgacaaaattttacacatgctgcaccacgatctcttctaatgcgccatcttcgtctgatgagtcatctcctgctgcttcatcctctcttgacgagtcgacatctccttgtgagtcatttattcctgttgacttgtccttttccacggagccacttttccttgctgcttctataccagagccgtctcttagacgtattcaccgtcttcggcatcctactaatcggtattctcctt

SEQ ID NO: 110207 - DNA, 400 bp, Zea Mays
actaggttggttaccaacgaatagttggtctgcatttactatctcagaaggtcttgccttcagctgcttgcaagcatcttaatcccaatttgtgaccatacttctccccctcttatttacaacatcattgtaatagggagtttagtggtgttccatttaaccactctttctggcacttccacataggattaatttgagtgacacctcatagtaaatgcacatggcagtcaatttgcaacttcttgcaaatcattcgaacccaaaggttcagttttagtacgtgatcctgagcctgaatgcttactgcattcattataatttcctggcattcattttggtactcgaaatctccccctaatgcctggaaaagctcatgattcaagcaagcgtacgggccgta

SEQ ID NO: 110208 - DNA, 526 bp, Zea Mays
catttacatgcccaaattaatcatatctgattttggggacatggagcggcagtaaaatatataaaaattttaaaatgacgctatcggttaccaactgtagtttcttttctgtaacacaaagaactgtatataataaaaaaatgatagaaaatgacgctatcagttactactgattaaaacccaccaaaactttcaacgcaattcaaaaagtttctgctgcgtcacagtaagcgatcgtgggaaggggtggatgatgagtgacagtgagacccacggcgtgtattgttggacctggacatcgctgttttggaagctgctttcgtagagaacaaagtcggctctagaaatctgaaatttttgaaagtagatagtgcgtgctgcagtggtgcttttatttcactaatattaacaaaatgcagtatatagaagggagtatgtgtatttcagtaggcagtagctgtcttgttgttacattgtaaagccgattgtaaagccggtttgtgtgtaatctaagggtgcatttggt

SEQ ID NO: 110209 - DNA, 518 bp, Zea Mays
ctccttttgggcatgggcgaaaacctaacagagaataaaaagacgagaaagttaaacacaatttgggaattaagaatatcaattaaacaattgcagatcttacagctggtgtccactgtcctcctgcacggactgatcccagtacagcaccttcttttagcaaaccattgaaaatggattggaagaatgaaccttccacagaaactccactagcaccatgcatctcatgaagctgttgttgcaaggagttccaaacagatggcaggtttgttggcactgttataccccttgcagcaccacgaaccatagcagtaatccgtgagacatacgctggagtgtatagctgtccgccttctagccttcctttcacctggaaggagggcagtaatgatagcagaacagcatgtaaaagtttttgtgaatgacatatatgtaaaaatattggaaataaagtattgcaacatggagatttaaagttagaaaatgtgaaactcaactaaacattctgatcctaagca

SEQ ID NO: 110210 - DNA, 446 bp, Zea Mays
cctattttaagcttatctaatgcatatgttgttcttttgatcacatctgttatttgtttgatcattgaataacttcaattaacacttatgcttcttagtgcctcttataatttcaatcgatatctcttgatatgcactaagttaaaaggagaattcatgatatatttatgcaatttgtgatctacttgatatataataacaatgacttagaaaaggatcactagttgtagaactctctcttgtgcaaaatatttccatacactgtcttgaatttaggtcttaagtaactaagactaaggacaaagcacaatgaagagagagtctctatgtgaaggtataaaagggtaaaactacttcctctcatttttacatgtacctaaatcttccttttcctatacatttcttgcatatcttgtataaaaggaagagaaagcatgtctatgcat

SEQ ID NO: 110211 - DNA, 640 bp, Zea Mays
taccaagactacccaaaggaaggcgactggacctcgaggtgtaccccggcaccagttggctcctcaacatgaggggagcagtagcggaagtaatgatcccataggggatctcgaggtcagggttgaatgattaacaacggaattgtgtcatggaagtagggagcgtgtgcgacatagctgtcgtattgctgagctgtcagcggaggttgaccgcttgcagcgagagatcgtggaacgagatatggctatagactgggctgtaaattcacgatctatagcctgggattgcgaggcgaatgcccaagcctgggtaatggagctaagcgtagccctagagaatctgcaagcatagaataacactttgcatgaggaagtgcacttgttatacgaccagctgcatccgaatgtaccaccggaggttgcaacaatgggagccggaacgtcaggagcagctggcggaggaccttatggggagttggatctctttggagcccctccttccatgaacctcgcagatgatcgttctcccaaagttggcagtggagcgggagcaaccaaggatgaagataactagagtagtatagtagtaggtggtttccttatgtaaattaaataaggaaagttgagttgtactagtgag

SEQ ID NO: 110212 - DNA, 513 bp, Zea Mays
cacgtacgcacgtacgtactaccttctcatctacgcgtctgaagtggcggcgaagttgagcgttgcgttgcatgccgttgcagacaaggatgggaaagcaggcacagagccagcaggttggcatgggcacgatgtgagcaaaccccatgcatcactgttgttagtatacctgctctatcatggggaggaaccgggtggccggctgaacgagaacgcctttggcctgtgcgccacacagaggacacgggagcaagatgggtgggagaggatgcggaagtggcaaggacaaaggctaacaaagatgggtggcactactggaattcggctttgccgagtgctcatcgctttgcttagtgctttttatcgtgcacgcggtaaggaagtctttgccaagtgtcacactcagtaaagttctgctctcggtaatgacagcgtttaccgagcgcagtactctcggcacagaaatacactcggcaaataaacctgtgttgagtgccaaacactcggcaaaca

SEQ ID NO: 110213 - DNA, 539 bp, Zea Mays
cctaacatgttagcacgagaccaagcttgcatacacatcaatccttcaactgtttttggtgctagtctacttcgatgtgggcttattactcttcccctagtgctgaatacagactcagatgcaacagttgtgactggaattgccatgatatctcgagcaatctttctcaaagtggggtacttgatccctgcatattgccaccaattaattatgtctagctcttgagttcttggcagtgttggctcctccaaatataaatccaactcagtgcgcacaaaagatgaacaatcaggttcttccgacaagaatttatcaaagattccaaacatcaagtcatctccttcgttgggggccctacagcccctactagctgcacctacagcatctgttgttgccatgccctccatagattcttgatattctaacaccaactcatacaacaaatttttgactctacacacttcatcgtctgtagttggactttcttccccataaatggtgctataaaaagctttcatgaacttcaatttgtacctagg

SEQ ID NO: 110214 - DNA, 347 bp, Zea Mays
cgagtttggagatgcgccgtgggaggaagacagaataccttgacatctcactcaaggatagcatcaaaggatggcgcttggagtggttcattgtagaaaatcatggcaagtccctcccccctcggtcagggagacaaccggatgttcatgctccaagttggattgaatcccccgccgacttggagataacagaggccagagttctgcttgctgagattggtttgctgaaggagataggtttgactgctgaagctgtagttgcagactttgtttttaagaatatctagccactgaaggacagagcgtacccggcttatttgtatagtggtgtcactgattcaacccgg

SEQ ID NO: 110215 - DNA, 603 bp, Zea Mays
atctccatcctcgatccatctctcctaccaatgaacgccacgacagagcaaattccaccaggtcaccaccactaccagtccataccccccgctaggatccaatcgaagcatgcgtggcgacaccaacgatggacatggcgctacacgtcgtcatcgtcgccaccatcctctcctgtctcgacgttagctccttgtgcctcattgttgtcgcttgtcgtgtactccgtacctctgccaagatgcatccatcccctgcctcgtgcgccctgacctacccgagctcctcgtcctcttcaactacgaggacatcagcaggtgcctcttagctagagatctagtaggcggcacaaagagtggtggtcgtcttcaacatgatcttcaccttcgtcatgctgctctgccacctcgagttcggtctcttctgctttcttcggcacctaggagattgccatgacgctctttgtctacttcttcatgtcggagaccaaggggatccccatcgaggagatggaccgtcctaggcgaaccactggtactagaagcggttcgtcgacagtgaccgcaaggtcgagctcatgcccaccgccgtgtaacaatcgtcgt

SEQ ID NO: 110216 - DNA, 292 bp, Zea Mays
gtaatttctatcccactacgtcgcttgggcggtcccttcgtgacgatggtgcccttcctaaacttctttctctaccttctgaaggggtgattgaagggtagaaaacatctatggcaatcaaactaacatatcttgccaccagcactaagacaaaaacaatctgtatctttagcacaataaggacacgtcaatctaccatgcacgctccatccagagaaaataccatacgccataaaatcatgaaccaagaacatatacgcaacacgaagattgaatttctgcttcttgaagc

SEQ ID NO: 110217 - DNA, 662 bp, Zea Mays
aaacaattttctagaattattttttactaaaaatcgatttctataataatttttttgagttaccaactgtctggaccgtggttacaatattgagaagctcggggatggatttgcaaaatatcctagactcagactacatcaatggtggactgcgggttgatatcagtaaaatgtaggggctctttagaaattctgaggcggcgaaagggtatgagtgatatctgaccgcccgatcaacagtggacggcatggattagctctgctatcgaccgaaccggtatctaactcagtttagaccagggatctacggcgggtatctaacggagcgcgaccaatcccagccaccttatcatgactggagggtcctgatctcacctaagggcttcgcatctggaacctaatctaaccgtccgatagctgatcaccggtatcaagtcgtcttctacctcccgttagcacatcgagcagcacccatgtcaccgcaacggagtaagccccgccggagctggctacgtcatcctatgcaccatactgttctaacgagcacgaccgagtaccgatcgccaagacaccgccagccaacccatatgaatctacctgctaagacccccctgcgcccgagcaaggcggcacggtgactctgcccgccaccggcgagcaat

SEQ ID NO: 110218 - DNA, 276 bp, Zea Mays
catctgtctttccttgccagaggaaacctctccttattttgccatttgccttaatggtccatgaagggaggtcgatggccattaccaaatacaccagcatcagggttaacacatgttgcactaaaatcatgtggccttccttagttagtaggtcaggccttccaacctgacagccgcccagccaagcgtcaatatatggttgcaattgaagcctttgttaacttttttcaaagatagccagattcccagatgtttacaggagaaattccaattggt

SEQ ID NO: 110219 - DNA, 735 bp, Zea Mays
gcgaggcaacaaataaaggagtggctgggtgaggcggtaaccctaatgccgagtgggttttgttcctcgcacatctagggccacctaggcccatggcgaaatttccccgccgtgctaagccaagcctgcactactaggcacataggattttctcgttccagtgtacgcagaccgatgaccccccatttgcactacctaggatagcataagaggcctatgcgagcatccaaacatccatgggttgtagcaataggagctatctaggggcttgtgctacctaccatacacatcctatatgaggggattttgttttattagaagaaaattgctactcatccacctgtagaccgcatctgatatctacgtatctggtgtgagaacatccatccaactgtttgaccttgttgttgtaaatgtaaacagaacaaatataagggcctacttgtatattgttgaaatataatatggaaggatgggtgtgttgtgtaagttgacacacaccaaaatcaatatggtatacaaagctagggttggtgtcccttaccactggcactgccactagagctaagtttgcatgtgtgagagagaagaaggccatccaccagccccgaagagcgtcaacaactgaggaggagtcagtggctcctgcagcgcgtaacatcggcgaccaccgttgagcgttcaccctcaagtgaccatgatggcacggactccgacaagtcaacctcactgccg

SEQ ID NO: 110220 - DNA, 996 bp, Zea Mays
gtcacattatagaaattgctcgcactttgttgatatcttcttttgtcccttcacatttttggggtgaagcagtttctattgcggtttacctcatcaattgacaactgtcatccaaactctctggcaaaacacctggtgaagttcttttcggaactcatccacgatatgaccaccttcgagtttttggatgtacgtgttatgtattattatcacctcgtgaacgtactaaattgactgctcaatctgttgagtgtgtttttcttggatacagccctgaacataaaggctatcagtgttatgattcatcttctcgtcgcatgcgtatttctcgagatgtgagctttaatgaaaaccgagccttcttttacaactcttccactcattcttctttttattccacagagtctacctcctttatgagctttcctcccatttctgaaacttcatcagtatcaccacctactgtttctaccccagatgttcttattctcatcacaccaccttccacttccacaccatctcagtcttactcttccaaaccacctgtcactcagacttgcattcgtcgtcctcgctctactcccacggccagtcttgatgatgatcatgttgctgatacttgtactaacaatgatgactctcatctcatgttgtttttaatcaggggtgtcatcttcgtgatcgtgggcactattgcagctccagaacgttatgggtttccccgtgctggtgcagtcattgttgaaccatcatcttataaagaggcttctggtatacctaagtggcaacttgctatgactgatgaattgaatgcccttcatcgcacatgtacatgggatgttgttccgttacctgatggtgttgtacctatcatgtgcaaatgggtcttcaaggttaaaaccaaatctgatgggtctattgagcgatataaagctcgtcttgtggccagaggttttcaacaacagggtattgactatgatgagacttttgcacatg

SEQ ID NO: 110221 - DNA, 316 bp, Zea Mays
gcggatagcgtgggctccatggggcgggttgttgcaaccacgactgcagtttcctctgcgcctagctcgaaagcccttggcttcatgattaaaagttgggtgtgccgtgctattccctccgtttgcgcctacctattcctcccctcgctccctcgaacacagcgcggacgtcatcctcatcgccataggccgcaagttgagaggataattcgacggcgtagtacctctggtgtcgggtctagggcttggcctatcgtgtgcctagagcttggtgcactgcggggtcgtcgttggcgaggcacttgtcatcgtggac

SEQ ID NO: 110222 - DNA, 329 bp, Zea Mays
attccatgcaaacgcactatttggtcaatatagatttctgcataatttttctaccctgtgggtggtatgtactggcaagaaatgagttgtcttggttagcctatccacaatgacccaaatagaatcatggtgccgggaggtgttgggcaaacccacaatgaaatccatgctgaggtcctcccatttccaagatggtatggggagaggttgtaaggtactaccttcaatgactagccttgattctttggcaagtgtcgcacttagatacatacttagcaatttcccttttcatcctggtccaccaatataaggatctgaggtcatgatac

SEQ ID NO: 110223 - DNA, 321 bp, Zea Mays
ctagaatgtgatgctagcaaaaatataagaacattgtgaaatatgaacagaagcattttctcgcggtatcctaggaccataagacatctaattcatgtacctgtaagtaggaatgcatcacgaggaacgagtgcaacacctagcaacccaaggaactaataaagaactaacctaacacgtgttatcatttgcaggaaccaattaacagggcaagttattcagaaaattaaatatgagggactaaaatgtatgcacactttgcacctaaaattgtttatagctgcacattttgtaagtaaaggcatggtcggtagattaaca

SEQ ID NO: 110224 - DNA, 367 bp, Zea Mays
gaattctcaatattttgaaagctacacagccccaaagttgggcctataaccctgttttcaaacttaggctaaaaagattcaagtgtggctcttttgcacttaagcccaaaactttagggtttaacttgcaaatccacatatttgtaacccaaatgacttaatatgtttaaacatagtagtttttacactttggtccaaatgtgcacagtttttgcacataggcccttaaggtttggttttagggttttccagggttccatttagggtttctagtatccaggggtataaatgtgactccactttgtttttggggatattttatgactattaccctaaaatatttggattttctcaagttgggttaagt

SEQ ID NO: 110225 - DNA, 922 bp, Zea Mays
tgggaagtggattgggatgaaattatggaaacctcagaaaaaatcagtacttctatagaacctcgatcttaagaaggcagatcctctacatgatagataaatgagaaaaacctctagaaaaaattatactacaatgaacaaaaatgagaacaaagataaaaatctcaccatctaaattatactcatgtgcagatgacgtgtatgtattactcgcaacagcctctatgattcaacatggattgaatcaagttgtgccctactctcctacacacacatacaacgtagaaacatatatcagtgtcatagactccttcagagagttgaggcaacctatttttgaccgagagactcatcaaggtgtatttgttcagattgtctatacagtgcacacactaaacagaaaaatggaggtccagcatttccaactctagagctacgatttgttaccatggacaaaagaaacgtcagccaaaattattttccccaacccaagagccgcattatacaaaaccacccatgcgatttcttgattcctataaccccaattctcacaaaaagcagagcacaacgtgaatttgaagagacaacagaaaggggcaacggggtctgggggctcaacaacaccatgccgacactgcaagctagaatggataggacgtcatgatgtcgcaggaggctgccagcactaacatcacgaccatggcggtaaggcgtcaagaggagcaggtcggcaccgggcagccaaaggaaaaagtggaggagtaggaggaggacgtagccgtggaggagaagatcatacaggtggaggcggagatgccgcaactgcaagaggtgaggccacagatcagcgaggtcgtggagatagaaacggaggcccatgagcgcatggacgatggctcactggccatcgttggagaagaag

SEQ ID NO: 110226 - DNA, 722 bp, Zea Mays
tcatgcaaaaattcaagaaaaatgcctctgaagatcctcggtcagaacaactaatgaagcttccaatggtacagtgcactgaaatatcctagggttcagtccccctcgccgtcagcgatccgcgcgcccggattcgcgccggtcgccgtgattcgtgcctggcacaccatggatattcgcagggaggtaactttggacgtgtcgcgacctcgtggacctagcctgatcctagtcggagataattcaccggcggtcgccgtggctcggtcatttccgccgtcgtgtcatccatgcctcgctcctcgctcaatgtgtccctttttacgtggtaaccatgcacgaatggtgtaatccgcggccgtggatcattagccggaccaccgcgcctttaaattgccccaccacccacgacgaggtattcacatcttcagcagtgaactcggttgaagcacaaatttccgaaatcctctccacctctcccaaaattggttgtgcacggtgaaaccatagtcctttgcgaccgtgtagccccaacctcacctcctaattccgcccggaaccgtcgcaacgccattttccccttttctgtcaccagcgaacgaaaatcctccgcgctccgtgcccagcttctcccaggtctgttcatgctctctgctctcccatttcagtgtccttaggttctcctgatgctcctcgacccattcaattgagctaagctgcgc

SEQ ID NO: 110227 - DNA, 1483 bp, Zea Mays
ctgcctgcaacattcgtctgttcccaacagacctaaaaagaagcttggaggttcggatatcacatctatgttgttcaatatctctatgaaaatattggctgttgaatcagttattttttctgggagttgatttaatagttctactcattcccacaagcttgttgggtattgaattgagttactaatttgtttgtctttccttgaattcctacctgattaaagaaaatcactagtggtgccactccctctaaaaggatgtactttgtactacatgctgtatgtagcttgtctaaataagttgatatcataatctccataaggagttagggacatgtgatttactgactgcaacatgtatctcttacaggctgatgattatctgagtagtctctctatcaaagcacttccaggcattggtcatacagtttcatctaaactgaaaagcaaagaaattgaatattgtagtcaacttcgcaatgtttcaaaggttcgtcggtgctatttgtgtagtgtaacatgaagcagtcccctttcctcattgaaagaattttttccagtccttcattttacaagtgttactgtgttccagtctcgactttaaatgccatttactaatgcagaataaaatccttctgtttagaagtcataagcacatcgtctaggttgtctactgtgtgatggtcacgtaatgccaactacattctttaggattatatacaatttcttgtctagatgaatattgatgtggtttctcacctatctccttccaaatatggttattacatcttagtgcttttgtaggatgccctccacaaggatttcggaaaaaagactggtgatcttttatggaattattgtagaggaattgatcattcaattgttggatctgttcaggtagaaaaaagagcatcccagccattgcttcagttgttttttttatcgaacgcgcaggagaactgcgcatgttatatattagagaggaatagaagccttacaaaaaaggagatgttgctgagcaaatctcccaaggaccctacatatacccgaaggtaattacaaattggtaccgtaacttgacccgacctcgcccagagctgcaactaagccaaggctctcaatctccttagctcctgctattgcccagctaacacactcatcagttgtgagtgcctgtgtctattttgttttactgaaaattgtgctcaactggtgtatgggatgtaaatacctggagcaggcagctctgctgatctgttcatgctccaaagaacatctaagaaatagattcagaaataacaatttgaacagtccagttttagtcaagcatttgggttgctttcaaggtgattggcaaaatcagaagacggttcctgtggagaggaaggaaataagttatgggagggcattgtttagtggctttgagcaaggttactagaccaaaagaattgggaggtttgggcatctcacacctgcagaaaatgag

SEQ ID NO: 110228 - DNA, 307 bp, Zea Mays
cttgcactaaatccctggtgctgatatgttcagccaccactctgaattctgctacggccagctggcatggtgaccctggcttcatgttgcacaagggtctggtcatcctgaagcttaaactcagtgggctcatgaccatcgtcttcaacttctccctcttcttctcattggccttgacataaaaccacgcgctcttctagccagttggccacttggtgcgatatctgaggtccggagccttcgtatccttgcgatacgcgaagttataacaaccaaaattttcatgcagcccgtcttctctggcctt

SEQ ID NO: 110229 - DNA, 339 bp, Zea Mays
gcagacaacagacggagagaactcagatttgaggaaggagatttcgtatacctcaaggtctccccgatgcgtggtgtcaaaaggttccaaatgaaaggaaagctagcaccgcgtttcgtcggcccctatcccgtcattagcaaagtgggacccacagcataccgccttgaactaccagaatccatgtcagatattcacaatgtgtttcatgtgtcctagcttcgtaaatgcctgcaagtaccagagaaccacatcgaggcagagacaattcagattcaaaaagatctccagtaccgggaaaagccaataaagattcttgactaagcagtccgaaagacc

SEQ ID NO: 110230 - DNA, 456 bp, Zea Mays
atcagcttcagccatcctgaagaaggagctttgaacgaagcttgctccttgaattcaaatgtcaaagtcacaaactcaccttctctagattacacaaccttcgacagtttccagcctatacgggtggggaaaatgttgtaagcaatgaattattgaatcaagtcatgagagccgatcttcttggcaacaacattgaaagccttataacaattttcagtagcctcgcacatgtttcacttccgcctcttcagaccgaagctaatctccagaggactcatcaacatatccttgaactactcacgatgttcaatatccacctcattataaaaccattcttttgtccagtagcaatgccattttgtttggtatgcaagcactagggcaactatatcctctcggtaggcgaaggtgtagcacctgaagatgtaatgaagtccatccgaagctctagctttg

SEQ ID NO: 110231 - DNA, 572 bp, Zea Mays
atacctttggtcggtcttgagctaggtgtctagtagtgagccccagttgggtatgatggtcagtcggttggtgaggggaactagcgaaccagggttaggctttgctgctaaggatgggagtgctgcatgttttggaaaggttggtgagtggagtggatggaaaccatcagagaaaccttcaagcactcccaagctcatgaaaatcaccccacctaagcctaccaccaatgtgagagatggtgtgattgaggagcctgtgagagcccctccttaaaaacaagtgtggattccaaaacctaaccatctcaataacacacttgatcaatgttgcctttctcataacgatctcaaagaaagtgaaagcgaacatcaatatgattggtcttcgaatgaagcacaagattcttggcaacacttatggcattcgtgttatgcaaagcagagggacatgatgaaaattcaagccaaaatcctataaagtggccattatccaaagcaactacgaggaacaactagcggcagcgacatactcagcctctatggtagactgagcaatgctagattgtttgcgc

SEQ ID NO: 110232 - DNA, 273 bp, Zea Mays
gttgaattgtagttcatggcatcatgatatatagaaaccatagcaacacacgtgcatctaactagttaatgtattaagcaccagtaaaagaacacaggcagttataattttcttgttatctttgtattatcctttcttgactttttgtcattttagtttccagttatggtgtttttggtctgttcagtttaattcaattccatttgtgtttcgtgtaatgcaatgcctgcttatttggtgctgtttgattcacatatttgtaacgtgaacggt

SEQ ID NO: 110233 - DNA, 297 bp, Zea Mays
cttggacgaagctcatctctcaaaattttccatgcaccccgggagtaacaagatgtatcatgatctcagatccttatattggtggactaggaggaacagagaaataactaagtatgtatctgagtgcgacacttgccaaaggattaaagcaagccatttgaaggtagaagagaccttgcaaccactccctataccatcttggaaatgggaggacctcaacatggacttcattgtgggattgccaaatacctcccgacaccacgattctatttgggtcattgtggataggctaaccaa

SEQ ID NO: 110234 - DNA, 665 bp, Zea Mays
gtttaggtggctgttggtttcctagcaggcatgcgacattatctaaaatactgctgtagtatattagatacaaatcaggaggtccggtctcacaccactggttcctggcttaactcaccacacacacacatcaccaaatctcccattcccaatccacactcgcacacacctcaccatcatcaccagcacatcacccaacacatgcttagactaaatctgtgacaagggcagctccctcccgtccttgtctcaatggcctaaagccggatcctagatcagaggtagaaaagaagattcccatactaagacgagaaaactaagtccctaggattgtccttggccatggacacggctatacgttagatttacactctgcagaggttgtacaactgtacccatacgaagcggaggcttggccgagcctcgacacaacaccctccagtaaatcccccgctcacggcaccaacctgctttttcaagccaagatctgtgggaggtactccctcccacacaacggaactgtgaactcccccacccagggccctcgagaggagtctattggataagggcagggcgcaccatcagccccgttcctaacacttacgccttatgcccacagttcgtggtgccgcttacgggagaccaccttttgggccggtacccac

SEQ ID NO: 110235 - DNA, 271 bp, Zea Mays
gaggcaaggcttatgggcacggcgagtgtgcgatgttccaagacgcgtcagggagcaggatttggatgagattttgatggggccgagtgtcttgcacatgctggtgccggtcatggggcgctttccggtgcttggaatgccatgcttgttgtgtcttggccgagtgtctcgatcagatgaagatggcaatgccatgctgcgaaatagagctcacatgacgtgctaccgatccagctgcaggcactgaattgaagagccgataaagctgtcg

SEQ ID NO: 110236 - DNA, 496 bp, Zea Mays
atcaaattgcccatattttaaatttcggcataagcttggctattggctaacgtcgtgactattttctaattaccaacatacaccaactttcaccattttaggatacttgcatgacacacagttattctaatacatcacaagtacattcaaccccatcagtagggcaccagcacatttccgaaaattttcccgagactacgacgaccaggcatcggtcttaccacgcacataaagcatcaccgacattatttacggaacctatcggctaacttgatcgacacactacgcatgttctttgcccttcaaaatttatcgcacaacaggaaacatccctcttgctaatgacaccaatagtacctactgacctattatttaccacacgaacacagttatatgtcgcatactagtttcttacatgattctcacatagctcgtaatttaactacttactaacaataattcacgcacggcaactaccacatcaactgatttattt

SEQ ID NO: 110237 - DNA, 880 bp, Zea Mays
ctgtccctgaccagcgacaaagccacctgctccaccgtgctgttgatgacctgaagcatacccgcttgcacccccggattgctgatggtctctaccactgccatggcctccaagatcactgccaagcaccattgtatgccttgctgcgtccacgtatgagatggtggctgacttcctgagagttgaatgaactacccgagcactagtcacccaggtgcccgtacgtgcaaaaagggaagccagccctggcgtaggtctgtaaggaattccagggctgagtttcagctgctgggctctcccaaatctacgcctaccatacacatacaaactatggctccttgtatccggaaatgaagatgtgagcgattcctgcagatttgcccgatctccagcctttccaaataaacaaggaagcaaatttgaagctgcctccggcggccccactaacacagccgtacattccgccttcttcaacccttgaacacgacgcccatcgtcgtaacttggtttccggcgctcttgcgccattgataggacatctccaagtgtgagcttcggcgaacaccgtggcgatggcaacttgccctgccatggcttcaccttactcctagaagaagaggtcaaaggaggaggatgaagcggactatgaacaggcgtccgcataggtcccgacctgcagacccccactgcgcattcaccaacggactgcaacgtctccatccactcgaactttgccggagctgagtcccatcccggtttacagccaccacctccagccgcagaaacattacccagatcaggcagcggagatgcagaacacgctggcgaagaacacgtactggtaacctctccatgatgggcaccagtaacattttccgca

SEQ ID NO: 110238 - DNA, 551 bp, Zea Mays
cgactactttaaaaatgcaagcactctattcatctatgcatgtaccttatgtatggatccaatgaaacggggaacaaatatgtatccacatagatgacatagaaagcagtgtgaaaacgcgaagaacacaataaaccaagacaccaaagcaacacgacaaaccgaggaacggtgcaagtagtggcttacctcatatcccaacataaggggctaagaggacggtttcaggacctgcgcacgatggcccaaacctgcaacatggcagatctacaagaacaacacaaataatgagtcagcgcacatggatcgggtgcagagactgcaaggaaacaatgcaaaaggaaccaggatccgaagaaaaggaacgaacgacaacagtggagtcgaggaggagaaagaagcccctggcaggaactaggtcgaggacaaaaaaagacattggcggagggactacatataagcggtagaaagcaacaacatggcggtatgtcagaaggacgacaacacagcgatgcgatggacaacaagcacacatggaggcacgacaaaac

SEQ ID NO: 110239 - DNA, 385 bp, Zea Mays
taatttgggctttacaaatcctaccccttaaaaggaatctcgacctcgagattaagacgaactaggaaaaaggtggggaaattctactcttaattcttcttctctctcccaagtggcttcatcttcactgtgatgactccattgcactttgcacattttgatcatttactcctcgtaacgggagtcaaagtatcaaggattttgatagggtactcagtataagtcagatcatcttgaacactaagctcttccataggcagttgctcttctggtaccctgaggcaattcttcaactgggatacgtgaaagacatcatgcacatctgctagatggtcgggtagttctagttggtaggcaacttcccttactcgctttaggatcatga

SEQ ID NO: 110240 - DNA, 409 bp, Zea Mays
tagaaatttttggggtttgtccccaatggctacttgggtggttgagagctataaatacaccccaaccaacccattcaatatacaagagatgagcattcatttatacattcaataacaatactcccaaagtgatcaagtctcccaagtgccatatctgagtgatttgagccttgagatagtctagtgcctcgtgagaaagatggaaaagagtgtgtgatgtgttcttgagcttggagttttgactcacgtttattgtaaaggctagcgagaggcttcgatgtgtgaagtgccttgcagagacttcggtctcccgtttaagaaaatgtagaggactatcgatctttggaatcacaaaagatggttgaaaagatctggtcctttgtgttttcttgtttgcgatttgttttcc

SEQ ID NO: 110241 - DNA, 300 bp, Zea Mays
gtttgatatttgaagcgtacgtgtaaacgtaaacagaggtctaggtgcatcatccttcacactagcgatagtttctcgaggctttcacagtggaatccataattttgttgggcacttgttatattttataaaatacaagaaattttattttctggatgattcacactagcgataatgtctcaaggctgtcactgagaaatccataattttcttgggcacttgctatatattttataaaatataagaaatgatattttctagatgaccgtgacttgaacgtagaaaaagtcaacaactaga

SEQ ID NO: 110242 - DNA, 1437 bp, Zea Mays
cagaggcgacacaaaatttcgaccataggtccagcgaagtctctatgtcacccttcgctgcaaccaccaggccggcgggcaccatagacggtaccaccgctagttgcccagcctccgcccctacataaaaaacaagtcagaaaatatataatcacctggctaagaaggattaagattttcaactcaccaacaggagacagcccagtttgggcatcaaacatagtgactccgcccaccaggtagtcgtccaccaccaactcctagcccgtccactaggtctcctacaccgttgtctccatcacgcgcgacagcaaaggcagttttgcagcggcggacagcaccgcagggggaggcatcgtcgcgggaggggcagcccctttgcattggaccgctaccttagcatcttggtgtgggtccaatagccaaagagggtccttccgcttcttccactatgcatcttggcgatctttctccatcactattgacacaacagcaccaatatttctcccataaggaaagattctcggctcacgagctaaacgggacgtaaaatagtcaccgtcggcgacctgggtatagggtcattcctgtgccatcgacccccggtaacattcaccatgcgcgaagatgtttcccggagctcgggcgaagacatcacctccccgtgaccctcgcacatcctcattaactcctcaacaaaaatcctagaggccctcggccccatctcatcatccctcgtaccttgcaaatctattttccttttttgggtagctgcaactacagccttccccttcgaggttccctctttaggctgggtcttcacctattttcctcggtcattgccggtgtcagtagagtccccctcctagtagggaccatatggcaagctattcaactcaaaaacatggttcatcctcacattggaaccgcggatatcccaactctttatcatctcagtattcagcacatactttccaaaaatcttaatggcctctgactccacctcccgcacgaaggtggccgcatcccgcccacgcaagtcaacaatgaaggctaggctctgcaccattttatcccctagcattggcatcccgcgaggtctaatttcgcccaacacccacccgtgcgctaacgaccacactccataggcgatgaactcttccaccaaataacggtcgctgctcaatcggaccgtgtagtgaaggacctgctcgtcccgatcccccttcttcaccttaaagtgtggaaaggccacatagcaaggagaacacaaaatgaccgggggcaaggtaggcaacccttcgacattcccgggcgccacataaaaccaaaaatcccaccagttaccccatttattcttggcacaagtaacaatctcaaccactttagccgaagtctttccggtcctcggcgtgaaactgcaggacccaaactgag

SEQ ID NO: 110243 - DNA, 422 bp, Zea Mays
gttgaagatgctcttcccccttgcggtggtgattgtctaatttgttagtacatgtggtcaaagctagctatatagaatatttttggataaaagcaatttcattgcaataccatgatggtacggttgatagattcgccaaaatgaaaaatgatattagttatcttctcatcctttcattgtttgggcctcattgatgcatgttatggattgttgtagtttaggagtcgatccagtcatcaagcattggttgtagtcgaccatgaggcacatgtgaagcacaagtcaatatttaagtagtcttcccttgactttggattctttgcgagtttatgttctcttgatgtaaattcttatgctatgtcagtacactgataattcctatttgaaactattatgctacgtcagtacactgataattccca

SEQ ID NO: 110244 - DNA, 988 bp, Zea Mays
aagtagtgtgtcccgcggcccttctcctcgtcgacccggcgactctcccgcaaccacggcgtcagtactctcgctctcgcgcccttgacccccacgaccacactcttctgccagaccgccgtggacaacctccactggcaatgccgcttagccgttgatttggtctcggcgtgctttccggtcgagacgcctgctcaagtggaaacctctggtgccgtcgacttgctgtaagatcgatcggtgtgtaggtgatttatcactgtacctgctactccgccgtgtcgcagtcctgcgcggacgtcgggtagcccaaggtaagaagacaaccacctagaattcgcattggtattttctctatgtagggtcgccgggatcgatttatcctgttatcaaccgggagcgtagtgaagggggagttagatggccatggtgccaccgtggggctgagtcgcgtcggggttgggcactttgggttgctcacgaactgcatatgcatggttagggtattcgggaagggttggtctctgtcttgaacaaattaggtcagagtttgggaatcgtgggctctagatcaggattccccagtggagctcggccgcattcgttgacggcaccgccgcctgctcgactgggaggtaaggggatacgcttcagacgttggatgagatgtgtacgcttgagattagaactaggtggtgttttgctcagggaagaatcatgttcgttggatggtcaatcgatggatcagattagtgaccagcgtcgatggtttctggtcatgggatccagatccaagggctcatgtttagtaccggtttgttaagtgatttgatctaattgtgaccgttggattgtgatcctgcggccagaatccacccataccccttcgcctgggatcatttgctatagagcccctaggatctttattattcaacccgcagtgcacagcagaggaattctgagtctgcgtaaaatttatggtttagcc

SEQ ID NO: 110245 - DNA, 439 bp, Zea Mays
ggggtatataggtgactatataagtaggccagaaaggccggcactaggatagtagggatgccctaggagcacccctctgatcgatgagaggacgttccttcaagaatgcatgcattataaaacatgaataattaaaagttaaagaaaatgcatcgaatcatgacccctagcaacattagttaaaaatgggtagcaagaaaatgagttggaatagataaatctaaattgattcacctcctttaaaacttaagcacacttatcccttaccgctaccttaacacttacacttaaccctcttccacatatgtcttcacccacccccgccaatggaggagacacccgcttcagctttgactacctttcccacgagggctttccctctatcttgtgggaggtgctctgctccgctggatacccacaccccctctatacacggtgc

SEQ ID NO: 110246 - DNA, 647 bp, Zea Mays
ctagctctataccattttggaagatgggaaactttaacccttatctagagttgggagtaaattatatagaggagttaggttataatagtggtaattaggtatttttttctcgaacgcgcaggagagatgcacatcattgtattaaggagataaaaagggtccaaaatggactagtacaagaaagaggagccaccttacggtggccagtaaccaaaatagagaaatgtgtccattacaactccaaaaagactaccatcctacaacccaggaattgggactattaggagagagaggttcttggcccctgccatctcccacagcaccctctcttcctcagcccttcttatggctgcatttggggtgattttgtcgaagacgcagctgttcctatggttccagatggtccagaaacccaggattcttacagagttaagccccttttcagctatgtcttgcacctgctcgctcgcccttctccaccattccatagccttcccttcccctggcgagtagttccttgaaggttgacctgccaagcaatctgcaccaaaattcccttgcaaagacacaaccaaccaataagtggtctattgataactcatcttggtcacaaaatgggcatctttcaggatgttgcagcttttttt

SEQ ID NO: 110247 - DNA, 501 bp, Zea Mays
gccgtggttagccgcactggcatcacctccattggccattatccggccaggctacatgcctcgacaccttaccatggcacagtgagtcatcgtaaaccactctctactactggttcgtcgtcggtaaggccgccacggtagatgccaccaagctctagcgatagtgctctcctcactctccggccgccaccgcgccaactcaaattcatgagccaccgcccccaagtcctataaattgagcacaccgtcgggtccgtaaggtagtcaagtactcaagacaccaaggcgtgcctccaattactcaccaaagctcaccaattctggatttcccccaaacctgctttccaccaccgtgaaagaagcctcaccgtggccagctcgtctcaggtcctctcatactttctgctctttcatttcattgtccttgtgtgcccctgatgctccccgaccctgccaattaagctaggaccccttagatcgccgggaacgcgatggattggc

SEQ ID NO: 110248 - DNA, 886 bp, Zea Mays
taatatgccatatggtgagccactagggacgaactccatagaaaattggttgtctgtggtgaagcgataaatcgagagaagattttgtacgacgttaggggcaacatggacgtggttgaggtacaaaggaccaagaagaacagtgttgcctactgaggtgacatggagactggtagagtggactcattattgacaatgttgaaagaaggaaaggtgggattacagggatggggtaaggagcggtgtggtacgaggtggtggagtcaacaacccaatcagtgggagtagctagaggaggcaccctatagtaacatcgggaggggtgctggggcgtccaatgacaagcatgttgatggcgagcatgggtggtggagatggcagggcctcaagcctcatggagacaatctcaacacttcagaacataaataccacagtagcgtggcggccctttcgagggtcaatggaggctggagggtggtagagcacgaagcagtcacaaagatcagggttcatgacctgatcaaaggctacgaacatgtccgggagaagctgaatggcgtgaagggagacacatacatggtagggagtcaggtggagcatgccatggcaaaggacatgcatcaagggagcagacgttggagcaacatgttgctgccatggaggtgccatgcgcccgtgtcgtgggtgggatcgctagcacgagggtgggtgatgaggccggcaccaaggagtggagacatgctggtgaacttctggcgacaccaagagaagggagggcctagccaacattggagaggacacgagcagggaggagcgctggaggagacacataggaagcttgtgccattgtgctgctgggttaggaggggatgctggggagagcgtc

SEQ ID NO: 110249 - DNA, 487 bp, Zea Mays
gctttggtaccatgaaagatttgttcgaagcattcttcccttctttgaggtctatggtctatatttatatgcaaggtatgtataaaatttaatcagattacagccaggttaactgacccaaatacaaattaggatatctagatttagagtcgtggatggtcaaaaaatgtcagtggacattacaaaaaagagaagaaaaggatgttggataaactggacgaattagataagaaggcagaattgataccgctcacacaagatgagctaaatttaaaacatgatttaaataatgttgtagcgcatttgttactagaagaggaggtcaatggtatcaaagggctaaggtaaaaaacttgttataaggtgactcaaatacgaaatatttccagttagtggcaaatgggaaacataggaaaactcgtatttttcggttggaacatgagggtgtcactatagaaggtgatgagcctctgaagcaacatatcac

SEQ ID NO: 110250 - DNA, 453 bp, Zea Mays
cagctttttcaggcagaacctgttctatagcttcttcttccgctgccttttctccagtttccaaggatttctctttggcgggctctgaaggcctagcttcggcgtcggcctggctcattgtagcttcggcttcggtcacctttgtctcggtttcaatttgcgtttccgaagccttgacaattttccctagagtagagcttgaaacttttatcgtctccagcacatctagtacactagccatcctttttctcttgggggtcgctactagacctttttgtgtcttcgacacctccactcttgcagaagggcttagaatttctaatgtttttgtccctttggttctcggttcttcaattttgtcagtcttcggcattgcagtcggctcttcaatcctctgagtaagagaaggtcctttggcttcaatagctgaagaagtctcaccgccaaattcag

SEQ ID NO: 110251 - DNA, 387 bp, Zea Mays
acaatataacaagttcataaagatcacaagttcacagactcaaagttcacaattcacaatatccactcgatttagttgacatggcatgcttactcatgaaatattttttcctcacataaagggttttttcatagcctcataggaaaaccctaaaatctagtgtgtgaaaaaacagactgtcggctctctatcattatatattactaatacataacatgtacatagaaaatgatggattcgttcgagagaccaaatcgttaatctcaattgccttccaacaccatctaacccccaaaaaatcttaaagcgtcaaaaatacaaaaataagcaatccttatccagaaatgtacaggcgatgcgaaaaaatcacatgctgaaaaattccga

SEQ ID NO: 110252 - DNA, 435 bp, Zea Mays
actccaaccgtgactcctattgtctggtgttatctgtggtttttggcgggaggtattggcgcctacccaccacgcgcgacttcttttctgcgctggatgctacgattcggccggacaccaactgacggagggaacccatcttcgttgtccctgcaaatgcagcagggtcgtaggggtcaggccgacgaaagagcgatttgtgcagcattcatcaagtgggttcacaagaggcaggctgtcatcacccttggtatgcttttctcttgtttaacgccttttgatgtagctcctccacacattcacgtgctactccgttcctctaattcaactgatgctccggttagtggatagatcttgtagtttagtgaatagaaatgaagcagcatttataaatactattcatttctgttgatacattgttcattgatttcttat

SEQ ID NO: 110253 - DNA, 353 bp, Zea Mays
tcgcccttagtccacgcaaggactaagtgctcactatgagcttgttcttcaccactccgacatggtgaaccactcaaccgtgtacaacatttgagtcatcacaatttggcctcacttttgtactaagtgtgaacttaagtttaaaccaaacataaatattgttagccattcgatcaagtgagagaatgttggatgtgatcttggctaactgagtccaactctacatgtaagttaaggtccacctattaatgttgatctattatatgttttccacaatcggtgcataatgtgtatatgaataagaccaaagtgtgattttaggattaagactaatctcgccacctaaacccatc

SEQ ID NO: 110254 - DNA, 583 bp, Zea Mays
tgaagccggtcttatcctgaagcaagagtcgatataaaaatgtgtgttgccattgccgctctttggtgaatttaagcgaaaacactgccctcgcccccctttaccaaaggacggctatggggacatgcatgtgaatgattttcttgtgcgtattgtgcatattgtatttgaaatatgatgtgccttttattgtgatatcttttgaaatgtatttgtgttatttaagctgcatccttggatgtcttcgcgcgcttgggtgccgttagtacatttataatgacccgacgacacttttacgtgatttttggtaggctatagcagtatgtcttggcaacgactttgtgatgcacttgctatgttaatctagttgcacccataggcgacttttgcgtggatagaaatatgcgtctatgtgacgactttgcaaccttggatgctgttacgcacttgttgtgctagtctagctgcacccttaggcaacttttgctcggatagaaatgtgcgtctctaagtcgacttcgcacccttggatgttgttacacacttgttgtgctgatccagctgcacccttaggcgacttttg

SEQ ID NO: 110255 - DNA, 630 bp, Zea Mays
agctcttttactgcttcatccaagtgcaatagaccagcaacatcttaatttggagcggggtgtttgacacaaaatacttgcatgtgggtttttgaaaacccctaaatttgcaagcgtgtttatgcaattttccctaattaatattaggtgtctagtacttcttaatccactggccacactgtacaaagattaaaaaactttgaaatttcaactaacttgtgcacattgtcaatgatcttgtcccctccagtcatcacagcttgccaatctttccaaggaattcacacacttggctataggtgctatatttttagaaggccagaaatcaagaacgacttttgtctgcacaaatcatgcacgagaaagaatggttaagtccatggtccaggcctgcagacaacatgaaagggagttaaaaccaccaagttgccaaagaacactccggctctccatgttttccagctatagctgtttatagtattgaagtttctaagccaatatggttggcagtttggtcgtaacacattgttctaatatcacgactgtttacataatgggaatgaaaatgcaaacttgcataaatgaatagatgtagccagaaactgccaaacttgcataattgaatctcca

SEQ ID NO: 110256 - DNA, 581 bp, Zea Mays
aaaattaaagaaattgttgcccaaagttgctctatcagactggtattgaacaactgaatctgatagcagaagtggtcgtcggtattattggtcgaactcgagatcggatttgagctaaatccagtaggaattcgagtaggactgctataacaaagatgaagatgatctataggtctacaactttggtgcagaaggatgatgatgttgccatggaaaatttggagaaaacctgtcctaaacctcggctgtcaggctaactgaaaaagcttccaatggtacagtaccaaaatatcaacagaagcaggtcccccctcgccgccggcgacctcgcgcgtagattcgcgccgatgaggtgatgtgtgcccacttaagcccggataacgccgcgaggtaaaaagatcgtcaccactgttgggctatgggtactaatccggctagtcgtcgtgctcctttctgctttgcggtcggtccggataattcaccagagttggctgcccatcgaccgaacgccacgtgcctcaacaattaccatgtcgcaatcaccagtgttatgcacgtccaatgatcgtcggggaggccgc

SEQ ID NO: 110257 - DNA, 556 bp, Zea Mays
aacgagagtgctacatagcaatcacatgacgcagccaagttcgtacgccacaaatactgcgtcgtgttgccagggcgcagccaatgccaaaactcagccgtttaataatttagcctgatcggcatgtccggatacccacgatacaatttaatcgctcggcgtgagttcaaaagctcaacgcaacacaaatatttagagcgatttgagtatacacaatataaccttcacatgcattttaataattttctgctaattatttactacgggaaataattattaatgcagaaaaaaatgaacaccataattaatatatgaacataacacatcaggtgtaaaagacatttatccatttttaagcatgtatttttaaccaattatttgcgacagtcataattaataaagataaaaaacatgcttaattcgccacttcaatgagatattagccgctcattggttgctatttttttcttttagctacgcgaaatagcatttaactagccaaaggaacgagattacatgtagccatgcacgtgactccgtccacagctcctgggac

SEQ ID NO: 110258 - DNA, 309 bp, Zea Mays
agatacggttagacgtaaagggaacctgctgattttataattgaatctcttggtgtgcattactgacgagatttgaggtacagttgttgtaaagtctactagctagagctggcactccttgagtccttgtgcgccgagatggagaggacgctgatcggcacatggatgcggtacatgtactggttgttggttggtagcactaaagcaagagatgtgagctttttgctgtagtcgttgacagggatccactataagcatagtgagtgtggaattaatggatcgatcgtcgcaggggtccatcgagtggat

SEQ ID NO: 110259 - DNA, 308 bp, Zea Mays
caggactggcctacaccaatgatggtcacccaaattcggagttttctaggacttgcaggattttaccatcgttttgtgcgtgattttagctccatagctgcccctttgcacgaactcacaaagaaaggtgtgtcttttgcttgggaccccccacaagaagaggcgttcaacactttgaaagataagttaacccatgctccactcttacaattgcccgactttcataaagtgtttgaacttgaatgtgatgctagtggtattgggttaggtgctgttttgttacaagaaggaaaaccggttgcttattt

SEQ ID NO: 110260 - DNA, 617 bp, Zea Mays
gtgcattacagaccaaggaaaagccgacatcgccgccatcgcctcctcttttttttcttcttctaatcctgactgaacctatgcaccacaactaatagcaggaaggcgctagtaggtaggttgttggtacgattgccgccgaacaaggcgggtaggttgttggtatgatcgccgtcgtaccacgtccttacactacagcgtgggatccgtaaagagatgtggtaacgcgtggtggcggccgacgtacgtgcaagcagattgattagaaagagagaggatggattggttggttgttgttacctttcgacggcacgacgagaatgccgaagcttcgttctgggggggccgggcgctgcacttgttcggtggggcatcgtctgatcgtctgagtttcgctgatcgagcttggcttggcggagctgagaggtgggtgtgggtggccggtcggccgtgggatactgggatgcggcgacaacgagaagatattggttcacctcagggtcagtgctagggccttttataagcctttgatgataatgacccggtgcgctgcaggatgctatgccgcatcgctcgtctaggtctgcttggaatattcgcccccatggtagctaggc

SEQ ID NO: 110261 - DNA, 650 bp, Zea Mays
taacattgcgtaaaccacggagagatgtatccttagctagaggtagtgttataaagtttgtaacctatagtggcagacctgacataggtgttggaggacagcccagaccctaactgtctttgtcgtctccgacaagagattttggccgttacacgatgcctgctgtaaagtagaatgccattgcagttgttgcatcagaaagcagccatttaacgccaccgtaaagttagtgactgttaaatacatcaacacttgtctctcaggtttctgtatctttcatttctttccatgtgtatatggagtttctttattgcacctttttacccgagtgacaattaatacttgcagttacactaaataaatcctgaattccctttaattgttggccttacttggaactacttctgcatatatcggacaactattttgaaccatttcttcaagatgtttttcaatcccagcaattgataggaacatgatttatttgacatattcacgatggatttgtatattggatgtttcaccttttcatctatccaatgtaattcttggacataacattgcacaccggtaccaaattcacacccttgttatgtgagttctgtcaatcatgatgttcacatgtgactgtttggttccattcaatggtt

SEQ ID NO: 110262 - DNA, 408 bp, Zea Mays
gagtttgggggggaagatttgttcctttgattgccacagatgcttcttaccccaaactcacctgtataggttcgaggttaacacctttaagaagggcactatcatgacaaagggaccgcccaggcatctgagtggacttgagattgaggctatgcttaataatttgaaagagaaagaaagtggtgatggatacatcgggtttggaactgagcataactagacccataaatgtgatttatgggaactcccatatgttaagacattgattctgatgcataacattgatgttatgcatcaagaatgtaatgttggtgaaagcattctaagtatttgcatgaatctgggcgacaaaacaaaagacaatataaaggctagaaaagacttagcaaaactttgtaaccgaccaac

SEQ ID NO: 110263 - DNA, 862 bp, Zea Mays
cacatgtatctgctgtagtcatcaaccactaggagaaaataggaggctccccctatacttttaggagtaatttgcccacatagatcagcatggactaactcaagatttttctgtgctctgaaatttgacttttgagggaatgattttctgtgttgtttcccaagaacacacccatcgcaaatctgctctaaccttttcactgtaggcatgccttctaccatgtttttgctgcacagatcatgtaaggctttgaaatttaagtggccatatctagcatgccatctccacgttaattcatcagattttgcagcatgcagacacactggtgaggttaatccaaattttacaatgtatagtctatttctggttcttggagcagctatcagaagtctacattcttgatcataaatacacagacttccattcctcccctcatatttgaaccctttttcctctaactgacccaagctaacaatattgcttttcagttcaggaatgtagtaaacatctgtaagtaccttatgacctttacagcgatcctgaatgacaactgagcccataccttgaattttgacgcaagaaccatcaccaaaccgcactgtgcctcgaacactcggatcaagctgtgtcagcattgatcgagtaccagtcatgtgattgctagctccggagtctagtacccacatcccgtcaggtaccaactctggtgtagtcttctcagtcaggtgaacatgttggcatggtccgtgcacgacgtcgcacgttgccagcatgagagcgccattgtgttcaactccgccaacgaccatgttcacttcaggcatctatggttccttcttcttccctctttttggacgtttgc

SEQ ID NO: 110264 - DNA, 751 bp, Zea Mays
tcggctcctgctgttgaggaagtgcccatgcctgaatttaccaatgctgaccccaatgggtgtgatccatctaacgctgaccccaatgggtgtgctgtctgtgttgctgatgaaaatgaggaggaggaagaagatgagatccctctgacttggaagaacagtcggtgctacgtagccagtggggaaagtagtggagttccttctcctgctctgtctgccctcattggtctacaagaattgtctctggctaactttgatcaaactcttgaagatatggttccagaggatctgttatcagagccggtggatggtgacgcgatggatgtttgtgctgatgtgttcgacgccgggttggggtcatcccgggcagcgtcccgcgcctcatcgaccttggagcgcggtcttgagggtcaggaaactgacttggattgtcctgctcccatggaagtgactgagggaccttcagccttagaggtggctgctgcagagaacttggccctcaaggatggtgttgacactcacccagcccccgagggtgttgccggggatgattctgttcgggtgggaagcgcaagctgcgacccagcccccgagggtattgccggagacgatccggctcgaatgggtagcgcaaactatgacccagcccccgagggtgtccgagcggggtctccctcttgtacttccatggatgttcacgtagggtctcctccacactctggttgcatggtggtagcccaagcctttggtc

SEQ ID NO: 110265 - DNA, 363 bp, Zea Mays
cggtagaagacacagtgagggagatcgcggcatgggtgacaccgcggcaaagtcactgggtcacggtggccgccggtgaggtctccggctggactcagggaacggtgccacgtatgcgctgtttaactccgactctatccatttccgatcgcgcacgaacccggacggcggcggcacggattttggcgcaaagaggtcgccgacggtgagcaagccacgctggcgttctaatcctatccggctactgtaccatggcgaagttcagtttagatgcctgacagagccttttgaggcttagttttctctcaattttgtgtggcgactaagctagcaccctgtaccaaaattatagcctgacaaacc

SEQ ID NO: 110266 - DNA, 486 bp, Zea Mays
ttagccgcaacgcattgggatacctgggcaccggctcagccttctctggcacaactccaccgggagggaacgccgccgccacctctactgggttctgggaggaaaaagagaatgcgtggagcgttgatcttgtgatcaacggctccggttggacgatagtgtgatgagccacggaccgttgatctcgagctgactggtctagattaaacctatgtaccgcttcgtggtagggttgcggtggccgttgatctaaccgtggacgcctcagattggatcgcggtcatttaaaatccaagcccttgatcgctgatccggtggtccagatcgcgtaccccttcatagattaaatcaagccgttgatctctaatcctgcgatcagtgttgcataccgattggattcaaatgatcgatctgatctggcgcatccgttcctaatcggacggctgtggattgcccataccccttcgccgagccagtttcacaaat

SEQ ID NO: 110267 - DNA, 532 bp, Zea Mays
cagtaactgaataagattccaggttcagtgaactcgctgccggtgatctccacgccgcgattcatgccggccgccgcgattcatgccctgtgtgaagtggataactgcgggaggtaaaaagatctcgcgcgggggatgagcttgggcactattactcctcactcgccatacccacttgccggcgacgtggccgagcgaccatcaccgaggtcgacgtcattatagataaccgaacttgccgtgtcattacgcgcacctgcatgactgtctaagattcttaggacaaggacatctgtaggtgggcctaataccttgggaagttccgtcacagatccggagccacaccacctgttgtgggaattaaacttagtacaaacattcatatagcatttgctaataatcaacaccgctctacgcacaacccaaccactaacatgaacaaccactgctccctaccacccgccaacagtagcagcgctgcttgttaattttgtatctttaaaattattaaaatagtgctatcaaacaaaat

SEQ ID NO: 110268 - DNA, 501 bp, Zea Mays
tccgccgaagccgagggcggggtcttttggatggcttgcttacgtccatcatttgccatttcttttgacccctggcatttcccccggtagctgaagccctttcctctcgagctttgttcaaatcccttctcctttgactgcaataggctagtcagatctgaacctaggggacttagcattgcaaatgggaagggttcagtcattaccttcagtatctctaaaacatcgatagaggaatacggagaagtgtcgatagtcttttctggtacatcttgtaccttcatctctgcaggagacatcctgacacacttttgtttgttgggaaccgaatccttcggctccgctagaactttctgcttcttaacaaccctttgatcttctttgatggacaggatggcttgacttttcagaatactcacaaccctctttctctttgctccctggccccttcgtcaagcctgtcgtaatctagatattcaaagtcgagagcatccattaccc

SEQ ID NO: 110269 - DNA, 422 bp, Zea Mays
tggaaatccagcgcgcgtagtagataaggaagatgagggagagagagaaacgtgagggagaaggccagctccaagcggcgggatttttcccaggaagcagagcgagttccataggaagataaatacgacgacaaaatggcagataaggataggagaaagagagtgcgtgtagagaattccagggagcttgacttacctgcttgagagactacgacaaggataaggctcaagagatatgacggtgggatatttagagaatcatttttccatttttacttctttttacaatagtaaaatgcatatattttggagtataaatgagggtttataagatatataaaaggaccaaacaaaataatatcgacaacaatatttgaaccggatttaatttggtgaatacttcggagtcagatgaattttca

SEQ ID NO: 110270 - DNA, 379 bp, Zea Mays
atcatacaagaaggaatatcctagccttttcatgcatctctaattgagaaagatactcaaaaccctagaccccctccttgaggcattagagccccaagattggattagtgggagagctatgtaaattaccaaatcatgacttaaaccttttacaaaagttatagcacatggaaatacctacaagaaatcgtaaggaagttatccaaaaatgtcccacaaaaacctcaaattaatcacacaagtggaaagcactcaagaacaacctctttttctctaagtcaaatttcagtcctcttctaaagacaccctatgttcacttagttgcagacgccaaatccacatgatccaattgacaaaagggcgccaaattacccaaggc

SEQ ID NO: 110271 - DNA, 572 bp, Zea Mays
cccatccgaagtgacaaagggccaagaaattacccctcgatatcgtgatccccaaccacactatgttaattggtgaaggcctagccctgtagaaggaggctagcttgctcgactgcctaagcagaaataatgatgtcgtcacctggttgtcatctgacctagtcggagtaagttggagcattattgagcacatagtgcatatcaacccctccgcccagcctaagaaacaacgactccgcaaaatgttagatgagaagatgaaggcaaccaaggccgatgttcagcggctcttagatgcaaaattcattgaaccaatcgactaccccacttgacttgcaaatgttgtcatggtcaaaaataaaaaatggcaaatggagcatgtgcatcgacttcacaagctcaaacaaagcctgccctaaagacgggttctcgcttccccccatcgacaaaattgtcggttctacagtaggttgccaggtcatgtccctccttaactattttctggttaccacaaaatatttctcagcgaataggacaaggcgaacgccagtttcatcacccccttcgacact

SEQ ID NO: 110272 - DNA, 395 bp, Zea Mays
cagaaatcaaacagttggccgaagagccatcaacagaaaagatagaaaaagcaaagactgaagaagcaaaaacattagaagttttaagtccttcagcaaaaattgagtcagaaaaaagccagaagggtccaatagtgaccccgaaaagaaaaaggatggttaatgtgttagatgttttgaagacaattaaatcttcgagcataactcaaagaaaactattggaacttctgaagtatctactgaagcctttgttgctgaaacttcgaagcaacaacttgaagctgaagctgggccttcagagccctccaaggaacaacctttggaaaccgaagaaacaaaggttacaaaggcagcattggaagccgaaaaaataaaaatgtcagagccaatttcgg

SEQ ID NO: 110273 - DNA, 585 bp, Zea Mays
ttgctagtatttgacgtgatattgtgagtggccttcttgccacttctacgcagattttgcttaatggggtgcctggtgatttcatctcccataggagagggctgcgacaaggggatcctctctccactatgcttttcattcttgtcatggatatgttcaatcttattattgtgagagcttctgaagcttggttgttacagacgctatcctctcattctattcaacattgggtgtcgctttatgtggacgatgtggtgctttttctcagacctacaacagtggaccttgatctcacagtgagggttctcaggctttttggagaagcttctggtcttcagactaatatccagaagagtagtgttgctccctatcaattgtactcattatggtttggtccttgtccatgaccatctgccttgccgactggatgaattcccagtcaaatatttgggactgcccctatccctgaagaagctcactaagtcacagctgcagcccctcatcgaccgattggttgaccttcctaaatggaaggctgatcttatgactagggccgagcgggctgtcctcatgcggtctgtgtta

SEQ ID NO: 110274 - DNA, 419 bp, Zea Mays
caggtattactgtcaggcttaccctagtttagttaggtttttcatcctataactccagataattggcgtacaaaaaaaatttccgctgtcctagaacccttgcttagcctttgcaattttgttttcaatttggctttgttcagttcgtgtccatggtcgagtcgtattgctggtttttggtgtatattcgtcgtaggtcaactgcaccttcgccgctatcccatccaccattacccagatcacaagtcgatccaccccattaatcgacttgtcctcactagccgttgccgcgccagccctagatagattgcaggtagggaagttttgccctaaccgcaccgccttctagtcgtgcctcccaaaaacataacttgaggtaccttccttaaaccgggcataacttttcgctcggttgttca

SEQ ID NO: 110275 - DNA, 375 bp, Zea Mays
ggaggaagaagggggtggtggctagggttcccagctccctgagggaagccggcaacaaataagttgcttctgcttaattccaataggtatgtgtacgaagtacttatagtcccttaaggggatctaatctaatcctattcctttatctgataaggcaatcttatccatataactaatctgaagatctgatctatagatccaatctaatctgaaatactaatccaatctaatctggaatactaatctgatccggagtactattgactaggcttatccgcttatggctatcgtctctgtactccattcataacagcactactaactggcaactgctgacctgagcatagaatgtgaataaacataacctcctttttc

SEQ ID NO: 110276 - DNA, 287 bp, Zea Mays
tgaaggatgttgatgatgcttatgatttttataagagatatgcatttgaagttgggtttccgttgaagaaatattgagagaaaacctactctaagtggttgaattgttcgcacgaaggaaaatgtacatctagaacaaatgagacgcctagaaagtagaataagttcagtgcatgaacacagtgcaaggctggaataaaactaagaaaggtctatgatgatgataagaagaaagtgatatatgtacaaattgtattggtgaacctagagcataatcatgagttcatt

SEQ ID NO: 110277 - DNA, 318 bp, Zea Mays
ggtgacgttgccacagtgcagtcgcaacatcctgaggttggcagggtaacttggctcatggtggggcattcatttagttgtgattgtgacaagtgactggcgggtgctcaggcgggtgcacgaggtcttgccggagtggctttctgcactgaggtatcacttcaaggtctgcaacctgacactttaatatagcagcttggtgtgcacgacaaggctgtatcagggcatagggtgtaggtggggcttgctaggatgcacaaaagccaaggcggctagaggcaggcttacgatttctttacgcatgtgttttgccacagg

SEQ ID NO: 110278 - DNA, 761 bp, Zea Mays
gatcaacagtccgcctcccatcttgtccaacgccatcttcgcctccgccctctgtgagacctcttccttagcatcgccttatccctctcctcggttagtgtcatgcgggtgccgaatggtgcgtcgtttaatcacgaattgctcgccagggtttgaacctccccgtctattcgccgcgtcgtgggtggcgcacatcaccgtacgattcccgtaggtcctgcatcgttctctgcgttaggactctgagttcgaggccatccgtcaccataatgccttgcgccggtgaactcgccaccgcatggagctcagcgccgccatgctctgccgatgtagaagggagatggccgggtatcgttcgatccacagcggacaaatctgaatagatctaggaggtgatggtgttttgccgtcggtctgaaattggcggatgggatcggaggttgcataccccttcccagaatcccctaggaccataggatctcaatcgtgtggctctggtgcaacacatgttttgcagtcatggtggttttataaaagagaccctgagaaccctgataatcaacccactgtcccaaagcagttaggaatcctttaaagtaggtcctatccttttgcgccttatccactgtgttctcgggaaatattgcccgcactcgaacctgtttgtgaatttaataaaatggttatataaaaggatttctggtaggaaaataatttcagaaacttaaataattcacatcttaaccattttaactctaaat

SEQ ID NO: 110279 - DNA, 774 bp, Zea Mays
cttcacaacccgaggtccacgacggtgagcggcgccagaccgaactccgttgaacctgtactggctaagctatgcaacggctgaccctcccctttgctagacaccgaattcaacccttcgtgactaattcccctcacttaattgctgaattcgagttctacatcacccggttcatggtgacaacgtgaggaatggaccgaccgaggttttcccgatgattaaatggattctagctcaattggatgggtcagagagtatcaggagcatccaaggatactaaaacgaggaaccagagggcatggacggacctgagacacgttggccatggcggggtctttttcacggtggcggaaaccgatttgggggaactttggaattagcgtgctctggtgggcaatcggaggcacgagttgctggattaggtgcttgactacctaatgcagccaagggtgtgctcaatttataacatgcttgagcggtggctagtgaattggacagagacgcgcggtggccggaggaggggcactggcacacacgattggtggccataaccgtggcaacctcaccggcgatcactggataagttagtatgagtcacgacagcgtggttagagtgccgaggcatgtggcacaagaccgcgaggtgtctaactccggcgagggtagattcaatgcgaccggggtagagtggacacggcggccggacggaatagtgcctcaagctcatccgtggtggagatcttttcactgcgagatgttatccaggtaccggtg

SEQ ID NO: 110280 - DNA, 919 bp, Zea Mays
tgactgaagagctgggacaacaacagcctgaagagctagaggaggagcaaacagtagtggagggagctgaacaccggtatgctggagaatatgagccttaaacgcccggtgctctgccatgtctgctaggagctactgctgtagggtgtcctggtggtcctgaatggtctgaaacatcaatagcatcagctcagacaactgatgctggatagcggcctgcctggcctgctctgctgcctgacgggcatgctctatggccatatgagcctactgctgagtaagcgattgaagaatagcagccaaggcaggattaatagctggaggggtagcaggagcagcactagagctaccagcctcgtgatcatgggaacaaggtggcacaggaggcggtggtggaatccctaggtcctcatcatcatcagaagaaatatctacagcgacaccctgagtcttgaactgtctgatggtctcatcctcaaccctgatatctgatactagagctggcgctggacctatgtccttaggagctaggcgatagaagccgaacagaagttgagaggcctcgagggtagcctggaactgaggaggctggattagctacacaaatatgtgacagaggtagtgggcatacggtagctgacagcgagcacagagaccatccaacattgtatcctcaacctcacaaatcaaaaagtcgacaacatcaaactccgagtgtgaaatcaaggcaccaaatagccagagctgaatatgcgtggtggcctccctatatcccatcatgggtagcaaagtctgcctcatcagctcatagaggaacttcgctgctggagtgaagtcggtaggagaacgtcgcgacccatctatgaatggaggtctgaacagtgcagcgacgtgagctatagcaggagcaaatccgtcg

SEQ ID NO: 110281 - DNA, 793 bp, Zea Mays
atcagacctcatgcatgtggctgagttggtttaaggcactagtttagttttaagtgcatgaggggtatggccttatcttttgtaccagcattaagtaacttactctaggttagatcgtaatagattagataaaatctagattaggtcggatatgactagattagattagtttaggttaggtagatctactagggtaggatatgtgttagaatcttttgagatgggatggattatatggggtaggtagatcagaatctctgtcagattaaacagagggattatgcaactatcgggtggttaaggtagttgcataaggccgagttggtcggttactcttaatttagtgccgagtgaatcacgttagaacaggtggatagggtctaatccatgttacaagtattaactaatctgtttgagtgggtcacatcgggttagatcagattagatggaaactagattagtttagcataactagatttgactaaataagacctaattaattttggatcagtttaggttgaatggggtctaggcatgactagattaatctagataggatcttcttattttattttagaatagattatgtcagtcacaccattacgagataagcaaggtggtggagataagtatgcttattaggacaagatgagtatctaagaataaaatagaatcttttcgagataaaatgaatctattaaggtaagaaaaaaatcttttaagattagataggtctattaagatatgagagaatcttttaagataagatgattctgttacgataagaaggaat

SEQ ID NO: 110282 - DNA, 547 bp, Zea Mays
attagcagcgttaataacccttccttctgctctacgttcaaagacttcatttttatttgaaataagaataatagagatgagggtagcggctcttactgtggctgaatcacgggcaacattaaaaaggaaagcaaagacgtacgcacatgtatactaaaaccctccaaacaataggtctccaatccagcgagtagatgaacaagtcgaccaataggtaggaaggaaggagcaagccccccttttgagaggaatggctcatccccttagctttaggaaagagcgagccattccttgccgaggcggtatgagttagccattcatctgttggatgtatggagccaacttagttggggccaacgccagcaacctaagaagaagaaattagagacatatgcattttgcaaatacatacaaatataatatacttggctcccaaatcgaaggcagcagagtaagcaattgttagaaaaccaagataggtcaattgatccatcttaagtaagcattgtctatgtgaactagaccgcctagtaaggagatgcttatt

SEQ ID NO: 110283 - DNA, 468 bp, Zea Mays
gggaaatatcaccatataactagcttttgatgaagcaaatgatgataactgcttggcaagaatgaaacaatactggtatccgtctaggatccatcttcaacaacagatattactgctctcatacgaagaaatcatgaggagtatagaggatacaacaggactctacaagatcttcatatttctatcacaaattatcaccacttacaatctcgtggtcaagacttatggctcttctggtgccaaggactaaggacatattaatgcccaatttagcttcaagctttgtggtgatgtgggatttcatggctatttttctactcttcttatttctggtagatcagatatagattatggtaagcatgccaaggggtggaatacaatgtaattctgctacataaaccccagatatatgtctattcagaatcgatctttaccatttggtttatagtatacaccataccagtcaaa

SEQ ID NO: 110284 - DNA, 375 bp, Zea Mays
gggtggtatgtactggcaagaaatgagttgtcttggttaatctatccacaataacccaaatagaatcatgatgtcgggaagtgctgggcaatcccacaataaaatccatgcaaatatcctcccatttccaagatggtatgggaaggggctgtaaggtacccgctaccttcaaatgactggccttgactctttggcaagtgtcacattcagatatatacatagcaattttcctcttcatcctggtccaccaatacaaagatctgagatcatgatacatcttgttactaccggggtgcatggagaatttggaaaggtgagcttcgtccaatattttctttctgagttcgagattcttaggaacaaccaatcggtctt

SEQ ID NO: 110285 - DNA, 641 bp, Zea Mays
caacaaaccaacaaggaacgggccagttgctcgctgtctcccatggttgaggggatttgaggcttcctttctttttctagggtaactaattgattagttgatttaaaaaatctacaaaatcaatggttcagatttatttgagttattacctcctaataaggaaaaggtgtactgcagcattgccctacaccaaaacttagaaatgacaatttaacattactgaggtgcaggtgttctttggacttttggagatggcttatggtgacaataaaccacagagatacttaagtaaataagaagcaccgaaattacatatcttcaaccgatagcactaagtttgatactgcaaattagcaaaaggatgtgtgtactagatactgatcataaactctcatgtttcattcaacatgcagcagtgcaatccatacatgattatatgcaaaaacaaaatgtatagaaagatgaatgatttagtagtgagagctttcaacatacccagatatcctgttggcggcgctattggccatgctgatatccagggactgtaaattgggacaggaaaatgcaatacatgccagcgttgtggcatcaacatcactgaaaaatgtagcgaaaagaacatctggtcagaacattaagtc

SEQ ID NO: 110286 - DNA, 301 bp, Zea Mays
ccggggtagtccggttacgaagtccatgcctatttcttcccacttccattcaggtatcgggaggggttgtaataggcctgcaggtttttggtgctcggccttcgttcgttggcagatgtcacaccgggccacatactgagctatttctttcttcatccctctccaccagtatctgtttttgaggtctaggtacatcttggtagtccctgggtggatggagtaggctgagttgtgagcttcttcgagcaggacttctcgggcctccccttttggtacacacagacgatttttgaaccaaagg

SEQ ID NO: 110287 - DNA, 398 bp, Zea Mays
tgtaaatggcatggctcctttcttcgtaacaccaatgattgtgttgtcttccgtcggcaaatacaatcgactataaacgaaggccgattgagatttcaaaaggaggtgaagattgacaggccgcctgtccctatcaccacattagagccgacgagcaaaaagtcatagttcggccatgtgcgaccaataagagaaaggataaaaatatcatcactggtgatacacgtacgccaaatatatcacgtagagtggttactcagaaggctcctgacaaaataaagaccggaggcactggggggcaagcacgatcagacacccaatcacagtcacatgtcctgcatacatcggatggttcgagtactaaggccggatagtccgagacatgcgcggatagtacg

SEQ ID NO: 110288 - DNA, 303 bp, Zea Mays
cagaattgaataccgatggtacctcccgactcactggtggagccagcacctctcgacccacaggaggggagccggtgaagttggcacctcccaatccgtgggaaggggagccggtggagtcagcgttggagcaacgtatgttgatgtcgatgcttcgagtatgaagctaacgcacgacaggtccctcgcaagggagtccgcattgtcagtctgcctagaagcaccggttgggcgtggagcgctgcccatagcacagttgcggtcgttccatctctatctcctcccgcgagaaggacggcgacg

SEQ ID NO: 110289 - DNA, 300 bp, Zea Mays
ctaacattttatcgaactgcatcaggggcaatgtagaaatctgcattagggatagggatttcgtcagagccttcatcagtagatggcttttggttcaaacaaccatatttggcaggcgtatggtgctctattcctggattatcaccgttacttcatctcccagttccttcttgtgttgcttgctatttctccttgtgtatactatgcgtactccaggtacgggccacgactttagcttttcttttaacccaacctatttattgctcttctgcctctccttttcttcttaatcaactcttt

SEQ ID NO: 110290 - DNA, 651 bp, Zea Mays
atttgatatgagatatatatgtaattagtctacatgtacactagtttgagcaacttgggccatggtgatgaaatagcttaaacatgttgttatgctcaactagagtgatgaaggagctcattacgtatgaaacatgatatgaaatcatgtggctaggtggagaaggtaaaaagacttggactggttgtgaataaccaggttgctagtgagaagggaaagtcaagaaacttgggtgcaacgaaacaacatggtagtgaagctagatcaagaacttgttgccgatggactaagtgcaatagcgaaggccaagcgaagttgtgattgatggaccaataaggtcacctgatgacatagagtggatcatatcatcaatgaagacatttgttgattacaagtggcttgatggaaccctaaaccagattgcttgtgttcaatagaatctgaagtgtgaaagtgattgagctttcgtagttcagtgtattctacgagttttctttagtggcactaggtggaattgtgcaagccaggttgtttgttactcttataggttgcctccttctacatggcttggctacctgtggtctctgtcgtgaagcccacataaaggttgtctatgattctggagaaggctttgtgaagggcatcatgctt

SEQ ID NO: 110291 - DNA, 850 bp, Zea Mays
cactgcagaaattacgagagttaaaaaaatgcgcttggaggttcaaccaaaaatgcacagaccggttcccagttttagccggggtgatcgcttggaggttgaaccaaaaatgcacagaccaaaaatgcaccagttcatctgtttgctgttcaaccaaaaatgcacagaccaaaaaatgcacagaccggttcaaccagatcactgctaacacagcttgatcagggagttcggggttcagtcagttttggtgatggctctcgggtgaaaatccaaggtatgggttctgtagtgatgcaagatcacaactctggtcataaggtactttactgatgcttactatattcctgagatgaaaagtaacatagtaagtttgggacaattagaggaaaaaggttttacttatgaagggggcaatgggagactgtgtgtatgatcaataacacaaactgcttatttctgctcctagaacagcgaataggttgtatattgcaaaatttggtcctagactgtcagtttatttctgcttatttctgctcctagactgtcagtttatttgcaaaatctgaagaaaagtcttggcaatggcatgcaagatatggacatctaaatttcagggctctgaatgatttaggcagtaaaaacatggttgaaggcatcccaagtatcaagaaggtagagcaggtgtgtgatggttgtgttctggggaaacaacatagaaaaccattcccacaggtgtcgagttttagagcccaaacaggattagaactggtccatgctgacttatgtggaaaaattactccaagaactataggggtgcattctagcaaccaacgcgaactgaagtttgaga

SEQ ID NO: 110292 - DNA, 950 bp, Zea Mays
ttccaaactccctttctaaggtgtccccaaattccctgagaagatcgtcaaggctagctagggacatctcctcaacatctgtcaagttttctatcctggagggaggcagtgttggcggggcttcctcttttcggtcagtgtggcatccttggctcttggtccgctttcggatcttcttggtgggggcgagcttctttaactttttagcgtagtccatcttcagagtccggtatgcctcacgagtgttggcctcttcgccttatgctatttcgagactttcttggagggacgccttttcttcttttaattccttgatttgttgctctaggctttccacccgagaatttaggtgggtgcagtgggagaaaaggtcatcatagtggttgtcaagggtgggagatatccggccatgtagactatggtggggtcatcctcattaggatctctccctaacaaggcctgaagtcttttcctccaggtaggggtatttttgttgctgggtgggaagtagcaaaggggtgtctcaaagacctccctgccatagttttggcaaagctggcggagggctctttgggcagcattttggcaagtgtctgggaagcagtgtccagtggcagtgacttggaagggagggtaatttgggtagtttcggctttctcctaggtagactgccatagagcatttgtcaattctgttctcgcggtattctttccagacatactccggcttcttgcggatccccatgcaaagcgcacaactccgtagaatgtgagggaatccttccacctcagagcagtaggatgttctaatgacaaaggggccttccatctggtagcaagagaagaagggtttgttaatatcgggggaaaggagagaagattcttttagaggttaagaggtattttcttttaaggaaaaaacttttaaggtcagggctacgatctacggcc

SEQ ID NO: 110293 - DNA, 330 bp, Zea Mays
tgctaaaatcttggttaatattttcatgaaatttgttgatgaggctgatcggtctaaacatgccaatcctgtcaacaccctcccatttttgtaaaagagtgatatttgcctcattaacgaggtgcaggtttttgcatctatggtggtagaaatcatgaattgcactggatagatcatctttaatcagctcaaaacagcacttatagaaaatccctatgaaaccatctagacccgacgcctttttagagtgcatttccataaccacatttttaatctcatcctcgttgatcataacatccagatctgataactcaaaaagactatagccaa

SEQ ID NO: 110294 - DNA, 862 bp, Zea Mays
tagttcagattaaaattaaattacacgagttgttccatcaaaatttattgtcgcccgtgccaaaaaaataataattgcgctctgttacaggtttacgctcgtgacccgagttataaaaattcgagggctttctaattgtagcgtggtgttagattttcgagttcgtttcgaatttggatcggatgcagcgatagtaagtcacgtagaataaaagttaaatagatgccagcacactgagtattccattctgagagtacggacttggattaatttttagacatagatcgaatatcgagaaatgggattcagacacaaattggatagagatcaaacacatgatgaataccgagtaataggatgtaaacacaaatgggatctccgccttcgaagaatcgaagtcgaatacgaaaggataacttgccgataagttcgataaatttgttcgggcaagaattgtaagactagattgactttctgaattgcattcgtttcaagaaataaaagttttaataggccccaaatttggcctttctcgagattgaataactccgaatttggtgaaactttatgaatagttttgataaatagagatagacgcgatcaagaaataaaaaaaatctagtgaggatctgagctaaagtccaatctcacagcattacacgaaataaacacccggggtgtcacacgaagttagtccgtagaggactcatcaacattctcttgaaatcttcgcgatgctcagagtctacttctgcgtagaaccactcttttgtccaatcactatgccacttttgtaacgggaccatccaatctataaaagcacaaatatcaaaaacatctgcttgcatagttgtttaaacat

SEQ ID NO: 110295 - DNA, 681 bp, Zea Mays
ttgtttttagataagtttttgcaggatcacctattcaccaccctctaggtgctctcaaattggcacttaatcgttttcttgcaatccaacccagtcaaagaggatgtaaggtattacgctccaacaacctgaatctatctaaaaccctagtctccctcgcattgctcatgtgtgttacccatattaggaaattggcatttacgtgtttgacctagggtgctaatataagtttattggataatttggtgtcttacttgcattaggaaattagcccctacgcatttgattatagggctgcaatttattttccatgtaatattctatttgagcaaagaaatagatcttggaaaagtgtcaagttttgtaggatcaaagcaaaaccatattcttgtgtgttaaaagtttgtgttttcttaacttcttatagccaagtacttctacggcgaagttcaaagggtcctaacacaaaataacacagaccgaccaccagacgccatgaaacaggctcagagatcaagactagtctacaggtaggaagacccgatcgatgattggcgcccaaagcgcactggaaccactgcatgcatgcgatcacgaatgaatccacgttccaaccgccgcatgcagcagatagcgcggaggctcccatctgtccatctctggatcacaccagcgcagtcc

SEQ ID NO: 110296 - DNA, 527 bp, Zea Mays
ccgtgatcaatattgggctcggagccctaaagtcccgaggcggttcgtctgaaccctattgagggccgagccttcaaacctctgaatagtatctttccttgcctcttttcctcctgaagcgatatgccaaggtagaatatgacttttttcgatttgctgctctttttccgagggggtttcctgaggcagaagacacttctttccagttcgattgtcgagaggataaagggtagtgaagtcgagggggagggcataccttttgaggtggaatgtggaacaacactcggcgtgttattcctcggaagggacactgtcatttaatgcaacgagacatcctgtctgtcagccgaccgttcacgacacgcgtgcccacgggattcgaaacagccatcgtccagccgttttcgaatcacaccttggtggctccgtccgtcctataaagctgaccaagagggagggctttggaccattacctttgcagccttaatccttttccttcaaacaccgtttccaccttcttacaaaag

SEQ ID NO: 110297 - DNA, 473 bp, Zea Mays
agggattatgccttggtgccatgaaatattttgagataattaggcccaaagatgggctgtcagactgtcttaggtctgaaatttaggctgacagtgtgattgggcagtctttggacttagattcgaccataatccagtcagtgtttggctatggttactatagtaagtttgtagctggatcattaggctacaattttgctgcagagcattggtcttgttgccatggagatttgggaagaaattcgccctaaacattgactgtcaggctgactgaagaacaaacccatggtacaataaactgaaacagatcgcagattcatcccccttcaccgtcggtgcccgtcgcgccgcaattcacgccggtcgctgtgattcgtgcgccgtgacttgcggataactgtggtcgagtaaagatcttggcacctggatcgactcgggctcggtcacagctaagctcgccgtacccacttgct

SEQ ID NO: 110298 - DNA, 685 bp, Zea Mays
tttcgaatagaacttgcagactgcacgattcaccttgttgcaattcgagccagttgtctgatatgtttacacagatatagaagattgttgatttagacatgtatatacacacacgtagaagagatagaaatatctgaatatataattgcttgcagtaacaggtagttcactctacaaatataatataatagcatgaggaatctgaaaaaatgtgcatcgtgaagacatgtgcatgcaagaaatagtaacagcttttattccaacaaagtctaatgagtggaaatgtgcataccttgttcacaccatagatcttattagctctgttcttcctctccttaatttgattgtgttttaatgagtggaactgtgcataccttgttcacaccacagatcttattagccctgttcttcctctccttaatctgattatgtgactccacatcggtagcaagaccattctgcaaaactctaaacacaaagtcctatcaaaataatcagagcagacatatagtgttgttttaatcatagaatctacattacaatgtaatggatttctaaaatatttttttatggtaagggagcgtacaaatgaacttgcgacagctaagcatgaagatgagacatgtcttattcctggaaccagcaagatcttataggccaggtgcgtccatcaccaaccaataag

SEQ ID NO: 110299 - DNA, 403 bp, Zea Mays
ttgcgcctgaagcttaaatgtcaagaaagagccttaactttttgagaatgatgtgagttaataataggaaactagctagtgagtgccctttgttttcacgcacaatggccgccacagacgacgattaaactagtgacctgccgaggagaaaggggacgatggcatggatgatttgacaaggttaggaggtagtgcatccctatctgtccgggctaatgctacgaaagcagccaaacaatgtggttgtgacctcttggaagcctgtggatgcagtaagctatcacaggaaaagagaatgctatgtaccgtagctcatttctagtctgtacgaacgattaatattagtctgtagggacgattaatagtcctatttgcttcaagttggctcatatagacattaaag

SEQ ID NO: 110300 - DNA, 509 bp, Zea Mays
ggaccgtccggcctagagcacggattgcactgcacgacacagagaggagttgttcctgtcgtagggttgcagaacgtccaactctagccacagactgttcgcgccgatgcagagagcaccgccaggcgatacaccacgagagtttggtcccaaatcagagccaacacactttttggcgactctggtggggacgaaagattggatccatcagatcatatctattagatcagatctattagatcgaccacgatggtcgatcccaaagaatgcaccaatgtctcccgagacaacatccttaggctgacttttgagccgagtttatcgactgacgaccagcaggaatttaaagactacatgaggaagcagggcgaggagttcaagcatcgacaagattcggagcgcaaggagatggagagttgctacctcttgcacttcatggtaggtcaccaccaaaaggacgtccaggagaagaggggtagagctcgcttccctggtggccttgcaatagc

SEQ ID NO: 110301 - DNA, 470 bp, Zea Mays
gaaaaatctagcaaggatgaaaataaataaagtgtttgagagatatggtcggtgggatcaatatccccttatttatagagctattatatattttcaatttagttctagataattagagccgaaccacttaacctcaaggacgttatagtccaacacaagatctatatagatatgacagtcacgagtacttcacagctttgctttgtatcgccttaagctttgagctgacaccgtctcaagttcctactagaaatccacctagattttgaggcccaaacctagaaatcgttcgctcctctagcttctccacttgacttagatcaatcgttgttgtcttgattcgatgaacacaatctactcatccatgtcctcttgtacttgtcaatgatctcagctgggctgccggtgtgagtcatctatagtcgctctttcagcttcttcggtccctcagtccaagttcaaccgcttcc

SEQ ID NO: 110302 - DNA, 487 bp, Zea Mays
ttgacgaccacaaagtcatagtagtcacaggatttccaataggggacattctccacaacaaagaagctattggaagggtagccaagtgggcatgtgagctgggagctcacgacatagagttccgacctcgcacgacaataaagattcaagcactggttgactttgtatcagactggactgagcatcaggtcccaaacaacccagagactaccaaagtatggagaacgtactttgacggctcgctgaagttgcagggatcctcttcattgctcctagaggtgaacaactcaagtatgcacctcagctattatttctagcatcaaataatgtggcagaatatgaagcagtgatccacggattgaacatcgtcgtatcactaagcatcaagaagctgatggtatatggagattcactagtggtcataagccagacaaatgaaggttgggattgctcgactggttccatgggaaagtactgtgcagccgtc

SEQ ID NO: 110303 - DNA, 409 bp, Zea Mays
agcgcctatcggcattgaaatagtgctcggggacctctgtgggagcagagcaacaaccatggtgccaccgcgtggaccacgcgccgccgctctggtcaccgtgaggggaaaaggtatccaccaggcgtcagatttcaatcggagggttgagaatataagccgcataccgtttcgccttggttgaagcgtgaccgttgatctatcaccggtcggatccaagtcgttctctactatttaagatgaggaccgttgatcgtggagcggacgctccagattagaagagagaataccctttcgcgtgtttaatcgggcccattggaccgagatcggacggctccatagcgcccatacccctttcagccgttcacttttgcataagagccctccgaaaattaactaatcaacccgc

SEQ ID NO: 110304 - DNA, 497 bp, Zea Mays
actttataaaacttgttctcattactaaggtctcgaacttagctatagcaactttagtccaaaaccacttgcattaatcacaaatgagctccaaagtagacaccattcacagatttcaggtttcagccactgaaccttttccattacttgctctaggacttttaatctcgggacgagattcttttatgggggggaaggatttaacacccctggtgttactaccactaaaacttgagcataacatcataagcattgccatatcatgtgtttgttacacttagaatgcattcactaggaaaaaagttcaaacaagttgtgttgatgtgacatttcatgggtgaaaccctaggatacagtacttaaccctagactgggcttaaaagagtaaccaaagtctaactaagagaaaacttcaaaacttagttgtaataatcataaaatatcaccatggatggacttaagtagcatccaaaccctagaagtaccaaaaaccctaa

SEQ ID NO: 110305 - DNA, 1027 bp, Zea Mays
atcgcagccagagtagggtcaacgacaggaggggcagcaggggtagcactggaactccctgcctcgtgatcatgtgagcgtagaggcacaggaggcggtggcaggatcccaaaatcatcatcatcatcatcgtcagggacagttgtgccctgggtctcgaactggtggaatgccgcatcctcatcctatgtgcctagcactggatccgatactggcactgggtcctcaggggctagacgataggattcaaacaggaggcgtgaggcctcgagggtgccttggaactaaggcgaccggatcagctacacgaagatgtgacataggtaatgtgcatacggcagctgtcggcgagcacgaagaccatccaacacggtgtcctcaatctcacagataagaaaatcaactacgtcaaactctgagtgagagattaaggcaccaaggagctagagatgaatgtgaatggtggcctctctataacccatccggggcagtagtgtccgtctcatgatctgatagagatactttgctgctggagtgaaatctgttagagagggtcgcgacccatctgtgaagggcggtctgaacagggctgcgacatgagcagtggctggaacgactccgctgtgagggtgtcgaggaggatcagaagtaccatagcacaggctgtgaaggcgagtcgatgactcgggaaatccaaacagctggcgaatctggctagcatgaatagtgacatcctctcgctcaaaacggaacctcatccactggtggtcggggtctatccacaccgaagcataaaacactcggacccactcctcaacatatctgccactcgtagtcagtagagtgagaagtccaggcagataggagaggtgcacctcggaatccacaccggctgctagcagaaaagtagggagatccaatagttggtgcgctcgtagagctatctgtgctgacaactgagctcgaaagaatgattcatgtattctggtgctgaacaaatctgtcgttgcagggtccctctgagcag

SEQ ID NO: 110306 - DNA, 423 bp, Zea Mays
cgatgacccaaatggaatcgtggtgtcgggatgtgttgggtaaacccacaataaaatccatgctgagatcctcccatttccaagatggtatgggaaggggctgtaaggtacccgctaccttcaaatgactagccttgactctttggcaagtgtcgcattcagatatatacttagcaatttccctcttcatcctagtccaccagtacaaagatctgagatcatgatacatcttgttactgccggggtgcatggagaatttggaaaggtgagcttcatccaatattttctttctaagttcgggattcttaggaacaaccaatcggtcttcaaaccatagaactcccttgttgtcctgacgaaagcatttgtacttatccaccttctgttcgagcatttccttaatgatttgaacacccttgtcac

SEQ ID NO: 110307 - DNA, 878 bp, Zea Mays
tgacttcatttaacgatcggtaatcaatacacatcctcatacttccatctttcttagagacgaaaaggactggtgctccccaaggggatgagctgggacgaatgtaccctttttgttgaagatctgcgatgtggagcttcaattctgctaactcggtaggagccatgcggtatggtctctttgcaatgggtgtcgttccaggaatcagatctatgtagaattccacttctctttctggtggcattcctggcaactcttccgggaagacatccatgaattcttctaccactgatatgctttctgctgctaaattaaacatcactggatcattggcggacgtctgagcttggcaagagactgactttccttggtggtctgtgagaaggactgtcttgtttgcgcaactgatgatacctttgtgcttggtcaactaatccattcctaagatcacatcaatcccttgggatggaaagacggttaagtctgccaagaacactacctcacttaaaatgattctgacttgggagcatttgtgctggcatagaaggtctgaccctggggttcgggtgaccaagggaatctctagaggggtagagcgaatgccatgcttttccacaaaactagtggctataaaagaatatgatgctcctgaatcgaaaagtacagtagcgggagtaaattcaacaaggaactcaccgagcactactcccagagcttgctgagcctcctgagcatcgacgtgatttactcgtgcccttccttgatactgggtcttgttctgttggctgatggaggagggcaccttgggagcggatgctgaggtattcttggggccattcaccgagttggagtaggcaggtcctgatggcttcagctag

SEQ ID NO: 110308 - DNA, 555 bp, Zea Mays
cggtgaaaatatcgggggagggggatggatgtggtctctggcgcgagctcatccgcttcagccagttgctcccgtggtcggccgggacgccatcaccggagtttgatgttcctcgcggccacgccacgtaactgagggtgttaccacgtagcgtggagtcgtggcgtgaagccagttactaccttaagccattgctccactacgcgccacggtgaacacgctccagcgaagatcttttctgtcaccaccgtgtgcacttccgtcccaaattcgcgaagcaagaaatccatccctttaaattgaggacactccctgcttcgcctcgctgttacgcgcacagcccacccctcactgccccagttcattcaccacagcccccagtcactggtttttcccgagaaaggtcagtagcgccgccgtgtggagttccaccgtggtcagtcctgtctgaggtaatcccagcccaactactatctgttctagcttccttttggtgtcgtggtgctcactggcttggaaatttgaactctgctacagcagggcgtcgagaacgtt

SEQ ID NO: 110309 - DNA, 593 bp, Zea Mays
acccttgcgaccaagcaagaacacctcccactcatatctttgccttatgcttcatccaaattaagataaggagagatctaatgtgtatgcattgagtgattgcatcttatggcactaagtgattgtttgggctatggttctcttgttgctcttagtggttgtcgccacctaaatggcttggataaactagtggtcattgaggaaggttggttattgctctttgcctctaaccggttcatattgtgagaggttttgatcccacctcatggagtgccaagggaaactctagtggattactcatggctagttggaatgcaccatttgagtggttctcatggtgcccttgtgtgaatcatctaggccccttggtgatgttttggtaattaatgacaactgcttgtgggctaacgattcttggagaaataagaatgcagggttggaccacatagaacaggaaatcttggagattcataagcattggttgtggatcaagtgaaggcaaaggtataacacatgtttcgtttttgccggtcttgaggagtttagagaagatacttgaccggattagtaggctagatagtcgtactattaag

SEQ ID NO: 110310 - DNA, 599 bp, Zea Mays
agatgaaatctgccctgtttcttcaaatgagcatgattaaccatgcagtccatgctatcggactttttgcacgatcatttgatggctacttaatagatcgtcttagatctcttggaacgacttcttttgttatatctcaatcggcctgtttctgctgctccgttatatgcatagtttccttctgcatcttttcattatataaatagcggtttagatatttcttgctgattatcaatctcaagtaggcttgtaatacttttgtttgttatgcccgcagccacatatcatgatgtcaaattaaaagatgtgttctgctaaattttctgatgtttgtgctcgttgtcactgtcccagtcttattgtaataatgttgtgatgttttggacattagcaagctgcaaattgaaatatttaagtcttttgtaatttgtgtgtgtactggcattgtactagttactatatatagagcggggagcaatcctcgtcgatcagcccatctcgtggctattcttatgggtcacaggatcttcatcgaacggacacggagcggtcttcccacgtataattcctgtattttctgaatagtttgagtggcaatt

SEQ ID NO: 110311 - DNA, 327 bp, Zea Mays
taatgtcactcattatttcttttaatgtgtcatacttatacccgagaattatccattaggaaatcaccttgggacaatcttcatgttagttaggtgtagggcccatgtcccggtgttgtacgacctccggtgggcccataacatccttcagccctaaaacaaacctaggccgatgtggcacgacatgacatcagactatccgcattggattcttccccactaaaccatttcatgggtgttgaccagacaacgtgcccatccaaggttgggattcagcaccaaaccgaaattcagcgtccatgagccccttccatcaccgcaaaacca

SEQ ID NO: 110312 - DNA, 531 bp, Zea Mays
ccagatacgctggagcttgtactcgcgtggaatgtggtggattattcgagcccctgaagtcacagcatagcacaaccttcgtaaacaatgttgtttaactctatattttatttgattgttttgtgtggcatcatatatttatttatattgccaagtggccataacaactatatcaagctctatagtgcttgaataatctgggaaattaaattgaaatacaatgaaacacagataagttaattcgttgttctctcctcatgcataaagttttacccgaagtaacccgaagatatataatataatgcatgaaagcctttttggcatagaagacatcacaaattgggattctattagtaagcaaaaggccttaccaaatgatttaagactaaatctcagccatacattgctcaaccagatgttagcacattgctctctttgtcactaaacgacatgaagcaaactatgagataaaaggacatgtaatcgcgagcaacacaaagttgcgattataccgagaggttattctgagaa

SEQ ID NO: 110313 - DNA, 624 bp, Zea Mays
agaaaatgaggaaggcctctggcaagagttaatcaggaaaaaacatatgtacaataaaaatgtgcataaagtttccttcagtgttcatgattcccatgtttggcatgatttgttaaaggtcaagaattttcattagttgggtaggcaagtgattacgaaatctagcgacaaaactagattttgggaagattcttggttggagaatcaacctctttgtcatatttttctgaaattatttgatatttgtgattacaaagatattatggtaaagaaggtcctagaggtaaattggtatgatctctactccttaggttgtatgagtggtggggggtagagcgcaggctggaagaatgggggcgagaggacgccttgctgtcgcacgaaggggcacaatgagaggcaaggaaataatctcttctttagattaatttctcgctgaccatcctggttacagagataggacttatatagtccctgattgaaacaaactccccctaacaactctttatttctaggaattatctaatatgtaacaaactccatatcctaacaaactccctctaacagctccttacttctaggacttatctaatctgtttgcaacagaaattgctaataactctc

SEQ ID NO: 110314 - DNA, 680 bp, Zea Mays
gtcaagttcaagcgcggattggctccaaatcttcataattatggccatgatcccattgagagatctcttcatctgtcatttctttgtcgtttctatgtggaggcttatgtgttttgttgactggagccaaagatatggagtgatgaagtttggtttgtctcactgctgaaaaccgagatgaaatcccagatttgacgcgtctacgacacgaatctcgatgccatcttctcacacgttgcagaggcgttaatttagcacaactttgtcaatgggggcttaaggatttgagctagggatcaaggtgaacgtgctcaagttcaaggtgagggctgaaattcagaattctgaattttcagatttccctattgagctgcacttggatggcctttttggggattttaattaattattttggccaaacttttctactagatattgtagcttgattagtgtacttcaacttttataattgtcctaagcaatgattccatgttttttcatggtcttttaccaatttcttattctttacttaaatggcctatttaaggttactctagggtttagacattttcccccactttgggtgcatgatatgattaaggcatgattcttaagacaaaacgacttagttgaatttgtgttcccaagtttttggtgtcttttgctcaatttaaatcaca

SEQ ID NO: 110315 - DNA, 315 bp, Zea Mays
tttggactagaattaaaaatagatttgatgagtccaaacatgttagttcatatgatgcttctactccctttagtccttgtgaaactaaccctttgaaggaagaagaaggaaatgaacatcggagaccaaatggtgaatccagcactccaaaaggtttgtcttcccatttggattcccacatatgttgtatggctaatgaaaatgatagtggaagcacaaatgaggatgaggaggataaaagaagcttcatgcaactctatgctcatctaagcctagaacataagacggtcacactcaaacttttaaaaagagcga

SEQ ID NO: 110316 - DNA, 341 bp, Zea Mays
tagttttgtgagttttggaccatttgtgctctgcacttcttgaggttgcttcctccttgattttggtggtcttccaggcttcttcacatagacaggtggaagaatttctatcccttccacatgctcccattctctcatatccttgcaaggccaaatattatttccatacgcaactttataagcttcaagtgtgtagcaaactagaattacactctcaggtgggatcctgtcatgttaaaggcaactaatggcatgaggacatggtatcttagtcagctaccatcttttgcagtcacatctcttgactcttagatccacaatgtgttggtaatccttttcta

SEQ ID NO: 110317 - DNA, 393 bp, Zea Mays
gtcacatcaagttactactccaggacactgtggtaaacactctgcgtaccaagacaccccttgggcacacccattgggtgtgtcgctaagaattttcaaagattttctgaagaagtcatatccgcaaaatatacgcaatgaatgtactacgacaaaaggaagagatcggctgagatgggaggaagtccaaatgtagccactgaactgcaagtccaatcagcagaagcattgaagcacaaagcggggtgatgtccagctgagagccatctgcctcaaccagccagacgtccaatctgtcaccgatcgaattaatttcagacctaataaggcgtggacatataacgttgtttgaattcgcaagatcataagaagaagacgaaatgctgatttcta

SEQ ID NO: 110318 - DNA, 299 bp, Zea Mays
gcgagaaaggcatgccattttacaaattgctcaaaaaggtggacaagtttcagtggaccatagaggcacaggaagctttagaggcactgaaaaagttcctgactacaccaccagtactcaagccaccacaccgagccacgccgaatcagccaacagaagatctgttgttatacatctcctgcatgactcatgtggtaagcaccgcgttagtagtcgagcgggtggaggaaggacatacataccaggtgcaacatccggtctacttcatcagcgaagttctcaggccctaaaaaatgaag

SEQ ID NO: 110319 - DNA, 547 bp, Zea Mays
gcaagaatagcctggagtaagaaggtttatggtgaatccttgttgggtggtaatgcatctgaagatcgagttcgtcttcctctctttatttttttaacgaggttgatcctttccttctccggtcttggcctcattgcatcggggttaacgtatatcaatagagatggggcatatggttgaaacagttataggtgaaatggactatatgatgtaggtcaaaatctagtttgatgtcaggtgggggttgatagattatacaatccatcaagactctattggttgggttagctcatgatcatggtgggatataacttagatctgatatcattattttggattagatcctagttgttactttaggatgacataagtaaagtggttaggataagatgaatccttcaagataagatgaatctattaagataagagagaatcttttaagataaatggatctatatgaaatagatacactttaatggaggataatctaggttgtttagttatctcatgaattttattcatttatatttatgcctatatgtatatg

SEQ ID NO: 110320 - DNA, 535 bp, Zea Mays
ggcgtatagagacccagggcgctggaatctttcgtcggacttcgtgttctccgattgtctgcatcacgccgtggttggtccccttcgcgactcaattggccggtaagatctcccccaatcaatcagcctcgtctccccgtacgaatagttgttgtccctgtgtgaattggtacatgggggatgacgtatcctggcaccgccgtcgcggataaccagcgcgctgccacttcggttgggcgaaggaagaagtatatacagtggctgtcgatctcgcgtggacagtgtagattagagacacccatacccattcgagccattaaatcagggctgtcggcgggtagatgggcagatcagtgtagcgtgtggcgtggcgcaaatctcagccacggatagaagatccgagggccatcgttttcattatcgatggattctaatcagtgccatcggattgggatccaacagtaggtatacgcagataccccttcggtattgccttttttaaagaaccccctcggaactacggaatcaacttgcg

SEQ ID NO: 110321 - DNA, 497 bp, Zea Mays
gctaaacttctgtctttctttacggaatgcaagaaacagaatccacaatttttttgtgattttcagctagacaatgatgggaaaatagtgagtatttttttgtcacacgcaagtatgcaggggggattatgcagattatggtgatgttgtgacatttgatacaacacacaagacgaatatatatgataaaccactgggcatgtttattggagctaacagccatctgcagtgtacagtgtttagatttgtgttgttgggagatgaaacagttcagacttttgaatgggctttcaattcattcaaaacatgtatgggatgcaagggtccgagagttatgctaacaggtatgtggtatgtgaatttgttatgcaaacacgtcaaataatttattgtgatagtaaaataatagtttgtgagcaattgcagatcaagatcctgcaatgccaattgctctgagaattgtatttccaaaaacaattcacagactgtgtttatgg

SEQ ID NO: 110322 - DNA, 291 bp, Zea Mays
ctaaagtaggcgctataggagagaatgatgcgatggaggcgatatgtcctccacatcaaggtcggagaaggccttagaggctggagctgaacccctctgcctggacatggtcatagagcatggtgaagttgtagtccactggctagaggtccaccaccacgactgccatgtcatacgaccacgaacctagtgagacagtgtgtaggggagccacctgtgcaacctcctcctcaagcctctaccgtcggtgggtgcggctgcggcggggcagccacctatgcagcctcctcc

SEQ ID NO: 110323 - DNA, 406 bp, Zea Mays
gggaatttgagcgacgacgcgcagcggtcgaaggagtggaaggttattggcgcagcagattggtgtcctattaccgtggcagtcattccggcaatcaacagagagttacaatgggtcacggcgatgcggtggaggtgccaaggcacgtggcacaaggtcgtgaagaggcagtcaccggcgaggttatccgaagtgaccgtggcaggctcggtacggtggctggagtagattaatggccggagtttatccacgacgaggattcttactcgatcccaggcgctatccacacgatccgagcacgaatcacggcgccatgagcgcgaatccgtgcgcggctcgtcggcggcgagtttctgaacctgttttccccggtgcactgtaccatggcgaggtgggttcagttggc

SEQ ID NO: 110324 - DNA, 850 bp, Zea Mays
agtagaaaaatataaaaatacatgtgaatgctatgttgcgtatttttatatcgctataaatatttgagttgtgttgagcttttggactcacgtcgaacgattaaattgtataatgggtactcagacacgccgatcaggctgcgttggtaatcggctgagttatgacattagttgaatattgactgcgccctggcaacacgacgcaatatctgtgcagttcgaacttggctgcgtcatgtgattgctatgttgcggtctccattaatcggattgctctcgttgagtcagaccgtcatcgctgagtcgcatattttttgcatgccctgtaggcactgtctgtctgacgcgagccaaaattgcgtctgttgcgcacattgcgtggatttatcgtgtaccccaattaccgagccataattgtgcctgttgcgcttattacgaaggcttgctatactgtcgtagccctgatggccgcacacacgttgacgccagatacgctagagcttgtactagcttggattgtggtgagttgttcaaggtcctgaagtcacattatgtgcaaccttcgtaaacaattttgttttcactttatattttgtttgattgtgttgtgtggcatcgtatatttatatatatcgccaagtggccataacaactatattaaatctgggaaattaaatcgaaatacaatggaacacagataagttaaatctctgctctctcctcgtgcataaagttttacccaaagtaacctgaagaaattcaatattaatgcatgaaagcctttttggcacagaaaacatcacaaattgggattttattagtaagcaataagactttgtcagatgaatag

SEQ ID NO: 110325 - DNA, 885 bp, Zea Mays
aatacatccaggcgcactaagtcagggtcaccacagatcgaggtctgggagacctattcagaaatcgcgaggcatctgcctgaatatccaaatgggcagccgaactctccggatacaacgtcaccttcaagccaaggacaacaatcaaatcccaggtcttggcagactttatagcagattggacagggccttcggagccacaccagcttcacgcagagactatttggaccatccactgtgacggtgcatggtatcatgtgggcgccagcgctgtagcaattatcacatcgcccacatgcctcaaataaagatatgatgcacgccttcaattcgcacttgaatcagacaaatgcacgaacaatatagtagaatacgaagtcgtcatcctcagactccgcaagctccaagcccatgcatagtcaaaattgattctaagatagtcgccggctaaatcgaaaaggactgctccgctaaagagccagttctcatgcaatatctctcggtcgtccgaagtctgaaaaagcaattcaaaggatttacattgcaacaagaatgaagaggccgacatgttggcgaaagcagcagagaaaggcgatccgctgctatttgacgtgttttttcacacaattggcacaccagctgtacgaagccccgaaggcctatagataacacaagacctcaacaaccgcagaatcgtacattttataatgactgaagactgacgggcacccatcaccttataccttcaaggtcattattgtaacaccccagtgttacttagggtttttcccagtaccccaacttgtgacattatcacatgtgactctaataatgaaagcgacacctaaacttataggattaaagcctaagtaagtctttttcagc

SEQ ID NO: 110326 - DNA, 285 bp, Zea Mays
tgtggggaggataaaggacatacaacaaggacatgtcaagtcacgatccataagcaaaaagaaatagctgaagccgaagcacgacagaatcagccaaatcaggttctgtatactgcttcatgctattctccgtacattccggagtatgtgggcaaccagtagcccacaacatcagttgcttcggcaagtcattctcatgctgcatgggccccgctaccaccaccaccacctatggcaccaaccttgacccacaatcagcagccagaagggcaccgccaagcgcag

SEQ ID NO: 110327 - DNA, 431 bp, Zea Mays
gatgtatgcgacacaagcatagaggtcctagatagaacgagtaaagtggttcgacgggaacacactatggttttcacaccaacacagtcaaaattttctcaaaataacctctcggtatactcgcaacttcgtgttgctagcggttacatgtccttttatctcatagtttgcttcatgtcatccagtgacaaagagagcaatgtgctaacatctggttgagcaatgtatgactgagatttctgatcttaaattatttggtaaggtctttttgcttactaatataatcccaatttgtgatatcttctatgccaaaaaggctttcatgcattaatattgaatttcttcaggttacttcgggtaaaattttatgcacgaggagagagcagagatttaacttatctgtgtttcattgtatttcgatttaatttccc

SEQ ID NO: 110328 - DNA, 432 bp, Zea Mays
acccatttggtaccgatgggatggcagttagaaggaggtggcaccaaaacccaaacctgatttctttcaaaattttcaagctcctcatgcatagcattaacctagttatgatcaaataaagcatgtccaacatgccggggcttaaaagtagcaacaaaagctgagtgagcaaagtgagaaatctgctgtcacctagagcgagtgactcgctcgtgaagctctctgatcatctgctgaggtgggtgacgaggctaaatgtgatgtggagcctcccttgacgaaggggtctccccctcaacagcagccttaactcctccagtctcagcaggagctggctcgagcggaccccaagtggtggaagaagtggggtcgggtccgtcatccgaagtagtggaagcaagatcaactggtgcagctggtggagtcgactca

SEQ ID NO: 110329 - DNA, 893 bp, Zea Mays
aacatgcactatccaaaacaaagaggtatgggccaagtcggcttgactttgagaatacttctcctcaaggtcagagcatcattaggccatatccgacaacgcagctgaaaggggatgcatggctaagaacaagttgatcaataaaaacaactagggaagctgcaagatcactaaccagtgtttgacgccttcaagtcatcgatctgtttctggagcagcaatgggttccactgcatcagagacagagcttgttcaggaacagcaacaccgcgggatctcagctgggcagatattccatcaacaaaagcatgcgatcatagacagatgagcagaagaaagataattcgctaatatgaacaacgtaaaacaagaggctgactcacctgaaggttggagaggaatagtggtagacccagggcaggaggagctgagtcatggctcgatgagggaagatcaacaggaatgatctgaagagcactatccgcgggtacctcagccccaccagcagacagcaggctccttgcatctagcttgccaacctctaaggcgacttgtccggttgaaactatggaagcacgtaccaccggcgccccatcggactgaggtggggacgacccaacatggacatccatggaggcgtgggaagagagcccacctgaacaccctcgggggctgggttgtattttgcactacccacaagagctggatcactatgagcaacaccctcaggggctgggtaactgccggcaccactctcgggggctgggtctttcgcggcagccacctctaaggctgagggctactcagccacctccatgggaaatgggtgactcagaccagcgccttggcatggaagactgccctccaaagtcgacgatgcatgagacaccgct

SEQ ID NO: 110330 - DNA, 401 bp, Zea Mays
ctcattttgaggtcatgacaccactaaggatagaacttgcgtagctgctcgatgttccatgaattgccgactagagttctatcggtttgagatagccgataagatcctggacgagtaacctctgtgatgatgtacgatccatcatagtagggggataacttgtgtcgtccatctccatatattaccttccgaagcactaggtccttgactgaaaatgctcgaaaccgaatcgctctgtcatggtagtgtcgcagggtctgttggtatcgtgccaactaaatcatcgtattcagtcgttcctcttcgatcatatcaatttcctcaagccaagtagcttttatctcagccacgtccttgaaagccaatcttggtgctccaaatgctaagtcagtgagtaacac

SEQ ID NO: 110331 - DNA, 1069 bp, Zea Mays
tcctccaagctgcgacaaaattcccccaagcagcaagtacccagatcactggaaaaaaacaacccataagaattagccgaccagtaaggatatatctctatacataggtagaggctagtgcctcttttagagactggcagactggtatgtcgaatatcaattccaaagaaactagatcgtagtaaaaattgctaagctctaaacatgctgggcagcaggcaggaaacctagaccacccagcatgtaactgcacataagcatcaaaaaattggaaatgctgaaacgtccatgtaggaagccacatcaatgtgatcgctagctacatgctccttaagcgtggaactttttcttattgctgggcattagaaaatatagtgtaggtaaaaggagaatgatgtgcataggtgtacagactaaccgctgatcgaaaaggcaaactgttgagtatctcgtccacgctgcgccacaattcgtctcgtccacgctgcgccacaattcacccaggcagcaagcacccagagcactgaaaaaacagctaaaaaagaattagctaaccagcaaggacatatgtacacagataagcacgcaaatatacatatgtatgcagattccttgctgcattggccatattttgttgtcactttaccaaccgataattgtagtatgtgtgtatgtatgtatgatattactatggaaaaaatacgaatctagattagatatggataaccgaaatgttttgtcaggcctaaaacagaaatcaagcggtaagtactaatttggcaccatctaagtctagcctctaattatgtctcagaagcagcccagccatccacattattaaaaaataccaaaaaatcaatgcaaacaatggatgatacgaatgtagaagaccacgatgtcgcaggaagcatcctataagatcatgtcttcagtctgtttatcctcttccaaactttctcattgtaacacagagaccagacaattatcagacacttgagtaccactgagctattgaaaataaatgttactactggaaaacaaatcttgaccagagcaccaaaatccaaat

SEQ ID NO: 110332 - DNA, 626 bp, Zea Mays
tttattttgttttgagaaacgatgtggcaaattgatgtgtggtgttttacttgagtggacataaacattgtctaagtatgccttgaatggaggggttataggaaatctgttatcacaaaaggtcattatctagcccactaatgtcttcatccactagttgtactctaataccctctcgtgtgaatacaatgccattgacatgtgggaagcatcatttttagtttaaaagttgatctattgctttgaattcattatattcctactttttagcaactgtatggtggaaaaaaggtgacattttccatggtcattgttttattttgagaaacgatgtggcatattgatgtgtgttgtttttcttgagtggacataaacaccgtctaggtatgccttgaatagaggagattataggaaacctggtatcacaaaaggtcattagctagcccaataacgtcttcatccactagttgtactctaataccctattgtgcgaatacaatgcccttgacatcagggaaacatcatttttagtttaaaaggtgatctattgttttgaattcttgatattcctactttttagcaactgtatggttgaaaaaggtgccttacaaccttaacacttgttt

SEQ ID NO: 110333 - DNA, 752 bp, Zea Mays
ctcaattgttgggcggcgaataggagcttctgtgtttcagtacatcggatcagtccgaatttttgctccataacccgtacccattcatctgcttccagaggttctccagctttaacaaaaagcggtggccgggtttcagaaaaatccaagtatgtggtgtctcgtggcccttgaggttgacctctgcctccatgttgctgaaattgatttcccgccaattcacgcatgaaacgtgtgttgtcagcggtagcattgactaaggcagcgatagcctcggccaatgtaggaggtacaggtggcgggtttggagtttcctcccgccgcgggaagttcccgctccgtcatgagcacgagttcttgatggcatctgaggaagaaaaacatcctgaattattacatgccgaaagtacaccacctttattacattatgctgaactggtaataattatacatactcactgttacaactcaacttccttatttaatttacataaggacactacttaaattacactgctctaattatcttcgtccttggccgttcctactccactgccagcctcgggagaatgttcatctgcgaggttcatggaaggaggggctccaaaaaggtccaactccccatcaggtccggctcccattgctgcaacctctggtggtacattcgatgcagccggtcgtataacacacacacctcttcatgcagggtgttacaatacgcttgcagattttccagggatgcgcttagttcc

SEQ ID NO: 110334 - DNA, 639 bp, Zea Mays
cacaatgtccactcgctttcaagtatcgacatccaaaaactggtacatcaaaacaaaaaatcatctaaaacttttgttcagctagttaaggtcgtccctgcttttgaaaaggtcgttccttgcaatcggccaacaaagcaactccgatcacccgcaacggcaacatggccgaataaaaatggcctaaaaggaaggtgatgcaacaagtgtcgtctattcatccaatgatgacatggtacttcccactagcctattcaccgccatatattttcatgttcaagcatggggtagtgctgcgatgaacccatattatatgtatcattcctttgcttactcgggctgggggaaccacaatttgtaattattgatccattgatcaggtagttaaattatcaccctactagattaaaaagccggtgacccacatgaggcatagttcgtaatttgggaataaagtaactcgcaaggtttattatttcccgaagggtgctgatagaacatgtgcttttggttcgtcaacctccaccaaaaggcagggggcatatgttgatcacaaaaactggcagcgtggaccgtccatgcgtgcgcagaatcagttagggttccgtatttcttgcaggacttgttagcaaaacctgc

SEQ ID NO: 110335 - DNA, 529 bp, Zea Mays
gccaggccaaggcatgtgcgagccgtgcgctcgcacagggcctccaaaaattgagggcctcaaaacttagtagatgtatatatattctagttttatgattttctacgcatgttaatatatagcacatttttttctccctaccataccgctgcgctgaagcgaaactaccgagcgctccactaaagaaaaaaatcttcatagaatcttaacatatttgtccgcgtgaatgaagttctctaaattaaagctactaaattcatatctgtgttctactatgataaaaaaagacgtattatttagctacaatagtattcgagagtgaagctttggagaagatcgaatataagcatattgtacaaattttctttaaaacccaccaaaagagcgatgttattcaaataaaatagaaatgtttctttagatattctattgcaatatatattactgtaatttgcagattgttattactggtttttaataaaaacatatattacactgctttagatttggcacatggcctcaaatttct

SEQ ID NO: 110336 - DNA, 385 bp, Zea Mays
tttgggaggaggcaggttccaggccgagtatgccactggagcaccaacgtttgacactttgcctctaaggatcatctcaagtcggctcaccaagtctgcagagggaatttttctgttggtaacccgagttgagtcggctaggcctcgatacatataggctgggtatgccctgtccttcaacggctgaatattcttgaaaacaaaatcagtaaccacggcttcagcagtcagacccctctctttcagcagtccaacttcagctagcaacgcacctgcctcagctacctcctgatctgtgggagactcggtccagcttggggtgcgaacgtccggctgtcttcccgaccgaggggggagagagttcccataattctcaactatgaac

SEQ ID NO: 110337 - DNA, 487 bp, Zea Mays
gtttctgccaacctagtccatgagtatagactgtgttaggtgggagaaagtggacccggcatttttgaggccttcaggcatcctcacaaaacagtatttgtcgaagagggtgatgaaactagcgttcgacttgtcctcttcactgaggaatatctagtggtagctggagaaacagtcaaggaggggcatgacttcgtagcttgtttccgagtcaacaattttgtcgatgtaaggtagtgagaacttgtctttggggcagaccatctttaagctagtgaattcaatgcacatgtgccactttctatttttctttttcaccatgaaaacatttgggagctaggctgggtaatcgcttggttcaatgaattttgtgtctaggagccgcttgacctcggccttggctgcttctgttttctcgtctgacatttttgcgaaggtgctgcttcttggggcgcagggaggggttgttgtgcagcctgtgctcgat

SEQ ID NO: 110338 - DNA, 453 bp, Zea Mays
tcggtatggcttgatgtcacatggtgatccccatctccaataatctgtccatcatggtgatctccatctccatgatataggtattccatcctttaggtgatgagtccttcaagacctatctaacgtatgctggtaaacaaattacatatatgctttggatcatcacatgttgacacgcaggtcattacattaaatttggacaatacatatggctccaggcgtattgccctggtcacggctcgtaggtcatgaataattcattaatatgcatcatatacacacaatagccataccgatcacaagatgtcctgcaaaaacaggttagacaaacatgtttctatatgttcgccactacagcagatagccacggcgatccctgaaaacctcacaggattccatgcatcgtatgtatggaaattccactaaaaatctcatgcgattgatcaaatcaac

SEQ ID NO: 110339 - DNA, 483 bp, Zea Mays
gtagaattcgagctgatagcatctgtttgaatgtatgtgtggaaataagggggatagtgtttcccgctaacctcatagtaatgggtactcagggaatagatgtcatcctagggatgaattggctagataagtatcaggcagttatcagttgtgataagaggacaatcaaattggtgtccccactaggagaggaagtggtgaccgagttagtcctgcctgagccgaagaaaggaagttgttatcagatggctgtcgatagcagtgaagcagacccaattgagagtatcaaggttgtgtctgagtttccagatgtgtttccaaaggacttgccagtgatgccaccagagcggaaagttgaatttgccatagagcttcttcctggaaccgcccccatctttaagagagcttacagaatatctgggccagagttggtcgagcttaagaagcagatcgatgagttgtcagagaaaggttacatccgac

SEQ ID NO: 110340 - DNA, 471 bp, Zea Mays
gacggatacaaggtgaagaaggtcggactcagaaacaacagacatgtggttacctgcgaaaggcaactggttgttgggatcgatgggaggaatggttgcgacagatgaactctgagttttccgcttgggcgctatctcaatcttgctggcgagcggggcggaagcaatatcgcaagaaagcagagaaggtctggatgcagaaaagcaagactagggctcagaatacagaggcatgcgacggcgcagtgcaaatggggttttcccaggccagatgccatttctaaaaagtgcccagtcatcactcagctgttattccgccaacgctggcgcgccatgtcatcactcggtcgttatttccaaaacggccgacgtggcccaatataactcagctgttatttctaaaaacgctgacgttaccagtcctcactcgaccactgtttccaaagcggccgacgtggcctgttatcactc

SEQ ID NO: 110341 - DNA, 438 bp, Zea Mays
gaagatcttgtcgttagctcgttcgacgacaccgttgtactgtgggtggtagacagagacgaacactaccttggtgccgatggagctgtagaattctcggaagtccttgttgtcaaactgcttgccgttgtcgactgtcagctcggatgggactccgaaccaatagacgatgttctgccagaagaatttctgcgcggtctttgctgttattgtggagactgcttagccctcgatccatttggtaaagtattcgatgatgacgaaggtgaattttaggttcccttgtgccgtaggcagtggtccgacgatgtctagcccccatcgcagaagcggacaggtgtgggcgatgagcttggtaaattgcaaagaggcgcctgattgaggagagaatttctggcatgcttcgcatgatctggtgactcggttggttgattattg

SEQ ID NO: 110342 - DNA, 539 bp, Zea Mays
tgagtcaaatagggaccaatggatcgtggtcccatacgcattcaccaactacgatgacgcatgaccgggaataacggccactccccccccacgccgactattgtgctcaaacaactccggatgtgatgtgcgcacgtcagagcatggtctcaccttcgggagggaacttcacctcgcctgaagtcagcctcggctcgaagaaactctgcctcgcctgagctcagcttcggccgaccgcctcgacaacaactcctcccgaatcctataggaggccactctgaaaactatgctaaccctccctgtacgattgcatgccccatggaaggctcgaccaaggcctcaggaggaacctctgtctcgcccgtgccgagcctcgacctagataacatcgaccaaaggatgccaccaactcctccatgaaggctactgacgacgggatggctacagaacagatgtcaagtctcctttatgccatacagaaagaattactatgcacttttcaccatacttatcactatttcaacaactacgactcggac

SEQ ID NO: 110343 - DNA, 580 bp, Zea Mays
aaaaaaataaaggatcaatcaatagaagaattatgagtcagttcaacaatacaattgatgatttgcatctgttagagcttgagctcaatgatagagcatttacttggtcaaatgaacaagtggaccctacaatgaccaggatagatagattctttgggacaactcaatggcatgggctcttcccatcagcagatctgctgtccctttgcactatgacttcagaccactgcccaattattatgcaaggttgttcacaatttcgtttcttcaaaggcttcagatttgaatcgttctggacaaagctggacgatttcaaggaggtggttaatcgagcttggtctactgttgttaactctcaagatgccattctgaggctgcatgtcaagatgtcacgcactgctaaggcccttagtatgtggagacgcaaaacagtagggagcgtcaagatccgcctggcaattatccagatcactcttactcaccttgagaaggcgcaagaaaatagacagctctccaacgatgaagtggagttcaggagaagactaaaaatcaaaattcttggtcttgcttccattcagaa

SEQ ID NO: 110344 - DNA, 333 bp, Zea Mays
ggagagataggtaactcaccgctctcaaattgggatagaaagaaggagatttcaaaatgcagacctaagaaagtatcaaggcaagatctatagattacaaaggtaaggatgatatcaaacaaaagctcaacaaaggatggagttaaggtaaaacaaggcctgcaacatgacaaaggaaaaggaaatgacctagagcgggataggtaaaacaacactctcgagctgaaatggaggaggtgaggctttaaaatgtgggtaagtgtcatggtaaataccgagagatgtcaagggttaaaggtgataacagacaaggatgtaagggaagaggtaaat

SEQ ID NO: 110345 - DNA, 678 bp, Zea Mays
tggctcgggctggtggttaagacctaaacaacaacgattcggtggggggtgttatcgatgcgagcctttggtagaggctgatgtgattctgatttctaaaatgtgctcatagtggaggaggttggggtattagtgtcaatttaaattgcgaggttgatgtcgagcgctgttgtatttcgagagttggtttcgaagacttggatggattttttgttcttccataggaagaggttcatgaacattgaggcgtttatttatgcctacatatgtatgtatgtggttcctctgttcagtaaggcccgtgaatggttcactggagaaatgcagctggacgacgtcaggagccctgggcgtcttgtaaagataggaaatgccatggaccggtgcaagaaactctactgaaatctggtcagctatctccctctcacacacttgctcattctctgcttaccggagccgagcagatcacacagtgagtcagtgacgaccgagcgcgccttggttacgacatctcgtcgtcgagtatcagcacgcaatagctgacccggagcagctgtggttagtgcggctcaagagctgactgcttgtgttttcgctactagtattctggaaggaagcattatgtgactgtcgccgaagcaactgcgctctccaagtccagccccctttcccttcgca

SEQ ID NO: 110346 - DNA, 472 bp, Zea Mays
agatgtagttctcacattgagatcacattgagacacattgagatcacaaattcagttctcacattcatttcagagatagatgtagttctcagaaacatttggttctcagacataaacacaacagacaaatttaatctaggcagaaaaatagatacatttagttctcagacagaaacacaatagacgacacattcagttcagacacaaaaatagacaaacacattctgttcacatttagtgcacattcactgcctcgaaccccgacaacgagcattcaacttctcaattatatcctcctgcaaagcttgatagtacatgcgttgaaggggttggcattgatcaaggttgatggccaaaaagcgctcctgctcttccttctcttttttttcagcctccatgttcagacgttgcttatccaaagctagtctttccctctccaactctatcattgtattgcggtgttcccgagcct

SEQ ID NO: 110347 - DNA, 454 bp, Zea Mays
ttgtgattcgtgctcggtggcacacggataactatgcggggtgaaaaatcttgcgcaagagatgaagtcggggcactatgactgccaagtcgtcgtacccacttgcgtcgcaatgtggtcggacggtcatcactgtggaaatagtcgttcaccgcgattgcgccacgccatagtcgatccaccacgttgttgcaagccgcaaggactcagcggtaaccgtcgtagttcgttaaccagtgaccgccacggtagctcgcgcctgtgactcacctcctctctccgaccgccagcgtttcccttccaaattcagagccgccgctcaaagcttctataaattgatgccccagttttcttcgctcagttgttacaaacctagagcactagccctcgcctcggctcatccatcatagcgccccaattttgtatttcccccaaatcgatttttcatgccgcc

SEQ ID NO: 110348 - DNA, 363 bp, Zea Mays
gggcatgaaggtgcccccttggtaacgaagggcgagggggctagctggcggaggacgcgtcgtatagagccgtggcggacacgggggactcaatgtctagggtgagcgcctcgagaagtagctcattgcagacatcgtggaaggaggggaagcgcacagagcgcttgatgaaggccttcaggtggttgtagcgtcaactgagaccgcgtagaaggttgaggacaagcatgcggtcggagacgggcatgccgagatcctgaagagactggtggcagaaagagattaggtgtggaatggtgtcgttgaggacgtggtcgtcgtgggcataacactgaaaagtcaggagcacctggtcgcgccagc

SEQ ID NO: 110349 - DNA, 549 bp, Zea Mays
gcagcccaacaggccccgagaccgaacagagcgccaatggaggttgcgaagccgagaccggttaaaattcgaattttgaaaattggaacggtcgtgaattccaccgccatgaacttcgccaataggatcagggctcgaaaaccgaggggacacagctctccgccgagaggaagaagacgacaagcccagacgattgaacgcagagattcttgggcgagactgatgaagccctccagcggggaacctcctatcgctgtgaactggagctagattactaggagaagatcccaaacgactgaacacagacgtactagcccgagcctgacgctcaaggccaccggagaacttaatgttgttacgaatcggaatagcattagcaccagtgagagggagcttaacaatatccgcaaaagataaactcttcttgccccggaccgtctgccaagatgccgcttctttatccgaaaaattcttgaattcatgtttccagttagggccaccatgattccaaaggttgaagaaggctctgaattccttacgatcaatgca

SEQ ID NO: 110350 - DNA, 735 bp, Zea Mays
ttgggtattacagaaagtcatcagagtcttcatagctcccgcctcggtagtgtcgtccgacctgaatccaatagtctcagagtcaagggagtgccagcccggctacagggggtgagcctctagagtcagccaaactcggcaacgtagtaccgaatgctcctcgtacaactgcaccgtgtacaaagggggcgtagggtaaccggcagtgttgagcacctcccacaagatgtaagggaaaccctcatgggaaaggaaatcagaactgaaacgagtgtctcctccattggcgggggtgggtgaagtcatctgtggaagaggatcagatgtaaaggttacggtagtgaaaaggaaaaacatgtgcccgggtcgttaaaaggaggtgggttagatttgattttactccttatgttatttattattatccctattggctacattcatgctaagaggcatctttcctttaatttctaatcctttcatgttttataatgcatgcatgctgaaaagaacgtctcctcaccgatcagaagggtgcttttagggcatccttacaattataaaactggcccatatggcctacttaattagccacctgttttccccactattcctaaggcctttcatcctaagtctagcgttctagtcctcacgattccaacgctagtttctaagcaagttttatttttgaaaaagttggtattcacgatttattgatttctctatggtggtatttgc

SEQ ID NO: 110351 - DNA, 356 bp, Zea Mays
acctaatgcatctagtatggataaaaaaggaataacaatgaattaattatgaatttaataagattttggaattatttctatactagaaaccattttctatatgaatttacttgatttatttaatccatgtactgtgggtcctatttaccagaagctcagggtctcttctataagaatgaggacttgtattaaactactctatacacagtgtgggtcgcgggttatttacagcagcgaagggatacgagcagaatctggttcagcgtcccctcatcgagggccaggattagatctgacccatccccacaccaatacacttcgtacgccctcggatcctgaatctgtggccagcaaca

SEQ ID NO: 110352 - DNA, 592 bp, Zea Mays
aaaacaacctttatctatttatatctattcaataaactactactcaaccttatcttgagatgatgacgggagaaacattatcacgtcatcagcataaaaggatacatgatggtttacctgttgtgttattagattatcatgggatatgttgtgttattagacttatcatgggatatgtttatagctatacctattattgatactatcttctacaaacttggtcaaactttaacatatgatccaaaaatagctacagttgcatttttcgggaccaaggcagtaaaattcatgcgggtcacaaaatgaagaccgaaataaataaaatatatgttcatatatatcatacatctccactttaaatgactttatgtgtgtaagctgctccaaggaagtaaacagatagaaggccatacgctgaactaacactatatgcatgctcagtcgttctgccatgcataggttgttacattcaaataatttttaaattgttgtaatgtactaagtctatggtctgatcacagctacaagtagtttactacatcaacaagttcaggtaatttatgtgaaagcataaaatccaaacgaacaaata

SEQ ID NO: 110353 - DNA, 469 bp, Zea Mays
aaatgaaaatacttggaattctcatcaccctctaataagaatttatccctagctttttgtctaaggctaatgttttcctcatcaacaatcttcctgagattagattccaaatctaatttcatatatctgtcagcatccgaaaggccagacatctcactggccttatccagaatatcaattttttcaatcaagtttttcttcaactttttgtagtgacctaccatattactgttccaacctttaagcttctgacgcagacgtttcaattttattttccaaacatcaagactgttggacacaccaaccggaagagtccaaacattttccactaatttgtgaaaatcaggcctaatcttccaacacagctcataacgaaaatccttacgcaccatgggcaggaaatcagtgtgaaggcaaaggggaacatgatccgaaaaggatctatttaacccgataacactaatattat

SEQ ID NO: 110354 - DNA, 382 bp, Zea Mays
catatatcatgacaagctgtaatggctgaagttagcagaacatcgacaatcttgcagcttggtgttaatgaaaactgtacaaccgatatcttactaacatttgtctattttagtactgagtgagggattgttatatgttgagttgttgtgccctctagctgagctaattaggtggtttgagtaacacttctcagttcctgagtttgaatctcaacggaagtgaattccaagttaaggttttaaaaaaggcactcactgattcctgtgattgtgtccatatgagatggattgacctatggacagtggatcctcgtgtaagggatgagagggctcaaaacaaatgtaaagatctagcttgtgggaggttgttgagaaccaaaat

SEQ ID NO: 110355 - DNA, 416 bp, Zea Mays
gtagggtagtggcgattgtgactcgaccgtccctatcgattgaggtggtggtccattttatagcccatgcaaacagccggacgatgctgcatctgcgtgggccatccctctctcgtttgatcgggaacgcagagcagagcaacacagagcagctagctagcgttactctcatcactagtagtactatcgtgcaaccaacccagcagcagcagactctcatcattatcgtaccactaccagcccagcagcagcattgcctgccggctacgctgttgctgcattcccgcattcttgagcaagctgtagctgtagggaggcggaatcacatcacatgagagttaaggtggagcgccgagatgagaggatatgcgacatctccatttcacctgtgctgatttaattagtatgtgcgcggt

SEQ ID NO: 110356 - DNA, 499 bp, Zea Mays
atttttcagggcttgattctgagcaaggctttaaaggctcaaaaagatgcggaggatgagagctgcaaaatagccctcgggaaccttcgttcagaaatcatatctttgagaaatgaagcacttgagaaggataagatattactttccttagtggagaagctgaaatctagcgaggctagtcttgctgcgcaagacaaagcacataaagccgaagtggaggagctgaaaaagaaagttgttaaaactaatgaaaaatttgaagtcgaagcagtgaagcatgaaatttgcgagatcgaaaggcctagagctcaaaagaaccgcgatgagcttcgtgcttcaaaagagaaatgttatgaaatatctttggaatgtgctaagaaattgaaagacaactttggtagagttggggcattttcctgtgagcaaaaattcattcgtggcgaccctgatggggttatccagtggatcagcggggaggtcgaagcttttaatgagatac

SEQ ID NO: 110357 - DNA, 609 bp, Zea Mays
gtgaatctgggagttcgtttccttggacgaaggagtcctcggatgaaggcttggattattttgttgcgttggatgtggctgcggcgaagacttcgtcgtgtatggagggtgccggggatcttcctagtgcgggtggagggcgtaggcggcgaagggtggtggggaaacatagtgtgggtgagttttcacggagttgcaggcgccgttgtatggggatggagagtggccgtctccgtgtaaaccgagttgataaacgagaattgttgtccttgccgactggggcgagcataggcgagggggatcttcggaagttttttgagggtgaggaattgaggataatgttgtttaattatagggagatgggtatcattccgaaggttgagccaatgtaataggcgatgcccttgccgtgtgtatgtaattgtaatttgtatggcgatgtggcctgttggctgtattcgtacgcttgtattggtccggctgcgtacgtgggcgactttgtgcagagtgtctttgtaatgagagacttcgattaatgttattccggctgcgcccttaatcagctattgcgctgagtgtcttttgaataaaagactagcgcacttgtgc

SEQ ID NO: 110358 - DNA, 334 bp, Zea Mays
gtaaaacactgctctcaaattaaaataggagattggagattttagaaaacgaacataacgtaatcaccagggtaagatcaagggatgagaaaggtaaaggtaatatcaaacaaaagtaggcaaagggtggagttaaaaactcgcaagggacaaagaagatgatacgctcaagagaaaaaatgggtaaagcatacactcttagattgggatcgaagagaggagatttttagaggcagatataggataaacatcaacgtaagatatagaggtgataagggtaaaggtgttaatgatgaaaagcataaccatggacagagttaaggcaagactcgca

SEQ ID NO: 110359 - DNA, 386 bp, Zea Mays
gcacgctccatccatagaaaataccatacgtcataaaatcatgaatcgagaactgatacgcaacacgaagattgaatttctgcttcttgaagcagtcataggcttccactccttgccatagcttctttaactcttcaatcagtggttgaagcatcacattgaggcatacgccaggatgctcagacccaggtataacaagacataggaacataaactcatatttcatgcaaagagcaggtggaaggttgtacggtatggcaatgacaggccaacatgaatacgacgcagcggtcatattgaaaggtgtgaaaccatcagttgccaagccgatacgaatgtttcttgcatcgctggcaaaatctggatcaaagttgtcaagagccttc

SEQ ID NO: 110360 - DNA, 526 bp, Zea Mays
ctaaaatccagtgctagcttgctctatggaagccaaaatattattgagatcaaagccaacttgaagattgtttgaactagatagagttggatatgttgtctatgcacaagacatgcataacaccttatctcgattggtttcattcaatgcgacactgttgagtctggtgtgcaccatacgagagttactatgctaactctaagtagttggggaggctttggagtcattgaatgtatctggtgatgcactagatctcccatcgtacatgcatcattgcaagttaaagactttgactagggagtcagtgcactcatcgaacgtacctagtagtgcactgggctcatcactaaatcgatctatttgtagatggagaacccaagagactagcatggttcactggatgagtatggtattcactggatgtgtcatatattaatgactagtttggaaactagccattatagactcatcagatgtgtttggtgtgggaagaagtggtgcactgaacacactcgataccctcgat

SEQ ID NO: 110361 - DNA, 449 bp, Zea Mays
gggccagggcagactgcaaacaaatgggtactgttgacgtgctgcgcagaatgcaaaactgcagagtgcagacaagggggaaggaggggagcatggatgaccttcggatgacgagctcatcttgtgcattgtagatgagcagggggcagggacgaccttcttcaaggatgagctgcacgccggcgatgattgacgatggagagacctggaggctagagcagcagccgctgacagaggacagaaacttgagaggggcgcaggcacaggggaggatttagggtttaggggcaccaacagatgtatgcggctactgggcccaaaaaacggtgaagcccaatagcacaatcacatttagcccgcgcgcactggtcgaccagaacctagctaatcagacgactaatcggtcgctttggacgtctaatcaacgattaggatgaccaggaaaccag

SEQ ID NO: 110362 - DNA, 706 bp, Zea Mays
aaaaatgccaaagtgccgagcaaggtctaagcggttgcaagtaaacaaccccttggtgcgtaaccaccagtccagctccaggtcgtcgttcgtctcgtcgtgcatttctccgcgaggatcggcatgtcggtattagattgcccagggccgaccgcatgaagccctcgccgaacaggagctcctacaacaccggcaggcacaaggatggtgttagcagcaggtgaagggagcggagaagtagataggggaatcactggaagaagaagataggaacggcgacggctaccgcgaccgtagtgttctattctcttaattctttgatatccggttatgttgtcacgattaccttttaaggcttacaaacaggcttggcccagcacgaattacatgacccaatcgggcccaatgacacgggtgttttctcgcctttcatgacggggtcgcgcctggccgtcgtcttctccatgttcctgcgtggttgacatcgatgcttgcttggcttgcttctcttcccgacctgctgcctcctcttgaagtgctggtttgacattccccctcccttgaggcgctgcttgtccccaagccggcgcgcacgggaaacgctccttcaatgcggttgtgtcctcccaggtggccagagccggatccaggtcggaccaggtgactttcacttgcgccaccgtcagtcctccacgttgaatcatcc

SEQ ID NO: 110363 - DNA, 368 bp, Zea Mays
ctcgtatatgacccttgtgctcaaaccctagccactagatacaatagaacttgaattatacgttcagggttggacggtgatagcattagggtggtgtagctccactccgaggcggtggcctttccttcactagccacgtaagagacaaaccggatctcactagaggtgtacgagagaggagactacgaagaatgttagttcgtgcttcgtgcgccggccctctccctatttatgtacgtggtgtgaaaggggatcacaaccataaagttattgcgccgttgaccaaagcatgatagttgtgtctgacttgatcctttgaccgagtcggatgagatcgacctcaacactttttacatccctcaaccagc

SEQ ID NO: 110364 - DNA, 527 bp, Zea Mays
gggaaggggacatgtcaaaacagtagagtaaaatgattgaagaaggaacaccttctattccgtcgtcccagaccatgtcgtaatcgagttcatgaacagggccatcaaactctgcaacactatcccaatctatgggttgtaggtttaaatcgatccctaatccagacattgcgatagcatcaatgtggaagagttcgctggaatgacctgggcatggcgatcctactgggcgatttatatacgccatgggagagaagtggcgggcaatggaaatttgatgtttttggcggctaaattttgtttcttcaggaagatcaaacgaaaaatcaaagttgcgctgggtgtgtccgtgagcgcgcgaaaatacgtgagctacgtgagcggctgggtgggaccacatacgcgagcgcacggttctgagcaaatgaattaacgccgggccattaaaagcaacggagggagtagcacggttatttgctgtcccttggtcactgtgcccatggcttacacgatgggaatttaggaac

SEQ ID NO: 110365 - DNA, 392 bp, Zea Mays
ataactcttctgacggctctgagcggccaaaatattatgacggatttctcgaaccttcttagaagtctgctgaatccaatcaggaccaaccagggatctctctccgaaagtctcccagcaaagaggggagatacaccgcctgccatataaagcctcgaatggtgccatcttgatgcttgcctggtagctgttgttataagcaaactctgccaaagcaagatgatcctcccagctacccttccatgacagcacacaagcacacaacatatctcccaaggtttggatcattcgctccgactgaccatcagtctgagggtgaaaagcgacactaagtgaaagcttggtgcccaatgcactgtgaagactctcccagaatttggatacaaatttgg

SEQ ID NO: 110366 - DNA, 851 bp, Zea Mays
acactcttccagctaatctatctgttgatcgtctttgggatgacatggataccagtagcaggaatcctcttaccactgctcttcttcttcttcctcattatcatcaggcagcacttcatcccgaaatattttgatccgagccacctgagggaattagatgcagccgagtacgaagaactgaaaggttttacacctgatccatcagtggtaagaagtcttgatctacctggttttatcgattgcccgttagcatatactattcaagaaaggctacttcattcatctgtgtattgttaacatgccccttctcacgcagtgtgaggacgagtctgttcgcagcggagatgctcagcctggatatgcttccgaaatactcgaggaattcacgactcaccgtggagagctgaagcgcaggaactctaccttccatgatgggagactacttcaggtaacattttcgcgcaaacattagtgcctctggttttcgtaagattaattaattaaaggtctcccgttcaactctggagttggaacttgatatttcctttattattttggtttggtagcttaactctgtcaagatgacgagagagctttctcgggttccttcttggcttacatgaatcctagaagaatacgcggtttctgaatccgaactccaattaagcatgggggtgcgaagtctcatggcctcattgcttacaaagtattctctgaagcaagcaactcattttaggtactgactttggggcaaatacacggggatgagcagaggaatgtagcagagctggaaaatgtttgtaaaaaataaatacaaaaagaaatgcatgttaaacacatctaagcttcaa

SEQ ID NO: 110367 - DNA, 407 bp, Zea Mays
agtgtgattataattggtcttgctgtcgtttctgcttttgttatactgggtcggctgcgcccttaggcggttcttgcgataggctccggttttttgcgcacttgttgtgctaagtccggctgcacccttaggcgacttctgcgcggatagtcttcgcgatagacttcggtttttgcgcacttgttgtgctaagtccggctgcacccttaggcgacttctgcgcggatagtcttcgcgatagacttcggtttttgcgcacttgttgtgctaagtccggctgcacccttaggcgacttctgcgcggatagtcttcgcgatagacttcggtttttgcgcacttgttgtgctaagttcggctgcacccttaggcgacttctgcgcggatagtcttcgcgatagactttggt

SEQ ID NO: 110368 - DNA, 351 bp, Zea Mays
tattgtttcatgacccaatcctttgtgcagccattactgtcaaccctaatggcatccatgtgttgatcaatatatggttgcatcagttttgtactctgaaggacactctaatgcacccgacccacttcgttgaaatccttgtcgatgaagacttttctccccatggagcccttaccagccaccctacccttgtgacgagaatcgggtaaaccaatccctctccatccttttagttactcttgatagcactagatgacttctttggtattgtaaccctctatcatggagccctctaggtaaggtcgattattatgcatttattggttaagaaccaacattaatcgcttgtag

SEQ ID NO: 110369 - DNA, 691 bp, Zea Mays
attttatgaacttcagttttagcgttgagctgggcctcgttgcttttcagtctatccaccaaggagagtagtattttgtatttttcaagtctttcgttccttaacgtaataacttcagatcgaagatttccaagtgctagctcacagctttcatcttcggccttattttgggctcttaaagctttgctcagaattagtccctacaaaaataaatggtgagcacacactaaaaaggaaataaattacgaaaataatatgctttttaactagtaaaaagtcttcccaccttcagactgttataggcaagactatctgcaagttgatccttcgacattgcagacaaacctaactcaagcttcagatatcctatattgtctgccatctcccgacagacatgaatttctttattatcaggcaggcaataaaggaagtcatcctcgtcatccccaccatacaccaatgaccctcgagtatactacagatccctggcataatgttgcgcttcgtcaatttgctctttcgataattctttccctgaagcatgtcgcactataaattctaatttctcggtaggggcttcgggggcagggaactcagattcttcggtagcactatcttttcttagcgatgatggtccctcagcagcctccgaaggccttgcttcagcaccctcctaagcggcccctgaggg

SEQ ID NO: 110370 - DNA, 520 bp, Zea Mays
gttattttgggaatggagttgggtgggcgacgggggttgaagatgtccccgagccggaggggtggttgtgttcgagtcgtttttcgctgctggacttcgcttgtcggcgcaccgattcgtagttcaagttctgcggaaattcgaaattcagattcatcagttgatgtcgaacgctatggtggcattgacgaagtatgtttggtcggtgtcttcgtatggtggaaagccatatgttgagatcttcgtaagtattattgcttgcattggtagaagaaaaagataggtgggctgattgcgcaatttgggtcctgcacattcacaccgagaactgggaatacttcgaccgaagtgattgcgattgtttcttgtgctaagaataagtggggcaactggtgggatttttggttttatgtggcgcgggggaatgtcgaagggttgcctggtttgccctcggccattttgtgctcgcattgttatgtggccttcccacaatttaaagtgaaaaggggataaaaacaag

SEQ ID NO: 110371 - DNA, 318 bp, Zea Mays
agcaacatcttcttcatcattccctccaagcacttcaccaggtgtgcatgcactagatcaatccacaacaatgccaccaaacatttcatgtaacaattcttcatgctctggtgggcctttctttaattttttccagtttgaatgaccctgcatgcaagtaaaagaatggttagttaaactgaactcattaagaaaacattgaaaataaggaacaaaatgatgcatacctttgtcaacctattccagtactcatcggatgcagaatatgttcccaaggttgcattccacccaagtccagtatctttatgcagttgtaac

SEQ ID NO: 110372 - DNA, 612 bp, Zea Mays
tgaactagaggactccttgctcgtctgtcctaaggtccggaggttgctccttgcgagctctttccataagcctggctgtccgtccaggcgttgagccttgcatatgagatcttctagatttggcttgacttccaggctaccgttgtctcccagacatgcattcagctgagctgattctttcttccaaacttccagaaagttggttcctttaatcccgaaaggttttcggctgagggcgtctgctaccacgttggccttcccggggtggtagtggatttcgaggtcataatccttgatcaattcaagtcatcttctttgacggaggttgaggtccggttgcgtgaagatgtacttcagactcttgtgatcagtgaagatgtggcatttgttcccgatcagataatgcctccatattttagggcgcgcactatggctgccaattccagatcgtgggtagggtagttctgctcgtgcggcttgagtaagcgggatgcataagcaatgaccttctcattttgcatcaagacacaccctaagccttgcttggaagcatcacagaagatgacaaaatcctggtgtatatctggcagagtcaaaactggtgcggttgta

SEQ ID NO: 110373 - DNA, 424 bp, Zea Mays
gtgaaccccaaggcaaaccacatatacgactccctcatagaaaggctctagatgcccatctacaaggctcaactgccccttggtcatgtcagaagacacgacgttagggtccaggcacgacagcaaagacaggcctttggagcataggggacgacttatgaccagtaatcaaaagatgacttaccccatcaaattttctatgtaacaaatgtctatatgctccctcgactatataaggaaaatatgacaaccaacaaaaactccaggtgaatttagcatgcaaaccaaccagtatccgaataatccaataggcattcaaaagtattaacaaccgaccaagtagacacacaagcatgagagctcttgggctccatctataccaatctcaaagcaaccaataaagacttcaacattatatgagaca

SEQ ID NO: 110374 - DNA, 502 bp, Zea Mays
attgctcctcggccctagaactttctggctctgatttctctagctgagtggtggcagctttggaagcctcagcgggaattatctccaaagtcgaggggtagcttcgacatattcaacaacttccatcttttctgtagcaggcagtgcagcatccctctctagggaatgcaacttcgaccgatgagtcacaactttagtccttttcggcttcggcacgacggaagaggtcatagttgagattttcctcttcgttccttgtttccgttcgggaaagcagtagccaggacaaataaatccaatcacatcaaaaactatgtttagtctcctctttccacgagcaccgaaggcagtattcatggcttcgttctctgccttcgtataagcccccaacaattcatcactggtcatcttaacagcttcaagccattcatcatttggctcgctaaactgacttctatagcgataagtgtattttagataaaccaggtgttgggggtttgct

SEQ ID NO: 110375 - DNA, 310 bp, Zea Mays
gattcgaacatcagttccaagaaggcgaccaagaggaacaaacctgataagtgaagaaaataggttctagaagaacattggccttaatttcataatatactgaggtaagccattgaatctcaacatttccttctctaatccaggcaattgattaatgtttccgttagatttagagctcatacaaatctatgaagaatccaaaacacacataggtgcatatattgtttattgaaattcatgtccagttctaaaattacttgcctgctggatgttgtccagtgttgaaaataacatcgcacattcatcgata

SEQ ID NO: 110376 - DNA, 420 bp, Zea Mays
aaccacctgtggcaaaacacatgcgtaaacaaatcataagactgcctctagccgcctcagcatttgtgcatcctggcaagccccacctacaccctctgccctgagacaaccttgtcgtgcacgccgagctgctatattaaagtgttgggttgcagatcttgaagtgatacctcagtgcagaaagccactccggcaagacctcatgcacccgcctgagcacacaccagtcacttgtcacagtcacaactaaatgaatgccccaccatgagccaagttaccctgccaacctcgggatgttgcgactgcactgtggcaacgtcgccactcatagtacgtcggtcaagactccctccattataaattgtcgttcctccgcctataaatattgatgcccttgccgcggaacctcacagtccagcc

SEQ ID NO: 110377 - DNA, 669 bp, Zea Mays
tggttagtcagctcgttgcactaccatgagaagagttggatgtagtctcttagggtctcgtccagtttctacatgcagttcttaaggtcccacgaatttttcgggcgcatgtacgtgccctagaaatttcttacgaagatttcctcgagatcagcccaattttggatacactcgggcctcaggttctcgagccacgctcgtgccaagtccaccaagtataggggggttccagattatgaagtagttgtggtctgcccctcccacctgacacgttggccagtaatctcctagccagagattggggtttgattatcctaagtactttgtgatgttggtggggggcctgtatcgttgtggtactggcgcccagaggttgtggcgtctaaaggcccaaggtattgttgtggatgcggtacactggtcatccttcggctaccggcgccgtgacatggaagtctcagcctgctgttgcacggtgaggtcaatgaggcctcgaatttcttggtgagttcttcgttcgctccgagtttccacctcagagtgtttgtccaggagtaccacagtggctacgatgttctggctcacccgatggaaccgtggttcgctggccccatcataggtcagacggcggcaaacactagttgttgtgtcatgagtctgccaaccacc

SEQ ID NO: 110378 - DNA, 489 bp, Zea Mays
ccaaggatccaccgctccagtaagcaagaaaaggataagcttatgataattagtagatacatgacttagaaaaccatggagaagctcatatatatattacaactatagagtatagacttgtaatatcagaaagcaatgctatccacaatatatgtcatgccattcttaccaataaaccaaatgtacaaaggagacagaaatactgtgcccagcttcaagaatgacacatcggttcactttctgatttatctggacatgccttgaatagattaaagcaccgatatgtataacttatgtaatatctcaaatttgcaagagcaagcacaaagagttggaaggggagattatcaaaatggttccacagataaaagtattagcgaagtgtacgacaaaaagctatggggtatctaccattaaacactacctgcccagcttcaagaatgacacattgctagaatagactagatatggaaagtattttacttcacg

SEQ ID NO: 110379 - DNA, 298 bp, Zea Mays
tgaggaggaggctttgtgcattgcactaaggaacatgtccattggatatgtgtgtcctcgagttcctgggataggctacaccaacacaagatcaaccttcatcctccgtacaaagcctctccactggtacaaactgaggaacaagcttaagaagttgaagatcaagttcaagacaatgagctacctcaagatgatagcattgtcaagagggatatggagttaagcaagaaaaggaggatgaacaagagattcaggcttcaagaccaccacatccaagagtccatcaatcaattcagcg

SEQ ID NO: 110380 - DNA, 523 bp, Zea Mays
agaaggataataagctcttcacatagattatgacatatgggtcccccttacatcggtgaatttttttatgaattttatttctcccacgcgcacctagattgttgcatataaaatgaattcataacctgcacatattgctcactgaaaatagctcacgtgtttttccgtagtttcgatggttggttttcatattgctcacacaatttcgtctacttcttgtgtgcgatggctgatgacaacaaaagtgaggaagctgcaattgtttagttccaagaggctatggagaagacaaatgttgcaaggattgccgataagatattggttggtttgtcagatgattctgaggatagcgaggattttgattttgaagagaccactgatgaagctgaggaacgaccatggaaacctagctatatggtttttggaaagtctaagaccggggatattgaggcgataaagggcaaatactttcataatgtttctattgcaaggtcaggtggagaaggtatcgtcccccatccta

SEQ ID NO: 110381 - DNA, 585 bp, Zea Mays
tgaaggtgaagcatgttccttacctgttcttcgcaggctataggaagtgcgtgctaggaaattggcttacctccgtgtatcaaaatgctacttgctccttgcatgtcaacctattttgtctgctggaaagaggattagaatgtgcatactgcaagtttaaaaccaaggaggcatgagatttttccccaaagaaagaaaataaaagaggggagcgctgaaacagtacaaaacaaaacaaaaatacacacgttcttgattgaagcacaatgctaagcaaacagaggagaaaacgagggaggttaaggaaagggattctggcgaaaacgattgaagacacgggccaacgaattggataagcataatctgcagccgccaatagaaaatatgagggcaaaaaagattaatttctttctgatggatctcaccgacagataacacaaacagtaaaaccacaaagtcgagcaaacagaggaggaggaaagaggggattaaggaaatggattctggagaaaacaattcaatacatgggcattgaactggataagcagaatctacgcccgctacggaaaaaatgagacaaaaaag

SEQ ID NO: 110382 - DNA, 271 bp, Zea Mays
gcacccggacctatctatctagctagctccagtgagggtgaggtagaattgtagttatccaaaaagtcaagtgggttaccgcgatacagtgtcatgttctgaagtgcctccattttgggctcacgccaaagtccaatttacctctcaggagaaagctaagcacatagctctcacaccgaacacaatttagtttccaaaaattatgccaccagggcaaaaatctctattccatatgagtcccctgtgcaaggacaaccaacaacacgagtca

SEQ ID NO: 110383 - DNA, 395 bp, Zea Mays
ccaaaacgataaaggtaggtccgactggctcatcattgatcgaaccatatctaataaagtccgattacgtcactcagacacgccattcctctgaggcgttccaagcggcgtaagttgtggaacaattccacaattctttagatgattgctaaactcatggctcaaatattcacctgcacaatcagatcgcagtgctttatttttcttgccacgctgattttccacttcattctgaaactctttgaacttttctaaagattcggacttgtgtttcattaagtagacatacccatatctactaaaatcatcagtgaaggttatgaagtattggaatcatcccctagttgtcgtactcattggtccgcacacataagtatgtatgagttccaacaaat

SEQ ID NO: 110384 - DNA, 542 bp, Zea Mays
actctaatccttgaaattagaattggttccttaaacgtcgtttgaaattctttcacgcttgtgttgcatgtgtctctctatggcctgccatcgtggtgtgtggtgggtgctaaccggtgtctggacagtgcacaacatctcgcccacgtgaacgatgcatgacgtcgcttctgaaaggatcacaatttcgatatcgcgtcgatctcatgtatttattttgcgaaatgtcgagtcttatgtctgtttcaaaattatggattaagagaacatgaatttggaatcccgacccactcttgtgatttttgacccgagcaaataaaattagacctcgacgacaaaagtactgatgcaaaactaaattggaccgagataattagagccaatattgagtattcctaattaatttgtttccctgctcagactgcagatgaaattatttgatttcaaatcaaatcgaacacattctaaaatattgttgttaacatcgttctggtttgttccgatttcatctcgcccagatccaaacgttcggatataaataa

SEQ ID NO: 110385 - DNA, 1553 bp, Zea Mays
aagcatatcgagctgcggagtcccaaaaccagtatggcacacaaagagacagaccaagtgccggaggctcccaaatgagtgatgtttgaggaagggataaaccaaagtaagctttcctcctgcgaatgcaaagagactgcttcgaacctgcgatcaggtgactcggtgagacaactctcaccactgcaccaggctcccttctgatatgacatacaacatatacaataaatccttttagtaaccctcgagattgactgtctgtctgacaaaattttgcaccatcattccccacgttcgctcattaggaactattcctccacttattgctttgtctagaagcatagcggcatcatcaagcaatctgactttgcagtgccaactaatgagaatgttgtatgtcacaatgtcaggatgcacattttcgttgggtagcttctctaaaagatttaaagcagcatgtgtccatcccactttgcataacccatttatgagtgtattgtaagtcacaatgtcaggtgtcagtccttgattcagcatctcctttgagagctccagtgcatcacgtacctttcccgccttgcagagttcattgatcagcatgttatacgagaaattatttggcttaattccctttgtcaccatttcctcaagcaacgccatactccgatcaacattcccctctttgcagagggctttaatcaggccattgtagctaataacatctagctggcaaccatgaagtagcatttcacttgcaagccttaggccctcctgccaccttccgttgcgcagaagtgcatgaatgagagtattataagttattccattggcaacaacaccctcttcaattaagtttctgaaaatatgttctgcctcctccatcaggtcattgttgcacagatgataaatcattgtattgtacgtgcaaatatcaggcttgcacccctgactcttcatctcttggacaagccttgtcgcttgatcaagcttgccatccttgcataaggcatatatgataccattgtatccttgggagttcatactaaagcccttggctaacatctgatccagcattgctcttgcgtcatcccacatgccattcctgcaaaatgaatgcagcaaggtagagtaggtcacgatatttggtgcacaacccttctcctccatctcatcaagcatccgcactgctgaaccaaatctcccaagcttgcaaaggccatgcatcaaaatactgtatgtgtgcacatcaggcgggcatccttttgaacccatcatctcatacaactctgttgccctggccagcttcccctccgtcagacatccacggatcaccgtgttaagcatcaccacgttcacctccggcaacctcccgagcatggcgcacgcctcgtccgcctgccttgttcggcacagcccttgcaggaggaacccatatgtcaccacacttggcatgcatccctgcgtcatcatcctgtccaccagcctggctgcctctcgcacgcgcccgagcccgcacagcccgagcaccaggtcgttgaaggtgttcacgtccg

SEQ ID NO: 110386 - DNA, 2008 bp, Zea Mays
tcaaaaaaatatcaatatagaataatcatgtacacaaaaattatatttcagttttgagtttgcaccatgagtttatcctttcatatgggcatgagttactatcaacttctacttccaacatacttctataatattgtttcagtagtaacaagatagcaacatcactctcctaaacaacaaattcttgaagagttgtgcatgtcattcatgtgacggtgtctttgattgtctacagcatactgcgttgttgctactgaatcagctggtcgacagcttccagttggatttattgaaagagtcaaggatgatttttccaagaagtatagcggagggaaagccaaaactgctaatgctaatggcctcaagcgagaatatgggtacttaatggccttataacacttttcagtaaccactccacacctttttcatgtatattttgggtgactctttggcactaattggaagtattttctcctaggcctaaacttaaagagcacatgaagtattgtgaccagcaccccgaggagatcgacaagcttgcaaaagtgaaggctcaagtcacagaggtcaagggagtgatgatgcaaaacatcgagaaggtgggtaatgtccttttactatagtggttatcagttactaatcctatgggatcaattagtatttaggaaccaactattttcttttactttaacttactaataatctgatgctcaaatggctctacattggtcatcaggtactagatcgtggtgaaaaaatcgaacttcttgtggataaaacggaggatctccgagcacaggttcatcatgtggaatcccattagtcccgtctatctgactatcaccaaactcagttgttttaattccacatctaggcacaagatttcaggcaacagggaacgaagatacgaagaaagatgtggtgggagaatatgaagatgaagctcatcgttttcggcatcgtggttgcactgatcctcctcattgtcttgacagtttgcaaggacttcgattgctggtgatgtgaaattacagagcccatgcatccgacctgttgcttttgtagccttgcattccttcactttgatgttgttgttcttgcagataagatgcaggaacatgaaaggaaagaacatgagaaaaaatgtagggggagtgtagtgccatgacaccgcgggaccaaaatccatcatttgtgtgatgttgttggcattggccacaatgttcttagctacgcctagaacgatgggctcaaattaagttataacagggctctctaatattttaaataattgtaatagtagcaaatatcgttgtgaatcatgatttgataaggtgattactctacaatttagtgaagagcttcttattgatgtaccccacttctagctgtgctggtgacactttgagtttccttaatgtctttgtaagccttttagggcttgatgcatggggattggaggggatttggattatatggacctcaatcccctccaatcccatgcatcaaacaagcccttactcttggggacttcaccttgttcccaagtatttaccccttttctcatctttgccaacgtccctgctgcagatccgtgttgtgccactttctgatatataaaagcacctgaatcattgccagtgccagatggagagcattttagtctacatccaatgcactctatccttaccatctgtctcgttagttgtcaaccatactatcaactgtgttatcaattgtcgccatctgttatctctactataaaccaacattttctatggttccaccatcgtcgcttttgggaaaaaccttgtacttctttataatgaacctacggtccaagcctccccaccccaatttcaatagttggctttctcaagtgtcttcctccacctcgacgaatccctctacgccctcgccctcgctcgcttaccctttcttccccaggcacgaccgtcaccaccattagacaccttgtcgtcgtcgtctggtgaaagggtcagatccc

SEQ ID NO: 110387 - DNA, 366 bp, Zea Mays
ttatagccatagttgtggtaatatttttcttctcctatgtaggtgccactcgtcaatgacttataaaagtatggtagaatcccttaggcatgccatcattatggtacagaatttgagcgtctaaccttagccaagtgtgaaacaaatgtgtgacaatttttggcaccttacaacaaccaaactaccgtaaatattcaactctcacatatgactatacaaatagttacataatatatatcgagttgttgagcaacatcgatccttttgttgcctcttgacggttgaaagcttaagacccaccataaagttgtttgggtgttttgtcactttcgtgagtctacatctagaactttagttttcagcgac

SEQ ID NO: 110388 - DNA, 490 bp, Zea Mays
tggaattcatacaggacataatattcaggttcgggataccgaatagcatcataaccgacctgggatccaatttcacaagctcagagttcttcgatttctgtgaacaaaaaagcattcagatcaaatatgcctcggtggcgcacccaagagccaacggcaagtagaaagggccaacgggatgatattcgaggcgctcagaaagaaagtcttcgacaagaatgaaaagttcgcaggaaagtggatcagagagttaccatatgttgtctggagcctgagaactcaacctagccgagctctgcatggaaacactcctttctttatggtctatggctcggaggcagtgctacctgctgatctcaagtttggggcaccaagattgatcttcaaaatcatagctgaagccaaagctactaggctggaagatgttgatatactagaagaggaacggttgaatatggtgattcagtcaacccgatatcagcaaactctg

SEQ ID NO: 110389 - DNA, 477 bp, Zea Mays
agaaaatctgccctaaacatcgactgtcaggcgatttttaactgaaacgtggcgcactgttcatcggatttcagaaaagatctcgtcgaagataagaacgccaccgcggttggggatgggtctatggccacggtaaagatcatccatgatgtggcattaaaacgttgcggtggcactgcacggttaatcggcggtcaccggaccatcgtcgtggctctgcccgcgcgggtgagctcgccagcgtggttacagctccgcgagtctcatccaactccggccatcggcctataaattgagcccggatcctgcttcttcaccacatcacgcacacaagcacttgagcaatcaacttaatttcaccagaagaacgtacacagtccacaaaaccattccgccctgttcttcgcgctgccgtgaaggactcctccgtggccagcactccccgggacagttactccctaattgcttcttgttcta

SEQ ID NO: 110390 - DNA, 625 bp, Zea Mays
ccacagagacagaaaaagagataataagttgagagttatacaacggcaacaacaaagaggcggaggaatccaagcaagagataagacttatcgtacgtggttggtttgtcagacgagaagcgggtgatgcaggacgacagtagaaactattacttatgtgtttcgtgcgtgacgcgggacgaccatccaaactattttatctagtttgttaggcgaggtgtggggaggagaacagacttatgtgtttcgtgcatgacgcaagacgaccatcgaaagtggtgttttgtaggagtagagatattggaggataaaagcagcaaaactaaaagtccctgttcgataaggaggagggaggtactagggagaaagaccccaaaacattttctaagaaaacatcaattgtgctgctagcaggcactagcccaaaaagaagttgttcggagagggaggaggataaatagaaagaagagaaggagaaaacaacagacttgccttcttgagcaaagctatttgttgggttctaacaggtgggaagcaaacacttggaaacagttagggaaaaatagtgacgcgatcaaggaactatagctctcaatatcttgtcaagtgtgtcccatccgagttc

SEQ ID NO: 110391 - DNA, 523 bp, Zea Mays
ctaagatgactgctttgtgttcagcgatgttatttgtttatctgagtctagtgcgaaacggagacgcatgacgtatctgcatttgagtcctgtgggtgatgtaatgattgttgcagcacgggcacctgtgtgacaccatgccccattttagtggatggtccggatagtccctgcacgaaactgatgtggttccgaaggccctgtctagtctaccatgaagtcctatgggatttgattgctgtcctaggttcgaaggtgatgttgtaactagagagttcaatagcccatttagctattctggcggacgcctccgaatttctgaataactctccaagaccacgatctgaagtgactcgtactttgcgtgcctcaaaataatatcttagcttacgtgaagccatgatgacggcatacactatcttttctaactctgtcatgttgcacttggaggtggtaagtaccggcatacactatattttctaactctgtcatgttgcacttggaggcggtaagtacttcagag

SEQ ID NO: 110392 - DNA, 432 bp, Zea Mays
gccacggtgaaagcaactaatcccgagcgccagtaaccttcttcctcttcggccaccagcgcatcttcacgaaattggacgccaccgctgtgggagcctataaattgccgaccctgcctgctccgctaagtaattgtgcaaccagtagagcaactcgtgcctcgaatcatccactagagctccccaattagggattccccccaaatcacccaagaacaccgagcggtgtgacctcgccgtggccagctcgtctcaggttcgttcatgcccactgtcctcttctttcagcacccttacttgctcctgatactcgctgacccattaaatttagctaggcggtgctagatcaccgggaacgcgtttgaatgtccgtcgtgcccgctgtcaccatggacagagcgttgtcgagcctcattggtgaaattgagtgag

SEQ ID NO: 110393 - DNA, 308 bp, Zea Mays
aacaaccgacaaagtacaccccgcgttcagtttttggacagcaacctagctgagttcaaaatgtgatatctcctagaatataccaccgaatcgaacgcataagtactctataaaaagatatgacaaagctccacatgattttcacagcgattacagctacttacccccacaaaaatcccagaaactacccacactactgctgtcctcccgccaggacagcactactaccaattcgcctaggtgaatggataatcaaatgtaattgcagcacaaatacaaaataaacacaagatcaccttgagttcttc

SEQ ID NO: 110394 - DNA, 506 bp, Zea Mays
atcccggtgcctaccctccgcaagttggtcagggctgcggggctgggctgcattgctgagatctccattggagtggtgcctcctgttccggaatgtatgccagtttttcctaacagatttctcgccattttgtctgggcaggacttcttcgtgaattcacgcggaaacaggctcttcacttgcatgtggacaccgaggaaatcggagtgcaaagttttgatctttatctgccatggtagcgacatctccttacactcacttcctcccttgattggctatggtttgtttgagaactaacgagccgatctttcttccgtggctcaattttgctaggatacggagccgagtgcagcatatccatgggaggtaaaccttcaagtttcacttccatgttctttccatcagtgatgaactcatggcatcgatgcatactcacaaacttccataaaaaaaatacagacacagtcgctcgattagtacaccgtggatacgctgttcacggaatc

SEQ ID NO: 110395 - DNA, 1003 bp, Zea Mays
gccaagtagtacttctgagttttcttagtgcgataaaaccatttctcatcagtgtgcacaatgttgtacattccattaaaacttgtttcatgtggcacactagatggttcgagcattgagagacaaaaccttactctagcctttttgttttcttcattcaatgtaggcttgattgcatttgagtgacgtctaaactccccctctttgaatctcctatgaagtgttgatagtgacataccgagtgcattggataaatccttgaaagttgttctgttttccagtgctattgttttgattatttctggatcaaatgacttttttaggaccacattttttggttttttttgctcataacaccgttaaccccgcgccttgttttgcatcgtaccttatgcactggactactctcaaaggtactccagtttcacgcgaaacagccttagtgacccctctatctaacttagtatttaccgacactagttcgctctaaaagcatgccatagatagattgcttcaattcattgctgtatgtgttcctcctcctaatctctccaccttgatcaacatggtcgacatgaggtccttctggttgtgcgtcacttgagccctcaacatggggttcatggtggatgtcctcctgcctagaagttgcatgaacatgccttgtgagtcctagtctcgcacgactacctacggttggtgtgaacagggccatcgtgttgcccgcgcccaacaatgaaaccagctccacgccctcgaccagccagaccaagcctaccacgaacacgacctgctactgcatctgtcgatggattactcatttgttttcaacataacaagaattcatatggatttcagattttgggaacaccatgcttactttgtgtgtgcgtatggccaccgacgttatgtgttgtgtttgtgtggccggcgtcaacattttgaccttctccatgttcatcgtggactgcacgggatcaaacaaattgttcatttgagtagc

SEQ ID NO: 110396 - DNA, 334 bp, Zea Mays
ggatatataaactaaaatatttaaataggcaacatagttttcagaggtaagtatttgaaacaagagtattgaagaatctagggatacgagcatgtcaataccaaggaaataaagatggctaaacggtggcaaattaatgacaaaaggaaaaaaattccaaaggcaataaggttatggtcagggggcatctaaaaagatgtcgcaagcacaagagtgagatcagatctaatagaatgagagaagtatagaccatactagaataaaatacttttggcaagggggcatataggagcacaacatagaattagtcgaggtgactaatattttgaagcag

SEQ ID NO: 110397 - DNA, 332 bp, Zea Mays
ctacatcttgtcaaaggtgcctttggacaggtatgtaatttacttggttacaatatttgctttaggtgttcttgaatagtatacatattcaagtcaaatagatgatgaaagttacctgagtgactgatcagtcaaattaattttgggtcaaatatggtgaggcacgtatttcaaaattggttcacttatggtgtaacacatttcatagtttttcattgcctcatgtgttcatttggggcctgtagtattagggtatgtacttttgagttgttagactggatagattgcctgtgcattccgtttgatattgggatttgagaagctacatgtga

SEQ ID NO: 110398 - DNA, 617 bp, Zea Mays
aattccggaactgtgtactgaactctgcccaagtgatagtatcagcggcatcgtgggcagcagtatatgaatcccaccagtcagcagcaggacctgtcagacgtccagaagcatataaaaccttctcccggtcagtgcattgtgcaatattcagcatcttctcaacggacttcagccaatcatccgcgtccagtggatcaggagagcttgcaaatgtaggtggcttatgactcatgaattccctatgcttatcacgggatggaactggtggtggaggtagaggcagtggtacttgttgctgttgctgctattgctgttgttgttgcatttgctgttgcagctgctgttgcaccctcctttcttggcgtatctcctctcgctcctggcgcaattcctggcttatctcttctctttcctgatgcatctcctggcgttcttgctgcatctgagcacgcatatctgccatagtatccgccatttgttgcatcatcctcatctgagcagcaatcagtgggtcaactccgcctggtggaggattaggaggattcatctctgctggctgtggctggggttgtctatatatccactgagtgtgtcgattaggaggcaaatcaatt

SEQ ID NO: 110399 - DNA, 334 bp, Zea Mays
aggaagttgcttcagccatccccagtgagccagcgccggagaggaaaaagataaaggttcttactcaccggccacggtatattgaaccggccacagtgcctaaatatgctggtgaaacctcttcggccaccgaagccaaggagccgactcccctaccgaatgttgaagagccaatcataatgccggaaatgaagaaaatagaagaaccgaaggctacagaaacaaggacatatgaaattttaagtccttcagcaaaaattgaagcaccaaagagccaaaagggtccagcaatgacccccaaaagaaaaaggatggttaatgtgctggatgtttt

SEQ ID NO: 110400 - DNA, 289 bp, Zea Mays
aattgtttccaaaacatctaacacattaaccattcttttcctttttggggtcactgttggccccttttaatttttgctgcttcaatttcttctgaaggacttaaaatttccgatattttcactccctcagctgatgctttcgcttcttccatttttggttcttccatcttttctgtcgctagcacttcggccatttctttgacttctggcagcagggttggttctttagctttagtggccgaagaggtctcaccggcgaatgcaggcaccgtggctggttcaatgtagc

SEQ ID NO: 110401 - DNA, 485 bp, Zea Mays
cagagctcggctatagggaagaagttgttcacaggatttttctttaacaccaaaccttcactattcatgatccgatggtatacacgggacctcggctccaacgactacttcagactccaacggtcgactccaataggcggctgacacatggtggtctggtggtggaccggaacgatctagtgctcgctcgagaaggaaaggaccaatcaggatcccgagtcagggctacatgactatgtccagtggtgcaccggaccggttcagtgcctccactgaaggcagtttttctagctggtttccaactactcttttggttatttgggctataaacagagatcctagccagcctctacaagtacccaagcactccaagagcaattgatcaatgtcatactcctgtgcaacaccccgatttcattctagagaggtctaagcaccattctgagttgtgttagtcattctagtgtgtgtgctttcgagatatg

SEQ ID NO: 110402 - DNA, 924 bp, Zea Mays
gctatatgaagcatgactagcctgggtcatcagtccaccagggtgctccccaagggcccacctatcagtgtaactagtgggtgtaattgtaagtgcacgatgctagaggacgttgcagtgttgtaattactccattatatggaatattccaaggatgtagttggtaaccgggggtatgaatgtactttgggccacctacccctagacaaccctataaatatgatatccctcgtcctgtagctggacaggaaactcataacgagatgctacaattccacaccaaacattttgttgtgcactgtgctccctttttgtctctgagtgtcttggtccacctaacggtacccaacatttggcgcccaccatttgtgcgatgaatactaatcccatgatgcctcccaagaagacaaccgagccagctcaccagccgtcgttgacatagcgagggcgaccctcatctctaaaaaggccaaagttgccttcgcttacaatgtctcaccaaccgatccaaaaaccaccatcgagccacaaggcgagggtcatgccacgaaacaaaagcagttaccaaccaccaccgagccagaagaaaaagtccatacctctagcttagacaccccaagtgacacccacccaatccaaaaagccatccctacgaagccataatctggccagacctaaccaagaacatgtcattagtccccctaggcttcctgctaggaatgcccctcctacataacggtcagtggctccctctaggaatgcccctctagacgacgactacgaagacctacataacggtctagaccttgacatcaacaccaaaaaacaacttttagtcaggagccttcgcatgcacaacagtaatctacagaagcaaagagatgtcctcatagccaagagacaattcaacgaagtctaggccag

SEQ ID NO: 110403 - DNA, 514 bp, Zea Mays
gtcggctggtaagttcttagggttcattattcatgaacatggtatagagatagaccctgaccgaattaaatccatttggaatgtgggacctccgacctgtaagcttgaagtgcagaagttcctcgcaaagataaattatttacggaggtttatttctaatctaactgggaaaattgatgccttcactcctatccttcggcttaaaaatgatgtcgaattcacttggggggtagaacaacaggaagcgtttgatctcattagaaagtatttgtcttcggctcccgtattaaaagcgccacaggtaggagtaccattcagattatacattgtagctgaagataaggtagttggagttattctgacgcaaaagacttaaggaaaggagcatgtggtagcctacctaagtcggaggctggtggatgctgaaacgaggtacacttttatcgaaaagttatgcttatgcctgttttatgcatgcaccaagtgtagatgttatttactgtctagtcattgc

SEQ ID NO: 110404 - DNA, 736 bp, Zea Mays
aatacctatttttctagatgaatgttttcacactttcaatcaatcaaaaagatgtgtggttcggcatggtgcagcaaatcaaagaaaataactctagggtttactattatcacatgacttaaagttttgaagacgggtgaggttttagcgaaaagaaatgggaaagaggggtaacaccctaatttagcgagcgatagggaaagaaaaaaaattcaactcgaaattcggggcgttacacgtgccctgcagcttcttcagttttttggcctctttctgagcgtcgtgagattctttttcattttttctaatagcttcgtcagctatctcacgaccgccctttatccatactttggagtaaaatttaccgcttaacgaagacgcttcggctgaaggattcttaatgtcgtcggctgagataacaattctggctgaacaacagccttcgcatggtcacagtcgaccttttccaaaattgatacagcccacgggtactagcaaaagcacagaaatccactcgatcgctgagtatctcatcaaaagcttcgacctccccgctgatctacaagataaccccatcggggtcaccgcggatgaacctctgctcgaaagagtatgcccccacctttgcaaaactgttctttagattcttggcgcattccaaggatatttcgtagcatctctctttggagtcgcggagctcttcggcattcttttgtgcccttgatttttcaaattc

SEQ ID NO: 110405 - DNA, 930 bp, Zea Mays
ttggtgtattttctaaacgccatccaacacacaggtatgctccgtaacaatagaacatacccagtgagttttccatctacccttgtaggcatgtactctccatgggcacccatcgtccttcaaacacttcacctcgtactccttactgccagatttgacaactcaaaattctctccttaatgacacagcccatttctttacagcatccttcacggcttcaatatttgaatacttcgctccttgcactacctcgttctctcggtactcccactcttggcatctgccatcttgtataatagggttgccgaaccccttcactcagttggcactgggtatgcctcgtcgtccgatgagtccccacattcttccatctcctgtgcctcacggtcttcagcctccatttcatccacaattcttattatcctctccccttcatcagccacaccttgcgattctatgtcataagcacggcggccctcagctctgtcgggttgttctgcctccacgtatccagacggatacctttcatcttcatcttgtgctattacgcgttgtggcttttcatgcaactgtacacgcatgccaaaaggccacccacgtaatgtagctgcatcgatatattcctgccaagcagtagtgttctcgatgcccatcaagtcccacgtgtcagcttcaccctcctagttgacaacaacttgtacgctcggcacatgtgtctccggccggattgacaccaaaggcacgctcgagcgatttcttaattgaaccaaaacttctctctaagggtttatctattccaatgctcgtacgctcaaacagtgacatgtctactccctgaggaccgtacatagcagggccggcaccataatagacttgaaacactaatttgttcgatatatctgcaaatgaatcgtatgacacaattcgttc

SEQ ID NO: 110406 - DNA, 723 bp, Zea Mays
ccatctctcgcaatggactcaaagccttcgattggtctgatgccgtcttcagttctggctcttcggccgattctgtccctgcttcggcaggagcggagcgacttgactcagatacgaaagaagacccctcaataggcctcggcactttggtcgtttcaatgcgcttggggcggtgtgttaaaaccttaactttttcggcttcagcgtgctagaaatcaccgaagcaacagtttttcttttctttcctgccttttgcgaaggataacaataatccgggtatacaaacccgatgacatcaaaaactctattcaatctctttttgcctcgacccccaaaggctattgtcatagcatcatcttcagccttcgagtaggcaccaagcaattcatcactggttgcttcgatggcatctagccagtcatcattcggctcattgaattgattcatgtacccaaaggtgcagtttaggtaaactagaccgccttggctagatccagcagcagcttccttcggcatctcccacccacttgtgagtggccacaccctataagcgatatgctcatgtactaagtcccttatgcctatataagtatatactgtattaaaggccatttggcatgctagtatgtcgttcccatgggcagtggatggcctcctaatgctgaaacgagaccagatagggcgttgaataatcctcttaatatcttccctttcagccaggtc

SEQ ID NO: 110407 - DNA, 328 bp, Zea Mays
cacccgcgcctagcttctccgagaacttcttcgtcgcgtcttgcaggtcagcatacttgaacgtagctatgccaacgacgctaccgcctttatcactgtcagcgatgggtctagaccaccacttcccattattccgcctgctgcaaatcactacgacgacgagaaccaaaaccaaagcggcaacaccagctaccatggcaatcctgttgcctttcccactctctagctctttcgcatgcagcaaggcgaaggtaaatcatcccttcgttaccgtcagcagctacgttaactaactcgccatgccacagggagcacccatcttcgccgc

SEQ ID NO: 110408 - DNA, 343 bp, Zea Mays
ataaattctagaaagctcagggtcctaatcattaaaattaggacttaaatgtaattctctatagcactccctggacgacgggtttattacaataaagctgaggggtttatttaaaactttccaaatccgaaagtgtatgggccaacaagggccactcgatccagaatcaaaggaccagatcagttcctgattcaagcgaaccggtacgccattttatgcatcggattcaactccaatggcacggatttaaaacatcctcgactaccccgcatccgtccgatcatattcaacggcttggatcagatctaccccaacccgagctggtatgggatcagggtcgacc

SEQ ID NO: 110409 - DNA, 292 bp, Zea Mays
gaagttagtgtccttatcgggagaagaagtgttagtggagttggtcttgtttggaccaaggaaaggaagttgtcaccaagtcaccgcccacattgaggagattaaaccatcagaggctatcagtgtagtattggatttcccagatgtgtttcccgaagagttaccaggtatgccacctgaaaggaaggttgaatttgccatagagcttattccaggcaccgcccctatttccaagagagcctatcgagtgtccggcccagagttggtggaactcaagaagcagattgatgag

SEQ ID NO: 110410 - DNA, 812 bp, Zea Mays
gagaaaacaccatcacatgtaaataataacccacactcttacttcattagattttaggtgttacagctagcccgggtccatcaccaaacgtgttgggctgggcatggaccggttcaaaatacgggcctcgggtcaggtctacgggctcgggctccatgtacacctatactgattcctagcatgtctcagaataattcgactattgcttccttaattttatccatgatagctggtggtaaaggactggattctgagacatgaggctcatgtgactaggtagtgttatgcatgttgtctacatgaggataatctatgtgtggcgaagcgaacccctctaactccctatgagttgggcggtactcagttctagatgcgggaatgctttggttttggtgggccgaaggtggaggagggaggagatgttgtggtatagagcctggttgcgtgttgtgcatattgtaccaatctgagtgttgtaccccgaacagtccgtggtaggtccacaacgagttatcaagagtccagtctggggccaaactgtccgagattatactcggatggctcgagcgtgcatagggatgctagcatgttacataggagttgtaagggtagcagcttccctagaaataagtttattggcataccatataattgctaggattgtggaggcccatttgttgccgatgcgacctcgtgagatggaaaactaggtatagtagatttttcgagcgcacctgtgagtttcttgagtaagtgttctacccctcccagaaactgctctaactgatccctttgttgatctacataatgct

SEQ ID NO: 110411 - DNA, 284 bp, Zea Mays
tgaactgccatcaatcctacgctcgtctaccatcctagcacttgatctgatgtgatatcgatttatcgagtcgaagacgatcccagtggtcttgttaggccacgcccaatgctcctacgtggttggtaaccttaagtctacccgcctaatatagttgtccatcttaaccggtttgattgcttgcaggttgtgtgatagtttcgttgtgaaaacatattctgttagttttgtgtgggataaaaagctcaggaatgattgtgacatgtgcagttgacaaacaaaac

SEQ ID NO: 110412 - DNA, 283 bp, Zea Mays
gccaattttcaaaatttaaaacttgcctagaaactgctatggatcgtcaggactagaccgctagacctaggatgaaaggccttaggcatagagggagaaataggtggctaactaattaggccccgtgggccagtacttatattttaaggatgccctaaaaagcaccctattttctttttgagaggcaacgtttcttccagcatgcatgcattataaaacacaagaaggaattaaaattttgagctaaccccctttctttaaaaccatccaggctctctttttc

SEQ ID NO: 110413 - DNA, 282 bp, Zea Mays
ctcaccagggagataagctccactctcctcccaaattcggagccgtcgcctaaagcttctataaattgatgccccactctacttcgccaagttattacaaacccaagacactaactctcatctccgattagccaccatagccgaagaatttgggttttcccccaaattgatcatttgctccaccgtgaatcaccccgtcgaggctagccgttctcaggtccgcactcaccctccttattcgtgttttagcaccctcgcatgcctgtgatgcttgtcggctca

SEQ ID NO: 110414 - DNA, 443 bp, Zea Mays
cttagtggataggctgaagatcagtgaagcaaaacttaatgcacaatccgaagctcataaagctgaaattgaaagcctaaagaaaaagcttgccgaaaagaatgaggattttgaagtagcgaaagcgaagcaagaaataagcgaatggactagctcaagattacaaaagaatgtggatgaacttcgtgaatcgaaaaagagatgttatgagaaatccttggattgcacaaagaaattgaaagatagttttgcaaaggtgggtgcatactcatcggagcaaaaatttatttgaggcgatcccaaaggagtcattgaatagatcggcgaagaagctaaagcttttgacgaaatacttagcgaacgtggagatttctgcgccttcgccggtgcccgaggggttgcagcagtttttgagaaagctagttgtgaacatgttaaagctg

SEQ ID NO: 110415 - DNA, 451 bp, Zea Mays
gtttgatggcttgcatcagattcatcattcgtcatttcttctgacccccagcatttgccccggtagccgaagcggtctcctttgactgcaataggctagtcagatatgaccctagaggagttatcattgcgaacgggaaaggttcggtcattaccttcagaatttgtgaaacatcaacaaaggaaggtgaagaagggcctgcagtcttttctggcacatcttgtaccttcgtctcttcaggagatattctgacaagctttcgtttattgggagccgaatccttcggctccactagaattttttgcttcttgacagccctctgatcttccttgatggatcggatggcctgcctttttagaatactaacaatcctctttcttttcgctcctccgatcccttcatcaaggctatcgtaatctgggtacttaaagttgagagcatccatcacccg

SEQ ID NO: 110416 - DNA, 637 bp, Zea Mays
ggccaccacgagacggggatttgcgaggtatcgaccttctcccctgtctctgggagacacaatggtcgcctaacttcaaagttttgaacgtcgacaaatacaagcccaagcaaaaccctcacagatggttggttgtctacaccacggtttcccaagcagcaggggcaacggaggatgtcatgacggtgtacctgtcgatcgtacttggacaagactcaatctagttgctttgacatcttccccgccattgcatcaacgactgaactgacttctgccaccggtttgtcgcaaatttctagtcccttttcgaaaaacaggcgtagccctaggaccttaaatgcatcaagcgtcggaatgaagaaaccctccaatcatttctaaagagtttgcaaacaatgaggaaccgcatccccgacatggtcgaggtggccacgatcgaggacttctaccgtgggtgtaatgagtcggccttcgtccgagctttcctctagaaagctctagctaccttggagcatctcttccgggaagcagacatctatatcactgccgataagtgggctcgagacctcatcggtcagtcgaagcatgcaccctaggcccaaagaaggaagcaagctagcaacaagacaagtgctgg

SEQ ID NO: 110417 - DNA, 413 bp, Zea Mays
tgcaggctcatagtattgcacataattctcaaagttttctttagtataaagatcaataccagccgagaccaagtcatactccaaactgtttgcagcaacaaactcaacaaaggttgcatcaaacctcttaaaccctgtcatacagataattgtcttctcctcaatgtcaaatctctgtagtggcaaggaactgtctgaccgccatcccattgtaggcagtcttctgtcccataaactcatatagccatcatgccttgaatttggaaattaaaccctccatcaccatctcattctgaatatactcccaatcaatcacctagtacttgtggaagtaggtatccatcaaagttccctagaaacatcgaattgcagctgagtatgaaagaatgggatgttagtgtcactgagcaggg

SEQ ID NO: 110418 - DNA, 475 bp, Zea Mays
tctccacttggagatttgaattggggtttctacaggggcctttttgcaatacttctctcccataattgatggttacaaacttagttagggtttgggtaaaagttacacatgctttgcccacttgctcactctctttcccccccccttacttagggttttggaagatagggtttaggagaggtctagggttcttctcccccctgatccaaggtagtaagtgtgcaaggattagagtaatgcttcttatgtcatttgcaacattattagcactaggtttccaagttcttatgtggtgccctaagtctttaccccttgtgaacacagcttctagtgccaaagtgggttttagccagggtaacacctggggtgttacacaacggttcctccggacgtcttctcccgagacttgcatcaaccctccgtcaagaccgacgacacgcccgagcccgagaaggtctcggccctacccgaggcg

SEQ ID NO: 110419 - DNA, 462 bp, Zea Mays
ttaaaaggattgtactgctccatctaatcaaggcaattaggtgtgttccctttaaatattacttacctttctttgccaatcttttcttggtttatctgttttacttttataatgatcaatgttttcaaatgatatcgcatatcgatactgaaattaaatggaaacttttccttatgggactgcaaagtaatacttccaaaactttagccatggagctcatatcatggtaaccttgtcaaacctgatgttcaaaccaaaaaatgagttatcaggaactggtaaacttcacaaatggtgtttgtaactgcagacatgtgcataataactgcataaacagtactgcaagtgctttgtgtctgtgcatgtttggttatttcctacatgtcctactcaacacatgatttttgacatttatttaggatttcttttgttcttctgtcctactacttgaaagctccatgt

SEQ ID NO: 110420 - DNA, 383 bp, Zea Mays
ttttgcgggggatttttcacttgtatattacatgactccgtctcgttaaaaacctcaccccccgggaggaaaagagtgtgggccaaaataaaattgttgttgcgaattacaagggcgagctggccctgaggagtcaaacaaaaaacttgcggagattatcaatgttccaggaatgctccaagtcctcgccggatggcgttgcgagcctgtacgcgctggggacgccttcgtcttgacgatgaaagggccctcccacttgggctccagcttgcccctggactctgtccgagctgtccggacgagtacgaggtctccttcgctgaattccctcgggatgactgcgtggtcacgccatgcttttgtttgggcttggtatttattta

SEQ ID NO: 110421 - DNA, 329 bp, Zea Mays
ttattggatcgaaattatcgtcgtatccgcagcttggtttagttatggtgagatctttgattacccttattagttagcggctatggtaaattgaatagatatgttggtcacgatgatttcttgttctagcacaggtccgttgtggtgatcgtgtctagaaccattgtcgtgcccatgtgctggtcctctgtgagatgcaggaaagaaattttctcttctttcctccttttgtcgttgtgattgtaagtagctttggttggaatgctttagtgatatgccatgttatggttgtattagatatttgtgtaaagtacctccttgtattcaat

SEQ ID NO: 110422 - DNA, 664 bp, Zea Mays
gagaacatcaatatgaggtagcggatattagcacgataatccacacataacctcttgcttttatccttcttctcaacaaacaataccgggaaagcccatggtgaccagctaggcctaatgaaacccttagccagcagattgtccaattgtcgcttcaattcaacctgctcctttggagccatccgatacggggcttatgaataggctacgtacccagaatcagcttgatttcaaaagctgcattgcgctctggtggaaggccttgtagcgccactggaaacacgtcggcataatcactcgccacactgatgtcctacacccgcaaggcagcctcactttccaccatcatggagaaaaggattcccgacttccttgaccgatgatccaaaagtaattgggacaacaaggaaagagtgtactttggagagcttcccaagaatacaacctccctacccaacggcgcctgcaataacactgtcttccaaaaacaggatataactgcacgatactaagttaaacaatccatactcaagataacatcaaatgaccctagggaaatcaccacgagattagttgaaaagacctcatcagcaagaacgacagaacaacccgggcagactgaacagctactaacggagccattaacagaactaaccacaattgg

SEQ ID NO: 110423 - DNA, 516 bp, Zea Mays
cttagcagcaccttcagaagctgaagcacccttggtcatatccacaggagctgggtgaccctggccagcaacgtcaagagccggagtgtccccacgatctagaccgccctccaaggtcgaagaagcgtgagaaaccgtccgagttatctcttgccctatggattaccagccaaagggacgtcattcaggacctctgtacaaacgacagaactttcagccttaggaggctctgataaaaggtcttcaggaataatttcctctaatgcatggtcaatggcagccattatcaacccctggaggctaattaaacccgacaaagcctgcatgggaatgtcactgctgctatagctacagctgttcttgcgaatcaaagggacctcctcttcttcctccccatcctcatcaagcacacgaccaccaactctaacaccatcacaaccatcaatgttgtccttgaggttggtgctcgctgggccaccgccgaggactgaggtcgtaggatcagcatccagttcc

SEQ ID NO: 110424 - DNA, 338 bp, Zea Mays
gttcccctgagccgtgggcaggggcccgacaatgtccaggccccagcgctgaagaggccatgtgtgggtgattagtttcgtgaattgcgaagggcttcctgatcgaggtgaaaacttctggcaggcttcgcaagaccttgtgacctgatttgcgacacagatcattgcgggccagtagaaaccttgacggatcacctttgcggctagggcccttggccctgcgtgagagccgcaagtcccgcgtggacttcgcgcaggatttggacgccttcagtctcggtgacacatttaagcattggttgactgacccccttcttgtaaagctggccttcaatcag

SEQ ID NO: 110425 - DNA, 740 bp, Zea Mays
ctccgatgggggagagaggtcggctgtaataagtatatgataatgagttgcgaaggtaaaaacgaacaacaaggcaaaatgttttaaataaaagtacctataatcatggcgcgctcgacaatctctttagcttgtttagcttcctcgcgggcgtcatgagattctttctcattctttttaatggcttcgtcggccatctcacgtccacccttcatccacacatcagaataaaatttaccgcccatcaaagtagcttcggttgaaggttcttttgcatcgtctacagagaagctagtttctgcctgggctatagtcttgacatgttcacaaccagttttctccagaactgctgcaaccccccgggcaccggctaaagcacaaaaatctctgcggtcacaaagtatttcttcaaaggcttcggcctcttcgtcgatccattgaataactccttcaggatcgcctcagataaatctttgctccgatgagtatgcacccacctttgcaaagctatctttaagtttcttcgcacaattcatgggtgctttatagcatttctctttggaatcccgaagctcatcaatatttttctgtaccctagctgtttccatttcacttatttcttgttttgctttcgcaacttcaaaattttcattcatttcagcgagcttattcttcaaatcttcaacttcaattttatgagcttcggcttgagcgttgagctgggcctcactgcttttcag

SEQ ID NO: 110426 - DNA, 697 bp, Zea Mays
gtgatttcttgggtttggttgggctaacgcattccaagagattggttcttgatcggtgtcagttggggaatgtgcgttgcatacgcagattcctgattctctgttgaagcaggggaggtcttggagtaattcgagcggattagtttggtttttggtccaccgtttgtttcttcggtttggatatcaagggtgttgttcacatcacattcttgtctcgttcggagtgatcagatggggaactgttgcgatttacgtttctagtcaattctttctggtgtcttgcattcactgtggtttggggggattaggcattcgtgctcttcataatcgaacgtcacctcgtaatgtggattctttggtctttggtcttggaatcatccatctttttcaccaatatgactgaagaagaaaactcactgttgctgcgctgaataatgcctgacgacaacatctcttgtacttggcgttcaatttcagtcttcagagctggtgcatatctgtaaggcctcctattaaatggttgagcaccgggcaagagagacatcagatgatcacaatctcggactggaggaaggcctgcaggaagtgcaaatacagaatggaatcggctgactagtgcttgtaattcagctggtaaggtagagaacaccgactggtccttgtctggcaatgcagacaaattacatagttcaatgac

SEQ ID NO: 110427 - DNA, 618 bp, Zea Mays
cggcgatctactgtggcaaccgcagagcgactgaactacgacggtcactggatggtcactacggctcataccgatgcgataaacttcctaaggcgtggcgccctcacggtgaatggtgaacacgtcggtgatagccactcggccacgtcgctggtgtgcactgatgaaccatcaagcacacagcacatcccagctcacccgcgacaagatctttcaccccgtgatcattatccacgtttaattcggtgtgaatcacgacgatagcacgaatctgcgcgcgtggtcgccggcggtgaggtctctgagctggcaatctgatcagtatactataccatcgcaaagctttatcagttagcctgacagagcatgtttgggatcaattttgctccatactttatgtggtgactcaaccaatactctgcatcaaagtcgaagcctgataaaccagctctaactttgttacattgtgcacccacaaaaagtcacagaatcttacttaaaattgagccctaagttcatccaatgtcactgtcactgaaagttcagacttaaagtgacctgacagcccgactttggatcaaattttctcaaaatttctcatggcaccaaggcataatc

SEQ ID NO: 110428 - DNA, 350 bp, Zea Mays
gggttgatcggccaagtcttcttgtttgggtgctggtgggggtggtggtggatttgggtgatgtggtggtggtggtgggagggcttggatctcttgttgttgctcatacatatggttttgctggtggggatggtattgttcattgtggaattggcgctggtgatattgttgggggtggtaggtgtgggaaacaactcgttggttgtcagccggttgatttctggccatcatatctttggtggccttggtttcagggcaacccctggtgggatgtgtggagtcctcgctgtgaattagacagtaaaaccttcgttattgtgggactcggcctttccctctgcctctagggt

SEQ ID NO: 110429 - DNA, 431 bp, Zea Mays
ccttgtgacttgatgtccatgaggttgcacatctactagattagcccacagttacccacagctcccctaaattgttatgcagcaaatacaggtttttgaacttctgtgtagtgaatcaactcaaacttctattccatggtacgaagccaatcgtcagcctctagaggatcatcagctttgacaaatacaggtggacatgtttatgtgaattcaacatatgtaatctctctagggtgatgttgttgatcacgacctccttgatgattactctgattttgtgccatttcttggaggaagcgagtattttttgtagtagcatttactagagatgcaatagcatctgacaaggtgggaggcattggtggtggattaggaatatcattaccaccaccaatgcgggctggcatctgattatatacaaaccaaagttt

SEQ ID NO: 110430 - DNA, 438 bp, Zea Mays
cagtgagtgtcgtgaggatcgaggaacagggaggctagcttgtttcacgtacgaaagccccagagatccctgttctatgggcgaaattttcaacaaatgtccgctaaaaaccaaaatcgagtggccatgggcatccacaaataaaacgtgtaaagaccatacgccatagatttgcggaaaaggtgatttgcatgggcatttgtgccgccttgattggataattacaatgagaatgtaaccaccgctgccgttgcccacaaaaagaagcgcttcacaccatgcaccgttgctttcttactccagcaaaaagaacgcatcacgcaccttgatggccaggataaataacttcctcccccatagcatgacaacacaacgaaagtgaatctgttacctatggtttaggctagaatcaacctaaaaagaagcatgtcacactac

SEQ ID NO: 110431 - DNA, 666 bp, Zea Mays
ccctccattttagttagccctttctgtgatcccatagaactcaacatttctggttccatatggcgcaacatctcttcgcaatcaaattctttaaaatctttattggcatccacagaatccactttaccatccaccttatcttcaattccgacagctctctcgtcattaccaggcacttcacacggatccaactcaccatgttctgaccatatcgtgtaattgtttttaaacccctttttagcagatgtgattgaattactcctgtatctctccaagctatcttattatcacaatcgatgcacggacataatatctccttactctttcgcaaattcgcgtgcttgttggccgcttcaataaagcttctcaaattttgaatgtacgacggatgtggtcttggcacattgtacatccaacctcggtccattacctatccctatattgattaacatcaataaaatcattaattaattgaattcatccctaaaacatgaaaaataaatgtacatgaaagtgaaacaagatcatatcgagaggtacctagcaaatgaactacaaaaaatatttaaaatatccctaattaattgaatttaatccctaaatcatgaacgaaatgatgtgcatgaaaatgaaacaagattgcagcaataggtaccttgaggtgag

SEQ ID NO: 110432 - DNA, 408 bp, Zea Mays
cactggatctagaatccacggcaatcgctcgctccacacatcattaaatcccggccgactaactcgagatcgacggtcccagacaaacgcgcccgaaccgatacttggttttcaatcagagtcgcgcatagagcatccaacggtccacggtgcatcttccctagccctcgccgagtaacagcggtgcccgagctcccacggcggagagccaccggaagaacatcaatccgatgcaccgagcaccaattcctccaatctagataatctacacgttgtcatgaatggcccgagcacgtggacagaacccaactaaagtaaagcgtgcgcgcgagccctggccacggcgcacggcggttccaccactccggcgagcaatcgccaggtgacgcgtgccttttattgaacgat

SEQ ID NO: 110433 - DNA, 361 bp, Zea Mays
gaggatgacaagttcggtgtgaagaagaagataagggatggagacgacggcaaccagccaaattgttgtggtttttggattaatccatcgatacccacttacaaagctagggaaggcttataagctccacatacttggcccaacggccccaattacacaaccccattcgggcccatatactctaatgttgcctcacttctgcgacgtggtcgcgtaggacaactcttctttcttgttgcttcttcgtagtgacagctccttcaatggcctattctccatcttcaccgatggtagtatggttggcgttcgaatctctggacgttgctgacaacgtagtagtgctgctcaaaaagacaagttg

SEQ ID NO: 110434 - DNA, 519 bp, Zea Mays
caacgaccggtgctctacttcggcgcagacctaattcaagccctaacaagcgtttcccctcaactaatttcactaacggcgctctaacacactctgtccacggtgaccgtgtaataaacggccagtccaatgtgttcccagcgatctaatgggtcttagattaattggcggggtcggggagcatcaggggcacacaaggacattgaaacaaaagagcagagggcatgagaggacctgaggtgagctagccacggcgaggtcacaccgctcggtgttcatgagtgatttgagggaaatcccatattggggagctctagtagatgattcgaggcacgggttgcttcactgcttgcacaattacttagcggagcaggcggtgtcggcaatttataggctcccacagtggtggtcggtgaattggagggagacgcgcgacggccgtagaaagagaaggttactggcgctctggattagtggctttcaccgtggcagctccaccggcgacgagccagggccacg

SEQ ID NO: 110435 - DNA, 485 bp, Zea Mays
atcattgaacaaaaaaaatttcagcagcaacaggtgtaaacagtgatctttattttgtgcttttctagcttttttcctcataaacatttctagagctagtttgccaatcaaccacacacacatgtgtacgatattagtgaagtaaagaaaacaataatagtgtatcacccaccaccctccctcttgattctagaacatcctcctttgtatctcagtaatgttttcagccaaatttattttatctcaaataatcaagcaagcacagaattgaccatgggatgggttgtcgcatgtcagggggaacaagggaaggatgatagcttggccatgtcatgttagcatagtataggcagtacatcacaagcataataacagagatggtagatgagcaaagtgtttcctatatcccctcatgtagatataattgtagaaatgccaatgacagagcatcttgtctttctcccgagcacgacaaagagtcttct

SEQ ID NO: 110436 - DNA, 543 bp, Zea Mays
attttctcttgctcgttgatgattacagcaggtacatgtggttgacacttctggcgtccaaggacgcagcacccggcgccatcaagcgtgtacaagcggtggtcgagcgcagcagcggaaggaagttgtgtgccctgcgtaccgatcgcgggggagagttcacggcgggtcacttcaatgactattgcgccgagctcggcgtaaggcgtgaactgaccacgccatatacaccccagcaaaatggcgtcgtcgagcgtaggaaccagacggtggttggcaccgccaggagcatgctcaaggccagcggcctccctggcacgttttggggggaggcggtctccaccgccgtctacctgctgaacaggacaatgacgaagggaaatggcggtaagacgccatatgagttgtggcatgggaggacgccagcggtccatcacctgcgcaccttcggttgtgtggctcatgtcaagagcacaggccccaggatcaagaagctggacgaccgaagcaagccgatgatttttgtcgggtatgaacctggca

SEQ ID NO: 110437 - DNA, 332 bp, Zea Mays
agtgatcctaacatttaaaatccctaccgttggtccccaatcggatggttctgcggcgctatgagtttgatccgcgcagatctaatccataccacccgcgcgaaatctgacggccagtacgcggggataccccttcgcgtggcatttatctaaagagaccttaagttattaacgattcaacccgcagtccacccgagtccctccttgagtctgtggaatcttgcgctaggccccctgacctttctggaaaatgagaccgagtccagaggacaaaaaaaccatagaaaataaaacaaaatttgatttttaattcataaataaatgttagaatt

SEQ ID NO: 110438 - DNA, 518 bp, Zea Mays
ctccgtaaattctcaaaataaataaataaatggaggtaaatagtgacgttgttttctagttatgcaggaatcttacgggcctacggcatttttagtgcaaatctgaatgaactttacttttgtttagatactatctgttatcagttgcaatctgtattataatgatggagtaccgctttaaaattaaaaataagtgttaggctttgatggcccaacccttttatctgatttttattgtttttatagtactcgtatcacgtggtttgtctgtaacaataatcacagtttggacttatttaaaatggtacttacaagtatgattcttctttaaaatagtattccagccttatttcctctatttatattttcttttcttattcactaccacttaaaaggatatttttacctttgtcttttctcacaatacataaacgaaagaagtcttgagggaactctcactgccgtcaccatccgacatcttcctcgtgttgccgctagccgtcctccggtcgtatgcc

SEQ ID NO: 110439 - DNA, 427 bp, Zea Mays
acaaaagaaagaaggaacatggaggttttgcatagattacagaaagctcaatgatatgacagtgaagaataggtttccaatgcctttggtggatgagattttagatgaattggcaggcacccaatatttttccagtttggatatgacaaatgggtaccatcatattagaatgggcgaagaagatgagcacaagactgcctttaaaacccatcatgggcattatcaattcagagtaatgccatttgggttgacaaatgctcctgtcacttttcagtgtgctatgaatagtattttggaacccttcctcaggaagtttgtgcttgtttttattgatgatattctcaattacagcccaacattgcaagatcatgttcaacatttgaagcaagttttcactgtgttaaggcatcaccagttttatctcaaa

SEQ ID NO: 110440 - DNA, 491 bp, Zea Mays
gcgaactataatgacgtgtcacgagagattggaatcaacgacggaaatggtgcggtggtgtagtgtgtgcaagcagctcaagcaagaggggagcaggcgagcagagacccgaaggactgataagagagtgtggcgaggtgagaagcgcggacgggtctgctcttatagttgagcagaggaagtggagagggtgtcgggtgccagcttaaaggtgccttgaaggctatttgctgtggtgttgaatgtcgtgattgaaatctccattaatggaggaggtaaggctgggaaagaaaccatcgtgacgagaaacgggcgagcgactgattgggcgctgggccagcgaggcgacatgggctgaatcgacgatgactgctgctgctgattattgcgaacagagcaacgtgagagaaagtggaggagaggaggaatagtgtcatgggtcccatgcgtcattgagaggtgagagaagagaggaagagtgcgagaggaat

SEQ ID NO: 110441 - DNA, 694 bp, Zea Mays
atatggttataatgaaaaaaattgggttactttggagaagccgagagtaggcttgttcgttttgctggcgaagaagtggttccagagccaaaggatgatgaagttattgtgtttaaaagcttcttcagggtggggcttcggttccctctctatgatatgataggagaggttttgaagaattttgaaatataccttcatcaattgacacccaacgcaattgttagacttagtgtctacatctaggccctccaaagccaggggatgagtcctaatgccgaagctttctgctaggtgcacgagctgcatcaccagatgaaagctagggcagatggccttcatgaaaattttggctgctacaattttgcgtatcgaaaggatacaaaggcaccaattcttagctaccgcactaagtggccaactagttggaagagtgaatgggtttacatgaaagcagacgagaaaaagagggagaagctgatgagtatggttatgagtccactgactttcagcttcggaatgacgaggcccttgtgccacatgcaacttggctccccatgccaagtagccgaagtggagtttagagtggtagcggccgaggtcagtactagggatttggtgcaggaattcttggcaaatagggtattcccgacctctagtggctgggggatgcccaagaagaaggatgtgagcaaga

SEQ ID NO: 110442 - DNA, 642 bp, Zea Mays
gaaatttgcaccgacaaagtccccagtaaaggaaaaggtagaccaaaatgttatgaagcacttcgttgtccatgctaggcaagaagaactagagtactggataaagctaagaggcaatagactatgaaggactctatcgagaaattgtttcagaatagagggcagaaagggaaaggtaatccattgcttacacaacaagaaaagcaatcaattgatctatttattgtgttttcgagggactaggatcgcgtgcaaatgatgatgagcactagtctcacaactcttcagagaataaccaatctcaactcctttaaagaacgagttttgtgtgtcgtgtgttgcgtgtcacacatgaatcgtgtagatcttttttctcaccccatgtctcgcctaacgaccagataagataatccttatctctaacaaccaaataagaaaagccttaacacttgcatgcgcaaccaatcatacaaacatcacgagcgcttatattaaccctcaacatttcccaactattttcctatctctaactctctcacccaaattcttctacaccaccatagaggacttcaagtagtccatcttgttggcatccgactctccagtgacgatctgtggccgagaatctgactctcttcctga

SEQ ID NO: 110443 - DNA, 427 bp, Zea Mays
gaaaaatacaagagttaaactctttaggaagagtctatctctacacgacgctctatacatattgtctattattacctgcatttatggtgtgattgattttaaagttatcctattgtatcatagatttttagcgtctcttctagttagaaaaccgatcaaaagtctctagattgtgcatacccttacacgtactcgatagtgacttgcagttctgacggtggctcagggctagaggtggtaatggatcacgatgcaaatatttcttcacggtttatttaggtccttaattaattttagcttaaaaataaatataaatagagctcaattctaagactgtttacaacagatcgtgtaaaatagattttttgtacgatagatgacactccttgcatattgaagtttaaaatagagtatagcatgaacagat

SEQ ID NO: 110444 - DNA, 374 bp, Zea Mays
gtcctagtctctacaccccacataaggcgaggcccgatgctgccacgtgtcctacgactcgtgatgtaagtcatcggggaaagtttgacgtcagcttccaagtgtgaagtgcctctgcattaactacagacgagacgtatacctgcccaccccagtggtcgacggtgcgtccgcagtatgcaggtcgtacaatactcgtgcgttaccaaggcaagaccattgtctctctgcactgtgtgggctgctatcaccatgactcccaccgtagcccgcgttgtactaaggcaaagggtgacagacggagaaggcatgacgacacttcctgagcaccctacatgcatgcgtatcagcctacgccgcaacctactcctgcg

SEQ ID NO: 110445 - DNA, 460 bp, Zea Mays
ataaacgaaggagtaacaaccaaagttgttgtgatattgttccttcccaaccgccttcgtctggtaggataattcgtgtatattgcagaagcagtcgacgtttgactctagcccttggctcctcatcccccaaataaaaactccaactttaatcaaagcttcaggagtaagctgatgaaagtatatttcgaatcttttcagcacttcgactagcatcttatgcaagggaaagcgaagcccagccttcagaaaacttttgaataccaccacttcgtccaccttaggaagagaaacaacgttctctcctccacccctcactacgtatatatcatggaaatatttgaccttcattgcttccatatgccccttcttaacactggattttccaaaaacaacatggcttggcctccatggccgatcttcggcgtcttctgcaccactgtcgaaatcaacgtcatca

SEQ ID NO: 110446 - DNA, 491 bp, Zea Mays
gtccagagatgctatgtatttttaggacgaatttcccatgaaagctacacatgatacgtgtagtgatgaaccaacgataccccatgagcactttattccgatagaacacactgaggaatccaaaatacataatcatgtgcaagatgacaatgtatcaactcgaaagagtaagagaccaaggattgcaaagtccttcgatgatgattatattgtatatcttgtggatgacacaccaagtaccattgaagagaaatattcctctcctgatgttgacttttggaaggaagcaataaggagtgagatggattctattatgtctaatgaaacttgggaggtcgttgagcgtccttatgggtgtaagtctgttgggagtaaatgggtgttcaagaaaatgcttaggcctgatggtactatggaaagttacaaggggatgcttgtaattaaaggctattcacagaaggaatgtgaggatttctttgatacttattcac

SEQ ID NO: 110447 - DNA, 426 bp, Zea Mays
gttcttggttcggggtggtgtgctcggtggacgcaatgtttatactggtttaggcagaacgtccctacatacagtcttcgaaggctgacaatactggcacctttgttgctcaatgcttgtagtaggggttacaagcgggtgagagtgagaataagagctcccaagtaccttatgcatgggtggacctaaagactatgggactagatcctaaactaagccttggacatcacggtggctcacgccttggctccagcctccgagtcttctagtctcgttgagcgtgtgattcctatgttggtcgttcctcttttatctcgtgatcgacctcctccttttataggccaaggtgggggtcaatcgtcggtagcttcctcaagaaggagctactatgttgtggtaaaaccaagtgttttacccttgtgaagt

SEQ ID NO: 110448 - DNA, 307 bp, Zea Mays
cttaaatcctatccttccttgatttgatgaggtcgatcatcttcgatttcgttcttgaagttgttatccgaattagggacatgtagttaagataaagtagtaggtggagcagctagtttagtaggtggctatgagattagtcagaatctggttgggttgttttgcttctgaatggtttggataggttatgtaacctatgatgtatgtcaaattgttgggtatggcctgagttaatcccaatcaccaatttaggcttaagtgagttaggagtatgtcttatcttctgtacccgcattaagtaactcac

SEQ ID NO: 110449 - DNA, 429 bp, Zea Mays
caacggcaaacagtttgacaaccaagacttcagggatttctgtttctccatcggcaccaagcctgtcttcgcctcggtataccacccgcaatccaacggcgtcgtcgagcacgccaacgacaagattttcactgccatcaagaaaagacttctcgacgacaaaagggcaaatgggccgaccaactatctgaagtggtctgggccctaaacacgacagaatgccgggcaaccggattcataccatttcgtctattgtatggatccgaggccatgacgccgcaagagataaagcatgggtcaccccgaacaagcacatcagcagttcccgatgtcgacgaaccaacgtccaaagatctcatcgacggagaccgtgtcctcgccctacaggccctcaacaaatatcaggctcaaaccaaggcctggcacgac

SEQ ID NO: 110450 - DNA, 312 bp, Zea Mays
ttagcttccacaccttggcagtgtcaattagtttagaaacatgtgcaaagtaacttcaagagaatttatgccaacaactaagcagatgggcacaaaatgtttcgttttacacaatagcattagtggacatgtccattgaattgaatagaacatgagtgatggattatacatttttcaattaggaactattgaggggaagattagaagttgtatgattttttgaagattagggagaggaagcatcgtacaatatgtttattagtatgacatacctgtctttagatagaagttgtaggctgtaaacttgagttt

SEQ ID NO: 110451 - DNA, 475 bp, Zea Mays
agtggatcgaatggttccggtggcggagataattcagctacaacggaaaaaattagtcagtctgaagccacaaaaacaaaagccgaagctaagtgctgcaaaataatacctatgcctctctcgtgctctgcagcttcttcagcttgttttgcttgtactccggcatcgtgaatgtctttctcacttttcttcataatttcgtgagtcatttctcggccaccatttacccagatgtcattgtaaaattttccgctcattaaacttgcttcagctgagggatcctttgtgtcatccacagagaaggcagcttcggcttgggccagagtcttgacatggtcacaccctgccttctccaggatggctgaaattcctctcgcaccagagaacgcgcagacatccccgcgatcacttaaaatttcttcgaaagctttggcttctccacttatccattcaataacaccttcagggtcgccgc

SEQ ID NO: 110452 - DNA, 359 bp, Zea Mays
tctgtcgtgatatttattgcccgtgatgttctctatctgttatgtttgtggcataacttagggttcttgaatcattcctccgtttgccttatttgtgaagttgattcctctggaatagtaactgagtaactcgggcgtcatatcgtcgcttttaggggtgatggccgagctattattgtcaacatttacgcttttgaaatagcgtccgagtgatgatgaagccacgtcagcgtcggaatgactgatgaccacgtcggcgctcttagaggtaacagccgagtgacttttgacgacgtcggcgttttagaggtaactgccgagtgactgaagacaatgtcgacgttttagcgataactgcc

SEQ ID NO: 110453 - DNA, 514 bp, Zea Mays
ttcggaggaaggctccacccaaggcatgtcaggacaatccacaatcctagctcaagcgaagacaggggaaatcatactcaagggcatcaacacagctcccaatcattagggacacagcaaagctccttcaggccaccagacccaagaggcagaggaggatgaagcttcggaggaagattcagctcgcaaccaagaaggttgttttgcttgttctatggagaaaataagggacatacaactaggacatgccaagtcatgatacagaagcaaaaagaaatagctgaggccgaagcatggcagaatcagccgaagcaagtcctacatattgctttgtgttattccacgtacattcctgagtatgtgggcaatcaacaaccattttcacaacccacagtatcagtacattcggcaagccactccctagctgcatgggccctgccaccaccaccagtcatggctcaaacttcgtctcataatcaacagccagaagggcaccgccaaattcagcaacaac

SEQ ID NO: 110454 - DNA, 285 bp, Zea Mays
gccagcaccaaatcaagacaagggaagaaagcagaagatacaagtcatgcaagggaagctcaacttcactactatggaggaagtacctgagggagcccccatcatgaccggtatcttttcagtttataatcaacctgctttaattctgtttgattctggtgcatctcatagtttcattagccaaaagctcaatgctaaatgtcaactgcctttctatcactcaaaagggtcgtttatgatagccacacctgggggtaaaattgcaactaatcaattaaaccaaag

SEQ ID NO: 110455 - DNA, 485 bp, Zea Mays
ggaccctgatcttagaaagaagatactagacgaagctcacctttccaaattctccatgcaccctggtagcaacaagatgtatcatgatctcagatctctatattggtggacttgaatgaaaagggaaattgccaaatacatatccgaatgtgatacctgccagaggataaaagctagtcacttgaaggcagcaggccctttgcaaccccttcccataccatcttggaaatgggaggacatttgcatggacttcatagtgggattacccaatacctccaggcaccatgattcaatttgggttatcgtggacagattgaccaagactgctcatttcttgctagtgcataccacccacagggcagagaagtacgctgaaatttacgttgatcagatagtgaggttgcatggtattcccaagaccattgtatctgacagaggagcaccttttgtggcacgattttgggaacaattgcaagagtcacttg

SEQ ID NO: 110456 - DNA, 4072 bp, Zea Mays
atttggtattcaaagcctgaaacagtgacttccagaaaagactagtaaagattttgtccctatccgaaaccaaagacttgggagtaccatgcagtttcataatgttgtccagaaatacttgagccactgtagctgctgaaaaaggatgtttcaatgcaaaaaaatgagccgacttagtgaaacgatccaccacgaccaaaattgtatcatagccttcagacttaggtaatccctcaatgaaatccatcgtcaaatcctgccaagcaccatgtggaatgggtaaaggctgaagaagtccagaggaatgctttctttcagtcttagcatgctgacaaatgtcacactgactgacatactccaagacatcacctttaagtcccttccaccaaaacattctcttcagtctgtgataagtggcttggcctcctgagtgccctcccatagcactatcatgcatagcagaaatgagtttggttttgagggcagaattattggccacccaaatcaacccattcttccttataataccctgatgtaaagaaaacccatgttcatcaggactgtgaatggccaactgacccaacaactcttgagcttggacatcagtaacataagaattcagtacatcctgaatccaaagaggctgaacctgcatgatagtttgcattaccatagcatgtcccactcgagataaggcatcagcagctatattctctttgccttttcgatacaccaccctgaactggagtcccataagcttagccatagccttgttttgccattcagaatgcaatgtttgatcctccaagaagctaagagccttatggtcagtcttgatgatgaattctgcatgttgtaatattgtcgccacttggaaacagccaacagtaatgctaaaaattctttctcatatatggacaacaactgattctttgcactaagagccttgcttagataagccacaggtttatgtttttgcatcagcactgccccaatacccactgcacaagcatcagtttccacttcaaagggcacctgaaactgtggtaaagccagaactggagtagtcatcatagcctgttttagagcaacaaaagctgcctcagcctctgtagtccacacaaaagccttgtgctgcaatagtctagtaagtggcttggcaatgactccataattcttaacaaaccttctatagtatccagttagacccaaaaatccccgcaattctgttactgacgatggagtgggccattttctcatagcttcagttttagaagggtcagctgctacaccatcctgagaaatcacatgacccaagtaaatcaattcagttttaccaaaagcacacttagacctcttgagaaaaaattgatgctccctcagtttagtgaacaccatcctcacatgttgcacatgctctctccaggaagcactatagattaatatgtcatcaagaaacaccatggtgaacttcctaagaaagggtgctagaatggaattcatagcacactgaaatgttgctggagcatttgtgagaccaaatggcataactctgaattgataatgcccttgatgtgtcttaaatgcagttttgtactcttctgttatccccatccgaatctggtggtacccagcagtaagatccagactcgtaaagtatttagtgccagctaactcctccaatatctcctcaaccaacggcataggaaatctgtttttgatagtaaggtcattcaatttcctatagtccacacaaaaacgccacgagccatcctttttcttaactagtaacactggtgaagcaaaaggactagcacttggggtaatgagcccagctttcagcagtgcatctacctgtctttcaatctcatccttgtgaaaaggtgagtatctataaggtttagaattcacaggaactgctccaggtaacagaggtatatgatggtcaaattctctgacaggaggtaactgagtaggaatagaaaataggtctgcgaactccatcagcaaagcctgaatatcttcatgctgaacagtgctgttatcctccttaacctcctctagcagaaccatgatccacacgtcatgacctttgagccatttctgcacttgcagaactgacacattctgaatggaagaattgttctcagcaccatctccatacaacttcacccattggccagcatccttaaactgtaatactttgtcaatccaatcacactccataggactgtgctccatcaaccattcataaccaagtatggcatcaaatacccccaaaggtaacacccgcatatcagtatgatagaaatgtccatgtgaccaccactccaagtttttaaccatagtgttacaatccaatgcatgcccactagccaccttaactttcactggctgacagtgttccacctttaaacccagcatatgcaccatatgttggctgatgaagttagaggaactgccagaatccacaagcattaacatggtatgttttcccaccactgacctgattctcatgctttgttcattgtcagttcctgatacagcctgaaaagataaccgacagcagtgatcctccctctcatcctcctgggcaagtttctggagaacgtcatcagtgagttccattggctcttcctcagtaaccaccgcattcaactgaacgggtttcctccttacacacttggccaggtgtccaggctcgaatttctcaccacatgcatagcacagtccattaagcttgcgaaactctctaacttgtctctcacgaaataattctccccccatttgttgtcctcttccatctaccttattaccagccaagttttgcttcgtagcatacccttgtctggcaaccttatgccttcctttctccaacatctcctgctgtaactgggctaatgatgcagccttatctacagtggtaggttgatgcatctgcacagcatgttgaatctccaacttaagcccatgtataaactgtgtcacaaaaaacagttcatccaaccttgtgttgtgcacagcagcctgatatctggcctgttcgaactcatgcacatatgaatccagagtatccacctgcttcagatttctcaattttctcagagccttggcatacgcatctgccccaaacttgccctctacggctgtcacaaactccgtccacaccctcgctccttgtttcaatttctgcacctgccaccatctcgctgcattctgttccatgtgaatagaagcagccgaaacccacagagacgatggaacttgatacatgtgaaaatattccaggcacttatctatccaaacagcaggatcatcaccagaaaatctagggaaagacatcttaggcagtacctgcgtgttcgcgtgcccgatcggcctctcctctcgatgtctatccaccctcggctcagaatgatctcttctctgaaatcctcgctcgaaacccatgttctgctggtgattcctccttcctcgattctccacttcccctgatgaattctcgagctctcttcccatctgatccagccgtaattgagccatctctcgactcgtctcctccagcttcaggtacagttcggttctctcttctgcagcccgttcagcgaccgccgccgcgatctccgcctgcgtcatcaactggttctgtaccttcctcatatccttcacctcttccgtcagtgcttccatcgactcgaacatccgattccacctctcctgcaccgctcgatcggattccgccatggcctccaaaatgaatcgagtctgcacggagggcttcgccttgggagccgtcgtggttgctgccgaggatcgcagctctgataccacttgtgatgcccgtggccgacgtcgcgtcgccgtcgacgtgaggatcaccggtgattctcagagatacagaagacgcaaggtttgccacggtttatggagttctgtttctcttcttcgctaccttcctggtctcacacacagaattatttaagcagtcgcttacatgggcctcacgcccttacacatcatccggcccacacggcccaacaccttacagaatattgagaattcaaaaatcaat

SEQ ID NO: 110457 - DNA, 584 bp, Zea Mays
tttgatcttcacctccacaccttcaattacttcatgaccctctctaatgttatcaagcacgataacataattagataatctattcccaaaattatcgaaaggatcacttacctttgaaaatttaatcatcacatttgtgctcaagtcattggaccttatataacgatcggatgattagtaggcgcatctgaaggtgtgatgtccttatcatccttcctcaattgaaatggagtcattcttgactcaattcttcatctaaatatggctttaaatctgcaacgttaaagatggactaaccctagacatagattcttctttagaggtacttttaatcctattcccctactttagcaccactgctcagttctacccctctagtagtaatggatgaggcgtttttaatactagagaggtgcaaaactgatctatgacgctaagctaggagcatatatttaaaagtccctacctctacaagtgaatgatttcttgaaagactttgttagcaatgtgaatgtcatcgtcgcttttatgatagggaataaaagttatcacttcagataaatgatcaaccaccacaaaaatac

SEQ ID NO: 110458 - DNA, 328 bp, Zea Mays
gaagttcttctggcaaaacattgtttgccgattcggagtcccgtccgagctcacaatcgacaatggcaaacagtttgacagtcaggacttcagggacttctgcttctccatcggcaccaagcttgcctttgcctcggtatatcacccgcaatccaacggcgtcgtcgagcgcgccaacggcaagattttcactgccatcaagaaaaggcttctcgacgacaagaagggtaaatgggccgaccagctacctaaagtagtctgggccttaaacacgaccgaatgctgggcgaccggattcacaccttttcgtctactatatggatcggag

SEQ ID NO: 110459 - DNA, 417 bp, Zea Mays
cgcaccatccacaacgcatttgtgtcgcccttcagacccatttgtcatatgcccacatcttctttaatctctactttcgtccaacatccaaacttaccttgactcacagcctcacgcacaaccctcaacttctcttcccgtatcactacctcctgcaactcccagtcctgtcctggccgatcaaaaccaccccatccgccatattctctttctctcccatccgcaaggcaagactctcacttccgtatctcctcgtggtgtcaaggaagggggttcacttgaagctgctggtggagacacgggtagaagtctggagctccgccatagacgtgcttcgctggaacactgtgcgcaacacatcgccgacgccaccccgactggtaaggtctcgcatccccttcctgctaagttgttgtg

SEQ ID NO: 110460 - DNA, 584 bp, Zea Mays
ggttgttcccaaggaccctgagctcagaaagaagatattggatgaagctcacctttcaaaattctccatgcacccgggcagtaataagatgtatcatgatctcagatccttatactggtggactagaatgaagagggaaattgccaagtacatatccagtgtgacacttgccagaggatcaaagctagtcatttgaagacagcaggccccttgcaaccccttcccataccatcttggaaatgggaggacatctgcatggactttatcgtgggcttgcccaatacctcccggcaccatgattccatttgggtcgttgtggacagattgaccaagtcagctcatttcttgccggtacacaccacccacaggacggaaaagtatgcggaaatctacattgaccagatagttcgtttgcatggaataccaaggactatagtatcagacagaggagcaccatttgtggcacgatttttggagaaattgcaagaatcacttgggacccatgtaatacgaagctcagcataccatcctcaaacagatggccagacagaaagggtaaatcaaattttggaagacatgttgag

SEQ ID NO: 110461 - DNA, 469 bp, Zea Mays
ctctcgctgggtgtcacttcaccaaaaccccaaaccgctcctttgctcttggctctccggcgaccctctaagaatctgtcaatggcgtaccggcgcgtagacccggagccgttcctcccaccaggcttcagcgccttggtggtccagcatcgtgggatcatggtcaggtcagtctcgcagcgtttaccgccaatgcatgaggactgggcgattatcaatattcatcctttgcctgagcacgaggtcttgttccctgcggtcagagatgtggtcagggagtatcttgttaagcatcgtagggtcggtgttcgagccattcagcgctcacacttggggcaggtgatagtgcagtttcgtagtgttctgtagcgggataatttggttctgcttggcccccagcaatatttggatgctactttcaccgcggtccgtcataatgacgcttggaatcatcgagctcttcttttca

SEQ ID NO: 110462 - DNA, 375 bp, Zea Mays
cactttagacgcaaaggaaagtccaaagaaagtgagagaagtcatctagaatgaccaggtagcatttgtaaccagagaggctgagaacaggagaagtccatagatcataatgaacaagatcaaagccccgagtagccctttcgtggaagtggagaaaggaagatgagaatgacgaccgagctgacaagcatgatagaggcgctcaaaggagccctgactacaagagatatccaagcgactagagagctaggacatcacgtcagctagggagcaacaaggacgccgttaggatagaacggtcccaaaagaaccatatcacctaatgaggtgaccgagagtgtggaacctttccccatgacgatagaagaaggatgg

SEQ ID NO: 110463 - DNA, 570 bp, Zea Mays
gatcgtttgagtgagcgaacgtcaatttggacaacgtttgaattttataaattcggactgtgcgtgtaagtgcgaaatcatgcacgagtgggaaaatggagtttggcccccagtaggttgtgtcgggcagagcaataaagtatttgggtcattaacggacgaagtttgtctgatttcgatcgactcaaacacgacctataatatcaaagccgatgtcgtttggtttggtctgtttgcttttggccctgatccgagtatttggttagcaaatgaatttatcgtatctcaatcatgttaagagttgtctcatttatcttcgccaattaaattttggtccgactaaattagaccacgtccaaatcctaataccagaactcagacttctgaaatttgttttcgccaaaataaataagattcagataattctatttggtttcgattaacttaaaccctgtcaaaagtaccatcgacccgtatctatgtggtctgatccatttatatcctgttcaaaccctaattttagagctcggatttatattgttttgttgaagaaaaactgagaaatatctc

SEQ ID NO: 110464 - DNA, 750 bp, Zea Mays
acgacctaggttgacctaactaggagccactgaggttgggatgacttaaggtgactggggttagggccaacctagtcagggtgactaggtctggataacataggataactgaggttggagccaacttgattgggggaactaggttgagggagttctggtcggggtgacttggtcgggattgctacggtcaggtacacgacctggtcgggggagctctggttggggcgaacttggtcggggtaactaggggagagctactttggtcaagggttgccctagtcggtgccacattaagcgatgctcttatcttggagtggaccttcgggctgtcttgggatatccctagtatgggtacacattaatgggcatgccctaaagatgaaagataatactataatataatacaaataatctaggcaaatcttggtgcatagcccctacttttcaagcacttattattatatgttgatgtgcattaaattgtaggagttgattgaattgaaatccacctacataaatgttatatcctatgagtcctactaatatgataggaatcacattcggtagaagtctattaagtgatggattgtcactcccaagagataggtcctagttatacttttactgctaccacgtgcaattggggagactggataatgactagagactagatggggtcatgaactttggtttggatgtggttggttatggacatggccatggagtgaggctctagtgcattagtctcgt

SEQ ID NO: 110465 - DNA, 380 bp, Zea Mays
gcaatcgacgcagagcttaagcttctcagcatccaactctacacattgaaaaaaataaaagcaggcaggaacacacacacacacacactcagaatgaatggaaataaataggtcaccggcaattctaccatgctgaacaaagctccgcgccatgtttccaaacatcctgtgttactggcaaagctgacaggaaggaagcaaattttgggtcaagctgttatgcattcaccactctagctactacatgcttaaattaagtagcacatgagtatctcactttcactctccgttccacgaaggttgggttgggtttcacaagccccaggctagaatagatggcaccttacctacccaaattttgttgataaagtatctagatt

SEQ ID NO: 110466 - DNA, 438 bp, Zea Mays
tgctaacggagcaatcgacttaagtcggcaacgactcaagacggtgcaacatgctcgcgcttacttaactcggggtgaccactatgccctgctaacagagcaatcggcttaaagtcagcaacgactcaagacggtgcaacatgctcgcgcttacttaactcggggtgaccagtatgccctgctaacggagcaatcgacttaagtcggcaacgactcaagacggtgcaacatgctcgcgcttacttaactcggggtgaccactatgccctgctaacggagcaatcggcttaagtcagcaacgactcaagacggtgcaacatgctcgcgcttacttaactcggggtgaccactatgccctgctaacagagcaatcggcttaagtcggcaacgactcaagacggtgcaacatgctcgcgcttacttaactcggggtgacca

SEQ ID NO: 110467 - DNA, 642 bp, Zea Mays
atcagagacggcaggttagttactatttttttcgggtctctttagaaaaacagaccaaacaaaggggtatcaacgcgaatgagctgtcagatcgcccacagtggatctgacgcccacatgtggatctgattagatcatgacttatgtgaaagatacacattcttgaccgttaaatctcggattaacagcctatatgctaattaacggagatcaactccgttccatccgatcatgatccgagggcgcggatcgatcacgccgaggtggtacacgtcttctaatcggagtcgtccatccaaagatcggcggctgtgattgaatgagtgaaggggtatgcgatccttctaatcctatccgttcgcaaccgaaccaacggctcccattcctccatcctatagctcgtcggccaccaggcagcgccgccgcctgggattctacgacaacgacacaccggctcaaagcacaatggcgcctaggcgccctaacctcgaattcgcctagctctacacgatgcagaggaagaagcaaaataatggagaagtctctcaccgcagaagatggcacagatgaacccaccaacggtgcaaggtggatccacgtcgccgcatgaacgactgcgagaaagtcactggtactccagcc

SEQ ID NO: 110468 - DNA, 682 bp, Zea Mays
gtggactagaattagagaagatcctgagtcaaccatggcaagatttctaggtggactcaatgaagagatttctggatttgttgagatgttcccaactgtaccttgcaagatctagttgatcaagcaatgcgtatagagaggaaaattcagcaagagtcacgtggaaaatcctatgcaagtcattataatgttgtcccatggtgcaaacagcaatccggtgcttcttttggtggaggacgatcccaaggaaatgcagctaggtcttctccatcaaatggtacatcaaagatggcagcttctatagggtcatttcctgcaaataagcagcggcttgttgctagttcacagacccgacagaagtttcagtcgctacttatttgacatgtactagagaaattgtgtgccataagtgccatggccgtgggcacattgctgctcaatgtctaagtagaagaacaatgttgttgaatgaaaaaggtgaatgggaatcagacagggatccagaagatgatggaccaaagtttgatgaagaaattcaacaggaggagaatgagatccagctagaagaaggagatcatagttgttttatttctctttgagtgctaagtgtgactgctgaaagggaagaaaatggacaacgccacaatcttttccatacccgaggtatgatcaaagataagat

SEQ ID NO: 110469 - DNA, 515 bp, Zea Mays
aagccatcggatgccccaaaaatcagcgtgttcaattggctgctcatcaactttctgggatggccctagcatggtgggataccttcagcgaggccgtcagggatgctacctaggcagaattcgaaactgccttccgtgagcaccacgtaccctaggggatagttcaactcaaggaagatgaattccgggaactaactcaatgtggaagatctgttagtgaatacgtgcacaaattcacggagttggctcgttacgcacctgacgatgtcagcaccgagaccaggaagatggcccgttttctaaaggggctaagactagagcttaagaccatcctcgctagccaagacttcctcaacttctcgcacctctccaacaaagccatccaagtggaaagggcaaaagaggaagaaaaagggcacctcaagaggaaattacaggttctccgagctcagcagcaagaccgtcactagagagctcgatcctttgggattccacccaagggaccaagcttcaat

SEQ ID NO: 110470 - DNA, 401 bp, Zea Mays
gatgatacacaaggttgcaggctccaatctagagagttacaaagcctcctcattgaggagttggggtaagacaagctatagtatctctgactgttacttccttggcttgattgagttcaactatcttggcttgggtttggtggatcttggagtgatttcttgtggcatgttcaatttctgattcaatctcctatttggcctaaattgaatgctactctaccacattcttttataatccaaagtcatggtaattttacatgtgtataccactcgtggtatctatttgtcattgggccaataacccttgtccggtcttggtcttgtgatctttgtggcctgcaaaaggtacgcatcaacataatcattcctatggaggtgtgtagccacgggtctgccccaag

SEQ ID NO: 110471 - DNA, 490 bp, Zea Mays
tcgctcggcagttacctctaaaatgccgacgtcgttttcagtcgcttggtagttacctctaaaacgtcaacatcgtcataagtcactcggctattacctctaagagcgccgacgtggtcatcaatcattccgacgctggcgtggtttcgtcatcacccggacgctatttcaaaagcgtagatgttgacaataatagctcggccatcacccctaaaagcgacgatatgacgcccgagttactcagttactattctagaggaatcaatttcacaaataaggcaaacggatgaatgattcaagaactctaagttatgccacaaacataacagatagagaacatcacgggcaataaatatcacgacagagatcaactgactacgaagcaaaataatggacacaggaggaaacgaaatcattcttcattaagggaagttacagtacttacaaatcaactcactacgagttgatacttccctactgctactactac

SEQ ID NO: 110472 - DNA, 524 bp, Zea Mays
caatcatcgtttgaccatcaaattggtttctgaaccaaaatgtatacttcagataaaccaggccaccctggctggtaccagcggtggtttccttcggcatttcccattcgcttgcaagaggccatactttgtaagcaaaatgtcttgaactaagtctcttatgccaatataggtgcacactttgttgaaagcagcttggcacgcttgcacgtcatttccatgtgcgttggacaaccttctgatgccgaagcatgaccatataggacgctggataacacccttcacatcctccctctaattcaggtcatttttcacataaaaccattccttcatccaagaacctggccacttcttccgaaacgtgggcacatggtaactcgcctcagaccgaggcacaaagctgtaacaaccaaaattattatgatattgttctattccgattgcctttgtttgataagactgctcatgaatattgcaaaagcatcttgcatctggttctagtccttggctcctcatgtaccaga

SEQ ID NO: 110473 - DNA, 955 bp, Zea Mays
agacaattcgttgatcatagcaaattacaactcaggaatcccagaagcctcctgataagtggatggttcaacaattgccacaccagctcgcggaaaactgtagcgatccagaggttcaatggagccacgatcacgaagacgatagccctgattaaaagcatcatgaggcccaatattgttagtacaagaatctagaacatgatcagtatcaggactagccgtggaaatagagcaggaacgacgaatgtaggtctggatgacaggtggtttggaagagcaaggtgaaggtgccatggaggtggaaggtggtgttatgggaatgaggtcatcaggtgtggatatagaagatgatggtgcaaatgaaaattcaggaatggaaggaagacacatgaaggaggtggattctttgggacaatatgagttagtgtactggttgtgaaagaaggggcgattttcattaaaactcacatctctagaaatacgaatacgacgagtagatgtatcataacgatgatagcctttgtgtttaggactatatccaagaaaaacatgctcaacagatcaagtagtcaatttagtccgctcacgtggtggtaacaagacataacacgtacatccaaacactcgaaggtggtcatatcgttgaggtgtcccaaaaagaacttaccaggtgttttgccataagaaacagcttcagccaaaaaaatgtgaaggaacaaaagaagataccaaaagagtgcgtgcactctctataatatgacaatgtttgcgttcatcaatgccattttgggcatgagcaccagggcaagaaagttgagctactgtaccctctaaggtcaataactggtgaaaattatcagataaaaattcaccaccagaattagaaccaaaatttttaatgggagcagaaaactggctgtgaaccatgcacacgaaggtcttgtaaatagaaatc

SEQ ID NO: 110474 - DNA, 660 bp, Zea Mays
ctaggatgtgcatatctcagagaaacggtagatttttggcattctttcgctggggccgggagctcagaggagagtttgggttgtgagccgttgatttcacatcctgtggattggaggccccctctcctctctaaacctagccgcccctctcacccccactcccttgcagccgacccccctctctctcccatcttctccatctctttgcagccgaccatctcttcctctccctctcccactcatttgcagccgtcgcccccccctccccatcaaaccctagctgtcctcaccatttcctcctctccaaggtgcatccacctcttcccccttggacccctattgagttggtgcaagtctccattggaagcttggtgggaggaagaagagagcggtgaaggaggaattcaaggtgatcttgtgtttttattttgtaattgtgctgcaatttcttttggttaaccgttctcctaggtgaattggtagtggtactgttctgatttttggtggcgggcggacaaaagtagtgttggcagtttctaggatttttgcgggggtgattagctgtaatttctgtgaaattcatgaagagctttatcatatcttttcatagagtacttattcattcaattcagtgtaatattataggagatatcgcatttt

SEQ ID NO: 110475 - DNA, 301 bp, Zea Mays
acaagggcacaatgcaaacccagcagcagcactacaactaccaactccagctttccccttccttcccataaacccacccccaaagaaagctgctaaaacctaaagcgtggaaagttgcatcttctcactctcgtttggtgctgtctctgtagcagctccacaaaagccaacaccaaagaccccttcttcccaccaccaccctccacccctccttaataattccttctcccagcacaacctgagttgtaattattatactagtactcgtcagtattcaccttcgtttattgtttgttccccc

SEQ ID NO: 110476 - DNA, 530 bp, Zea Mays
gaaaaatatgatatagtttctcatttaaagctgttttgtccaaaacttagagaaaatcagaaagacattagaaattaatgaacagtgattaagattatttttcctaatttacttatgtaacagagaacctaggaaaaatacagagcctattaatttgtaccagttttgaattaaaatgatttatttagccttatgtagactgaaaatcaattattagagaggcaaaactataaccaaaatgcttaataaaaatccagtggacttacaaccaccagaaccccactacaaaaatacagagcacctcagtccaactttttaagtaaggagaataaatacaaaaggataatgaggcattttgaaaataaatcataaacaacccctaatgatgtaataatgggcaaccaaaaattagctaagtccattctgagatgaactaccagagaaaaatgcaaactcatgaaaaagaagcaaactcatacctattgctaaagatttatgagaaaggccacttaattcaaataatgcatacc

SEQ ID NO: 110477 - DNA, 628 bp, Zea Mays
cgccggagtttggtgaatttctcaccgaaatctagtggagccgtgaagccacctatcggtgtgaaccggatccctcacggcaccatcgacggtaggttttcgttccgtcaaattaccatcgtttccgcaccgtgtagaacattttatcgtgggggagagtcgtccaagcgggttggccgcacttcggcgggcgcgccaccgtgttgtgtcccggtccgccgtggctgtgtgataggttgaagaatgggtgtgggccattgatgttaggaggagcggccaggattagaagttggggccagatcctatctccaccgttggatctgctaccgatgcgtatgattagatggtagggtaaccattcgatgtgtttagcctgagacgctgatcaacggatcgacggtccaatacactcggtgttgttcggccctatatcctaaatctaacgaccaccgatggagtcctatttgcttttaattctcgtcgtgcatcgcggatccgatggcttcagtcatcatataccccttcagccggcaccatttgcaaaagagcccctccgtttttaatgaataaatctgcaatccagtttgactgttctctgagtcttaggatctttgcgcagaagcccttg

SEQ ID NO: 110478 - DNA, 352 bp, Zea Mays
tggcgaggtcgctggttattttcaacagtccaccgacagcactcgctcgccctaaaccctcacctctcagatcctgcccctcgctcgccgcccaatcaacagctcagacattgccgccccatccgagcaaaggtggaggcgtctgcctccacacacatcgccctcgccaccgccatccctagagaagacacggaggtgcagagaagacacggaggtacgtcacaatttcaaactgttggttaaacattactgagaatggcaaatggagataggattttaaagcataagcactgtgatcacaatgtgattattcctgataaagtgattagtgaatgtggaagttcaaccttca

SEQ ID NO: 110479 - DNA, 475 bp, Zea Mays
gtgccaagtaaacccagccatctggatttcggaaaatccaccatctccgaaggtgacttacgtaagatgttgagtttgggctatttaagtgaagcaaagaaagagctggttcgttttggtggggaagaaactactccaaagccaggaaaagatgaagtagtgatcttcaaaagtttctttaaagttggtttaagattccctttgaacaagatgattgctgatgtgctgaagaagtttgggatctaccttcattagctaactcctaacgctatcgttaagcttagcatttatatttgggctctctaaagccaaggggtggaaccatttgccgaaggtttctgccgagtgcgcgagcttcattatcagaccaaggctagaggagatgggctacatgaaaacttcggctgctacaattttgcctaccgcaagactacaaaatttccagtgatcaattaccgaagcaagtggccagctg

SEQ ID NO: 110480 - DNA, 517 bp, Zea Mays
tgttctaccacggcatcggcacaccagctgcccgtaaccccgaaggcttgcaaataactcaagactccaaaggccaccgaattgtcaacctcatcatggccgaagactggcgggccccaataacactataccaccagggccactaccatccaaccgatcataatgaggccaaacgactgaaacacaggagcagggatttcgcaatagtcgagggccagctttacaaaaagggaatcaactagcctatgatgaaatgcataaccgaaaccgaaggcctagaaatcctccgcgaagtccacggcggaacctatggctcacactcaggacccagggcctcgcagctaaggtgattcgtcagggattttactggctcgtgataatttgcacgacctaccgagtcaccaggtcatgcgaggcatgccaaaacttctctcctcgctcaggcaacccttcgcaattcaccaagctcatcgcccacacatggccacttcaacgttgggggatggacatcgtcggg

SEQ ID NO: 110481 - DNA, 300 bp, Zea Mays
tggggatcggatctggtccgtgcgatcttgatccggcgtatgtggatcgatctcagctacttaaaacctggaccgttgatttcccatcctgtggctgcggctgggtaccggttggcggataggccgatctaatcagggcgctccgtagtcgatctgacggcccctatcaacatataccccttcgccaagtcgattttgtaaaagagccctcctggaattcaggaactaacccgcagtctagtgaatagtgttctgagtctaggatttattacaccgaggcccctgggtttctgtttaatc

SEQ ID NO: 110482 - DNA, 825 bp, Zea Mays
aatgcccctatcagtttgaataactggatacaagtcacgacgctattcccatgtctcactgacacgttacaaaaacccccttctagtttttcttctttaccgttcttggcccgcgacgggaacaaatcaaacacctggctggagccatgattctacggtgagggtgacttggacaaggaataataggcttataaacatctagcaatagtcggtctgagtaaaagccctcaattaatttgagagatttgacctaatttgaagcttgttcatgtcacagcggcggaccgaccctagagatcgcgttccggatgattaatggaatcgaagctaaaattgaagcttgggaaggctttgcgggttcaccaggaactaggtacatgattgagtttaggccgaatgaggatagagaagcggatcgacagagagggcgcatacggcggcgttctacggagcaacggagcgttttggtggtgggactttagcaaactttgattggttggcaccaagagcaataggaggctaaggacatactagaatgagagacaattgagtgagtactaacccgaagagggctggccacggagaggtcctcacgacggtgctaggaacagggtggaatagatttgtggtctatctgagttctccggtggaattaagccgattactcaagcacttgggtgtgcggtgtggtgaagaagttgtgcctgggctcaatttataggccaatggccatagatggatgagattcactgagctgtaaacgcgctggcgagctcacccgcgcgggtagagccacgacgaactccatgtgaccgccgattaacc

SEQ ID NO: 110483 - DNA, 341 bp, Zea Mays
ccccctttcatcctctttaaagcttctttgacctctgattcttggatcctgcgtacaaagcatctatttaaatcatcaaaggagtcatctaattgggtgccatagtctcattctcaccattgaaaagattgtcaaaatacctctgccacctctgtttgatgtcttgtccttttaccaagagttgatccatctcatccttaatgcatttaacttggttgaggtccctcgtcttcctttcctgaatcctagccatcttatagacatccttctccccttcctttgtacttagtcttcggtaaagaccatcataagctcgaccctttgccccacttacagttccc

SEQ ID NO: 110484 - DNA, 282 bp, Zea Mays
caaaaagggtgaaagctttgggaggaggtaggttccaggccgagtatgccactggagcaccaacacttgaaactttacccctgaggatcatttcaagtcggcttaccaagtctacagaaggaattctcctattggtaacccgagttgagtcggccagccctcgatacagatatgccggataggccctatctttcagtggctgaatgttcttaaaaacaaagtcagtgaccaccgcttcggcagtcagacctctctctttcagcaatccgacttcagttagca

SEQ ID NO: 110485 - DNA, 498 bp, Zea Mays
gctcctggatacggtttccccactcaccacccttcgcctaagaaggtaactcatattttgataggaatcccgtgaaaagacaagccaataaacacgaaacaggagaaaaagtgcatgataaaatgcaaaaaaacaacgaaaagtcttggagaaatcaaacaatcataaacaaacttaaaagtttttcacacaaccctgcagggccagcaactcaggcatcggaagaaggcgaggcagcacccttagcatcattgggggcgttgccgcagagtaggatcctgtcgagcggggacactagcggaatcacctcctcttaaaaatgacaagccatcatcgagctcggcccttagacgacattcgcgagcctccaagcatctgcctcggcaaggtcatcaccctccgggaggatgtagccctcgctcactcgcttgagatcaatctcgtagtgagaggcgacaacagctagcacccgcttcactcctatacgcagggcctcgt

SEQ ID NO: 110486 - DNA, 366 bp, Zea Mays
gcggatggtcttcataagaactttggctgctaaactttgcatatcggaaagatacgaaggccccggtaattggctatcgcaccaagtggctgaccggttggacaagcaaatggttttacataaaggcggacgagaagaaaagggagaagctaatgactatggtcatgagtccaatgaaattaagcttcgggatgacaaggcccttgtgccacatgcagcttggctccccatgccaggtagccgaagtggaattcagagtggtagctaccgaaatcagcactagagatctagtacaagagtacttggcaaatagaacattttcgacctctagtggctggggaatgcctaagaaaaaggatgggggca

SEQ ID NO: 110487 - DNA, 468 bp, Zea Mays
ggaaaaatgtggttgccctctggttctcattttaaactctcttttccattttctaaaggtttggaccaaagcaagttttagtggttaatccttcttactctggtgtactgaggagtttatcatttttaaacagggtagttagtagttaattatgtctctaatttttttcttaacctcagtccaaaaatatagctatttttcccttatttatttagtttttggtcagtttactatttaaatcaaaactttaaaaagtcttgcagtactcagggtgtttgttatttttcctaagtagttcatattatttagaacctagcaaaattagtttgaccaaatttggttgggtaaaattcgagttatgaaatttgcaagttctgtatccatttaaaagaataaacattaaaaggtttaaggaaaaatcagtttgcaccgagacccctgggatttcccttaactaatcctttaaac

SEQ ID NO: 110488 - DNA, 531 bp, Zea Mays
caaaccctcagtgatgcccagggaggcgtctgaactcgcccccacgacgatacacccccagctaacgggtccaaggccatgcaaatcgacatcaacagtgacagggctgccccaaccatggactggaggatgccttacctagagtacctccttcgaggggagctccctctagggaaggccgaggcctgatgccttgcccgccaagcaaaaacttttgttctaataggagaggagagggagttgtaccgacgcagcccttggggaatactccaacgatgtatacctatcagccaagggcaggagctattgggagaaatccactcgggggcttgagggcaccacgcggtgccacgaaccctcctcggtaacgcctttaggcaagggttttactggccaaccgtggtagctgatgctatcaagatcatgcggtcctaccgaggatgctagttctatgcgaagcaaacacatatgccagcccaggccctatagatgatcccaataacgcggtcgttcgtggtatggggattagac

SEQ ID NO: 110489 - DNA, 472 bp, Zea Mays
tacaatttcaactcgcggttgcccgttagtaatctaccacagctggtacatagtagatggcctcttgcagccgaggaaggagcgctaggcgtgacagtggtgtacggactggattgctcccgatcggtggagcagggagagcggtagcataggacatcacaagtgatgacgatgccaacgtggctgtgcaacaagagccacacttggtagtgtttagggttccatgatcagggtgaccacatcgggtcggctatgcctatgaaaatggtgcgtgagggagcaacacctatggaggccacgctagaggacctgcaggaaggatacatagtgttgagtcaatgctgcgacatagattagcctgttcatgcaagaatgcaaggtccgttaggagatggtgtagcaaaaggaaaaatggactcattgaacacgacatgtcaaaagatgatgatcctattggattgcaagttgaggc

SEQ ID NO: 110490 - DNA, 276 bp, Zea Mays
gtaaaatacaacattaaacacaaacttggtcccaataaaaggttagttcaaaataaggccaggttagagtgagaagaagagaaaagccatcttcacttgattgccctttcaaaggttttgtctattcacccctccccctctaggcgactttcatcaacacccatccaaatcggtggtaaagtttgagccgatagtgtatgcttgaatgtaagtgtggaaataagagggatagagttccccgctaacctcatagtaatgggtactcaatggatagat

SEQ ID NO: 110491 - DNA, 526 bp, Zea Mays
cccctttcttcatggtctatggttcagaggccatgctacctgctgatctcaagtttggggcgccaaggttgatctttgaaaacatagcagaagccgaggctactaggctggaggatgttgatgtactcgaagaagaacggctgaacacagtaattcaatcagcacggtaccagcaaaccctgaggcgttatcacgataagaccatgagacatcgatccttcgcagtaggagatctcgtcctccgccgaattctaacaggggaggggcggcacaagttgtcacctctatgggaaggaccattcatagtagcagaagtcactcggccgggatcgtatcatctcactcagatggatgggacgggaatcgggaactcatggaacatagaacacctcaggaagttttacccctatctgtgttccaaaagctattgggacgacaatgtactctgtaaaactgggaaatatatcatcaataagaaggcttcgagagcgctcaaatcgttcattgtcgacctacattcttactt

SEQ ID NO: 110492 - DNA, 563 bp, Zea Mays
gtcagacctatggctgtcaaattttaacaccagcaagataataaagttatctacaattttcctatagcacatatctacagaaaacacaatttggttcatcaaacatacaacacaactaaaacagtgtgtgcagtccaaaacagcaatcaataaatttcagctcctatataattcaagaatcgctgcgttcgagagacttgaattactctaacgctttactatttattcgagttaagacaatcacttagaaccaacaagtcgacttgcaaatttttattcaagtcatttagtgcactaaaattactacaaccaattaacaatgcattcttcccgataatcactcaacaatttgcgttttaaatgagacatcacatgagcactactgactttttacctgcgaccataaccacacgcatttagactacaacaagcaattcatcgggactacgagcttaactaaagccatctaacaggttggttaaccaaagcaacaacctgggccgctatacaacatacttgtcgactagcctattattatcgaaatccgagacacaacatatata

SEQ ID NO: 110493 - DNA, 885 bp, Zea Mays
agagatcgggggactatctgttcttattctgttggattcaggcagctccatttccttcatcagttcgtccatcgtacctcatgtcccactgctaccggtcagctgtcagccgttactggtccaagtggctaatggctctaagctgtcttgtggtgctgaactcaacaatgcagactggtccattcaaggccatcggtttacttccaccctcaagattctcgaccttcaaccatttgacatgatcattggcatggattggttatccgaacatagcccgatgtgggtccattgggcagacaaatggttgtctttaacagtggggtcttcgctggtcaagttatatggagtacaagcttcagatggacagggtgctttggttcaattgtgcagcctttcacaacttccagacaccgaccaacatattattcattcacttccaccagaattacagtcattgttggatcgttattcatcagtgtttgcggtgccgcaaggtcttcctccaatcagggattgtgatcaccggattccgttgattcctggagctcggccggtgcaaatgagaccgtaccgttatgcccctgctcttaaaacagaaattgagaagcagatcgacgacatgctcggctcaggccttattcaacacagcaaaagccccttttcctcttctgtcattttggtcaagaagaaggacaactcctatcgcttctgtgtggactatcgccatctgaacgcactcacagctaaggctaaatttccagtacccattatggatgaactctttggagcagcttggttttcaaccttggatcttcgagctggatttcaccaaatccggatggacccacgagatcagcacaaaaccgcattccagacacatcatgg

SEQ ID NO: 110494 - DNA, 514 bp, Zea Mays
acttgcacttgtgcttgcccttacacttgaatttgcgcctgcgctagcactagcgctagcacttacaggttgtacagctacaacaaaaacaaatttaattataaatttgcagcttgcagtctgtcaaatgataatgcacaaagtcattacctgtagccgtattttgcattaaaaccataagtttgcccttgcttgatgtgaccttgaatgcagatgccattaacttgttggtagaggtactagttggcttcttcacttttggtgctagtttacgttgtttcacaacacgttgttcattcacatccatggatttctttttctttcctagactaacttgctgggcaatgtcaagctcatgctcatcactagcaacagaggcatgaacaacacaatcctctgccatctgttcattgctaccaacatcaccacccacaaatggagcttccaccatgtcatcatcatttgaaccatcctcaatctcagcgatccgattcccatccatggtgctaccaag

SEQ ID NO: 110495 - DNA, 505 bp, Zea Mays
gcattttcaacatgagcgccattgctttgttttggagttttgcttctttttgtttgttggtatcaggagtccaacgcggggcttaaataaccggttgacgagcgacaaaagcaggtgcaaagtcatcagaaaaaacgacatcctgggtgcgacattgtaaaattaaaacaaaagaagatgggcctattaatcaacagaaagctcaactagtggcaaaatggttcaagcatgggtatgagatatattatgaggatacttttagtcctgcaatgtaagttactagtattcgacttgtgctcacaattggaatcttaaacggttggcacttgagacaactagatatgcagaatgtgtttcttcatggtgttctaaaagaggaagcttatatgtgacatgaaaattaaacaactgcctaatcatgtgtgcatatttagataaagccatctatggtttgaaacatgcgcctagagcatgatattcaatttacgtacaaggttcctacatt

SEQ ID NO: 110496 - DNA, 845 bp, Zea Mays
tctcgctctagagcatctcaaaattttgacttaatacactgtgatttatggacatctcctgtggcaagcatttccggttacaaatattatcttgtcattcttgatgattgctctcactttgtgtggacgtttcctcttaaatttaagtcggacacgttttccactctcgctaactttttttcctttgtttccacccagtttagccgcaccatcaagagtgtccaatgcgacaatggctgcgagtttgacaactccagctctcgcacattcttcctcacccatggtgtcactctctgcatgtcttgttcttacacctctcagcaaaatggtaaagccgaacgcattcttcgaacacttaacaacatcgctcggtccttagtatttcaagctagctttccgccttcctattgggttgaagcccttcacacagccacttatttgcttaatcggaggccctccaaaacactttctcaacagactccctatgccgcgctccacggttctccaccctcttatgaccatttacgtgtttttggttgcaagtgctaccctaatacttccgccacagctactcacaaactagctccacgttcttctctttgtgtgtttcttggctactcagaaaatcacaaaggatatcgttgtttagaccttgattctaattgtcttatcatttctcgccatgtcgtatttgatgagtcatctttcccttttgctgagaaatctaattcacttccgtcatctaactttgactttctttcagagtttcatgccatgtcgctctccattaagccatgtttttcttctcgtgattgtgcagaaacaggctccactacggcttcaac

SEQ ID NO: 110497 - DNA, 277 bp, Zea Mays
aaattattttcagccaaattcaaactgaaaccaaacggaacctttacaaattactcaaaatttctctacacaacttggaaatctccaaatatgaaagttgctcacttttccaagcactacagctttggtaccttcacttttgccaattctctctagattttgaattccacgtttagggctaattcagggtttcacatgttcttcactttcttcaagtgtttcaccaatttgatccatgctccaaaagcaaatgtattctttgccctaagatctacat

SEQ ID NO: 110498 - DNA, 530 bp, Zea Mays
gggatgcttacttgcccatgttagtggcaggtggcgtacttccccgcattaaatgcgtgcgacgcgtccagtctgcagtgtatggtatccactattgccccgcacgtttccaaggcaagggcattgactcaatgcgtcgctttggcacccttcattatgacctccattattcctcgtgcattactgaggaatgaagagacaggcgaaggagactgaatgacaccgcccattgcaccgctatgcatgacagcatatcatgctacgtcgcaacctacaccaagttctgtgtttgggacaaggtaataggataaggatgccaagagatcacacaactgccaagaggagatacgagctcaagaagatctagcaccaccagtcctatccaaacacctcacacttcatattgtaacgattcatgggccctcctgccggggcccagctcccttgtagcaagcccccttggactataaaagggagtgcacttgcattgtagcaggagaagcgacacacacacagactctcgactctca

SEQ ID NO: 110499 - DNA, 563 bp, Zea Mays
ctctccttcagttcaaaaggtatcagttgacaaaaagattgagaaagtgtaggataagatccagttggtatatatgatctttatgtgtacatgaaattcaatatccgtgtgattggtggtgcgcgtccgagcgtgcaaaactcatttgtttcaaaaatcccatggaccagtatgtttggttgcttgaatatgttcttgggccaggcagtgttcatgcaaaaggttggcctcagccaggcccatgggatacgcccaaagactgcgttcttcatgagccttgttgtgctcatcactggctagaccctcctcatccccgaggctgcatcagcgtgtgatagggtttctcatttgtagctgtcactgtcgaggtttccctctcccgcatcctctcgccctcgtgctctccctcaagatcttgcaccctcccctcccctcgctgttgaggcttgctccttccagggatcgtcatgagtaaggaggtttgacactctcttgacctctccccctagacacgagctctttgtctagatctaagaatcttgagtactatctattcccctgag

SEQ ID NO: 110500 - DNA, 657 bp, Zea Mays
gtcaatttttagaatagttcatagccatccgttcagaactttatgcgaaagaatgttggctctatgtctgcttatacgaaagaatgttgtctcttccctttactaaaggagggtgaaataagttttactagcagcgtcgtaccggaggtgccagtagccttagtgtgccagtcgctcctcaagatggcctcactggcaacaaaatgttctctgatgagttgactcgtgtgcttgactgagattgtactttatctcttctgtcagctaagctctgctgaattcctccggcatcaacgttagcacgatggttcgcccaaccgagcatgtccccgattcacaaaactatatagttgggaacctcacagttagattcatagtagttaatagtttgcttaaacaaactgacgtggttgtttgatctatgcaaaagatggcactggttgttggttttaatagtgaaatgtcatcctaaccatttaactagctatgtccaacatattatgtatttatttctctaaatattgccagctgctctacaatacaaattacatggttgcctcactatccgtttccaacaaactttttgggggtaaaatcaaactgaaattcggcgatggctcgtccccttgcaatcagtcttctacctttcagtttctc

SEQ ID NO: 110501 - DNA, 529 bp, Zea Mays
cgcaaattggtgacaagggggttcaagtcattaaggagatgctcgaacaaaaggtggataagtacaaatgcttttgtcaggagagcaagggagttctatggtttgaagaccgattagttgttcctaagaatccagaacttaggcagaaaatattggatgaagctcatctatccaagttttccatgcaccccggcagtaacaagatgtatcatgatctcagatctttgtattggtggactagaatgaagagggaaattgctaagtatgtctctgaatgcgacacttgccaaagaatcaaggctagtcatttgaaggtagcaggtaccttacagcctcttcccataccatcttggaaatgggaggacctcatcatggattttattatgggattgcccaacacctcctggcaccacgattttatttgggtcattgtggataggctaaccaagacaactcaattcttgccagtacataccacccatagggcagaaaagtatgcagaaatctatattgaccaaatagtgcgtta

SEQ ID NO: 110502 - DNA, 726 bp, Zea Mays
gtaaaaaaacatcagcccattatttactgccaattgccaaattccatatccagttatccacccccaaaattttatttttactgcatgcgtcccgttcctcttccccggccttctgttcgtcagatcgcctgtgtgctactcctttatttttgtcaacccattttatgtcgatgtgcttattagctcaccggttcggtcactagagctgtttgaagcccccatctgctgatctatatgctactgttccattggagtgtatataggtggaacgatagctgatgctcatcgagatctcaaaatgctgtctcacatctttcttgagtcctgtgtagactgtagagtcatatcaagcagctcagcgcatacatcatgcaatactgtgaagtttcaacgtcttgctttcatcattgtgcgtaagcaccataaaccgatgtgcagcgcattatttacccgcatgcaggaacatttcatttcgtagttttttttctgaagaatatttgtctatcatatcaatgttttctcgaagttgtagcacttacctctcctcccttttcgatctcatgcatgtaagatttttctcagactccggctcagtagcattttctttgccatttttcacagatctccctcccttttagggactccaggtaatagatgatttgtttgtatatgttttatcaggcagtaaaaaattcttgatgttttaagaaagatccagagttccag

SEQ ID NO: 110503 - DNA, 473 bp, Zea Mays
cttcgttcggagcttcggatgcaggagcttcggtcttttctgatacaatctgccctgctgttttgtcctcaggcgcggcaggcttcgtctcggtgggcactgaaggcccagattcaactttggcttgaactttgatagcttcggcaattttcttaggagcagggctcaaggcctttgtaatctctataacagcgtctaatacgctggccatcctcctcctcttgggagttgcggcaggaattttttgcacttttggcaaatctgccttcgtcggtgggctcaggatttctggcgtttttatcaccttttccacccgaggctcttcagccttatcatctctagcttcaactggcccgactgtaggcaccttcggcactacaatcagctcttcagtactctgcacaatcggagcagctctctttgctttggcagctaaagaggtccccttgccaaatttaggcaccacgaccggt

SEQ ID NO: 110504 - DNA, 497 bp, Zea Mays
cagatcatgtgtgaggtagttctgctcatgaggcctgagtgctctggatgcgtaggcaataactctgttgccttgcatcaaaacacaacctagtcgagtgcctcaagcatcgcaatacacatcgaaagatttggtgttgtcaggctgtgctagcacgggtgctgttgtcagatgctgccttagtgcatgaaaggcatcctcacatttctgactccattcgtactttactccattctttaacaattccatcattggcttagcaatcctggagaaatccggaatgaatcgccgataatatcctgccaatcccagaaaactttgaacttgtcgcacggtggtaggaggcttccaatccatcacttcttgcactttctcaggaccaactgatatcccatcctgagaaaaggtgtgacccaagaatttgatttccctcaaccagaaatcacactttgagagtttggcatacaaatgatgatcacgcagtcgctgaagtacgg

SEQ ID NO: 110505 - DNA, 606 bp, Zea Mays
agttctttaggacttcccctatcatctcgttcagaggaaatcgcagtcctgctctgaagaagctcttaaaaaccacaacttcatccttcttcggctctggggtagtttcttcttcgacaaatcgaacaagtttgctttcagcttctccaaaatagtccagtctcatcatcattggcatgtcgtcttcggacacagtagatttctcaaaatctagatgactgggctttgttgggatcaaaatactgtaatcttcttcactctcatcaacattttcttcttcaacaacagtttgctcagcttcggcattaggagcaccttcgtcaacaactcgctctatcacaactagacctaatcgttccattacttctgaaattggtgctgtttcagtggcctcgatttcttccccctcatgagacacccttgcagttgatcgcactctggccattttgatggatttttacagtttgaggaagctaacccgtctgacgaagttaaccttaaacgatgaagtgttcgcttgagagcgcagtgcagaaagcttcggctatggttaaattttttaacagcacaacagtgcaatggcaatgaatgttgtggtaactcttc

SEQ ID NO: 110506 - DNA, 1097 bp, Zea Mays
aactgattcttcctaagagcacccagaacgagacggagatgtcgctcatgctcatcatctatttttgaataaatcagaatatcatccagaaacacgaatacaaagtcgtcgaagaactcatgcaacatcctattcattgcttccattaaagcagcaggggcattagttaagccgaaagacatgactatgaactcgaaatacccatacctggtgcaaaaggctgtcttttcaatatcctcctcacgaatcaattgatgataaccagagttcaaatcaatttttgagaacacctgggcacccctcaactgttcaaagagaacctcaatgcggggtagcggatatttattcttgattgtcacttgattcaaagcacgataatccacatataacctcttgcttttatccttcttctcaacaaacaatactggggaatcccaaggcgacctgctagcctaatgaaacccttagccagcagatcatccaattgctgcttcaattcaacctgctcctttggagccatccgatatggcatcttatgaataggctgcgtacctggaatcagtttgatttcaaaagctgcatcgcgctccggaggaatgcctggatgctctgctggaaacacgtcggcaaagtgacacaccacacggatgtcctgcacccgcaaggcagcctcaccctccaccaccatggagaaaaaaattcccgacttcctggaccaatgatctgaaagcaattgcaacaacaaggataacgtaaacattggagaacttcccaagaataccacctccctacccaacggcgcctgcaacaacattgtcttccaaaaacaggatataactgcgcgatactgagataaccaatccatacccaagataacatcaaatgcccctaaggaaatcaccacaagattagctgaaaagaccttgtcagcaagaatgatggaacaaccctgacaaactgaacaactactaatggagccattagcagaactaaccataattgggtgacccaacctctgcaccgaaagactagcctgcgacacaaaattcttcgcaacaaacgaatagctagcgctagagtcaaaaagagcatgggcc

SEQ ID NO: 110507 - DNA, 326 bp, Zea Mays
ctgagctatgcatcacggatctgagggcagatatcgtgtaccggtttagggtagcgagaatctaatcggcaccgtacagttttgatccaacggcccacagagcaccgtaccccttcgcgatagcgttttgcataagagaccccgcagaagttgagtatcaacccacggtccatccccctgtgccctgtgtcttagtattttagccccgagatccctggtctttctgaaaattgatgcccagtccagagatgtttaaaaacagagaaatgattatagaaattcgtttttaatacaaaaacaaatctagaaacttgtaaaatgcatag

SEQ ID NO: 110508 - DNA, 330 bp, Zea Mays
cagaaattctaaggactactcaccaatttagaactactacacgatttatctctttgcaacaaagtttccttgagagagtgagagataataacacaataagtttgtcgtagtctacgacagagcgatttttaattctaattggctcatttttctttaattgaaatccattacaatacgcaagtggtaaatcccatcaaagcgtttctctcctgcaacctgtacgccatgtgaaatccggcctatagactgggcagctccatgcgactgcgccgtgatgtcctcgacgcttattactcccctaccccgtacgccatgcgaaatccggccttc

SEQ ID NO: 110509 - DNA, 608 bp, Zea Mays
gccggacaatattgatataaggttgatacctaaagtcggtatgacatttagtaacgtgggcgaggcgtataatttttatagtcaatatgcatatgaggttggatttccgttgaagaaatatagggagcgaaagaattgtaaatggttgaattgttcaatggaaggaaagaatgctgaaaggggagctggaaatccaaagatgcgtaacacatgttcgaaacgaacacagtgcaaggctgagatggaatttaaaaaatctacgatgatgctaaagagaatgttatttccgttcgaattgatctggtaaactatgagcataatcatgaattcttgaagaaagatacagaaaaagggcaattgcaatacaacaaaactcatgatcgtgattatatggagttccttagtgcgatgcaagaaagcaggattccacaacattgcattatggattttgtttcagaaatgcatggtggcccgaaaaacgttccaataaccgtgcaggacatgagtaacctgtaagtgtattattcattgacaataatggttattatatattaccgaaacaatcgacatgtgttaaaaatatgtagtgcataatcattatgttttta

SEQ ID NO: 110510 - DNA, 543 bp, Zea Mays
gttgatctctagtattcacagttagtttgaaagcatcagtacatcataatgcatcgagaaacacctcgtgtcctcagtattagatgaaaacacagtttgttacgtctattcctaaattagagagagctgcgtctctctaccgtgatttacgatgggttagttgtggattacgatcccatctatgtatatccctatcttctctcttctctctatcttctctcttctctataactgcatatatcagcaatatataaacaccggccgtgacccctagagggcattgagccaagccaattaacattatcggtgccaagggattaatcactcgatccatgttcattgttatatcctactcctgccctattgccgtctcaactcctgcatcgtccatcatgtccaccaccacctttcccctccaccacgctgtcaccatcaagctcaacaaaaacaacttgctatggcgtgtgcagctgcttccataactacggagctccaagctgatcggatacctagacggtaccctcatcgcaccgacgttttttt

SEQ ID NO: 110511 - DNA, 604 bp, Zea Mays
attttggtagaggcttagacctatttgaggtactggtctcatattacttgtggcgctttaggagtggagtagtgcactgcttctatagagttctctcatgcccgtaacttcctttagaagagtggatgttattgtcttccactggaagctagtgatgttccttcttcaaaaagctattgtatgtcttcgaaaggaagataccgtatgaggaaagtcagggcactaccacaacagtatcagtacaccattttaaggacaatgagtacaacataataaatgcaactacttcatttacaatggaccaattaaaatctctactatatttaagtttcaacccctggtattttcttcgtgcatcaaggaccctcccgcgcgctgtaaataaaggggaaccagctctccctatggagatagatagcttctaccactacgctatgtgtttgtgtgtgatgtaaatagaagagatattgtgtgtagggaagatatattggaggccctgggcttccaaatggtacaggaaggcctagttgaccaccactgcgacctggttggaccacaccggtgcgtccacccacatcccacgtctgtgtgcaccaggtcaaac

SEQ ID NO: 110512 - DNA, 359 bp, Zea Mays
caggtggagttggagaagatcgcctcaacactctagatggtgtagtggcaggtcttaacacagacctggacagtgccaccccggatctctctagggtgcacttggagctggaggatacccacgctaggattgcagccctggaagctcaacttcaaggatgggatccccctgaagcccaagtccccgccatggcgttgtcccctccccgcaagaggattcgctatggggagcccggatccatcactaggctgctttaaatttttaagttataattgtaataagatagttttcgctctagacgatgaacactcttttctaatttatgcttataataataacaaccatgtgatggtgttggc

SEQ ID NO: 110513 - DNA, 480 bp, Zea Mays
ggagaggctcctaagtctcttgtttgaggtggaggtggttataaggtgtagtcctagtgaagtcttgccttggcgatggggttttgatctcctggtccatctccgtctcgttgatcttctgaatattgtcttccttggggatcatccgtctgtacggggactggcctattccttttataagctaaggaagggggtcggctagcggtgtcttccttggggaggagccacctagtgaaggtagtatggacggcgcaaacatcgagaacgcctggtcccaacgagtatcatgctccgcaaaccggcgatcccacttgcgtcatggtcagcgaaccgtcgagagatcttgtccaatatgatttgcgtgtccggattcatgatcacttgccaacgacgtagacgatgtggtttggcaatggatcaagtgcgcagaataccctggatgtcgaagatcgtcatctttgataccacttgttaagacta

SEQ ID NO: 110514 - DNA, 1971 bp, Zea Mays
gttgcattgtgcttttaagcacataggaaaaatgtgtgtgtttatattggtagtgaagtgcacgacatcaggccaatgctgccaagcaaagatttttatatgcagagatgtatagtccagctcatttttatcactgcccatggtttacccaattactcataccgctctgaaattgggtatcgattaatgcaacatttttaggtataataattttgagagagaacttataacaatggtcaattatttatggtgttaccagcagggtaaatatttctcctcatattatataccaacttgttctataaagcattatttcgatctcttcattgttcagcaaaaagagaagctttggaatagaacagacaaggccaagaattcattttatctaggaaaaatcaccatataacttagcttttgatgaagcaaatgatgataactgcttggcaagaacgaaaacaagactagtatccgcttaggatccgtcttcaacaacagatagtactactctcatacgaaggagtcatcaggactacgaagaatacaacaggtctccataagatctttatatttctatcacaaattatcatcactgacagtattgcggtcgagagttgtggctcttccaacgccaagaaccaaggacaaattaatgcccaatgtagcttcaagctctgtggtgatgtgggattccatggctatttttgtactcttcttacttctggtagatcagatatagattatggtaagcatcccaaggggtggaatacaatgtagttctgctacataaaccccagatatatgtctattcagaatcgacctttaccatttggtttatagtatataccataccagtcaaaaaactatcccaagtcaattcagtggctataagtatttaaattctgagagatgtatgcaacacaagcatagaggtcctagataggccgagtaaagtggttcgacgagaacacacaatgttttttcacacaaacgttgtgaaaaaattctcagaattacctttcgatgtaatcgcaacttcgtgttgctaaggtactagccatttatctcaaagttcgcttcatgccgttcagcgacaaatagcaatgtgccaacatctggttgagcaatgtatgactgagattctagcatttattcatctgataaggtcttattgcttactaataaaatctcaatttgtgatgttttatgcgccaaaaaggctttcatgcattatattatataccttcgagttacttcgggtaaaactttatgcacgaggagagagcagagatttaacttatctgtgtttcattgtatttcgaattaatttcccagatttaaaatagttgttatggccacttggcgatatatatataaatatacgatgccacacaacacaatcaaataaaatatagagccaaacaaaattgtttacgaaggttgcaaaataatgtgacttaaggggctcgaataacccaccataatccacgcgagtacaagctctagcgtatctgacgtcaatgcgtgtgcggccatcagggctacgaccgtatagcaagccttcgtaataagcgcaacaggcacaattatggctcagtaatcagggtacacgataagtccacgcaacgtgcgcaacaggcgcaattgtggctcaatgatcatggcagacatacagtgtctgcagggcatgcgaaaaatacgcgactcggcgatgacggtccaactcaacgggagcggtccgattaaacgagagtgtgacatagcaatcacatgacgcagccaagttcgtacgacacaatattgtgtcgtgttgccagggcgcagtcaatgctcagctaatgtcataactcagccgattaacaatgttgtctgatcggtgtgtccgagtacccactattcaatttaatcactcgacgtgagtccaaaagctcaacacaacacaaaatacgtaacatagctagtttctactaatag

SEQ ID NO: 110515 - DNA, 297 bp, Zea Mays
tgacatttgacgctgaattttgtgctaataaaattatgtgatgcaccagaatcgaatagaattactgcaagttggttaagaactaaaaaggtatcagtcatgacgagtgctccttctggaaggtcagctaacgtggtgaagtccagcctaccttgccttacttgtactttttgtttcttgcccttatttagacgagaattttgtcccttcctctgttggttccgagcagtcctttgcatagtggccagtgttgccacaagtgaagcatcggttcctattgtgctggcgattcggctg

SEQ ID NO: 110516 - DNA, 2400 bp, Zea Mays
taaattacatgctcagaggaacaacaaaagagagaaggggacactcagcaggcagcagcactatgcgatggagcctctgccctcagctcatctggtaccttccacccaaagaaggctgcgagagcctctatgtgattgaggggaagtctttcagagaatattttttcataatcttttctggtttgctgatctatctcttccagttcccccaccaccttgagagccttcataactttctttgttgctcttgaggaaagatcttgcttgccaatttctgctcgcattccagcaatgcggcggctgcggcgaagggacacagcagtagaccgctcggagattatgggctttggagttggatttgctggtgctggcagaataccagatacttctttcacaatttgtttaagaaatacctcttttttggctgttacagggtccacgccatccatctgcagggctggaatggtattattttccgttgtttcctcagcaatttcaactagcggcttattatgcttcttttttctatgataaacgagcaggtttggtgcctttatgagccttctttctgatgttgcagcgccctggctttggaaacaatgctgatgggaatgttcctcaaagtgcaccggagccgaggcctctcctaagagagcctcaaggcccgcacggtgtttgacacttggtaccgagtacaaatctctattaatactctgctgcccactaggattgcagtccaactggtcagaaaaaacagcagcagcatgttgagcttgctcttcagtgtgcaccggagccgagtcatcctcgtggggattctcaaggcccgcacggtgttcagaagtgtggtcgctgcattggttttcaatgtgcaccggagccgaagcctctccaaagggagcctcaaggcccgcacggtgattgagatttggacccaagcacaaatctctagtgaaattctgctgcccaatgggattgcagtccatttgatcagaaaaaacagcatgttgggcttgctcttcaatgtgcaccggagccgagtcatccccgtggggagtctctaggcccgcgcggtgttctccgttgagatcgcagcaagggccatccacagaattgtccagctcagaagggttaggattcatttgtttggaatccaagcatctgggacccagtctttctttggctgaacgacgctgctgtctcagctccccaagattgctagcgttgatgtcttcccgtggtcgccctcgtggagagtgtgaccgggaccgccggtatgaccgagggccatcatcatgatcacgaggcgacggcggtgaggcagagaccaaaggagcagcagcagctgaagaaggaatagaccatctgatcttcactgtataacccagagagataaccccttgcaaatctccagtaggcgcctgcagaggctcagtaatccagagctcccgtgactccggaatcatggatgtatcaatgcaccaggcagaacatctgaaggaaaccaggtcactcaggccagaggtatccgagtgcaccttaaatagccaagcaaaaggatttattaaatgttccaccgtagccgtctcccacacgtgcactgggatgccatctaattccaggttaaccagctgaggaagagttctgccagaagagttgaaaaatctagaccatcgcttgcagaccactgtgaaagtcgcagcccgctgaatggaccacctcgagtcgagcctttgagccatatcttcagacgggagaaccagcagaaaactatttggtgataagcgacggagaacaatggagtcttcagtgatttccaatcttggtgagagcagggatgccacttcgaattcagaaactgagtcacggttgctgatcaccgagacaaccactgccaaacgaagatcttcctcggcaacagtcatggcgtggttccaacccagcaagcatgggggtacaagtcctgaagaaggcagatggggctgcatataaatcctgctcccatcatctctgggaggggtggggggtttccgtcttttgcgagagtgacgccggcgagaacggcccctgatagtgacggcatcagcgcccccagcaaggtcagaagccattccttgaaacaaatactggctgcctgaaattgcagccaccgaagtcttcctccgccaaaccttccgaggcgctgcagggtgaatagattgcctcgtctggcacaaaccaccagaagacggataggaaagcctgctccaaacagacttcaagatcccaggaggttgctgatttcgaagacgggaccagacagaggctctttctggagcgacaccgccaagacgtgaccacactgtctgcttggaaacagctgtggaaaactgagcacgatctggagcctccgggcagcgg

SEQ ID NO: 110517 - DNA, 288 bp, Zea Mays
atcaaactcagcaatccagtctgagactgaggtgggtggagccaagcagttgacgatcacgacttagatttaaggtatgacgagttcgtacaaccgatattgttggtcagacgaggaaggtgatgaggcggcgtcgagcgttgtgctccgtacgcgtcgagggctctaacaccattgggcattgggcatagtagttgcaagtggtccagtgacagcagctatcgccgaccatgccttgtggttctacgatggatggatcctgactaacctatgcttaggcgtaaggac

SEQ ID NO: 110518 - DNA, 585 bp, Zea Mays
tttgaatacgatgagcccaacagagttataaagattgggggcttgtgggggacatatatcccccaggtccactcgggggcgaaaactctgctcggggccacatgccagtcgccccgcagtgacgcctcatcgtcagccaggcagagagaatggtggaaatgggccaacctaggaatgcgataggcccgcacccggattgctcgtggtttgggcgtggtcccattgaagctgttcgcttttcctgcgctcgacatcctcaaacaccggagagagctcggagcggaggtgccaggttttcctcggtatagtgaagtttgttcgctattagctaggagataagttggaagaatgtgatcagtgtgtacgcgggaagcaccttgcgttcgtgtatataaggccaagggggatcctcatcattttcatctcattagcacctcaccacccggtagacaccacttgtaaacacctcccacatacaaagtcatcccatgaagtagggtattacgctcctcaagcggcccgaacctgctgaaactcgctcgactctctctttctcgtgccctcagcacgaaccattgcgttata

SEQ ID NO: 110519 - DNA, 679 bp, Zea Mays
aacgaagctcacagaggcatctatttatagagatcgaccgtgtgcacgacgaatttgagcggtggatggctatcggtaagaaacaagatgagtcaccggcatggtgattcgtggccttcactgtggcgacctccccggcgatcatcggacatgaataatactggtgattgcgacatggtaattgctgaggcacgtggcgttcggtcgacgggcagccaactccggtgatgataatctcggccgaccgcgcggcaagtgggcatgacggccggaccagctagcgaccgaaacttatcccaccactgatcttttcaccccgccccagtgttatccactcctcatcgagcacgaatctcccaggtgaaacatggatcccgacgcgagctcaccggcgacgggtgcactgcacctatgatcttcttcagaccactgttcattctgaatctcccttcgaagttgcctgacaacccatgtttgagccacaattactccctgctctaggcagtaacacacctaccttcctttgacaaagttgtactccaatatatggtctccaaccttgtcacagagacccaagtcttaactccactggattagtcacaacttgactccaaagttgatccaatgtcactgatcatccaattttcagactgttttagtctgacagcccatctttggg

SEQ ID NO: 110520 - DNA, 361 bp, Zea Mays
tacaacccatacttggtaatgaatgtcgtcttcggaatgtctgaaggtcgtatcctgagctggtgataacccgacctcatatctatctttgagaacatgctggctcctctcaactggtcgaacagatcttctattctgggcaaagggtacttgttcttgattgtgacctcattcagagctcgatagtcgatacacatccttctggtgccatctttcttctccacgaataggacaggggcggcccaaggtgaggtgcttggccggatgtaacctttctctgacagctcatcgatctgcttcttgagttcaaccaactccggtccagatactctgtaagctctcttaaagatgggggcggttc

SEQ ID NO: 110521 - DNA, 627 bp, Zea Mays
agggaggtggctggagtccagggagacatggggaagatgatgctaggaagagcggcgtaagaataatagagagggtcctgtgcgcgcatagaagaaatggattggatcactagcgtgcgtgttcaggagatttctagcgacgacgaggggataaggctgagcaagagggacacacgtactgtgctcaagaatttgaaagaaatggctagatgtctagagcggtgggagataaagataagaaggaaaagggaattttcttcattaattctatcaaaagaacacaaggcaaaatttttggtttacattcgagcgagctgtaaatgggacaaactaaaacaagattggatttgatattataaatcggcgatttgatttagtcaagcctagaaaatttttcgccgctatccgaacattcaactagaacacaactcaactaataagtttacgccttgtatttcttggataatagcgttgtcgaatttataaaaatcaaaatcttttcaaaaacacattcacgcactcaaccaatctgaacaacaccggactcgacattacggaagattattaaagtctaaacttcgtgaaatatttttgacagtccaaatagacggagacaaatgtgatatc

SEQ ID NO: 110522 - DNA, 414 bp, Zea Mays
gaccgaatgccgggtgaccggattcacacctttttgtctactatatggatcggaggccatgacgccgcaggagataaagcatgggtcgccccgaacaagcacatcagcagtccccgacatagatgaaccaacgtccaaagacctcatcgatggagaccgcgtcttcgccctgcaggccttcaacaaataccaagctcaaaccaaggcctggcgcgaccacgtggtcgtcccaagagagttcaacgaaggagacctcatactcgtccggaccacccggatagagtcacgaggcaaactggagtcgaagtgggggggtccattcatcgtcaaatcgaaggcgtcccccagcgcgtacaggctgacaacaccatccggcgaagacctagagcattcctggaatattgacaatctccg

SEQ ID NO: 110523 - DNA, 303 bp, Zea Mays
gcagggctatacattggttatgggttaccaagtaggcctccatcaacttctggacatgctcgtccttggcttgcttcagggcttcaacaacaatgacttcacgactttccaaggcagttgcacgggcttgagctgcggtgagatccacatggagctgacggttgcacttctctacatcttctgctcgggcaatcatctgacggtggtgccgagccaagaaatcatactgcgcatccagggtgagcaggtatgtagtgaggtacacgactgtggggtcgtcctcaagcagctgctgctcttcca

SEQ ID NO: 110524 - DNA, 277 bp, Zea Mays
cgtgttttattttagccagttcagacagccagtcttcatatggaaaaatatcttcatctgaaggctgaagccctcttttcactgttcacaattcgtattcagaatctcataagtgaatggatggtcaggatttattaatcatgttattagagtaataaagctatatctaactagataaagaaattcagtgtgcagcagctactttatttatgtgctatagttgaagtactagaggacattgggatctttaatgtacaaaggaataggtcctcagtgc

SEQ ID NO: 110525 - DNA, 542 bp, Zea Mays
ttaatgttcaaccggtccagcatcatgatgttaatatccagcctgatgaacaacaactcagtaattagcattctgccctatcttcgaacagtttgatgggttttaacttgggagctcctgttccgaatgatcaggatttgggtgctcaaggcatggatggtctactctttgaagaggaggacaataatctggagcttgaccccatccctgttgtcttagctctatggggccatgcagccagctccaattcagtagcatatagatgttgctgatttagctgtggatatcaatcaagagcaactacctatcaatgtgcagggggctattggcgggctagattttcaggtagttccccaaggggaagatcagataatggaagaggctcagcaacatggcaatcaggtgggagcagacattgacccatttcacaataatttggagatcaactacatgtttgcacctaaaagacagcctgacccagtattccaaagtcatgtttcgagaatgaaaaatgctcaattctataggctttgggctaaata

SEQ ID NO: 110526 - DNA, 501 bp, Zea Mays
taaaccaccttagatagcttgttcatcgcctgagacactgccccggtgaaagccacgacagcttgcaccagtgaacttcccctctctctggccgccagcgcgcctacttcaaattggacgccaccgccgatagattctataaattgctgccctagtgagctccgttaggttattacgcctccaatcgttcaccatagctcctcaatttggagtttcccccaaatcgtgttttctgcgccgccgagagtctctcatcgtggccagccctcctcaggttggttcatgcttctttgttggatgttttagcatcccttaggtctcctgttgcttgtaggctcggttgattgagctagaccacaccaaatcgtcatgaacacctcggattgtctctgattttcaccgtcgttgtggacagagatatttcgggctggattcgtgtaattaatggagagattagagttgtcgagggtggaattaggtgttggccgagctagggctctg

SEQ ID NO: 110527 - DNA, 448 bp, Zea Mays
tttggacaggcaccagtggtggtggtggtggtaactgagcccagaaagcttgagagtgacttgctgaagcaacagaagttgtaggctattgattgcctacatactccataatatacagagagtagcacgaagcggtatggatgacctgcttcggctgactctgtcgtgcttcgtcttcagcaattaccttctgcttttggatcgtgacttggcacgtccttgttgtgtgtcccttgtcctctccatagaacaggcagaaccatttcctaggctgattatcataccttccttcaccaaagcttctccccctttgcctcttggggctggtggtctgtaagacgtttgctgcatgcccgaagactgtgagttgtgctgactactctgagcattattgaccctgtcatcattggcattaggattgtggattgtcctgacatgcctaggatgg

SEQ ID NO: 110528 - DNA, 926 bp, Zea Mays
gctgaggttacagagacatcaccaatttccgaagttatgaaacaatcaggtctagttgtggaagagggaaccatggacgaaggtacttctgccgccgaagctgaacataccattgccgaagaagatgttgccgaagaagaagatgttgaagaggatgaagaggattacaatattctgatctcaacaaaacccagccatctagattttgggaaatctactgtatccgaagctgacatgcccatgatggtgaagttgggctactttggggaggctgaaaagaaacttgtctgatttgccgaagaagaaaccaccccagtgccaaagtgatacgcccagcccaggtggggttggccgaggcccaacaagttagggttgcccggagcccaacagttcgttaagcacacccaactcaaggaaaggcccaatcgccccaaaagactagtccaatgggggaagggtggctctcccttttaaagtggcttcctcctcccaagttaagcaaggtgggataattctaaggctcacacagtcaccgtccgactacaattgggccaactaggccaattgcgtctttgccaacgggtaatagtggaggatgtcctcatcattcccaccttcttaaaatgggccctagctctgataccagatgatacacccagcctaggtggggttggccgaggcccaacaagttagggtttctcggagcccaacagttcgttaagcacacccaactcaggaaaggcccaaacgccccaaaagactagtccaatgggggaagggtggctctcccttttaaagtggcttcctcctcccaagttaagcaaggtgggataattctgaggctcatacggtcaccgtccgactacaattaggccaactaggccaattgcgtctttaccaacgggtaatagtggaggatgtcctca

SEQ ID NO: 110529 - DNA, 589 bp, Zea Mays
gttgttttctgttttagttagggtctctttagcaattttgacacggcaaaggggtatgcagtgtttgcaaccattagatccgaaaccgttggtccagattcaaaaccgtaaaataaactcttatctgcccgatccgaatcggacggctctcatctccccaacctgaatcaatatacccggagtaatctgatccacccatcggccatccaatggcccggattctattttacgaaaggataccctctcttctaatcacagccgctaattctagattctatggtcagtgactgtcttctctctcaagtatgtcgtacgacagcgcagagctcccccgcggtggcgctccatggccagaaaaccttagcagagactcaactacaccattctaggaacgattcggtgctacacctagggaagatttaggcaaattgatgggggatcaatacatcggctaccatgtgccccccccacaccgatgcccccacacaggcggcgttgaaacaaggacccgagcctggcaccaattccacagtcggtgagcacaacgatttggtgccgccatggtactattcaatggaaggaataaggc

SEQ ID NO: 110530 - DNA, 823 bp, Zea Mays
caatcacgactagcggttattaaagacccgagggcaagtaagctatcatgatccggcctttgggttctcgatcttttctaaatccctgtctacctagtggtttgtcgcatgtcctaggcccgaagcgctaggcttttcctatgtgttgatcgggctacaagattcgctcatgcatgggggaggaatcaaatgtcgcatctccttgacattctagagtggctgtggagtttgggattcaccatggtgcattgatgaccttcgcccttgtgcaacttcactacagtgaccgccttcatgaggttgctggcctacatgccgagacaacgtcagcaaacttagaactcctaacaagcggctttgacgtcgcggcgaacttcatgcttggggtgatgtcagtggaggaaataatctgtgatctcccgtaatcttgctttgcggctcatttattcctacaacgtgtatgatcattgggtccctcggaccccggttggtcctaagctctatcatggtccgaggggcgctatacgtgcaactttttcccattcaccatacccgtgtgaggcgagcccccgagcctctactcgatccagagatccgtttggggtgcttgccctatctttttgttttactctccctcacacatcccttctgtagtgatgaggggagaggagctgaaccacgctttcctcgatggtcgagcaatggcgcccggtgagctgcaaacggataatccgagtgaggccctaggttctttcgtaggatccaaacgcggggtttgctaggggaccgtcctcatactcccaagcaacgactcatatagttg

SEQ ID NO: 110531 - DNA, 326 bp, Zea Mays
cgatgacctgcaagtttactgcaatacattgcacgaggaagtccatgtgctctactcgcaactacaccctagtgagcctgcacactctgctgaggcggaagccggaccctctcacgctgcgggacgcgcgttgggtggggagttagatctttttgagccccctccttctttgaggttggtggacgtctggactcccacacctgacgatgaggccgccaagactaatggcaagcaggactagtagtgtaataaaagtagagtagtgtattgtagggtattgtatcctgttaataggttcaacttttgtaaaataggtaatgtatcct

SEQ ID NO: 110532 - DNA, 320 bp, Zea Mays
gttgaatcggagccccaaattcacgttgtctctgacccctcctctcaaattgagtctgcacagtgaagctatagcttcttacggtcgagtagcctcaatccccaaccccaatttcaaccagagccgccgcaacaccaattctcccctttctctgtcaccggcaagtctaagtcttccgcgctccgtggccagccctctctggtaaggccctgtccgattcaagcattgttttagcagctctatgtgtccatgaagctcctcgtagtaaccgtttgaccaatccgagcgtaaataattgggaacacgggatcgacaccacg

SEQ ID NO: 110533 - DNA, 1130 bp, Zea Mays
caacatcatcgtcctcctcttgttcacaaccatttccgactccacgaacagcaacagcgatctcaatgcactcttgtcattcaaatccctcataacaaaggacccaatgggtgcactgtcatcttgggatggggacgcttctaacaggagcgctcctcatttctgccggtggaacggcgtgacgtgcagcagccaccagcacggcagccatgtcactgccttgcgcctgcgagccttcggtctggaaggcaacatctcccagtcgcttgggaatcttagccacctccaaaccctggatctgtcgaacaacaacctagaaggcgagataccttccagtatcggtaacttgtttgctctccattttctcaacctaagtgttaaccacctgtccgggaacgttcctcagtccatcggccgtctttccgaactcgaaattctgaatttccgcgacaatgacatcgtaggaagcattccttcttcagtgctcaaccttacaggactcacaatgcttagtgccaccgaaaattacatgacagggaggattccagattggttgggaaacttgacggatctgacagatttgaacttggcatggaataacttcagtggacagatcccacaagctttaggtaagctacctaaccttgctagattgactatgcaaggtaatcaattggaaggtttaatctctcctacactgtttaacatttcatcccttgagaatttaaatctcggctataacaagctttcaggttctctacctccaaatattggatttacacttccaaatattgtagcatttagtgtatgctataacaaatttgagggtccagttccatcctccctgtccaatatttctgtgctccaacagctcatcctccacgggaacagatttcatggccgaattccacctaatattggtgtccacggcagcttaactaatcttgaattaggcaacaatcagcttcaagtcgtggatactaaagattgggattttctaacccctttggtgaattgcagtcatcttaaatatcttaatcttgagctaaataacatttctggcattttgccaaatgctgtttctaatctctcctatgagctggaagcgttactgatgggtggaaaccaaa

SEQ ID NO: 110534 - DNA, 621 bp, Zea Mays
cgctgttcatcaccgacgcggcctgtactggccatgaccggcggtggctgcctagtctagctacatgggtggcataaccaacccaaggtgaccctagaacatgctctaattggactaattcgggcccggatgtgcttgaccacgatgatcgcggatactgaactctgatcgaggcgttctggttgattaggtgaagtcaagctccaagggctgggcaggtgacgatcacaagcacatgtgggtgctaaaacacgaacaacaagggcgaggacggacctggaatcagctagccgcaagtaggcggttcacggcggcgcagtcgactgaactgggggaagaaggaaattctcctgctacggtggctaattgagggtgagaatgggtgcttcggcttcgtgataacatggcgcaactgactcggccttcaatttatagaaatgctaagcggtgacgtccaattttgaaaggagagaccggcggccgagaagagagatgagtcatcggcttgaactgtcgtggcgcttcctggggtaatttctccggcaaggaactgacctcttacggatatctacagcgacatggtacatcttctaagcacgtggcatggttataatcgccggc

SEQ ID NO: 110535 - DNA, 767 bp, Zea Mays
gtttctgatcactgtcacccccaggacctatccaagtcgctttccaatgcagttagacgacagagaaggcatgactatgatgtcataatgctgaaggaccccaagaagagactatggcctgtcgtttaccacgacagcctgttatttgtgggattcaccgcgggctggaaacatttcgtggcatcaaacgaccttcgggctggggatgtttgcgaacttgttaaggagccagacgatggtgagccggtgtactctgtccggatgtctgatcacaaaatttaaagccgccccggctttatctgtgcgcttctcttctgttaggtgggctgctaaactctgtggtttgtctttttttttacctgtcagtcgagtggtttgtcttctttccctaataacccgtttgcaacttgcgagtgtgcagacctccaagaagcatggtgcagccgacttgcggaccttgtgaaaagcatgtgggtctgcccccccttttttttgctggaagtcatggagaaaccatgtgggtcaggcgtttctgcgtggatttttgacgatccacagcctataaaaacatagagcgacacagctgtagtagtactgtagaagtcgggcagtgtgggactgcaacatgaattgtgatgtgttgtgtggttgggacttggaagtggtggtgtaaccatgtgctgtgatgttgcagccatgtgcgcgcggtggtcatggtcgattttgctctctgccgtttgaacattccgaccatgcctgaactggat

SEQ ID NO: 110536 - DNA, 569 bp, Zea Mays
gctgagtcgggggacaatgaagatggttatgatgtgcagaaaacaacttcaaaatcagatgatattcttccccagtcggcaggttagtcagttttatggtctttacgtcaatataaaaaagttattcaaacatttgttgatatcgttatgatgccattatttaaaatgatgtttttttgtataaatgatacgtaaagaaggatgtacgtgtccggccccacaaactgtaccggatatgtctactccagcatcctagcaggatacgcagttgacagacacacaggtacatgaattactgttaaggcaatagcatattcgtgtactattagaaagttgccccgatgaagctgacattgatccactggttcatacaaatacaacgaaacagaccaaaacacctacaaccccagtggtaatgtttttttattacttgtattttcattgaagggttgtattcatcgttttctttaaatagcatataaccattacaattttttcagggtaaacatggtgacgttggcaagaacatgccgaccaacacaaacgtcactcctcaagcaacaccacat

SEQ ID NO: 110537 - DNA, 441 bp, Zea Mays
tgacggaccacgagtgatgttgacagatatggtgtaataaatggctcgtattgattaaacacgtactatatgatatcatactgacttgcccaatgttagtaaatttatcgattttagatcaagaccctgctatgccaatcgcactaagcagaatattcccaaatacaatacattgattgtgtttgtggcatgtgcaaaacaggtatatgccccacttgaatgaattgtatgcaagatttgagaaaatggatttcaaaacaaggttccaatctataatacatcatccattgaatgaaatggagttcgaggcagcctggcaaatgatgctcaatgatttccagctacacgagaacaacacccttgttagattgtatgaaatacgtaaagattgggtacctgcatttttcaaaggagactattgtggtcttatggtctctacac

SEQ ID NO: 110538 - DNA, 369 bp, Zea Mays
tgtcaattgatgaaggtatatttcaaaattcttcaaaacctcccctatcatatcatagagagggaaccgaagccctgccctgaagaagcttttaaacacgataacttcatcatccttcggctctggaaccacttcttcgccagcaaaacgaacaagcctactctcggtttctccaaagttacccaattttttcattataaccatgtcatctgctgtcacagtagatttaccaaagtcaaggtgactagatttttctaggatcaagatagtgtaatcttcttcttcttcattaccacttccctcttcaactatgactccttcaactttggcagtcagtgtaccttcggtaataggctcttctgatacaac

SEQ ID NO: 110539 - DNA, 531 bp, Zea Mays
caagggggtacgacgaacctcatccgtgttcgagtctgagttaatccagtgcctagatctttatcttatcatcgttatccctttgccagcgaacacggaccgcggcgacggcgtgaatcacggcgtaaagatcgtcggcagcgatgagggatgaatcgagtatcttcttcagttactgtaccatggcatacatctccggttgacctgacagagcaacttgaagctagattttctcctaaattcgcttggcaaccaatccaaggctctgcaacaaagttgtagtctaacataccatcttcatctttgttatagtattccaaaacaaattcttactagatcatgcgtagaattgagctcaaagtctggtcaaacccactggcagtccaaattcagacttcaaacagcctgaaaacctaactttgggtgtatttatctccaaattcttcataacaacaatgtttaaccccttaaacaaagttgttcacctttgatagatctacaatattgatgtggtgacctagggcaaaatcc

SEQ ID NO: 110540 - DNA, 447 bp, Zea Mays
attgagcatcaggaacacttggcacgtcatcgatagcacaaccaaagtcttcagggggacggtctactacaactagacgcaccacaacctgcatgagttgcaaatgggtcttcatagccgaagtaacataattatcccaatccagttgacaatcaattgggatgactcgtcttatgatatttggtggatgaccaatattaagcactccgtcaaccgcaatgtcatcatcttcatggtaacctagcttttgtttagcctttgtaaacacatcactcaacgagggtctaccatcgaatagtaccggcacgtgtcgcatgtcaatgaacttggcatttccatacggatcttgttccacattgcctccatgatataagctcaaaaaattgtccatctatttcaaacacgaattaaacattcaatataaactatggatggttattgcctaac

SEQ ID NO: 110541 - DNA, 442 bp, Zea Mays
caggggtctcggtgcaagtgtttccaagactcagaaaacccacccagtggactgcgggttgttttgacacaaaccgaggggcccaaatgcactttagacccgcgaaggggtatcgggccgttctggccgtccgatccataactaacggcgaggattagatcgggtccggcccgaaccggtacacacttagagccgtcgatcaaacgatctgcggcccgaagttaatgaatggaaacttgaatcctagacgcccgccgatggatcaacggtctggatcatgtctgtctgaaagggtacgctagcctaatctgagccatccaacatccatccaacggcgcacgcatgtcttccccatcacacacacaggtgcggcggcgcaccaaatctcacggcggagccctcaccggcgagtctcaatgtgacgcatcgggcgctaatcccc

SEQ ID NO: 110542 - DNA, 363 bp, Zea Mays
cgaagctacaagtgatgaactgcttgggccgtactccaaagcggaagataatgcgctatctgtggccttcgaaagccggaagaagaaaagactaaatagagtttttgatgctattgggttcatgtaccctgactaccgctacacgtcacgagggcagaaaagaaaaagtgcaacttccgggaaggatgatgcttcagctgctccaagcaagcccgcgccgaagaggaaaaaggtgaaggttcttactcaccggtcgcgatatattgaaccggccgtagtgcccgaatttggcggtgaaacctcttcggctactgaagccaaggatcctgcgcctatacagaagattgaagagccggccgcaat

SEQ ID NO: 110543 - DNA, 449 bp, Zea Mays
ggaaatgccaaatgagactgtcaccaagtctagcgaaggtgacctggtccggttgaagtatacattcagatatggggataagtttgaagaaccaaacgacgactggctgaaatgtatcgaagctacaagtgatgaattgcttggatcatattccaaggcagaagataatgcattatccacagccttcggaggctggggaaagaagagattgaacagagtttttgatgccattggctttgcctaccccgactaccgctatccgctgcgaggacagggaaagaaaagaaaagctgctacttcgaccacttcagacgagcctgtgccgaagggcaaaaagttaaaggttcttacccaccagccgcgctatattgaactggtcgtggtgcctgagtttggcggggaggcttcttcagctgctaaatcaagagaacttgttcctcccacgctgt

SEQ ID NO: 110544 - DNA, 599 bp, Zea Mays
aggagaagaagggtgtttccttttatatcttaagggataggtcttacattggtgtctcttagagagagagggagagagcgagggtccttcggttgacgtggcgggttcccatccttcgggtggcgcaaggtagtgtttccggtatggtgccgcccatctctcttgttcctgtggcgagttcgtggttgacgttcccacgatgacacgcagctggtcccatggttcagcatctaggcctgattcatatgacacgactttctcctgtcatcgtgggccctacgtcgtcctcccgtgtgtgtggatttgttcatccggtacggtgtcgtcatgtcacttccgacataccggctactgtggagactttggtgttgaggtcggctctcaccggggctacctcgtcccatcagatagagcagcgtgctcaaattataagaaaggggcgtacagttgtgctgtcaactatcgcgtgggctcctagtgacatgctctgctgtggtcaatgtacgctcgttactctagcctaccgcttggtctcgctccacggatgtcgggtcgaacgttccacccagccgacttgctcggcgggggttggttgtcca

SEQ ID NO: 110545 - DNA, 523 bp, Zea Mays
tccttatgatctagcgcggtagagcttaatcggccgggccaacgagcatcacaagcatgcgagagtgctaaaacacggataaggagggtgaggacggacctggaggtggctggccacgatgcggcgtcacatgatggcgcagacaacagatttgggggaaaacgaaattctctggctgtggtagctaatcgagggcaagggttagcgctctggcttcgtatcaaactaacggagctagctgtgcactcaatttatagtatccatgagcggtggctgtgaatttggaagagggaagctagtggccgaagaggggggtgagtcaccggcgcgaaatactgtggcgttcactggggcaatgtttcaggcgatggacagactacctacgacggtctactgcgacatggtaacacttctaagtacgtggcgcccaggcggtaagcggcaaactctggcgagggtcatcttaactggccgtggggcaagtgggtacgacggctagctcacggcctcatccgcggtcaag

SEQ ID NO: 110546 - DNA, 438 bp, Zea Mays
caacatcctcgagcgcgctggcatggctgactgtaagccatgatccactctggtggacactcagggcaaggtttccactgacgccggctcttcggtggttggtccgaccagctattggagtcttgtcggggttctgtagtacctcgtcttcactcgtaccgacatcgcctacgtcgtctagcaggcgtgtcttcatatgcacgcttcgcgggagccacatctcactgctatgaagcggatccttcggtacctctgcggcacccaccgacttcagtcttctccttcgccgatctgcgaccaccgaccttgatgtctacactgacgccgattggttggttgtcccgacacccgtcagtccaattccggtttcgccgtcttgcttggcgacatccttgtctcctggtcttcgaggcggcaacccgtcgtctcccgctccag

SEQ ID NO: 110547 - DNA, 336 bp, Zea Mays
ggaccgatcgtaacctatattctataggaaaggatggctggttgttttctggaaagtgtaaggactcttttgcaatttcgctgtggccgaaggggtatcacgatatccctaccgtcatatcagaatctggggaacaagattagttctcatgagtatacaatgtggaccctcagattaaaatcctgcagttagggttttatggagatgggatctaatttcggtcattggccgaccatcccacgacccagatttcaaatgaaagagatcaaatcttggccgcacagttcaaaatcaacagccacagtttcatcgcccgaaactggtaaatggattggc

SEQ ID NO: 110548 - DNA, 412 bp, Zea Mays
gaataatttagtaaatttatgcaaaaaataacaaaagttaagacatttgttatgggctcacataatcaatgttcggacacacgaagtgcttcgcagtgtcctcgtcgatgacagcacgatctccgcaatcgcatcgaggcgacgagtccattcgtctttttgttgctacctccttctccgcatccgtcattggtggaggattcgggggaggaggtaccaattagcgaaaataagatatcgagggtcaaatttatcaggaccgtcgatccactggaaaaagaaacacctcaggtgctcctaaaaaatggaacgaagcattattacacatctagtaaacaatattaagtcacaagtcataagctacgtacgttaaaaccgccacaaaggtagaagcagcgagcagccgtatctg

SEQ ID NO: 110549 - DNA, 566 bp, Zea Mays
ttcatttccctttctcgtcgtccacagacaacctaagcacaacatggatggtcgcctcattgaagctctccaggacgtcctctagccctttgtacgaaagggacaaatgagggccgacaatgtcccaaaggtcatagccagactgaagctctccaacgagtagtgccaccacggctccttagtgaacgtcgaggtcaacaatgtcccagatacgacacgagacattgtctagacgctcgaccaaagagaaatcattggtcccaacgtagtccaagacctgacctaagtgttaacgcaacttctctagctcggcttccaagctatcaggagaaaagaacagagtaagaaaagggggcactcatgtaagaaggttacttaccttggctccggactagcatggcatggcattcttccgacccttgatccctcgaccgacccaatgaaggaacacatttgagaaaagagttaaagggcagaaggctcagggtaactttgagcggatgcttgctcggatttataaggatgcaaaagtgcttgatcatctctcgagtgagaacgagctgcat

SEQ ID NO: 110550 - DNA, 348 bp, Zea Mays
gaggcacgaagctatagcaaccaaaattattgtgatattgttctttgccagtggccttcgtctcgtacgacagttcgtgaatattgcaaaaacatcttgcatttggttctaacccctggctcctcatggcccaaataaaaatccccattctgatgatagcctcgagggtgagttcatgaaggaatatttcaaaagtcttcaaaacttcaactaacaatttatctaaagggaaccgaagtcccgctttcatgaagcttctttaaacgactacttcgtcagctttgggcaaaggggcattgatatctcccccagccctcacaatagaaatatcgcggaagtaccttccct

SEQ ID NO: 110551 - DNA, 507 bp, Zea Mays
tagcttgtcaaataaactggtcctaggtgtgttcccagttgtgctgtcaccgtaggcaacagatggatcaccagcgtcttctcccttcactccttcaaaaagatcttcagacatttctgcagtagcatcattccgtggcttcttagtctctaaacggtgtttggacaagcgaatggcttcctctttctcaaactgaatatcgaaattaacatagcacagaaaaactatattaaaggaaagagatagaagttcatgtaagaacaagataaagcggaaatgtgaaaataaactgaacaaaatctaccttttgataacagcactatcagtttggaaatcaaaacattgaatgcacaaagaaatctctagtacttattaaggctggaagggtagcatgtcattccttattctgtcattctcattccccctccccacatagcccacacccattcccattctcattcccccgcacagcccacgcttagctaaaattaaaaaacacatggccgc

SEQ ID NO: 110552 - DNA, 411 bp, Zea Mays
atttatacaaaaaaatgttaagctatcaccctgcataaatatgcatttcacttattatggacatgtggtatatctgtagcatcactattagtttttgtagcagtccgcataaactcgtaatggatatcatatacttcgttttttcataccactcaatatatttctgggtatatttcaagcattcacttatattacaatttttagttccaaagcaacacagaaacttgctattctattgtccatactgtccatgtacaatctgaggttagtttatgacaaaacagacatgacatccatgtgcacaactgcatgctgtgcatgacaaatgttttatgtataactatatccttatgttcgacttaataattatgacttattaattattgtgtattatttcatagcaaaggggca

SEQ ID NO: 110553 - DNA, 879 bp, Zea Mays
tggagctagaatgaattttctatggaataaacaagtttctagaattgtttttgtattaaaaactaaattctataatcatttctcggtttttattatcctctggactaggcgtcaatttctggaaagtccagggggctctggcgtaagtttaccgagacacaggagacttcccagtggactgcgggttgattcatccatttttcagggtctcatacgctattctgccatggcgaagggtatcggtgatccagagccgtccgattagaaacggacgtgccagatcagatcgcacatttgtatccaaccggtatactacccgagtcgttgatcgcgagatcgacggccgtgacttattactgaaccggtacgtcatgaggaccatcggattaaagatcgtcggtccagattccaccacgtcccacaccctatcggatccgtccaaacccaatcacatggtcaggatctaatggattgaaagggtataagcataacatatccgagccgtacaccctaggatcgatggctcacaaacgatcttctaccctcagacggaacccaggcggcggcgcatagcatcacggcagcgacatcgccggtgaggatgaaatcacacacaaatgccccaaattcgacaccgaaagatgctacacgaaactgagactatggggaaggtgtgggtgagctcttaccaaatggttaggtcggtgatggtcggcagcgacaacgcggcacgcctaggttccgacaagaaattgggggccgcccagcaagattccgttccaaccaaggcatcctacactcgccatacgattgaggcaatgcccccagccgctttctgagagcgtggcgccgacacagcggcgaatcacgacggcggcg

SEQ ID NO: 110554 - DNA, 788 bp, Zea Mays
caggagctaagtttaaataaattgagcaaaagagttgagaagatcaaaatgatgaatacctttgacttagagtagttggatgaactaataattttgtctaagtcgtaaaagtgctcaacaatatagccaaatgcaaacaagtgaagaatgtccaaaaaaggactaagcctagctattccgagagcactaaactaaagtaccagagagcttgttttgggcatagaggctttggcacgatggaccgagtctagtggtacaccagaccaaagttctatttgttgacagcaatttaatggtgcactagaccaaccgatcgccccaatggtcggatggttcaaaccaacggtccgatgatgtggcgttgtgatgtggcgaggttcggcgggtcaccggacggtctgttgagtactaacagcctaacaactttccagtttccacaacggctactaacaaaacaggaatggtactatttgaggtctggtgcacacattttatgtgtatatttgggagtggagttccaatggctatataggggtttggggtcctatatatgtccccaaccagtgtgttagacatcctaatgttaggcaaacaagtgcatacacaagaacaacacatccaagtgatcaaagggtcccaagtgccacaaaaagagatagagcacttgtgtgagctaaagtgtggagttgtgttgtgaattgtgatcctaagctttggagctagattcccattgagattgtgtaaagtgactaagagccttcaagtgcgtggagagccttgaactcaat

SEQ ID NO: 110555 - DNA, 763 bp, Zea Mays
ggagtaggagcaaccagatactaaggaaaaccctgcaccggcacgaactgagaagtcccaggcacataaaactgttgtggaggaagtggaactgaaaattgctgctcagcgcttgacatcatgttgacagtgcccttagaagaggaggaagtcactggctcccatctgagcttcccattgggattcctcctacacaccacatccttgtggtcttgactgcagattgaacatctgtcgttccactggcactctgcacggtgatgcacatcactacaacggaaacacaccagccccaacccgggcttaggaatagcccaaaacctctgagtacttcctcctgaagtacccgagtcagaggatttgccacgatagggatggcggcgctgatgctgagacttgcccctcttgtgggctggacctctagtgttgcccctcctcgcgtcctggccacgaggctgatcaacccccgaagacttctgtgactccatggtatactggtgttgcatcaccacacccagtgcctgctccactgtagtacggaagtccaccaacggaaaggctcccagggcatgcctgatggaaggtttcaggccctgacggaactggctcgccttctccatctcattataagccacatgagggacaaagcagaccatcttctcctgcttgtaggactgcaaatcaatcttcattttctccaggaaggtgaccgggtagaatctcctttcaaactgcctgatgaagacatcccaagacaggactc

SEQ ID NO: 110556 - DNA, 559 bp, Zea Mays
ctttaactcgaatccacatcaagtattgcagtggatgatgcagatgcattggggtacctccaccatggaaaattggaaaccaaggaaccattgtccattgtgatcggaagcctagcaacattctcttggatgacaatatggcggcacatgttggagactttggccttgcaaggttcaaatttgagaagtgcatatccaagaaatatgaagtcaagaaggcatatccaagagataactaaggtaatacaagcaacgccctctgcactttattttgataaggtaatcactctcccaaattaaatgcataatatgcattctgagaagtcaaaccagtctcaaggcagggcaacctaggagagattcactctaggcttcacagtcgcagatgcacacatggtaatacaacattccagatgatattttacttgcagcactgccacttaatatgtgatgataaataaatagtaacaacatcatgtctcaccaaattagtgagaactgcttgtgaaaagttgaagaacaaagaatctcaacttggggtctgatcaccacataggcg

SEQ ID NO: 110557 - DNA, 547 bp, Zea Mays
ctgcatcgtcgcccttcccattccctgtgctgctatcgtcgaacaagacaagtaagccatcgcactccgcttcgcccatgtctcatgttcccttgcttcgtgtcacatctgatcagtcacacctggaagagcgaattgggatctagctcatgcattctggagagcatccaagtttttacggtttgaatctaaagtagcccaccgaaggcttaaggctactgttctccgcctgtggtgggtgctaaactctttctaggttccttcttttgcaggtgggtcaaatcggataaagaaaatattgaaaaataatgttagatacatccacttagtatctacattagaaatggatataagtgcagatatacatagtataagttttagcaagtacaaatgacggataacgtataaggtattcctttcccgttttcgttctattttctggtgttttgccatgtttggatttactatagatttggcaaattaaatacgacagcttggcaaattttagtaacaaattaaagcaaaatattattaaaatcatagcttg

SEQ ID NO: 110558 - DNA, 420 bp, Zea Mays
atctggtcaatatagatttctgcgtatttttttgccctgtgggtgctgtgcacgggcaagaaatcagctgtcttggttagcctatccacaatgacccaaatggaatcgtggtgccgggaggtgttgggcaatcccacaataaaatccatgcaaaagtcctcccatttccatgatggtatagggagaggctgtaaggtacctgctacctttaaatgactggccttgattctttagcaagtgtcgcactcagatatgtacttagtaatctctctcttcatcctggtccaccaatataagaatctgaggtcatgatacatcttgttacttccggggtgcatggaaaatttggagagatgagcttcatccaaaattttcttcatgagttcttgatttttgggaacaaccagttgatcttcgaac

SEQ ID NO: 110559 - DNA, 671 bp, Zea Mays
gccagacatggtaatcgggccagataagtccgcgggcttatttctatgaatggttggacatgttatggacttaaacgggttgggtcggcccgtaagaatggaaaaacgagccgaaaagcgtggtgtaataaaaaacagaccaaacgagtcaagcactaaacggatcatactaggctagcatatcgtgcttaattctctgtccaggcctagctcgcttatttgtgctggaccggcctgtgtccgttttaagcgggtcgggcttcgatcttagtggacatctataggtatgtgtgagatagtgagagtgcatatggaagcgtgtgttagatttcaagggcataactcgagtctcgagggtatagatggcaagtgaacggtgttaaatgggtagacactaagcacaacacgaccctttgcagtgctttggtacggcatgggcacgatttatagtgtcaatgtcgatatgacacgagtctagtgtcttgtttggaccgccacctggtacgatggactggcacgagcacaatacgattaagcgaccgacaccaacccatggtatatagacgcatcagttgccacgagtaataataactaataatgacggtgacgtgtcgggcggcccaatactcgagggcatagcacgatgcatggttggagttggagggctgaac

SEQ ID NO: 110560 - DNA, 446 bp, Zea Mays
gttctgtgcaaattctaggacctaaccgtaatgcttctaatataattctggacggcgggttgtttttgaaataagtcagggtctctttagcaagattaccaggccgaagaggtatctcttgttgtgagccgttcgatcaagatttggtggataaaatataacaacgaagggcaagtaactgtaacccctgatccatgtatcagcggtccagatccaaggcaggcgtgatccactgtgcaccgcaggatcatgatcaaacgatcatggtttaacacctgaaccgttttccagggatcaaatcaaagtcgtccgtccatagatcgatggccaggtggtcgtcttcaaccccccggcactcactcctttcttccggccgactcaagacggcgccagcagcgcacggtggtttaaccctggcggctaaccagtactaaccgaaaaccgcg

SEQ ID NO: 110561 - DNA, 440 bp, Zea Mays
ctagcgtcacctaaatacaccgcgaagaagtccggatacgagcggaattggtgagcttctcctacaatctcgccatggcggctcgatgagatttggttctccctccctcctcggtacaggcggcgcacagattggggcaacgaggcgattgtgctggcgcgcccgatctatatgattcggagaggggatggataagcacggtggaaggggttgaaacggtttgcccgaggaatccggccctgcaattcggtcaacggagagtggaagcggtggatccaaaaattggggggagaagaagcttctgacgtgcgggtcccacccgcagagacatgagagcacgacgggtcacagcgtacactgaaaagtgggaccgtcccgtcattgagggaaggctggagccgcgcggtggagaagtttttgggccgcgcaggagatttctc

SEQ ID NO: 110562 - DNA, 501 bp, Zea Mays
aaaaattccagggcctcagtgtaaggttctttcaactgcttgggactgcgggttaattcgtggagatcccaggggttattttataactcggacgcggcgaaggggtacgggcgatctcgagccgcttgatcatgaaccaagggccgagattagatcgagaacaccactgaacgggtacgcgatcgtgaccccgatcaagcaatcaacggccggtatgaatcgatgcgcatataaaatcctgtccgtccgccagatcggacggcacacacgcaccaacgcgaacggtacagcctcagttaatctacaccgttcatccccaaaccgacgatggagagcacatcttcctccgcacagctcgccacggtggtgggagcagggcgccgccctgagagcacgacggcggatgcaattccgatggctccccgatttatactccaatcggaagattgctaggcaaagcgcggacggaaccgaatctagggaaggtagccataccgggta

SEQ ID NO: 110563 - DNA, 547 bp, Zea Mays
tcttcttgcttggatggtgggggaagtggttggtttgcttgctgtggtggagggactggtagggctaatatctcctagtgttaaaggcgtggtcgctggagcaaaattggattgtggttttgttggtgctaggggtaatatgggtgttcgttttggtagtggtggtggtggtatgggtgtggttggtatggatgagcgatcgctctttggttgtctgttggagcgactctggccatttggcccttggttgccttagtatcaggcagtctctagttggatgttctgagtcctcgccataaaaaacacaataaaatattcttggttattgagggcatcagtctctgcctcttcccctagcctcgttactgttgcggccttgttgcgaagggtagttttcacatcgggggtggacctctcctagttgttgctgggttgcaatgttgtggacttgtagttggtcgcgctcttgatgggccgggtcttgctgcagaggcctggtccatgtcctgttgatctgtggagtctcttttggtttccgttgtgactc

SEQ ID NO: 110564 - DNA, 398 bp, Zea Mays
aggccagaagccagaagaggaaagctactagcccaacatcgcaagacaaggagctagaccaagaaatcagagatagaagctattcatcatcatgtggaaaaaagaagggaaaagatgctttgtctggctgagctccagaagaagatattgcgcaagtcactgagcaagggcacaagccacaacaaagagatctttgtcaagaaggccctagccatgatgacatgtggtatgatgattttcaccatgatagcattgcttttgatgacacttctcctctagctacagggttgcaggctgtcccatggccaccatcatacaagccaccctagcttcccatgtatgatggtcactcagaccagaagcaatttctgatgagctacgaatcaaccatatcatca

SEQ ID NO: 110565 - DNA, 319 bp, Zea Mays
aggaatgtatgttttgaaaggggtggacatgccagtcacatgctttgatgctcctgaatctatgacccaatctatgtgatgtctacatgaggatgcaaaaatttgtgcctgagtaccttcgcccatgtgggcatagttggcaaagttaccgaaggagttggtggcttgcccatcaggtgaagtgaggcactcggaagacttgcccttctgccactgctcccattgcttagcttgttccccagacagagtaacagagagactctcttcagtggtagctatgttggccctggagccaccacgtcctctaccacgacctcca

SEQ ID NO: 110566 - DNA, 383 bp, Zea Mays
aactgatcaaggattacgacctataaattcactatcaccccgggaaggccaacgtggtagccgacgccctcagtcaaaagccattcggaataaaagggaccaactttctagaagactggaagaaagaataagcacaactaaatgtatgtctgggaaacaacgacagtctcgaagtcaaaccaatgctagaagacctcatctgcaaagctcaacatctagacccagagacggcaaggcttgtggagaaagcccgcaaggaacaactcccggacctcaggacagatgaccaaggagtcctttggttcaaacaccgtctatgtgtaccaaaaggggaaacccgagaagtcctactcaaggaagctcacgacttggcctactccatc

SEQ ID NO: 110567 - DNA, 488 bp, Zea Mays
gtcgaatcgaacaagttgggatgcatattttgttagtccgaaataagaagccatcatgcacataatatttatcccaaccttttctatcaatgcaatgagagaaacgttctttaaaatcagcatcagcagcataaagtgttttaatggattccaaaccaagcacttttgtatctagttgtgtaatcaatgcacatcttctatacaaggcatcagcaacaatgttatctttaccacgcttatgtttgacaacatagggaaacatttcaatgaactcaatccatttagcatgtcgacggttcagcttgccttggcttttcagatatttcaaagcttcatgatcagaatggattacaaattctttaggaaacaagtaatgttgccaaacttccaaaacacgaactaacgcataagctccttgtcataaactgagtaattcagatgtggaccatttagcttttcagaaaagtaggcaacaggtttaccttctt

SEQ ID NO: 110568 - DNA, 329 bp, Zea Mays
aaggactcgatcattaccttcaatatttctgagacctccgcaacagaagacgaaggacttccagttagtttcggcacatcttgtgtcttcgtcttctcagaggattttttggcaagcttccgttttttaggagccgataccttcggctccggcactgtttttatcttcttcatagtaccttggtcttccttgacagaccagatagcttgcctactcagaatactaacaaccctttttcttttgactcctctggccccttcatcaagcctttcatagtcaggattctcaaagttaagagcacccattacatggttcaaccttcatttcgg

SEQ ID NO: 110569 - DNA, 588 bp, Zea Mays
cggcagtaacaagatgtatcatgatctcagatccttgtactggtggaccagaatgaagagggaaattgctaagtatgtatctgaatacgacacttgccagagagtcaaagctagtcatttgaaggtagctagtaccttacagcctcttcccgtaccagcatggaaatgggaggatatttgcatggattttattgtgggtttacccaacacatcccgacaccatgattctatttgggtcattgtggataggttgaccaagatagctcatttcttgccagtacataccacccatagggcagagaagtatgctgagatctatgttgaccagatagttcgtttgcatggaataccaaggactattatgttagacagaggagcacagttcgtagcacgtttctgggagcagctacaagagtcactgggaactcaggtgataaggagctcagcataccatcctcagacagatggtcagacagaaagggtaaatcagatttttgcggacatgttaagggcatgtgtgttgcactatgggaagaattgggataagtgcctttccttggcagaattctcttataacaacagctacca

SEQ ID NO: 110570 - DNA, 564 bp, Zea Mays
cagttaataagaatatgtgtttgcaaaggaaatatactaatgaacctgtgaaaaaagaatactgaggcttaccgacttgcatttatccagatttaccaacgaaggcagtgtgttatgtaagcaattctgtaatacattttggtcaaacggctgaggattcttactatgacgttcctgctcttcaaaatttagcagagcctagaaacaacatagagagtatgtaagtatattcagtgaataattacaataactgtgaagaagaacataccccaacattgacatcaagtaataatctgttagaagtcatagttcgacgatgatttttggaatcatcacgaacacactcaatgaagcactgcatgaacacgttctcaagacacttcccctctgcgaaagattcataaatatcgagacagtttccactgtattcaccgtaatctatgacaaccctgtatgaagaatatagttatatattcatattacatgcatgaaacaaactaataaatacggtcttcgtaatttgtgtaacgtgtacctgctttggtcaatgtccttggaacagag

SEQ ID NO: 110571 - DNA, 590 bp, Zea Mays
tgaattaaataagttcctataattattttaacactaaaaatcattttccaaacgaatttctcggttttaataagtgtctggtctgcgctcacaaaaccaggaaaatgcaggggcttccgcgcaagaggcactagactcaggctacagtcacatggatggcgggttggtttctctaaaactcaggggcctttgtgttaatctaggcccgtgaaggggtaagatcgcatctgagccgcacgatctaaagtctatggcctagattagatcgcctaaaactgaaccggtatgcagccgtagccctcggatcttaatccgatggtctcggtttaatgaacccgcgatcagattcctaccgtacattgcgagatctacggttgcgatccgacccggtcaaatcgtctctgatctccaatctcatcccttcgatacccatccaatggccgaccgaggcctaggcacaaaacaggccgacggcgacgagcttttacgatggcgcccaccccctccggcaacccatggtgaggcccaccggtatcccaacctcgcaatggaacaatcctactccgagaggagacaaaagcggagatgag

SEQ ID NO: 110572 - DNA, 324 bp, Zea Mays
ggagatctcatcctggtagaaaataaatgtgttgtaagtgataacttgtaactcgtcagtacagttgcgaaaacagtgtgcaatagtattcatcatcgtctactcttgtgcactattttaggagagttattaaaattgtcacaaactgaacgaagtcttgtagggtcctcttgacctatgggcaaacagatcaggtaagtcaatgtcttgaagctttccttcgttcatcggtacattcttgttgcggcaaatttatttcaatggccatcactcgttgaatcctagtacaacgcagatcttgtgatacatctctgagtgccattc

SEQ ID NO: 110573 - DNA, 433 bp, Zea Mays
aatgtggacctttaaccatagaagaaatctcatcagggaaaaaatggaggaaagaatgtggacctttaacccaatgtgcactgaaggctaagtagcatcaatgcaattctttttttgcctttttaatggatcaactcatctgatttatgcagcaaattttactgctcgagattaatagcttgaagttaaaacataataccccacataaactggcatgtctgcattgaaaagagtatggctaattggctattctactatccgatactactcataccaatagctattaattcttcccataaaactatttgataagtaattgtgcagtcatggtgcttgctgcatggataaagacattgcccacggataagtttatcgttgtttttccaatgctagaaactgaatacatttgtagaactactaactccagtaattt

SEQ ID NO: 110574 - DNA, 436 bp, Zea Mays
ttcgattcccattgagcagattcttggttgaagtgctgaagatatttcagatctttttacatcaactcaaccccgaagctataattaggatggtcttgtttgtttgggctgtaagaagccaaggcttggaacgagcgcaaagtgtttttgcagtatgcatgaacttttgtacgagatgaaggccaccggcaaggagcagtatcacaacaacttcggttgtaacagattcattgctcgatctaatgcaagctatccggttccgacataccagaaaagttggcctggggcctggatggaggaatggtttttatgttaaaaataatctgattgaaagggaggatattaaggaaattatccagcgccccatctggtctagcttcgtcctccgaaggccgaaggtggctattaaaagtgatgctgaagcgtgtcagaaggc

SEQ ID NO: 110575 - DNA, 406 bp, Zea Mays
tgaaaaaacacatgtccttatactcaatatttaccagtattgactcacaagagacatttatcaaaagggaagaattaatgtccaaacaatttcacaagagactaaattatgggcatatttgggatttaggaggtgttatgctgaccttgggtaagaatcattagtggttcacttgttcttgagctttatcatttgtactcccttctgtttataatatatgggacccacatgaaaaattcagattatcgatcaaactctacttagctcaattgtgaaatttattgggagatctattaaaaatgatgttgatcatagcttcaatagcactacaatactcatgtcaatcattttaaggagtataacgtttgcctctttgtttatcgatttcttatttggtgcactttgg

SEQ ID NO: 110576 - DNA, 275 bp, Zea Mays
ccatacctcaacctccgtcagcgaaaatggctggaattgatcaaagattatgaccttgagatccactaccaccccgggaaggccaacgtggtagcagacgccctcagccaaaaaccttttgggaagaaaggaaccaatttcttggaagattggaagaaagaatcagctcaactaaatgtatgtctgggagacaatggcagcctagaagtcaagccaatgctagaagacctcatatgcaaggctcaacgcctggacactgagacagcaggtcttat

SEQ ID NO: 110577 - DNA, 321 bp, Zea Mays
ccgatagtggaaaaggtagtgtaaatgccagaaattctgagcccatcagcaggggcagaattaccgaagatactaaaagctgcagccgcaactcccaagaggaggaggatggctagcgtactagacgctgtcatggagaccacgaaggccttgacccctactcctaccaagaaagttgacgaagttatcgaagtccaggccgaagccgaagctggatcttcagtgcctattgagatgaaggctgccgcgcttgaggaagaaactgagcaacaaacttcggataccgacatggtggcggggcaaggtataacagaagaagca

SEQ ID NO: 110578 - DNA, 486 bp, Zea Mays
cttccgagttgcgaaccaatatccagaaaagcaatgtatacccaattagatgcggggaacaagacttgaccttgctgcaaaactcgtcgccttgtgagatctcgcaatttccctgcaaatacttgggtctacctcttgccataaaggaacttaccaaggaccaagtacaaccgattattgataaaattgctaaccaactgacagggtggaaagctgatttgatgactaaggctagattaaaggtacatgtgcagtttgtcctcacatggatggtcatatatctcgcaatggctgtggatttaccaccttgggctatcaaagtattgacaagatccgacgaggctttctttgccgagggcgcaaagaagcgagggaaggacactgtcttgttgcttggggaaaagtttgtcggccgcttgagcttggtgggctggggatttccaatctcaatgatcttgcttgggcacttcgtatgcgttggctctg

SEQ ID NO: 110579 - DNA, 538 bp, Zea Mays
ctcacaccctagcctctctatcataaaatcaccacgcacatctctctctgttgcggagaaggttttgccaaaggtcctcgaataattaaatttgttgttttaagtttatttcagaagacagtttccggagacttcagatgtctgtctcgggtgatgaagcgatgctcagggtaggacgaagccctatcgacaaagaaacatcaccttcagatcgtgagaagacgaaggagcttggagatacacggcacgtcttgtctaaaaatggagatatcctccaggaatagcaggtctcggatggatgatcaagtgagaaaatgcttcaattcttaggtgatattgggagcctctggaagcatagggtatgtgtttgattgttgtaatcctggtctagttgttgcccttcggtctgctaaggaggaggcggtggtgtggtctttggctggagccaaagctcttaccttcctcgaggttgatgatctgctggggtaaagcagttctgtaatgaccgtgtttttggtcggcaggtgatatctactct

SEQ ID NO: 110580 - DNA, 355 bp, Zea Mays
cgcaacgcatgggtaaccgactagtcatgctttaatttgtagtagtacctcgcatcttttgttttggtctaatcgttcacaatattttcgttggtttgccgaacaacaatctcgacaaataccatcgtcccatgcatgtcctatcacaccatgatctccagcacaaactgaaaatgggaaacaagccaagctgcgtcgtcaactaggcgatattggtgtaaccatccaggcaaaccacaaatgacaaaagttggaggccttttgctggctctctcatgtgcacaactgccgctcgccaaatgtcgaaaacgtcaagaatactctgttgtggagtttgggcagcaacttgctcaac

SEQ ID NO: 110581 - DNA, 583 bp, Zea Mays
ctctgtggcgcacgaataactgcgagaggtaaaaagatcggaagggaggaggatttggtcccagatgtgagcttatcgaccgcactcgattgcctggcgatgtgtctgcggccgatgtcgacggggacgccggcgatctcagtcgcaccacaccataggccgttttaccatgtcatcatgagtcgtggagtgtaatcagtgactgtcataagaccttgccccaatacgcgccacagtgaactccctttagtaacaatatcccttcaccgtcgtgatccaaatctcgttcaaattcggagcaaccgtgaccggcttctataaattgagcgcttcccttgctccgccctttgtcacgaacccagcgcaaccccaaccacgtcctgccatccaccgtagctcaagaattccgatttttcccccaattcggtctgccacgccatcgtgagacacctcgccgtggccagccatccacaggttggttcgtgcttctctggttcgtgttctagcatccttagggtctcctattgcttgtaagctcgaccaattgaacgctaccgtgctaggtcaatgggaacaactttgc

SEQ ID NO: 110582 - DNA, 1194 bp, Zea Mays
ctcgaccacgagtgcggactttaacacgtgatagcggtgaataaaatggacactaaattttaatcatctttgtcattcatgattttgatatcgtatttgtctctgtttatctaagttgtccaaagagtttagagaaattttggagtttaaaatctctcaagatgttgagtccatgctattcaaaattatttattaaacgagtaggtttttggaaagggtttgatttttttaataattcgatcacgttgaatatctaggaaaaacaaggtgtaaaattattaatcgctttgttttctagtcggatgaattgtggcggcgaaattcgtctaggctcgactaaattaaatatcgcttaagatatcaaagttgatgtcattgattcggtccatttacacactgtccgaactctaacccttaaaattgaatctggtttcgtaaaatccatcctgaatcccctcgcgcctgcgttgcgcgcgtccctctgcggcctggcattgtgacgtgtggcgggcgctaactggtgtctggacaacgcacaacctctcgcccacgtaaacaatgcgtgacatcgcttctgaaagaatcacactttcgatgccacatcgatctcgcgtatttatttcgcgatatgtcgagtcttgtgtccgtttaaaatttatagattaagagaatacgaattcggaagctcgacacactcggatgatttttatcctgaacaaattaattggaactcgacaaaaatggtttttagtccgaaacaaaccaggccagtgtaattagaactgaaacgagtaattgataattaatttgattagctaattcgtagaataaaatgtgtagcccgtatagtcgataatgccattttggtttgaccaagttaaacctcatttatactctggtactagattcaaatctgagagcacgaatatatatcgattattgtgtaaaaagaaaaggcaaaagaaaaaagtgaaaaaggaaaatatcctacagccgatcctatatgtcgtcgccccctttcttctgattttttcacagtcgcgtatgccttgagtccttatcccgtcgctagctattcggctgccacggatttttttcacgcatgcagattttttgacacttgcatgcgctcgcccacgcccgcgccgtccctgctcctgtcctctcccatggcgcctgtgggggacagatatc

SEQ ID NO: 110583 - DNA, 369 bp, Zea Mays
ctgttgattgcttacgtattctgggatatatggagagtagcacgaagcagtatgcaggacctgcttcagctgattctatcgtgcctcggcttcagcagtttccttttgcttttggatcatgacctagcacgtcctcgttgtgtgtcccttgtcctcgccacagaaaaggcagaacaatttcctgggctgattaccgtaccttcctccactgaagcttctcccccctctgcctctcgaagttggtggtctgtaagaagtttgctgcatgctcgaagactgtgagctatggtgactgctctgagcattgttagccctttcattgttggcattgggattgtggattgttctaacatgcctgggatgaattct

SEQ ID NO: 110584 - DNA, 457 bp, Zea Mays
attttgtaattcatttggcaaaacagcttctcacgaggagacggtggcagagactgtaatttcatgaaacattattgtgtgccggatagaaggagccggtagaagcttgttttctcgtgcttcggttcctaatagaaaaacggctctggctctttgatgactctcggtgaggagtcgtttttttaagaccgtttggtacggctttataaagagtcagaaaaagccaccgagagagccctgacaaagggggcctaaaaattgtgagctgttggcgatgctctgtcataacgtccggaagaagcgaccagcaaccgtatggccttcgatccgatacatggggccagtctcatcccatgtacactgtcgtttgcattgggctggctgggcgtgactgctatcgttgtcgcatacacatatgcgctgcccgtcagcacgtgcatgggtaagaaaagagcac

SEQ ID NO: 110585 - DNA, 361 bp, Zea Mays
gtataaaagacatgatttagagaatgttgttgaagaggaaagaaatatagagaatgtaatcttttaggatgtctccaacaagggaatgcttaggatggtggtacatgttgtgtagttgtgttataattacttctttcattgtaaggaatatggatgttttacatcaacccgaaatgtactccacatgccatggatattcgtttatgtactgctaaggaaatcctcctccatgaggattttttgttcctccagaaggaacttaagttttcaggagtgcacttattcatgtatcaagactaaattctgtttatgttacaagttttcagttgtcctttcttcacatgccagcatgttaaatctg

SEQ ID NO: 110586 - DNA, 587 bp, Zea Mays
aaaacaacaagagtggtattggatataattcttttgtgcaaaagaaagctacaactcaatacaagacaaagcagactcataagcctatcaaatgctttgagtgtggaaaagaaggtcattttattcacaactgcaaagccaaaccaccaactcccttgcctaagcactcaagaccatttgccttcaatgatcattatgttctaagaaaagtagcaaatggaaaagttgcaaaggccttgattgagaaagtcactggtcccatgcaatatagggccctcgaaactcaagcttgttttgtctatggatgtaggtgaactacaagaccagtgggagccattgggttattgacagtggatgcacacaacatatgacatgcaacccacagatgttcacctcacttgatgagaatgttgatggacaagacaaaatcacatttgttgacaattcaaagggaaaagttcaaggacttggcaaggtggcaatttcaaatgatctatcaatttcaaatgttctcttggttgcacctttgagcttcaacttattatcatgggtcaactctattatcttggccttcaatgcttattcac

SEQ ID NO: 110587 - DNA, 846 bp, Zea Mays
gtggtggaaggccacaggacaggatgggagattttttgagactcaagcctcccacgttcgcggggtccagcaatcccctcgatgcagatgactggcttcgcacgatcaagaggaagctggaagccatcggatgccccaaaaattagcgtgtccaactggctgctcattagctttcaggaatgactttagcatggtgggacacctttagtgaggccgtcagagatgctacctgggcagaattcgaaacacccttccgtgagcaccatgtaccccaggggatagttcaactcaaggaggatgaattctaggagctaactcaaggcgggagaacagtcagtgagtatgtgcacaagttcaccgaggtggcccgttacgcgcctgacgatgtcagcaccgagtctaggaagatggcccatttcctgaaaggactaagacccaagcttaagaccatcctcgccagccaagacttcctcaacttttctcacctctccaacaaagctatccaagtggaaagggcaaaagaggaagaaaaagggcacctcaagaggaaattccaagttctccgagctcaacagcaagaacgtcaccagagagctcgaccctttgggcttccacctaggggaccaagcttcaataaaccatctggacccactccatcgcgctacagtcagcagagtcagagctcccttcaggcaccctccgttgcaagtaaccaaccgccagcaaatgcctgttggcactgcggagaccccagtcacttcaagaataactgcccccagttgaaggcacccggacctacctactccaactcggtgaatggccccaagattccctcggcacctacct

SEQ ID NO: 110588 - DNA, 398 bp, Zea Mays
caattatttaaatcatgaaatgacttttcttaatttatccggaataggattttggagcgttacaccctctaataggaggattggtgaagtcgtcttcttgctttaggggtaggggtggtggccggtgggcttgctgatttgcttggggaggcggtgggggtgatagtgacaatctttcttggtaatggagttgtgggtgtagcggagcctctgattgtagttttactgttgtggatggtattggtgttcgcttccatagtgaggattatggtattgatggggatggtaagtatggccgatggctctttgattatttgcgggggctaccctggccatgcgctctttggtttcttttgtctccgggcagtccctggtatggtggtttgagtcctcgccat

SEQ ID NO: 110589 - DNA, 661 bp, Zea Mays
acttgttcttgatcgtgacctcattcagagctcgataatcgatacacatccttttcgtgacctcattcagagctcgataatcgatacctcattcagatctccacaaataggacaagggcagcccaaggcgaggtgcttggccgaatgtaacctttatctgataactcatcaatctgcttcttaagttcaaccaactctggtccagatattctgtaagctctcttaaagatgggggcggttccaggaaaaagctatatggcaaactcaactttccgctctggtggcatacccggtaagtccttgggaaacacatctagaaacttagacacaatcttgatactctcaattgggtctgcttcactgctatcgacagccatctgataacaacttcctttcttcggctcaggtgggactaactcggtcgccacttcctctcctagtggggacaccaacttgattgtcctcttatcacaactgataactgcctgatacttatctagccaattcatccctaggatgacatctattccctgagtacccattactatgagattagcgggaaacgctatcccccttatttccacacttacattcaaacaaatgccatcggctcgaattctaccaccggttgagtcaatttgaatgggggttgacatggtgg

SEQ ID NO: 110590 - DNA, 873 bp, Zea Mays
aaaggatattataatatccgcctgcaatgatattcttggttgcatccaatatccgcctgagaccatatccacgggtagaaattcatatccatgaccacgtccattgggtttcagatggatttctgctgtcgtacattatagagacaatcattttcaacaatttaatagcacaatcaatcagatttcttcccaattcaccatcatacacaattaaaacttaataaaagaatttacaaatagacatgtcttttaacaagcaatattctcaacatgaccaaatggaaggggcgtcggactagaaggggtggggagttgaggaccgctagggaagtggcggaggaggctctacagcaccggactagaagcacgaaggggcgacgatggcatgggctaaagaggcaggggcgactgagcgggcagatggcataagcaagaaggggcagccacgatgctagaaggggtggtgacagtgtggattgaagagccaggagcggtagggttggtggatggcgtaggattaaggcccaagcaagaaggggcagccacgtgcacaaaaaggggtgacctgcaagacacgggttgtggccaagggcattggagcctaaaagggtagacatcggtcagccgccagcggtgcaggtgttgtggcatgtgagacttggaaggggcatagggtgcaatgcaggaagccagcaaggttattagtggtgtccagcagtgggaaattaggaggcattaagcgtgaggttcagggagtttgagttttctctttgttgtgtaatatgggctagatcaaaacaataatctattggcctattttggatatctaataggcaacccacaggtggaaggtaatatcctaatccgtgcccg

SEQ ID NO: 110591 - DNA, 429 bp, Zea Mays
aaaaaatgaagtgtggcttcatgatcagtggaatgccattgttgcaggtcacagccgtcttggggaacaattcctaagtgctcgatcggttattgggccaagaatgcgcgttggattgaagatgtcacgtgtagatcatcatagcggtgtcgcatgaaagccaggtgacacactgttgcataggttttagtgtcggtgaccacacatggtacatctttcatatgtctggctacatgtggttctatctctaaggtagctacacgaatcctagcagttcaagcatacaccttagagcttcttacttgccacattgtgtcccctttgattctcgagacctcccagtcctaatggaagaaacaatattgtatgtggtctgttcgcacgcacatgcataagcacatacttcctcattctcctcttttctatttc

SEQ ID NO: 110592 - DNA, 575 bp, Zea Mays
gcccgggcgagtgtcgctccacttctgcccctacccagaccagtggcaacaatggtggtttccagctgaagaagagtggcagcagtggcacaggtggcgacaacgacatgaagaggtggccgccgaagaaaaacgacagcgatttccaggcttttggctggcaccagggaggcggcccacctcgtccatccggcccttgattctgcttcagtccggggatcagaccttataggcggcgtaggtccacagcatgccggcgaccaatatagctctggaggtggaggggatggcgtgcctttgctacagggctccttgggttggctgctaaggcgcacacggtcttcggtccactccaagtctcccaacaaccccagatgtgggattaggctggcctagacgccgccctgaaccatctgacactacaaaacgacgattgggtgctggattcatgcgtctccagccacatggcatctacggatggtatactcctttcccgtctccatcccactccccatcaccattggcaacggtcacacccttcccgtctccgcccgtggcaactcgaccctttccac

SEQ ID NO: 110593 - DNA, 704 bp, Zea Mays
caagaaactgaagaaaaagctaagtggagcctttgaggtaaaggatcttggaccacttcattacttccttggaattgagattgctagatcgctaaaggaatcattctctctcaaaggaagtaagttcttgatctattgacagagacatgaatgcttgggtgtcgtccatgtggctcacccattgataaaaatcaccaaacttgtgccgagtcaggtgaccctgtgaatcaagaaagatatcagagatagtgggtcggttgatatacctttgtcatatgagaccagacattgcttatgcagtgagtgtggtgagtaggtatatgcatgatcctaggacaagacatatggaggtggtctatcaaattccgagatacctgaagggaaccactggcaaggggttgtggtttagagcgaatcaacacctgaatctggagggttactgtgatgctgattgggcaagcagtagagatgatcggagatccacatctggatactgtgtgtttgtgggaggtaatcttgtttcatggagaagtaagaaacaagttgtggtgtctcggtctactgcagaagccgaacatagagcgatggctttagctctatgtgagatgatgtggttgaaaggtcttctgaaggagcttcgggtgttgaagaatgagactacgttactttattgtgataatgtagcaatgatcaatatagcaaat

SEQ ID NO: 110594 - DNA, 486 bp, Zea Mays
tcaatattccacgagtttcctacttgggttccatccatttgggtaagtcggtaggacctaggccgggtgacttctgcaatgatgaatggtcattcccattgcggtgataatttgtgccatccttctcctgccaatatgtggtggagtactaggtctcctactgtgaaggatcggtgccactttgctttgtcgtggtagcgcctcagagtttgctaatacctgaccgattggatgacgacattcaaacgttcttcttccaatacgttgacatcctccagtctgattgcttcagcttcagctattctttcgaatgtcaacctgggtgctccgaaaatcaaatctgctggcaacacagcttttgatccatacaccatgaagaacatagtgtttccatgcagggcccgacttggttgggttcgcaggctccagactacatacagtagttatttgatccatttgcctgcaaattttcactcttgttgaata

SEQ ID NO: 110595 - DNA, 380 bp, Zea Mays
gtggaagattgggagagcataggtatccagctactatttatgtgggatataaactgaacaggttgaggtaagaaagattatggcaaggaaaaaactttatccaaaatgttttaagtcctgattcatctcgagattcgcttttactgttatacccttccttgtcgatgttgatcttttctcctccggtcttgatctcattgattcgaggttagtgtatattatcagggttggagaatatagttaaaatagatatggatgagatagactacatgatgtaggtcagaagttaggtggggatagatagattatgcaatccatcatgactctattggtggagttagctcttatacctatggttaagttggtctacacctggccag

SEQ ID NO: 110596 - DNA, 456 bp, Zea Mays
gtttatacatgtttgggtcgcgcaaatgcgtaataccctacgttttgtgtggtgctgagtattgaattgtctcgagttcactgattgcaggtggttcagggacggaagatgagttctcctatcaatctaatggtgagcgagagtcaaagagagtgttttttgtaggggtatctttgcagccttatatagccgactagagagttacccctatacaattcgttgggtttatctaaatctactttccattgctatgagtatgtttgcttttccgttgctcggttggcttctctgttttatcatcccagtgatcgggtacctggcctcgtgagaaacgtgtccttagaactgttaattcttctgcaacatacacacacgaatggtatattggtgcagtgttctttgggatctcctcttatcatgtgctctgttgcttcgtttgccttttattttgcccgg

SEQ ID NO: 110597 - DNA, 407 bp, Zea Mays
gccatagtcttttggatcacttggagtgcatatacaatttgctgagatgtatgtgtcgacacttgtagcttttaaataacacaattctccagttgacatgaagtcatgctcttatacacccttatgatttctcatgaaatcccaaaacgagaatcaagggctttcgataacctagcctcatcagtgcgcactgagctaggttatgaatgtcttccattcacaggataatcaatatcctttaggtgtccaccaacaccatgttggttaccaacgaatatatggtctgcatttactatctcagaaggtcttgccttcattagcttgcaagcatcttaatcctaggatttgtgaccatacttctccccctcttatttacaacatcattataatagggagttaagtggtgt

SEQ ID NO: 110598 - DNA, 674 bp, Zea Mays
acgtactattaacctcgacactaataaactaaatggtttgaaggctcacgattaccatattttgatggaaagactcatgccggtaatgttccgtggctatttgaagcctcctctgtggaagatgattgctgaacttagttacatatatagacatatatgtgctaagcagatctcaaagaaattgatgattcaatttgagaaacaaatcacgatgcttgtatgcaagatggaaaaagtatttccgcctgaatttatgaatgtgatgcatcatttgctagtgcacttaccttatgaagcattggtaggaggaccagtgcagtttccatggatgtatagttaagaaagagaattgaaaaaacttagagctactgtgcgaaacaaagcaagggttgaggggtgtattgcagaggcctttgcagctaaatagatcacaatcttctcaagtcagtatttatcacacactaacaacgtgaatgctcagtcaacacggtatcatactgaagaagaaggtccttcgaccgaccttagtgtttttctctggaaggggaaaggggtcggggcttctactgcacattatgttgacataagagagcgtaatttcaccatgctctacttgtacaccaacatggaggaacttgatccatactttgaaatgtttgattccatatatttag

SEQ ID NO: 110599 - DNA, 520 bp, Zea Mays
gcttaaagttttggaaagtaggtttagagacaccaaagaaggctagaaaacaaagttttgttgtcttctgtatatgcttgtatgcccgagtgtctagacttgttaagtttcatttatttctgttcaatcgaagtgcttttacgttgtattgaatcgttgtacggattcacatacgaaccgttgtatctgttcaatccaaggtagtgtttggtttaccatgggtaatggtatcgcaatggaagttaaaaagcggtggattccaaatcaatgaataccattgcatgttttgcttggttgagttttgtaatacttttttattccaatacactgtttgtattggaaaccaatgtaatgtaatgaaattaagaatgtgagttttgtaacattttttttattccaatacacttttaatataagaaacaattcaacattatttgtgaacataaaaattcagtatttaccatcattcccttcgcgaacattcaacaacattcaaaactcataaaaattcagtttttac

SEQ ID NO: 110600 - DNA, 863 bp, Zea Mays
gcggatacttgttcttgatagttacttcatttaaaggtctatagtcaacacacatccttagggtttgatccttctttttcacaaaaattgcaggacagcctcatggtgaggaactgggtcgaataaaacccttttctagcaaatcttgcaatttagtcttcaactcggccagttcaacccttttcgagaaactagagttgtgtcaggctttagttcaatagagaattccacatcacgttctggtggcaaacctggcaactcttctggaaacacatccggaaattctcgcaccaccgaaacattgatgaactcttcgactaccacactataagcctttcccggaatttcttctagagaagacaactggatctttaactgactttctcctaacactgtatttatctgaatagtccgtttttgtgtcaataatggcttcatgttgagctagtcaattcatacctaggatcacatctatgtcctagccctttagcactatcatattggtggggtaggtatgcccacccaattctactggcacatgaaatgccatttcctttgtgcctaacttacccccatgagcttttacaataactcccatgtttgtttcttgaattggaatatcataatccacagcaaaagttctactaatgaatgtatgagatgcaccagtatcaaaaagtactttggcagggtgatgggcaacaaggaacgtacccataagcacaggatttccttctggagtcacatcaacttgcgtatagaacacttgccctgatttcctattgtccttcccttttgcactgctgctagaagtattcttgttctgattttgagaactgtttcctgctggtctatggaaatta

SEQ ID NO: 110601 - DNA, 370 bp, Zea Mays
gttgattattacaaagctgaggggctcttatggaaaaagtgatagccgaaggggtattggctatttatggccgttggatctaatcctgatgccccagatcagatccgcacctaaatgaatcggtacgcactggtgtccgcccgatccgagatcaacggcggagacatcacatgactgcgactgcctcccgatctaccgatccaagatcaacggcccgtggatgatttggacgaaagggtataacgtttctaatcacagtcgtttactcatagatcaatgacacactttgaagctggccgatccaattcccctatcaaatcccagtcgttaacccaacatcaacggctcgcgttttctttgccccctgctg

SEQ ID NO: 110602 - DNA, 603 bp, Zea Mays
taccatataaggttgtttttgttagagctagtcgtgttgataagcaatatacttgtgtgccaagtgaggaagaatggaaatttgcagaggatgttgtagaaagacttaaatcgttcaatgacataaatgaattgttttctagaaccaagtatgttactgccaatatttacttcacaaaaaattgtgagatcagaacaaaaattagacaatggtccatttgtggcaatgcatttgtagaagcaatgtcagttaatatggtgacaaagtttgataagtattggcctgatattcaaggtctaatgggcattgccactgttcttgatcctcgattcaaaactttaatgctacttatgtgttttgagtggttacttggtacgactggaaaggattgtgaggttaaggttgctgaagtcaaagggctattgagtgatttgatgaatgagtatcatgtggaagaggatgaagattacactgaagaactaccaccttcacttgacaacatggacttcttatcttcgtttagtgctcgaattgcaagtaaaaggccaatggaaatgttgtttaaatctgagctagatcgttatcttgaggatgaactggttc

SEQ ID NO: 110603 - DNA, 412 bp, Zea Mays
cgggagcaccatcagtggcggagagcttggcgtgagtgtcgacaggggtcgatgtagagtgacactcagccatgccagcgcgctggagaagctcaacggcgtactgtcgctaagacaggaagatcccgtcggaggagcgcgtgacggagatgttgaggaagtgatggaggtccccaaggtctgtcatggcgaactccgagtgaagaagagtgatgaagcgctgaagaagatccgtcgaagaggcggtgaggatgatgtcgtcgacgtagaggagcaagtaggcgagactctcaccctctttgtagagggagacgtcggaggaggaggcggtgaacccgagctggcgtatgtacgtggcgaaccgctggtaccatgccctgggagcctgctttaagccataaagagagcgctg

SEQ ID NO: 110604 - DNA, 624 bp, Zea Mays
ttcactactcgagtccctgacgacgcacaggtcgaacacctggccggaacccagcgcactcgctggcagggacccgttcctacgatgtcaagcgtataggatcaatcacagatgctaaccgaacccctttctatacttaatttggttagtccgtcactcaatcaggtctgtttgcgagaaccgcggcgcaaatgctccggtgagctaatcctaggttataagtgtcgttagagttcaatcaagcaactagggaagaatcagtgggtagctagggctaccatgcattgcgtaaacttggatgaagactacctagaacgaccggtctacggaagccatgtccgcggcggcgttcccggacaataccgtcacgttcacaatgctacggcgcgatagagttcattcgattgagccgatgagtatcacagacgcaagagtttgtagaaacacggacgagaaggacacaaacggacctgtgggttggtggccacggcgcggcatctcacggtggcgcggatgaccaatttgggggaattccgattactaggggctacgatgcacaagaacgcctacctaggggtggaatgaaggcttaacagagaggcggagcgagggcagcattcaatt

SEQ ID NO: 110605 - DNA, 721 bp, Zea Mays
gtatgtcgtctttctgttgtgctggcaagtcaggattctgcagatgtttaacagcaccatttggtttgttttcttctgaatctgcaacttcgtcactacctgcaaatgaaaattcctttcccttataatctgcaaaaaattcaggcttctcgctggtcttttgtgatgacaaaccagaagtgcacaagtcattccaaacagaaagtccattgcttagttggaattttccttcttgttctggcatgaattttatattaccgaactctgaccatgcctcttccagaacaactataagctcaggtagctgcaatgggtgcagattttcactttttaccgaagcaacttcggccaagcattcaacttctgacgaggcaaatggattagaatcctgtgcatcatactcctctccttcctggtgatgactttcacgaaaatctatgttaagaatttggtttttctcatggtcactagaaatatttgcctgcactagttcattctgcaaactcaagcctttgtgcagactgttctcctgaagaacatgagaagcttcactttgttgttgttttactgaaggttttggccttggtggtctcccaattttcgcagataacggtgatggcccagtctgtatcttgtttgttcgccactgcatcggtggaagaggaggaagcggtggcacatcttcagaagaaccattttcttctgcatttccattagttgg

SEQ ID NO: 110606 - DNA, 285 bp, Zea Mays
gatttgcatagtactagcttcattgcatttggtgctcactttgctgtctttagtactcttgttactgccttattgcttcttacaacctagtaatgtccacatcctatgcggaggtgtgagaacgagaacccgacatttgcaacaatgatgatatagatgctcgacctcgatgcctcaagtgcctagagtcgatcatggaatcaaatatacccaacctacaagagtgcatcacaaactcggtacatttgcaagcatgaacaaaacttgaaaagaaaaacaaattat

SEQ ID NO: 110607 - DNA, 288 bp, Zea Mays
tgaggtcagataatgtcagcgtttttagaaacaacagctgagtcaatttgagccgcgtcggccgttttggaaataacgaccgagtgatgacatggcacgccaacttttttagaaataatggctgagtgatgacatggcacgccagcgttttagaaataaccgctgggtgatgactgggcactttttggaaacggcatctggcccgggaaaaccccatatgtactgcactatcgcgcgcccccacgctccgtgccctagtttttgcttagctttttgcatctaggcttt

SEQ ID NO: 110608 - DNA, 815 bp, Zea Mays
tgaatatatcaccgctcagcatcatcccaactcaaagcagaacatcttcttcagtgattgctttactagtcaactgggtagtatccttaactgcagattacaagtatgcatgataaacttgatcttttaaaggctgaatgttgcaatacacaaaatcaattactacagcttgagctatcagacccctaccttttatattggcaatcttgatcatcaaagcagtaatctcagtcgactctaagtcggttgatccctctaaacaaagtgaaccattagggagggaattgttgtaattctccaaagtgaaccactcataacgccaccccttattgctatccttcaaacaaatatccatattatcaacttctctgcctcgacaaagttccatactcactcctccaactacctgctaccttttgtcgttcatgccagacttgcaatggtatacgtacttccacatactaaaatggggagcaatcccaagggaagcctcatagagatgaataaaagatggcgatttgaggcacataattgggattcaggtgggtcaaattaatggaatagaaatcaaggaggccctgggaaaaagagcagacatgtaagcctaatctatgcacaaaaaaggatgcaaaggcaacgaactcacaagtatcttcaatgggcactgaaatcccttcccaagtcctttacagactcaatgctttgggggatcatgttcatatcaacaaggcgcaagaggtcacattctatgatagaagaagtgaagaaagcacaaaacggaagcttactgttaggatcaaatggaggaatgtaat

SEQ ID NO: 110609 - DNA, 526 bp, Zea Mays
actaacttggcagcatcactcttcacagttggccagtagaaaccagatcttaaagccttcctgaccagagtccttgatgcagcttgcaacccacactgcccggcatggatttcatctaacaattgtctcccagtggccgagtgaatgcatttcatgaagactcctcctgcacctctcctgtacagtaagccccctatgatgatgtagtgggctgactgccttgcgatgcattctgccacagccttgtcatccgactcttcttcatttttatgtacctgatgataggctctctccagtcgttgggatctgcctctggctgactcaaagcgttgcactcctccacctgatccatgaggatgctcggttgtgatatttcttggacgaagatcccaggcgaagcctaggcccgactagatcctagctttgacaacgcatcagctactgcattgcgatctctttccacgtgatggaacttcaatccctcaaatttgccttccagttttcgcacagctgtgcagtactttcc

SEQ ID NO: 110610 - DNA, 428 bp, Zea Mays
ttcaaatcttgaagaggttcggtaagtattcctcctatttcactcttagaattgatgcactcaaccacaactgtttctccctccatataaaatgcaatactgtcctctgcatgtttgcttactgtagagttgctgactccattgatgagtaaataaaaatagagaaaaacttggccttaaagttccttgaacatttctataagggtgtcatttcatttttggtagaagtacagtggtcattccactcttgatgatcttagacatcttttagctaaggggaaggagggggatttcatggtatgatagggagtataaattttatatattggaagtggaggaagtatcacattgaataaaaagtgcagtttactagggaacgttggatcccctaccaacatgctcaaggtggttgagtcatatgagttgtt

SEQ ID NO: 110611 - DNA, 516 bp, Zea Mays
tttgtcagggaggtcccattggactcaaagacgtgctacccctagattcagaaactcctctacatggtcctaattgcaaagtagaagctccatcactacatcaagtcccaccccatgacagttgtgccctctttttcgattggcaaagtcatctagaactaggatgcaaccgggaggatagccaagtgggtcgagcttatggtctaagggatatcgtatgtcccacaaaccgccataaagtcctaggtgtactcatcgacttcatcgttgagtggactgaatcttaaatgccgccagtgatggtggaccaggaatactagatgatgttcttttctgggttagtgatgaagcggggtgctggggtcaaactagttgtcatctccccaattggggtacgtttgaagtacgcaatctacctccatttcgacatgtccaacaatgcggcttgatattcgaggtgattcttagcttggtagagaaagtcatgaaggagtccaatttccttaactaaaaaat

SEQ ID NO: 110612 - DNA, 320 bp, Zea Mays
aacctgggagccaaaacaacatcaaacttaatgcccatagaaacaagattgccaactttgttaagggcaaggctcccatggtgcaagatatagaaggctatattttatatcctaaaaactatcctgagcataagattagaagaattcatgctaagaattctcatcctgttgctcatcatgcttacatttacagaaatgaggcttctagttctaggcatacaactcatattaagatgcctaagaaaaagattgttgatgcatcaaatgaacatagcatttcatttaagacatttgatgcatcctttgttcttactaacaaa

SEQ ID NO: 110613 - DNA, 804 bp, Zea Mays
gttctgagggccggaagtcatggaaaactatcagtcttacaattaaggaataccggtatgcgtagcatacaccaataggtccttgttccagtataaatccgtaaacagaagaattggaagggccacataatcaacatgacatgaggggaataaggcctccaatgggcccgaccggaaaagtgcaaagagagtccacataaaaaataaccgaacctccagccatcaaaataaaccatttcgggcagcaaagagtcattgactccaacatagttaattgtatcaaacaggaaagagacctcgattccatcagagtacatttcagcaaaagcaaaaagcgccacatgcgcgccagctccaaccgttaaccaacaaaatagttgccaaccagtgaatagaaaataccaaacgacccaaaagggggaggccaaagccttacaaccccgccgaggtattgtcttcatcataattgtcatcattgaagtgagggtcccccacctgttcatcagagaagtcggattcctcatccttgctgtcggtggaagcagccggcctctgaatggcagtaccagtggccttggatctgttcaagtcgtccggatttagcttggaaggggtcattttatagaactcagcacccaatttcttgatgacgtcaagatgcatagagggaggggcattttgagtgcagcatgagcaatttttcttgccaatcccagtgcaatttttgaagcccttggcctttgccctaagcctggcactccttctgactgtcgtgtcgactgagataggctgcctttttctggg

SEQ ID NO: 110614 - DNA, 321 bp, Zea Mays
caagccgccatgccgagctacgccgaatcagccggtggaagatttgttgttatacatctcctgcacgactcacgtggtaagcaccgcattagttgtcgagcgggtggaggaaggacatgcgtacccggtgcaacatccagtctactttatcagtgaagtcctcgggccctcaaagataaggtatcctcaagtccagaagttgttgtatgcgatacttctaaccgcacgcaaactccgacactactttgacgaccacaaagtcatagtagtcacaggatttccaataggggacattctccacaacaaagaagctattggaag

SEQ ID NO: 110615 - DNA, 330 bp, Zea Mays
ggcagacgatacgaaatccatatctcataaactatatttgtccttgcagtactttgtggtaaatataaaatccagtcgacttcttttgttatataaatcttaattgcatattctgtatctgcttttgggaaccatctagagttcattggatttgtttgggattggtgatgattttcgttacatgtaacaccatcactatggggcggatggcttgttggcaacaagtgtaacagtgtggctgaacaacattaagagcagtagtgggaggtttgttcactgattgacacgctgatgcttgataacatcctctatttatacagagaggtgtac

SEQ ID NO: 110616 - DNA, 768 bp, Zea Mays
cgaggttatgcttggattcttttgagcattccctattttgacctgatccatgttcttgactctaattcatcggaataggtgaacaaggggcccttaggttggctccaatgccattgatagaaaacagagacccgccggatatacctaagtccctaaattgccaatctgaagcaaactctatgcagaaacaagtcctaacctaatctgagaggttaatgggggaagggaaacacacataccttctagacctaggcttatgggcgcactggtgagcgttgttgtgtcctataccggtgctccacctccatctcgttgactcccacctctggtgttgtcatgtccatggttagtgacaatgacatggggctcttcattccccaacgtcaatggatacaatggctccattgccgccataggctgcaacgattctggtcactagaaaaactagaagatctgatcttgtgaatgtggcgcctagggcttgcgggggcacagatgctttggcgtccgtgtcggtctattactgtttatacaatgtctctcgcgactgagggccacaaccatgaattaatttgtggccccgctcaaagcacgatctaactgtgccgagggagtctggatagactccagctcggtcaagtcagataacatcttcaaaagttcgttttttatttttaatgtatgtatgtttcacgtgtttatctcacatagtttttttagggaggaggttatgtctaaatcgactgtaagtttatagccagtttctgc

SEQ ID NO: 110617 - DNA, 284 bp, Zea Mays
accacaataatatgattgaacagagtcgtcacgaagagaatgtgcgaattccaaacacgtgtgatgcgagaatcgcaaactatcagatcacactaacaaatctgacgcaaaatgttacgactcgaactactgatcagttgttgtatgtcgcctagctatatgccgacgtgcatgagcttcggttgtcgactagcagccatttcaggattagctacatatagaaaccagtagatgtgatcatctcccattctagtcatcgttgccatgaaaacaacacaacatag

SEQ ID NO: 110618 - DNA, 486 bp, Zea Mays
tcagcggggaagtggattgaaccggcttcaccgtacccacttgcaccggcgacgtgtctgcgcgaccgccgtcgtcgtgctgccgtttacctcggtcacgactcgccttaagctattctaccacgttgtcgcggtttggggaggataaccaagtgacgcccgtaacattttgcccagtgaatgccacgttatgcgaactccggtgactcaccttgcttcggccgccagcgtgtcttccccaaattgggcacaaccgctgttgatcactataaattgatgccacgccttgctccgttagctcgttacgaagctagagcaccatgtctcgccttcgattagccactacaaaccccgaatttggaatttcccccaaatcggcttagaacactgctgcgtgatcccatgccgtggaccaccgtctccaggtttgctctcaccctcctcaccgtcgtttcagcacccatgcacgctaggaatgcttgtcgg

SEQ ID NO: 110619 - DNA, 785 bp, Zea Mays
ctttaggggacaggggcacggtgcaggggcggttgcgaccatgagtggcgaggcatgcacggcggtatgagtggcgcaaaagaacgtggtggagtggcgacagtgtgaggcaacgacggtgacgatgcgggtggtgggtgcggtgacggcctacagcggtgggcgaggctacaaaggttggcgcgggctcgaatggctggactccgtctttgcccgttcggtcataacaactaactttcgagaattagcgacggccataggaagttagaaagtaatttctgaggggttgacattgaaccgtcggaagttactccgagatctgggagaaccgttaatgatataaccgctgagagctcgaataacctgtcggaagttactctgagatttgggaaaaccgtcggaagttaatgacataaccgctgagagctcgaataacctgtcggaagttaataactttcgaccgggtatcccgggctgtcggaaattccctgttttttagtgtaggatttgttcctgttgtgttggtggtgccctgcgttgtcgcagccgagttacatgatgattgaggtctggttcaatcttcttcccaacacagccgcgccacggttgcggacacctcctcaaagtcaaacccctgcttgatgtatccctttgccacccgacccacaagaagctgcaagcgattagtgagaagaaggatgaacactcgaccataagagaggagagagtgcgatttgtgctgcaacgagagacgcgtgcgcacgacgcagtcgtggacatgctct

SEQ ID NO: 110620 - DNA, 644 bp, Zea Mays
tgggagtggatgaatagggcgagatgtctcgtggggtagttgagggtctggattcaggcactctactctcgtagaggttggaaccggcgctgcggtccaccgagtagggaaaattgccatgggatccgaaacagaccattgccacacccccttttccattttggtgtgatttccacctgctgtatgaacgagtcagacggcgcagctgggatgagccgaccatttgatggttcagtgttgccactcgtggattctgattttgtttctggctcccagaatccgcgttggttttgctgagttgtcgctcttggcttttgccagtgcaagcagtttggcttctgcattttgctgccaggatgaatatgaatgttttgcttcctagcattgacgcctagcagccggctatacaattgacattgttacagaaggggaattccatgatgccacatgactaaaaatgactcttcataactcttttatttctttccgttctaaacaactttccgattattggactagaaccatctcatattatcatgtttgcctgctgactgtttgttgttgtcttatttcctttctgctttgttgcctctcccgtaattagctggagcttgtctagtctatgccacaatagggggagtata

SEQ ID NO: 110621 - DNA, 395 bp, Zea Mays
ctcacagctgctccctgatacgtccatgggattccagcaatcgcagacatcctatatgcacggcggtgcttttgcttgctattgccccttcgttctccctctcgatcacaacgaccgcacacggctatcggcatgggtggggggttcacggctcgaccatttatgagcaccggtcacgggaccgagctaagagggtccattgcgagatcctcgaggttgttgcatgctcataccgcatgaggagtcctaccgatgcacccgccgtcatccattcaagaccatcccaggagaacgacgactgtcaggtcgggtccaccgtgcagtggcacagggcgtagcccataatgtgagcgggtgggcatcccttgtaggtgagggcccatttagtgggttgg

SEQ ID NO: 110622 - DNA, 389 bp, Zea Mays
gcactttggctggttctcctttggcttcagcaggagaggggcaggctggctccacagcagaagaaggcccttcagcaagcttcggcactttggccgtttcaatatacctgggccggtgcgtcaaaactttaaccttttttcccttcgtcatggtagaaatagccaaagcagcagcctttcttttctttccctgctttcgcgagggataacaatagtctgggtacacaaaaccaatgacatcaaagaccctgttcaatctcttcttgcctcgccctccaaaggccatgtcagggcatcatcttcggccctcgtgtaggcaccaagcaactcgtcgctagttgcctcaatgcaatctagccagtcatcattcggctcatcgaattgatttc

SEQ ID NO: 110623 - DNA, 358 bp, Zea Mays
gctttgcttggcctctacatcagacagagccttgagagcattcattcatgtggccaagtgttggtttgtaatctcccttgctagtgaattcctggagacaatttggggatttgttgtgatgagaaggttttattgggcttttgggcccggggagtcacgtgttgtgatctcatcactcctcaagtgccatcttggcgttctgcacttgaatggtgatggttcgtgagatgtgattaggagtggtaatggattatgtcttttcacaatttgtttgaaccctttaattaattttagttcaaaagtgaataaaaataaaacatgattctgatccgatctgatccttaattttatagtgtaa

SEQ ID NO: 110624 - DNA, 667 bp, Zea Mays
gatttgctggctgaggactcttctgatgctgctcctgctggggcattggtagtggcgcccctcccagaggctgatacaactttggatactcagaagcctgccagtactcgcccgaggcgcccttgccaagccaatcagcctgatccttctgctgatgagcagaaaaagaaaaggagacgcctccggcgagtatccagtttggatcgggacgctggtacttcggttcctgctgctgaagaaatgcccgtaactgaatttattgacactgaccccaatgggtgtacccaatctgctgctgatcccaatgtgggtgctccttctgttgctgatcccaatgggtgtgccccttctgttgctgatcccaatgtgggtgctccatctgttgttgatcccaatgggggtgctgcctgtgttgctaatgtggacgacgaggaggaagaagatgaagttcctttgactcggaaaaacagtcggcagttcatcgctagcggtgaaagtagtggagttccttctcctgctttgtctgctctcattagtctgcaagaactgtccctggccaactttgatcagactcttgaggatatggttccagaggatttgttatcggagccagtagatgatggtgtgatggaggtttgtgctgatgtgcttgatgctgggttgaggt

SEQ ID NO: 110625 - DNA, 576 bp, Zea Mays
tctataaattaaacaagttctagcatttatttttacactaaaaatcaatttctaaatgatttttacagcttttaatcactgcctggattgcacgtcaaaaacagagaaacccagggggtctggtataaaaaattcccaagacacagggcacgacttcgatgtaccgcgggttgataacttagaagggcgggtgctttttttaataaaaaatccagactgaagcggtatggaacgagatcggccattggatcaaatatgtgcacctcagattagaccttagtctgcctaattctcacacgcccgatccgaaacgtgcggctcagatttaaaatggtggtagttcatatgatctgtccgattataatccaagggtgaagactcaaacagttcacacgatctaatcccgtccgtccagctatcatctaacggcagaacgaccatcttcctaaacatcatcggactgaggcggcgccgccccgtgccgcagcggcggaacacgccggcgaaagagcataaccatgtctggtgacccaaaatcccctaccgattactccaaattggactagataaaatagc

SEQ ID NO: 110626 - DNA, 326 bp, Zea Mays
gtatcaagccagtcttagctgtgacaagagaaccgtgaagttagtgtccccatcaggagaagaagtgttagtggagttggtcttgtcaggaccaaggaaagggagttgtcaccaagtcactgcccatattgaagagattaaaccatcagaggttatcaatgtagtatcagaattcccagatgtgtttcccaaggagttaccaggtatgccaccttaaaggaaggttgaatttgccatagagcttataccaggcaccgcccctatttccaagagagcctatcgagtgtccggaccagagttggtggaactcaagaagtagattgatg

SEQ ID NO: 110627 - DNA, 1466 bp, Zea Mays
cggggccgcacatggcgtagtcggcacaggaagatgtataggtagtgggggccgcgcgtgacgtagtcgaaggcgacgtggccgtgggttgcattaaagagggtagcgggagaggaacattgacgcaatcgacatcgaggagggaatcgaggtcggggggtggggaggagttagcaagggggtaaacctcctcatgaaaggcaacatgacgagaaatgatgatgcagcgggtgaggaggtcaagacatcggtaccccttatgatgagagaagtaactcaggaaaagacaacgagtggagtcgggggagagcttatgaggagcagtggcagaggtgttgggatagcaggcacaaccaaagacccaaatgtgggtataggaggggttgtgccatagagagcgaaatgggggttggggtggggtgactcacctccttggtgggaaggcgattgaggagatgagtggcagtgtttagggtctgcccaatagctggcaggaaaggcgtctgaaagtggaggcagcgggtcatgttagtggtggtgcgaataatctgtttagcccgactgttctaagggtaaatgtaggggcacgagaggcgcatctgaactccgtgggagagtaaggagcgagaggcagagttgtcaaacttgcggccgttgtcgcactggagggcacacagtggacgacagatctgggtggagacccaggtgaagaaatgagtgagggtgtgaaaggtgtcggacttgagccgcagagaagtctagagaatgaaagaaatcatctaggatgaccagatagtacaggtaaccggagaggctgggaacaagggaggtctaaaggtcacagagaatgaggtcgaaggggtgagtagctcgggacatggaggaagagaagggtaagcgagtatgatgcccaagttgacatgcatggcaaagtgaggtggcgtcgctgcgagggtacagaatggctgaagtggacgatagacgagagaggatgtcgtgcccggggtgaccaatacgacgatggaaagtggaggcaggggcagtggaggcgagggcgtagggttggacaacatgggcggaggaatgtggtgcgagaagagggccaaggggggactcctatagagccaccaggaggggggtggaggcctgggacgacaatcatgtgaggtggaggcgttagggaggcaatcacgaccttgggaaacacaagaggccccaaagcatgacgacccatctgagggtggagttcgacgcagtcacggagaacaaggttcatgacccgatcaaaggccgcgaaggtgccctagaggtgctggccgtcatgaagggagacatgcacactgtagggatgcacgggaaccgcaacggaggtagggatcagcgtgacgggcattgccagtgctgcgggaggagctgcaggcgtcgctggcgtagcgaggaaggaggtcaccggcgtggaatggagg

SEQ ID NO: 110628 - DNA, 675 bp, Zea Mays
ccggcaacaccctcgggggctgggttgcagcttgcgctacccacccgagccagatcattaccggcaacaccctcgggggctgggtaaccgcttgcgccatccttgaggaccgggttctctgcaatagccacctctaaggctgaaggattctcagtcacctctataggaattgaacaaccttgaccagcctcttggctctgaagactgcactccaaggtcgacgaggcacgagacgttgctcgggataactctaatcccacatccggaatgtcagagcaaacgcccatcataccaccatccgttggctcggacagcagatcttcaggaacaacatcctcgagagcctgatcaaaatttgctatggataattcttgcaggccaacgagagcagacaaagctggagaagggatatcattactctccccactgactctgtaacgccgactattcttccgaattaatgggatttcctcatcttcttcttcgtcctcgtcaacaatacgaacaatacccccattggggtcagctccgacagggtcacacccattgggatcagcatcgtcaaggtcacacccattgggattagctctggcagggtcacacccattgagatcagcattagcagggtcacacccattggggttagctccagtaaaaagttccattggtacttct

SEQ ID NO: 110629 - DNA, 482 bp, Zea Mays
gtgggggtgaagattccgaagatcgaccgtggaggccaagccatacaattttcggaaagtcgacaattaaacaaagtcatcttgacaatatgaggggatggtactttcgagatatgtctattgtgagagtcggtggagacaacaacgtccctgcccctgaggaagacgaagttgtgatttaccgaagtttcttcaaggctgggcttcggtttccattgagtaggtttgtagttgaagtgttaaaaaccttccaaattttccttcatcaactgacccacgaagctatattgaggatgggagtcttcgtctgggcggcaaggagccaaggtatagacccaagcgcaaaatgcttctgcagtatgcatgaacttatgtatgaaacgaaggccacgggaaagaacagtatcacaacaacttcggttgttatggatttattgcccgtcccaactcaagctacccagtgccagcatttcggaaaagat

SEQ ID NO: 110630 - DNA, 552 bp, Zea Mays
ttagtgttttacatattgttgctcaattattcaatcaccttagttgattctcataaattgtttacttgttatcactagagaatttattcctcttgttatattgattaaatttacctagtgtttttgattttagtcaaaaccgtctattcaccccccctctagccggtgtcctagatcctatagaaggtcttcaggtcgggtttctactggccaacagcaaagagtgatgcaaccgagttagtccagaggtgcgaagcctaccagtacttgtcaaaacagcagcatctaccagcgcagcaattgcaaaccatacctgtaacctggtcgttcgcatgctggggactggatatgattggacccttcaagaaggcttaaggaggatacactcatgtactggttgctattgacaaattcactaaatggatagagttcaaacccgttgcttatctaacctcagctaaggcggtggaattcatacaagacataatattcaggttcggaataccgaatagcatcataaccgacctggaatccaatttcacaagcttagag

SEQ ID NO: 110631 - DNA, 719 bp, Zea Mays
cagatttttggttgaagtactaaagatatttcagatctttcttcatcaacttactcccgaagctataattagaatgggcttatttgtttaggctgtaagaagccaggggttggaaccgagcgcgaagtgattttgcagtatgcatgaacttttgtacgagacgaaggccaccgacaaggagcagtatcacaacaacttcggttgttacggattcattgctcgctctaatgcaagctacccggttccaacataccggaaaagatggcccggggcctggatggaggaatggttttatgttaagaaaatctagttgagagggaggatattaaggaaattatccagcgccccatctggtctcgcttcggccttcgaaggccgaaggtggctattgaaagtgatgccgaagcatgtcagaaggcttttagcaatgtctgtgctttcattggcacaagagatataattcaagagcacatagcctatagagtatggccacttgtggacaactgggagatgccgaaggagactactgctgaatctagagaaggtggactagttcgattgaaatataccttcaggttcatggaccggtttgatgaatcgaatgacgactagttgaaatgcattgaagctactagcgatgagttgctcagggcatacaccagggccgaagatgatgctttgtcctcagccttcgggggtcggggcaagaagagattgaa

SEQ ID NO: 110632 - DNA, 745 bp, Zea Mays
attataaaaacatgtggtatgtctaattgatgtgtgttactatatagtaaatatgtatacgaagttaatgcaattcgaacggatcaaatcggagttaaaacatatgaaatatgattttctaaagtttagggaattagttttgcacataaaaacattttctatatttattttatgaaggaatttctggattgtggctcatattttgagaaacctcagggtctgttctgcaaaatctaggacccaaatgcgctgatatttctatacccggggatggcgggttgattcatagattttccaggggctcgcttgcaattgcgccgggccataggggtatcgtgcgttttgagccattggatttaaaggccacggtcaagattggatcaaatctaaatgaacttgtatgcatccaaagtcgctggattcgagatccacgaccaaaattccccacgctaagatcccatcctaggccgtccgatgagcgacccatgccacagattcaagtagcgaaggggcacgctaacgatttaatcactaccgtccaatgctgatctgacggtcttcacatcaccccgtgttgatttgcactctctcccaaccgctccagatctgaaggccatagatccttattccccgatacgactggcacaaggcagaggcgctggtcgccctgctggtgggttcgccggacacggcgcaaacatcgagggtcccgaccatatcccccaatccaatagccctacacaac

SEQ ID NO: 110633 - DNA, 510 bp, Zea Mays
tactcatttatgttgttttagctcacgttttacgctggaatcggcccgagccaggaccccgctcatgatcggctgcacgcgattttcacgccgtaattttaggccccatttgctgttacaaaacagatataggatttacgctaaatttcgtactcatttacgctgttttagcctacggtttacgctggaatccgcccgagccagaaccagaaccacatactgcatgatttatgctgtcaagtacatgtcattatgcagtcgtaaacgctgttggagattttaaatgttgcatggtttacgctatcatgtctcacagcgttatgcaatcgtaaaccgacatgcacatgcaaatattcgttcccgtgaatcgtggcagaaacttttccatttatgcatgagttatgcacatttccacatacctttatgcgtgcgtatatcggttgcagcgtctcagccgggatacgttgctatcctatgcatggctgacgcaagctggcatccagtgggccg

SEQ ID NO: 110634 - DNA, 515 bp, Zea Mays
tccttctctacatttagcgcacttcggatcggaaatttgggcgtcgggtcgtctgatggttgtgctccggcgggagctccaccgtgtggcggggcgacgtcgttactgcccgggatcgagtggggagaaaggctctggatcattgatcctttgatcaagggctgggaatagatcactgttgtacccctttttgtagattagatccgatccttcaattcgtagatgcacggttacgacttaatattggcataccagtttgaccgtctgtagtgagcccttggatccagatcaaatggctatcacaacataccagttcgtgtcttattcgtggtcgtcaatccgtgatctgatggcctggggtgcacccacgttatgagctgagaaagttttacaaaagagaccatgaaaaatattcatataaacccaccatccatatgagaagtagtaagcttacgcagggacccctagaatttgcaaaatggcccctgagggcattattttaatgcaaagtgaac

SEQ ID NO: 110635 - DNA, 855 bp, Zea Mays
attgggcagtgacatttctttatccatgacgaggcgtacgcatctgggttggcatacctccatcaccttgaagggcacctcccagctgggggagagtttcgagagcccttctcagatcaagaagctctggatgcccactgtgtcgtttgttgctgtgcaacgttcgcaacaaccccagacacagggcagtgagagtcccgtggcatggatgacaccacaccctcccccatcggaaggtcgtcgaaggaggaattgaggtgcttggctatcggaaccatgatgccaaacaaaagatcaggtcaaaacctaagcaaagccccctcctggcgtgccaaatgtcggaggtaaactctagccaggtagccgaatgcatctgcctaatcctaagaacaaggtgcagcctagggttagcctaaggagatgcaagaaaacacaagggtttagaatggttcaggcccctcgagcataatacccaacgtctattgtgagttgtattgctaagagcttgagtgaggatgaagttgagtctaagagaggatgcctcttgtatcgcatgtgccctcccttttaagggtggcacatacaaggctactgagccctgacaggtgggccctagcgatataatattaaatatatacaacatggagttgtaaatgttgcgacaggcagagatctcctcggccatggtgtggatcttctagccgggcgtgtccccaccctgtttgctggtctgagccagacgcaaactggaacttgacactcacgtatgtagcggtaggccctgctgacgtgcggtcgatttaatgtgatggatgcatgtgctctaattgagccaacgactgcttatgatggcgc

SEQ ID NO: 110636 - DNA, 509 bp, Zea Mays
tctcctccttgttttaacttcataaattcttcttgtttcatatgcagcacaccttcgggtatgtagtgctcacggaaggctgctttaaattcttcccaggtgatttgatggttgacaggttgaataaccacaaaatttccccaccaggtactggcaggaccacgtagttgttgtgctgcgaataatggcttctgcgtttctgaacagcggagaagaccaaacttttgttcaataacccgtatccactcgtcggcttctagtggatcttcagctttcacaaatagtgatagacgggtttccgagaaatccaggtaagtggtttcacgggggccttgcggataaccccttcctgcctgctgctggaattgctgttgacccgccatttccctaaggaagcgggtgttgtctgcggtggcatttaccaaggcggcaatcgcctcggccaacgtgggaggaaccagaggtggatttggggtaacatccctttccccagaagttcctgctgcgtc

SEQ ID NO: 110637 - DNA, 327 bp, Zea Mays
acagacatagttcatggtaacacaagttattcaagtggacacaaggactttcgacctaattcaatataaaatctttgtgtcttctttacacaccatctgcatcgaacccacaaaacacatggattactagccagtggtttcagaacaccgacaatctctttcaacgatacaacctgatacaaccatttcagcctctgggttccctcatgccctaagccatctagcagttagccctcatgccccttagggctcaaggaaccttacgatttccatccacaagccccctccccttcgcatgccagtccctaggagacatcgcctcttaag

SEQ ID NO: 110638 - DNA, 452 bp, Zea Mays
tggaagttattgtcgatacagctctggcttcaatccacttggtgaagtattcaatggcaacaaaggtgaatttttggttgccttgcactgtggggagtggcccgacgatgtctagtccccaatgttgtagtggccaggtatgtgcaataagctttgtaagctgcgaaggggcgcccgttcgaggcaagaatttctggcatgcttcgcacgaacgagtcacccggttggccgtgcacacaatcgtcggccaatagaaaccttgatgtatgactttagcagccagggcccttggtcccgaatgtgatccgcatatacccctatggacttcgtggagaagttctatgccttcggttttcagttgtgcatttcaacatgggttggattatccccttcttatagagatgtccgtggactataacgaattctctacttctgtgttttaatattttggc

SEQ ID NO: 110639 - DNA, 342 bp, Zea Mays
cgctttctgcgggaaatggcgggacaacaaatgcaacagcaaggcgggcgagcatatccgcaatgaccccacaaaacttcatatttggacttctcggagacacgtcccccattatttgtcaaggctgaagatcctcttgaagcggatgagtggatccgggttattgaacaaaagtttgggcttctccgatgcacggagactcaaaagcccttatttgcggcgcaacagttgcgaatccctgccaacacttggtggggaaattatgtggctatccagcctgctggtcatcaaattatctgggatgaattcaaactggctttccgggagcactgtattcctgaa

SEQ ID NO: 110640 - DNA, 447 bp, Zea Mays
gttatgatgttgtttggtatcccgaatctgaatattatgtcttgtatgaattccacggccttagcagaggttaaagaagcaatgggcttgaactctatccatttagtgaatttgtcgattgctaccaatagatgagtgtatcctccttgagctttcttgaaaggtccaatcatatccagtccccagcatgcgaaaggccaagttactggtatggtctgtagttgctgtgctggcagatgttgttgttttgataggtattggcaagcttcgcacctctgaactaactcggctgcatcattcttcgctgttggccaatagaatcctgacctgaagaccttcccgactagtgttctggatgctgcatgtattccacattgcccagcatgaacctcctccagaagttgcttcccagtagatgagagaatgcacttcatgaggacacctgat

SEQ ID NO: 110641 - DNA, 460 bp, Zea Mays
gcatcttcgcacttctgactccaaacaaacttggcttctttcttcagcagctcagttataggcttcgcaattcgagagaaatccggaataaatcttcagtaataaccagttaatcctagaaaactccgaatctgacggacagtcgttggtggcttctagttcatcacctcttgcaccttatcaggattaacagctattcctgcctgagagatagtgtgacccaagaatttgatttcctttagccaaaaatcacactttgacaacttggcataaaggtggtgctctcgcagacgttgaagtactacatgcaaatgcccgacatgttcttcttcgttcttagagtacaccaagatatcatcgatgaacaccactacaaatttgtccaattcaggcatgaaaatagaattcatcagatacatgaaatatgttggtgcattagtcagcccgaaagacatcacca

SEQ ID NO: 110642 - DNA, 337 bp, Zea Mays
gagggcgacgtcagcattttagaggtaatgccgagcgactggagggcgacgtcagcgttttagaggtaacgccgagtgactggagggcgacgtcagcgttttagaggtaacgccgagtgacttaacattatgtcggagttttagagccaactgccgagcgacttaacattatgtcggagttttagagctaactgccgagcgacttgagggcgacgtcagcattttagaggtaatgtcgagcgactggagggcgacgtcagcgttttagaggtaacgccgagtgacagcaggttgcgtgggccactttgaggatgatagccgagtgatgaggtggcgc

SEQ ID NO: 110643 - DNA, 319 bp, Zea Mays
gcggtcggcaccgctcttccttgtgtcagctccaatttgccacctcacctagtaacctataaaaaggtgtccctgcatgtggccttattatggtgctcaacagtgtatctgtgggtcgttgttccgaacgttgtcaatcttttggattttgtttctgaacctcgctgagcagggtctcatgacctgtcccccggtcaggataaggcctaagcctttaggggctagtcctaggttctggaacaaccatcctaggatggtggagtgtgcggtcttagggtgctggaccaggctaagcggttacacggatccggattacctc

SEQ ID NO: 110644 - DNA, 315 bp, Zea Mays
aaagtccgataaccggtattgcaccaaattcccaagtcgcggaccgcccaggctacatatcccaagtcgcggaccgtttgggctacatagcggaccgtccgcggtgggctcggactatccgggcaaggagtccagattgtccgacggtatcaaagacatctctctaattaattcggctgataacataaccgatgcaactgattggagaacgcatataattaattacctacggaatcttggtggtaggggagacatgaatgttcggcgtacaactttcaagtataccctaattgataatgaacattaccgccgaat

SEQ ID NO: 110645 - DNA, 583 bp, Zea Mays
attttccatggaggaagttcggaaggcggttttccaaatggagcataataaggctccgggaccggatggtttcccagtagaattctttcaagatttctaggaagttattaaaagtgatttaatggctctgtttgaggacttccataataattctttgccggtgtatagactaaactttggggttattacgttaattcctaagaaagatattgctttgaaaatccaataatatagacctatctatttgctaaatgtgagttttaaaattatcactaaagtactcacaaacagaataggtatggtggcagatcgaattattaaactctctcagactgtgtttatgcctggtcgaaacattcttgaaggggtgattgttttgcatgagtctatacatgagatacacaggaaaaatttagatggaattattctcaagttagatttcgagaaagcatatgataaggtgaagtggaagttccttcagcaagctatgtgcatgaagggtttctcgccgaaatggtgtacatggatccaaagtattgtctccaaaggtcatgtgggggttagagttaatgacggcataggc

SEQ ID NO: 110646 - DNA, 1224 bp, Zea Mays
atctgattcaagagcatatatccttcagggtatgaccacttatggaaagctgggatatgccaaaggagaccaccaccgattctagtgatggtggtctggtctgactgaagtataccttcagatttagggagaagtttgacgagcccaacgacgactggttgaagtgcattgaagctactagtgatgaactacttggagcatactccaaagccgaagataatgctttgttcgcagccttcggaggtcaggggaagaaaaggctaaacatggtatttgatgctattggcttcgtataccctgattaccgctacccactgcgaggacaagagaaaaagaggaagattgctgcttcggtcaccccagctgagcctgtgccgaagagcaaaaaggtgaaggttctgacccaccgcccgcgttacattgattcggccgtggtgcctaactttggcgtagggtcctcttcaatagccgaagcaatacaaactgctccaattgcacagagcgctgaagaaccacctgtaatgccgaagacacatacagttgagccagtcaaagataaggttgataaggttgaagagccgaaggttgaagagataataaaaatgctaaagattatgagccctccgacagaggcaaatctgccgaagatgcaaaaggcttctgccacaactcccaagaggaggaggatggccaacgtactggatgctgtgctggagactacaaaggtgttgagccctgcccctgcaaagaaaattgctcaagctgaagccaaatcacaggctgatgccgcaactaggcaagcagaagccgaagctacgcaagctcaagctgaagccgaagctgggccttcagtgctcaccgagacggagcctgccgcgcctgaagaaaaagcggcagagcaaatttctcccaaaaagatcgagactcctgctcccaaagctttgatcgaaaaagttgactacatcattcgacacgcttcagggaaaaagttgtccgaagaagaagttctcgaagccaggcactatgcgcgaaagttgaaatatccgaagggagccttggtttttaacgggagtaatgaagatgatttcttatactgtctctcggacaacaaagaaatatccatttaccgggagataggtagaagcatgggattcccgaagctggaagacgacctttcaattttgtcgaaggatgatcttgctgacagcctagcgtacaacagta

SEQ ID NO: 110647 - DNA, 412 bp, Zea Mays
ggaaatgaggatgtcaaagatcggccatggaggccgagccatgttgtttttgggaaatcaactgtcaaacaagggcaaattgaaacgatgaaagacaaatattttcatgatgtttccatagcgagggctaggggagaaagcaccattccccttcccgaagctaatgaggtagtagtttttaagagcttcatgaaagctgggctccgctttctgctccacaagatgttggttgaggttttaaagacattcgagatattccttcatcaacttaccccccgaagctcttatcaaagtgggtttttatatgggccatgaggagtcagggactggagccggatgccagatgcttctgcaacattcatgaattatcttaccagacgaaggtgaccggaaaagaacaatatcataacaa

SEQ ID NO: 110648 - DNA, 289 bp, Zea Mays
tgaagctttttgccgggtacatgaactacattatcagacaaaggccagggtatatggtcttcataagaacttcggctgctacaactttgcatatagaaaagatacaaaggctctagtgattgcctatcgcaccaaatggccaaccgggtggacaaatgactggttttatgtgaaagcagacgagaagagaagggagaagctgatgactatggtcatgaatcctatgaaactaaacttcaggatgaccaggcccttgtgccatatgtaacttggctctccatgcctggta

SEQ ID NO: 110649 - DNA, 472 bp, Zea Mays
aacagatggagcacacccattgggatcagcaatagatggagcacacccattgggatcagcaacagatggagcacacccattgggatcagcagcagatggagcacacccagtggggtcggcgtcagtaaattcaggcacaagcacttcttcagcagcaggaaccgaagtaccaacgtcccgatccaaactagatactcgccggaggcgtctctttttctttttctgctcatcagcaggaggatcaagttgattgactcgacaaggacgtctcgggcaaacactgacaggtttctgaacatctgaggttgtaccagcctctgggagaggcaccaccaccaatgtcctagcaggagcagcattagaagagtcctcagccagcaaatcaagcatagcacttatctctgcatcactaggatccaagggcacctcaaagtggacctatcgttcactatcaggaacttccccgagcgag

SEQ ID NO: 110650 - DNA, 424 bp, Zea Mays
ttaaccctgaaacagacttgaaaatgaatagagctcaatagtttgaggacctttggtaaaggcacacccccaatagaatccttattagtttttaggtaacaaagagcagaataaccaaagtggtggcaagtgttgtgttgaaccttagcacaaccgagagctagcatgcatgaagtttaaagaggtttgggctacaatatgtgtaataccctacattctcttgctattcattgattgataaacacaaaggagaaaaatattacaagatcataacccattgagcgtcatggcttcctagctcccccattatctcttggttctagtgtcagtttgcttctattggtcctaatccacctttatgtcggccatctatgtagagtacatcaaaccttgaattgaacccctatgatgagcgagaggttct

SEQ ID NO: 110651 - DNA, 471 bp, Zea Mays
atgattgattagtggtttccacgatggtcgagcccgccgaggcagggtcaaatgatagcaggtctaaaaaggttgtaccccttataaggaagacattagttaatgtcagaaaaggggggagacacatatgacttgaggaacatgatgtaccttttttgggattggattaacggtcggctcggggacaaccgattcatgcaagtcctgaaggacgattagggtgtcgatgatctcagctaagatatcaatagcttctaggggagagtgccattggaatgcatgttcctccccactggatgcttcaaggatgatggtctgggaagcatgtgaactgcagttaccaggaatgtgcgagcatcgaatatgggatacagaaagggtgcatacttgatgtgcattcagggcttcttggttaggggacgatgatcgtgcctctttgagaaccttcttggcaaccactttcctcacctt

SEQ ID NO: 110652 - DNA, 376 bp, Zea Mays
ccacggtgcccctgtgtcctgcccagcagacagcagtagcacgggaacaaaataaattaaaccttcgtaatgcatgggatggtttggataacaaaataaaaacttggatgcatgtgttatcctatcccatcgtggaatgtagctagctgcacctgcgcaccgcagacggagagtgcctgttccctgtagattgattcaaactcctatatgtgcttgcattgtcgtcgctttcggtccagtccactactccactagtcacgttgcttcgagttcagcgaaatttgccccatgcttatatttattttcaattgtgagataaattttaagctctatagatatgcttttgtttcgggatgaaaggagtagacaccagtgc

SEQ ID NO: 110653 - DNA, 714 bp, Zea Mays
ttatcaagctcggttggcttccccggatgaaatattccatacccctctttctactgaagcgttcgagcaacttctctctctgcaggacacccttgataatatacagctgcttgatcacgatgatatttggcgatgtagtgcctcttccaaccggttttcttctcagaaggtctatgctcacttgactggtacccatcaaacgccccctatctttgtttggctatggaaatctaaatgtcaacccaagcacaaagtgttcttctggctagtgctcaaaaatagattgaatactcggtccctcctcaggcgtcgttctatgccattggattccttcacctgcgacaattgtattctccagattgaagaaacgcctattcatctgttcttcaggagcaattttgctaagcgatgttggcttcttttgggcttcctcccgccttgttctacggatctcctgcataccctaatgagaattagaagacgcttgcaagttccctggcgacttgaagttattatcatatcatgacatggtgtatctggcggtgcagaaacaattggatcttcaatgaaattcccccgacggtttctgggtgcaaagcgatgtttaagagtgaatttgccttgctttgtcttaaagtcaagcctgctcttaaagaagatattacatcttggctacttaacttaggactgtaactcttctcctttctcattccc

SEQ ID NO: 110654 - DNA, 331 bp, Zea Mays
ttggggaacgtggtcatgttccatggcactaggtggcggcataggcgtgttatgctttggtggcggcacgggtaaggtgagcgcggcgtgacaacctctgcggtgacttgcgcgaggatttgcacaatagtttagtttgcacttgctgatgtcgatgacgagagcgcaacatgatggattcacaccgggggacgacggtctagagtctaacaaccagatctgttcaactcagatcggaatcgtttgtcggagatgtgctttcgagtgacgaccgtgaagaggcggtcctagaggagcttgtggctgactcaggtgtggtggcagttgcgtg

SEQ ID NO: 110655 - DNA, 503 bp, Zea Mays
gttcatttggaaataaactggttgcttgtatatggtacaccaccgccacggcaatgagacaatcagttgcaaactggttgcttgtatatggtacaagccatccaagtttaacattgtattgagcacaataccaaaccctaaatcctaaaccctaaacaattcaagtggatggggcatttgacatcacagccgccgaagagtagttccaaacaagaaaggaagatcaacagataagcgacaaataaatatctagaaaataaaggaatgcatagggtgtttggtcatcagtcatcacagccagagaagaagagttccaaacaagaaagcaagatcaacagacaagtaacaaaaaacatcagaaaaacaaagatcatttggatgtgacaaccagcacagttacacttagagcatccaatcccaggtctttaggtcagggtagttcctggttcctaccatgggtgtctttttgtttctttgtttttggccaccgtaatggggtcttt

SEQ ID NO: 110656 - DNA, 779 bp, Zea Mays
agcggccactagcgagcccagcagctggagacggccagccatgccccgcgaggccgcgatcctatttccatctaactgcattcgtacgtgcgtgggtaacaggaaggagataaccaatggtgggccccacttgcatgcatcacgcctccataatttcccacatgcatgtatttctttttccacacgatccacaatccctacggtcggcacttgcatgcacaaccctcacacaagcgagatctgcaggcatgcaacacaggtggaaaattgctcccacacctgatcccacctccccttgatactcttgtggctaagacccatgtggtccatcgtatggttagctttcgaccaatcaaatcatgccacgtaatgtaaatccgagaaacactagttattcaatatatacgttgtgttgcgagtccgtctcgacttgtttcattcgtagcgacttcgtaataacctcgactacgtgttagtaatattatttggtcatgttttcgttaattgtgtagttaatcgtttatccgaggtttatttgaatgacattctaattaaaattaaggtatagtttttaaatggtgattttatagatgcaaattaatgtggttagtgccaactaagatgttttcaactaatatttgtttaatgtaaatgtgacgtctgtttagcttttctcgcatgtcgcgttgtttcacacgtggtcacgtgttgattcgcgcaccgttcgcgtgctatctcgtgcgcgtcgtcatgcgttgtccacgggtgtcgcacgtgcg

SEQ ID NO: 110657 - DNA, 420 bp, Zea Mays
ccttccagacaacaaggaaatatccatctgccgggagatggccaaaaatatgggatttccgaagcttgaagctggcctctccgccatgtcaaaggatgacctcgcagatagccttgcatacaacagtctaaaggtacagaagtggtggacttaaaaatagattatcttgtcttgtattcttgtgctgatcctttctttttgcagggcttaattcttagcaacgctttgagggcgcagaagaatgttgaagatgaaagttgccagatagccctcggcaaccttcggtcagaagttatcaagctgagaaatgaagccttggagaaagataaaattctactttcattggtggacaaagtgaagaaagacgaagcgaaatttaacgctcaatccgaagctcataaagccgaagttgaagacctt

SEQ ID NO: 110658 - DNA, 774 bp, Zea Mays
gagaacttgaagatcaaattgagaggaattgagtgggtagctgagtaagatctttataacaaacttgtagctggttctttggacgacaatattgacgcagacaagtgatcgagttgttacatgaaaagtagagaatgaagctctccaaaacgcactgtcagagtgtctgatgaagatcgtcgtgctacagtgaccataaagatctcccgtgccgtgagctcgacgccggtgatctgccgccacaattcgtgtccgcctgggagattcatgccgcggggagagtagataacgtcggggtggggtgaaaatatcaagtgtggggtgaatctggtagctgaccggaccggccgtcgtgtcccaccgcagtcaatcgcgctggcatcaccggagttcactgttatctggctaggctacgtgcctcaaagccttaccacatcgtagtagacctccttaggtagcttgttcatcacatgagacactaccccggtaaaagccacggtagcgcttgcgccagtgacttcccctctctccggccgccagcatgccttctcgaaattagacgccaccaccgtaggactctataaattgcagccatagtgagttccgctaggtatttacgcatccaacacaccagcccttgcctcggatcatccaccagagtctcccaatttcgtgtttcccccaaatacgttttccatgccaccgtgaacacttcatcatggccaaccctctgcaggtcagttcaagcttccttgattggtgttctagcctccc

SEQ ID NO: 110659 - DNA, 677 bp, Zea Mays
ccatttgaaaggtacttcttttttggtcaattcgttgatgggagcagcaatagtactgaagtcttttacaaaccacctgtagaacccagcgagcccaaggaagcttctcacttgtctcacattctgtggaggcatctagtcgtgtacaactttgaccttttcttcatctacctccacaccttgtcctaatacaacaaacccaagaaacctaaggtctatttgatgttcaattcctctcttaggtggtagcccttgtgtcacttcattaggaaacacatcctcatattcctgtaatgcatcaaagacaatacttggctaagtagagggtaagttgttagtagaaagtaggatgtccttgtataggagcacaaataacatacttggctaagtagagggtaagttgttagtagaaagtaggatgtccttgtataggagcacaaataacatggcattaggttcactcaattcttttagatcccccttcctagtcatcatgactaatccttcttttcccggtgtcttggttattggaggctgtggagttttatttggctttggaaactcttccttgctatttttgtggatcactctcaagtggttctcgctctttcgctatttcttccttagatcatccttcataacttccttcggtgtcaaaggaagcaaatagattcgct

SEQ ID NO: 110660 - DNA, 407 bp, Zea Mays
gtgatgtatagggtaatgggcccaggtggttcgactgcaaccctacagggtgcggcggctgcctcccccctctggttttggttagttggttatgtttggcaaggatctcctagattagatctttcctattcttagggatatccttgcctatatgtacctgagccttgggctcctcccataatcaatgtactatttcccagccatactctttcacaagctaaaacaaatccatgcaccaaacatgtttggaccttacaatgcattgaacaaacaatgtttgccaacaatgccaaatttcttactaaagggtaacaaatccatgcattgaacatgtttggaccttaaaatgcactgaacacaacatgtttgtaacaatgccaaatatgtttgaccttactataagaaac

SEQ ID NO: 110661 - DNA, 550 bp, Zea Mays
tggacatccaaagttgcatcaacctctgaaaggggcaccactgccaacgtaccaacaggagcagcgtcggaggaatcctcagctagcagatcaagcatgtcatttatgtccacatcactagggttcaggggcacttcaaaatgaacctgccgttcatcatcaggaatctccccaagcgaagcaaccaaagtactaacttcttcagcagagggtcgcactctaaggcccgaattgccatcagtcacaggcggatttgacacaaaaagggtgaaggctttgggaggaggcaggttctaggctgagtatgccgctggagcaccaacatttgacaccttacccctgaggatcatttcaagtcggcttaccaagtctacagaaggaattctcctattggtaacccgagttgagtcggccagccctcgatacagatatgctggataggccctatctttcagtggctgaatgttcttgaaaacaaagtcagcgaccacagcttcagcagttagacctctctctttcagcagtcctacttcagttagcaacacacctg

SEQ ID NO: 110662 - DNA, 420 bp, Zea Mays
ggtgcggtggtggtccgatgtcaacctgacttggaagacctcaatcaagatcctgggggacctgtccctgttcccggttcggtggtgcacctgactgaaccgatgtatcagttgagagcagattttttgtagtttttttgtaggcaagttcaacggccatatgggctcttggggctataaaaggacccccattttgacctcccacatacaccaagaataccaaaataaagtacttcacacattcgcaaggttccaaagtggaagacctccccgcgttgaagatgtctgcagcactgaaggtgttggccatggagctgtcgtgattcgatgtcgcaccccctacttggcgtgccagctgtcgatgtttagtcctgactttgcactatggggtagcccacgtaatgcttttgggaggacggt

SEQ ID NO: 110663 - DNA, 516 bp, Zea Mays
gttcggtaaatgttgttctctggggtgggcaagctagcttattccctggagaacagatctacaacgatggtcagtcctctccacagatcctgatgtttgttggcacgcttgtcaagaaatacgcgggtatactaactttgaacttttgcatttagtgcttttttatagttgggacctaatgccctttgttttagatggactgtgcttgtctggaggctcaccctgtaagtggtacattaatcctgatgttcctgaagcaagtgccctcatggctaggtaatattctgctatgcctggtgcacgtatcagactgatgtttggctttgctctgttctaacctgagcttgactcattgtatgtaaaaaccagtgcgagaaaagcgcatagtcccattaagtggaacgaggttctatcttccaatcagcctatgcctcatgtttctgaggaacagaaaatcgcttatatcagagatctgcacccatttgagaataaggtatgttccatgtttcattcact

SEQ ID NO: 110664 - DNA, 481 bp, Zea Mays
ttggaatgtccaggggcttatttgtgaaatccgtgggcacaactgttaatgcaatagcacttgatgatcggcagattatttttgggaaacaacagggtcacttttgcaaaatggcttcagcgaaggggtatggagcgattaaagccgcacgatcagaggcgcacggtgcatattaaatctgacttcgaccgaaacagtacgcaacatggagccttggatccaaattcgacgacccacagtcaattcgtgggatggaatagaagatccgatctcccccgtctgccctaagatcgatggtcaccgatcacatccggacgaagcgataacccgactaatcctagcagttggttagaggatcaacggtggacgcattgtcttcttccttacgaccccaagctaccgtcctttctcactcttcatggccgacgtcgatagcccaccccacagcgatgagtacaccagcgaccagtgcccacggcgc

SEQ ID NO: 110665 - DNA, 527 bp, Zea Mays
gttcatcaagttcataaagaaggctggtgcatttgttagaccgaaagacatcactgtgaattcatacaacccatacttggtaatgaatgccgtcttcggaatgcctgaaggtcggatcctgagctgatgataacctgacctcaggtctaccttggagaacacgctggctcctctcaactggtcgaacagatcttctattctgggcaaggggtacttgtttcttaatgggtgacctcattcagagctcaataatcgatacacatcattggtgccatctttcttctccacaaataggacaggggcggcccaaggcgaggtgcttggccggatgtaacctttctctgatagctcatcaatctgcttcttaagctcaaccaactctggtccagatattctataagctctcttaaagataggggcggttccaggaagaagctctatggcaaactcaaccttccgttctggtggcttacctggtaggtcctttggaaacacatctgggaactcagacacaaccttgatactct

SEQ ID NO: 110666 - DNA, 475 bp, Zea Mays
caaggtaagatatagaggtaataagggtaaaggtggtaatgatgaaaagcataaccatggatagagttaaggcaagacttacaaagtggagaaaacaagcaagggtaagataggtaaggttccaacaaaatggttgaagtaaagaaaattaattaccaagtggagtgacaaggagacaacgagattaccaaggatatgcaaaataaaacgaccgctcatggatcattaaaaacaagggtggtcaagggcacgttgactgaaatgtcttaaacagatattgagatataaaggtaagcacatataaaaataagagtatgcaagattccaatggtatgagcgtaccaagaccaagagaatagaaaaagccaaaggatgacaacttcataatggaatagggaggggcctcagaagacaagaggttcatggacatataatctgaaatgtttaagtaggcagtagaaatttagaggcgagt

SEQ ID NO: 110667 - DNA, 415 bp, Zea Mays
aagaagatcgcctcaacaccctagctggtgtggtggcaggtcttaacactgacctggatagtgctaccctggacctctctagggtacactaggagctggaggatgcacactcaaggatcgcagccctggaagctcaactagatggaaggaatccccctgaagttcaaatatgtgctatggcgttgtcccctccccgcaagaggatccgatatggagaaccaggatccatcaccaggctgctataaatttttttatattgtaataagttagatttcgcgttagacggtgaacacatttatattactacacttataataataacaaccatgtgatggtgttgtttgcaatgtttgatttggatttttgcttgagtgcaatggtcttatggaatgatggccataagagcataaaaata

SEQ ID NO: 110668 - DNA, 652 bp, Zea Mays
cacaacctttgttacattattccaagctctgacttattatacatactcagtccatacaactcactttccttatttagactagacaaggaaacaacctactactatactagtctattcctctacattcttggtcgctctagatccaccactagcttcaggagggcgatcatccacgatgttcatagaagtaggggccccaaagaggtccagctccccatagggtcctccttcacctgctcctactgcactagcacccatctctgcaactttaggtggcacgtttgggtgcaactggtcatacaacacatgcacctcttcgtgcaggatattgttgtacgcttgcaggttctccaaagctaggctcaactcttccacccgagcctgagcagtcgcctcacaatcctaggctatggatcacaagttcacagcccagtcaatagcccgatcacgctctacaatctcccgctgtagacgttctacttcttcggacaactcagcgatgcggcgacaagctcgcacacgctccctacctccatggcgcaactccatagtcaaaagctcaactctagcctccaaatctcctatgggatcattgctcccactgctgctcctctcatgatgaggagccaactaatgacggggcacaccctga

SEQ ID NO: 110669 - DNA, 427 bp, Zea Mays
gtgtagtcctcgcttcttcaacttctatttcctactcgttttctagatatagccatatataatcatgaatgctcatgtaatgctcatgaaaatgcaaagataataaaagtatattatctaatgtcttgaatataactttccttcacggatctccgggaaactagggtttttggagtctatagtgaagttcatagggcaggggttagggttttgggttctaagcaccaaacatggttcaaatcataccaaatttaacccaaggcttctaaataatattcaagtttatctaaaaagtttggtgaattttggaattattaattactctctaaaattccagaagtatgggttttgtctattttaaatatcccaaaattccctattggaactaaaaatcatgaatctatttttattaattactatggaaaat

SEQ ID NO: 110670 - DNA, 586 bp, Zea Mays
gtcagagtctgtaataatgtttaatttagtgtcagtgtcttagtcttaatcggtcttagtgttagtttgcttatcatatgttttgatgtctatcatgatgaactcatgatgaagttggatcgttgtaatgattgtcaccaaggtgtggccatcccccacagcttggtgtagttattaataaagtcagttatttagttgggcaacttttatttccactttcctctttatctgtgaagttgtgtttggctgtgttgagagtcagtgaagatgctcatttgtttagtattgtgaagacttctttatatcttttcttatgttgaaagactgcaaggtcagatctggtgtgtgtatactttctatagatgtctgacaacaggcgcagaggtggaaggtgtgctcagcaggagcagcaggcacctcagcagcagttgccaccaccacccccaatgactattgaacagatgttcctgatgcaaacccaagcagtccaagcgattggctagactttagcagcaatgtagcaggtgcagcagcagcaaccctcacctcaacctcagatacaagtgtagatgctgcaaatgcccaa

SEQ ID NO: 110671 - DNA, 400 bp, Zea Mays
aattcatgtgtgccaacaatgcacttcattgctccacataactttggttctaggcactctaccacagggattttgtcttcattgctatccatagggtactagtatggacatgaaggcacaacaagaatatatagcttcatataatgcacacagatgcaggtggcatcgtaggtaagaagcatttcattctagtgtatgtgctaaagcctctaatctatctagatgcgcaactacagtttagctatatatatgtttctatctgtcacaaaagagttatgcaacatataggttcaaatcctatcactatactatagcaaactaacaaaagacattactttaaatgatcatattgttcattaatcatgaaaatccaaatttgatggtctacggagtctatttc

SEQ ID NO: 110672 - DNA, 472 bp, Zea Mays
cttggatagggatagcatgcccctaatagctggatcattgcagtcctctccacagtgaggctggtacctgaaggcatcgagcgcgtaatagcctcggtgcatggcatctctcagcatgcccagctgctggatcatggcttgatttgtgatgtgccgtcccatggcctcctcatcgatgacctgtgctcggagaagagccctttgtaggctttcctccatgaccattgtgtgcggcttgaagcacttgttgatgatgaagtttatgtgttgagccatgagctctcccagggctgcaggaagaaaactttccatgtgagttccccttcctgtattctgtggatgggtgagaaaactcagaggtgagttgtgatgtttctgaaactctgtattctgtggttcacgtcaaagctcaagtgagaaaggggatccgggaatggttgggggacaagaagcaaacacatataagaaaaac

SEQ ID NO: 110673 - DNA, 446 bp, Zea Mays
ctcgatctctctcatcataaataccgtaccatgaaatatggtgatatatcatctcattaaataagaatgaaactatgataaaactctcactaggaatagcctaaggtcgttagcataaggccagctccaaacatatcgagtatagatcctcaaacaggagataaggagactacgaaacccaacagttcactctgcatgattggttacccgcccattctgttttagaccaccacatacattgactttgtctgagcgtatgtttggttatctatacgcgggaaacactagcagcataaacggatgcaaaataagtcattttaaggttatttacctacatctacagatacaccagaaataatcgtatctcaccaaccatgctcacgcgtgcctaggggagtatgcaccaaaccaataagtcgctataagaatgtttagtagctcactca

SEQ ID NO: 110674 - DNA, 430 bp, Zea Mays
ctaatttatgtcagctaaatttagttgtcgtaattaatatgcgctgggctcgttaaaagtctataaagatatgtttgattagtgagcggatgagatcatagtcgttctattatattttctatgtgtttggttacccacggaaagggtggagtggcttctggaatctctcggttcgagtattctatgaaagttattaaaacctcaaccccgtgggttcactcccacatttcacgacccaaaacgtcagcacgttctgacgtgtgtactccgtagcctcataaaagccctccaattttttgcaaaccaacctgcggttctcgctatgaccccaagtagattcatttgggcgtccctcgcggtcctcgagccccatctcgtccgaactccgaaccctagctcctccttgctgtcgcctcatcagacctcctgc

SEQ ID NO: 110675 - DNA, 535 bp, Zea Mays
ccctcttatctgaaatatccttctccattctgaggtatccattctcgccccaagtcgtgccccatgagttcttcatcagccagtacttagtaccatcactggtctttccataaccaatggctgcaatcccatggtccaagtcagtgccacatgagccagtcatcacaccaccagagtagaactggaacgtcatgtctccgccatccactgccaccgagacaggctggtttgccacggccttcatcaaggcagcctcatcatttgccggcacatcctcgtagccctttatggttgcagcactatttgatccactcttgcacttgccatctgcagcagtgtaaggatagctggactccgtggttaggccgccgttcttgatgatgaacttgaaagcatcgtccatcaaaccaccctcacaaccttgatcctcgccatggacatcgcaatccactaactcttgttctgcaagagagacgagcttgcccgtgctgattttcacaatgccttctgtggcggccacggctgagaacgccca

SEQ ID NO: 110676 - DNA, 973 bp, Zea Mays
actttgcggctgcgcctctcttcattaccaggactcaggagtccttcttccgggcatatctgacaactcagattgccttgtgagcgcaccggcttttgaatttacctgcttttctgcatgctgtcggtgccgattcagagggacatctcacctatctgccaggactacattctctattgaccatgagtggcaggtatattgaggagtgggtcagagtgttctatgctacagtgtggattgaccctgaccatcagtgactgtgattccatttcgagggagaggatgtcactttgcatgccagttagattcaccggctctttggatttccagagtcgtcgactaggctccacagtctgtgctacggcatctcggatcctcctcgtcgccctcacaacggtgttgcacctgctacaactcacgtcgcggccctgttcagacctcctttcatagatgggttgtgacgatctcctgctgacttcactacttcagtgaagttcttatatgagctgatgagacggacattactacctcggatgggatacagagaggctaccactcattcagctatggctacttggtgctttggtctcacattcagagtttgatgtggttgacttccttatttgtgagatcgaggatacagttttggatggacttcgtgcttgccgtcagctatcgtatgctcattatctctatcacatctttgcgtagctaatcaggcctcctcagttccagggcaccctcaatgcctctcgcctccagttcggttcctatcgtcctagtgccagatctagtgccagatgtttggcctgagcatgagaccttcagacagttcaagacccagggtgctattgctgacacttcttcagataatgatgagggccttgggattccgccaccgcctcctgtgccacctcgctcacatgatcatgaggcgggtagttctagtgctgctactgctgccccactagct

SEQ ID NO: 110677 - DNA, 380 bp, Zea Mays
ctgactgtcttgcgatgcgttctgttgccgccttgtcatccagttcctcttcattttttatgtacctgatgataggctctctccagtcattggggtccaactctggttggctcaaggtgttgcactcttctgtctgatctgagagaatactcgggcgtgaaacttcttgaacgaagatcctgggtgggacctaggcccgactggatcccagcttcgacaacgcgtctgctgccgcgttgcggtctctttccacgtgatggaactccaacccttcgaatttgtcctctaattttcggacggctgcatagacttgcccatagaatcaatcgagcaatcccagtctttatttatctggcttatgaccactaccgaatctccat

SEQ ID NO: 110678 - DNA, 1368 bp, Zea Mays
ggatcttgtcccacgtaaatatcgaagcacacgaagcaaatgaccataatgaactgaagtaggtgttgatacaaattggctcaacatatgaacagcatgagcaatatcaggtctggtgatggtgaggtaaacaagactacccacaatatgacaataccgagttgggtctgctagttccttcggacgaagttttaaatgaagatccatcggtgttgcaacagtgcgtgtatcagtaattccagagcgatcaagaagatcttgtatatatttggactgagacagataaaagcctttttgagtctgttgaacttcaatgcccaagaaatagctaagcggtcccaaatcagacatctgaaattccttactaagatgctgcttgacatgacaaatatgttctaagttgtcacctgtaatcaacatatcatccacatataatagaagtaaagtgcgaccttttggagaaacgtgaacaaacaatgcaggatcatgttcactagaagaaaaaccagcagctgtgatgacagagatgaatcgctcaaaccaagcacgaggagcttgtttcagcccatacaatgcgcgacggagacgacaaacatgccctgaaggagtatcaacccctggaggaggatgcatataaacttcttcttgtagatcgccattgagaaaagcattcttgacatccatctgagagatagtccaagaagatgaggctgcaactgcaatcaaggttcgaacagtagtcatatgcgcaacaggtgcaaaagtctcatcataatcaagtccttgagtctgttgaaagccacgagcaacaagacgagctttatacctctcaattgacccatctgattttgtcttaactttgaagacccatttacatgtgataggatcaacatgcgagggtaaaggaacaatatcccatgtaccggtgcgttcaagagcagccaattcatcaatcatagctagctgccactcaagaatcccagaagcttcctgatatgtagtgggttcaacaattgccacaccagcctgtggaaaaccatagcgatctagaggttcaatggtaccatgatcacaaagacgatatccctgattaaaaacatcattagactcattatggttagtacaagaatcaggtacaggatcagtatcgggaccagccgtagaaatagagtgggaacgacaaatgtaggtttggatgataggtggtttggaagagtaagaagaggatgacgtggaggtggaaggtggtgttattggaatgagaacatcagatgtggatgatggtgtagatgcaggaatggaaggaagacacatgaaagaagtagattatgtgggataatatgaggagtgagtagactggttgtgaaa

SEQ ID NO: 110679 - DNA, 602 bp, Zea Mays
ctgcttccgacccataaaccatgaagaatggggtatttccatgcagagctcgactgggttgagttcgcaggctccagaccacgtatggcagttctctgatccattttcctgcaagcttttcgctcttgtcgaataccttttttctgagtgcatccagtatcatttcgttggctctttccacctggccattggctcttggatgtgccactgatgcgtacttgatctagatgcttctttgctcgtagaaatcgaagtactcagagctggtgaagttagatccgaggtcagtgatgatgctattcggtatcccgaacctgaatattatatcctggataaactccactgcttttgctgaggtcaaggaggcaattggcttgtattttatccattttgtgaatttgtcgatggcaaccagtatatgagtattgcctccctgagccttcttgaaaggtctgatcttgtccagcccccatcatgcgaacgaccaggttacaggaatggtctgcaactgctacacgaacaagtgttgttgctttgacaaggattggaacgcttcacacttttggactaactcggcagcatcgctcttcgcagtggcccag

SEQ ID NO: 110680 - DNA, 449 bp, Zea Mays
gttcattctactgtaatatttatatctacatgtagcagtgagaatgtatgtccttacgcgctatggacaccagcaggatcaacttctacgcctaaatactgatagtcattcaacacacacacaccaaagaaaagagaactcacctgagagtcaagccatttctttgcaatctgactatagaaagggcatgtactcaatcgatagtgcaagttgatgaagaagtactatctcaggagatatgctacctaatctatttgcagccaagaacaacattggaagccaaatcagcatatgaaccgacaagcaatgtacattcatcgattcatgctataaaatggctatgttagacacatgctatcttgtgcaaaaacatcctaataaagtggctacactaacatcatcaggacttaatcaaaatggataactcacaacatatagaggcaaaaaat

SEQ ID NO: 110681 - DNA, 522 bp, Zea Mays
gttgtgatgacccgtggccgagggtagcagatctactccgacgtgagctctccttgctacggacgaggccaccacggtgacaaccgaggaagaactctccaggtaagcaagacacaggaatgattccaatatctggatttctgttattcagttcgtaactgccttctcaaccaccagatctagtatttatagaagtctatcttcctattacaagcctattaacaggccattaagcagactaacaggccgcacacaggcccatctcacagatctaagaataccaatactactactaggcgataatgcaacttcacatacctaggcatctgacatcttcccctcgcctagagtttgattgtcccaatcaaaatcagcaaaaaatctggtcttgagcacatcataatcctcccaagtagtcacttcatcagtaaaatgtgaccacaacaccttcacctgaaccactggatgatttcctctacgcaccaatcgtcgttccaaaatcttcaatggtttcacatcagc

SEQ ID NO: 110682 - DNA, 368 bp, Zea Mays
agctagctccacggttcgtcggcccctatcctatcattggccgagtaggacccgcaccataccgccttgaattgccagaatccatgtcagatatccacaatgtgtttcacgtatcccagctccgcaaatgcctgcaagtgccagaaagtcacatcgaagaagagacaattcagattcagaaggatctacagtaccgagaacaaccagtaaaggttcttgactcggcagtctgaaagacccgcaactcagaagtaagactctgtaaagtttagtggagtagagaaggagaagaggaagctacatgggagagtgaggactctttgaggagggaatacccttaccttttctcaagcccagtctgaatctcg

SEQ ID NO: 110683 - DNA, 438 bp, Zea Mays
ccaactgaaacactgttgcagtctaaggcagttactgctgaccaagtctctttgcacgaaccaagtagcaacacacacccagaatgtgaggatattgcaatcctgtctgataaagtgttgcccgagcagtggaatggcgcaccagcgcctggtgcagcagaatccatcttaggaaccatgctgggcgaaaccactatgagttcttctacatcaagtcgtcctacaaccagacttcagcacggtatttctaaaaagaaaatttatactgatggtacaattagatatggcaagtttggattatttacacatacaggtgaaccacaaagtgttgatgaagcattgagagatgcaaactagaaaaacgccatggatgttgagttctcagcattgcaaaagaacaatacatggagattagttccaccgcaaagagggaaaaat

SEQ ID NO: 110684 - DNA, 331 bp, Zea Mays
ccagagtcaaccaagacagtgttgaggctactgctgatggagctgacatcgatattggtatgttttacattaattcaataccgacagccatattatttgattctggagctacgcatttgtttatttttgctcgctatgccaccacaaatgagttaccacttcaaactatgcaaaaaccactgatagtaattacccctaaagggcctgttgaaacaaattatatgacacacagattaacactgacaactatggaaagggaattctggtctacacctatagtattagaagaaagaagtatagatctgatactcggtatgtaatggttaaggaa

SEQ ID NO: 110685 - DNA, 722 bp, Zea Mays
gggcgctgaagcagggacgcgcgtgggacagatcttttgccctgctgcccgagcggatgaggctggcacacgcggcaggagaagatttttctttcagagatttttttactgtgcgagacgatgaggatcggctggatattttccctctcccatttctttacacaaagttaaatgcaattatcaattactcgctttcagttctaatcacactggtctggtctgtttcggactgaaaaccattttcgtcgagttccaattaatttgttcaggataaaatcgtaagagtgggtcgagcttccaaattcgtattctcttaatctataaattttaaacggacacaagactcgacatatcgcgaaataaatacgcaagatcgatgcgactttgaaagtgtgatcctttcggaagcgacgtcacgcatcgctcacgcgggcgagaggctgtgcactgtccagacaccggttagcacgtgccacgtgccacgccatgtcacagagagacacgtgctacgcaagcgtgaaagaatttcaaatgaattcttaggaaccacagttgatttcaaagattagagtttgggtaagacgtcgatggcttaaccccaagcgatcaatgtttacttgttttaattaatttttagtcactaacatctataggtacgttcaggctataagatttgatagtgatccttgctctatagcgacccaccgctagtccccgacgac

SEQ ID NO: 110686 - DNA, 430 bp, Zea Mays
cttgggccaattataaaagatgtagtacacttaataccttacaaatgatggtaagaaagtgaccccaaaaagaatttagaaaaaccccaaaaggttcaccaaagggttgagcacaaaagaaaaatcagaattcttctaagtccaaaaccaccccctttccaaagatcaaacatgttcaccctcattcaaacttcaaaaccatttgacccaattaacaaagtggcgccaaaatacctctagaataccctggagaaagttgaaccccaccccaagtcgtttgacacgacttggcatagcttttgtcccggtttggacaactaggacagaggcaacttctcacctctatatctccctaccccgaccatatcttggcttggaactcacataaaaaaggcaggatatggtgcaaggaagagaccgtacacagtgg

SEQ ID NO: 110687 - DNA, 382 bp, Zea Mays
tgagacttcaaattggtcaaaatgaaaatgaaggtcattcacatcatattggcccaagcttcgacaaattaccgtcccataagataggtatctcaagtcctcgtatatgttaagggtctttatgcactgcaaatgataccgagttaaaatgacaaatactaccgtcaaaatttacgtgttattttcgacggcggccgagccacgggcgcctaaaatgctcactgttactgttgtgggttcactaaaatggctccaacctgttagttgtgttgatcgtagagtcaaataaagagaaagatacatcacccatgaagtagaggtatgttatcgtttatgaccaactcaaatataataatcactatatctccctatgacaaccgtt

SEQ ID NO: 110688 - DNA, 386 bp, Zea Mays
cctaggtatagctcttgggtattatctatcactaactgattgatggcttctaaatctacatcagtttcatctaaaccatcagatacttcaaaatcccctttatcatctagaccaccagccatgtcttgaaccaaattggctatgtcatcttcatctgaattgtttgtagcctctatatcactatagtcatgactgttaataggcatagagtctgtttctccatgataagtccaccttttgtatccctcttgaaaaccatcacatatcaagtgtgaacgaacttcattttcatctttccatagagaattaacacattttctacaaggacatagaattctatttccacctatagaattgctaaacgcaaactcaataaatccagctac

SEQ ID NO: 110689 - DNA, 289 bp, Zea Mays
catagggctcgccgtcgtgccctgtgtccttggcacgttcccgacactgtcgtcctccaccactagaccgttccacttctccagcttcaacttacagtgtcggtgtcgccttgctggtcgaccgcacacacacctgtggctgggatgtgctctctccaccggttgccgctgcgacaagccaggatagcagttagacgccgacccatgtgacacacaatggtgcgtgccgcctccccgtcatgcatagttgtttcttgctgcacccttgtcttcgcgcttgcgtgctttt

SEQ ID NO: 110690 - DNA, 508 bp, Zea Mays
gcgggagcctttgtcaccttcggcagttctgcctctaccggtgggctcagaatttctagcaacactattgttttttccaactttggctctttggccgcaccatatttggcttcgactgacccgactataggcaccttcagcactacagtcgatccttcagcgctccgagcggcgggagtagcttgttctgcttcagcagcggaagaggtcccttcaccaaattcaggcactacgactgtttcaatgtatcgtggccggtgggtcaaaaccttcattttcttgctcttcgacacaacagtgatggtcgaagcggtagttttactcttttttccttgccttcgcgaggggcagcagtaatcaaggtatatgaaaccaattgcatcgaaaaccctgttcaatcttttcttgccccgacccccgaaggctgaggataaagcatcatcttcggctctggtatatgccccaagtaactcgtcgctagtagcctcaatacattttagccagtcat

SEQ ID NO: 110691 - DNA, 431 bp, Zea Mays
ctgaggggcaagcacgatcggcctaccaattaaagctccctatcctacgcattgcgtacggttcgtacacacatggacagttcagctcatctggttagacaatgattagaggtcgaagcatccacatgccttcaagcatcgacaaccagaaacaggtacgtcaaagtaaaattcatctaaaacttctagttggccggttcaagtcgtccctacttttgaaaaggtcgtcccttgcgatcgaccaacaaagtaactctgtcacccgcaaaggcaatacggcggaataaaacggcccaaagggcgatgcaagaagggtcacctattcatcgaataatgccatggtactttccaccagcatattcatcgtcgatatagtttcctgttcaagcatggggtagtatggcgatgaactcgtattacatgtatcattc

SEQ ID NO: 110692 - DNA, 1206 bp, Zea Mays
gagaagcaaaatgtcaaacagggcctatgacttgcaaaaccatgtatcaatggggtaggtgttaaatataatcctgtagatggtaagtatcatgaaataatcaaatccacaactgataggggagcgattatccctgtttagtggtgcattcagtcatctatatgctcaatcttccaataaaacaaaacttagatatgggtatatgactgaacaagcatatatggatatacctctaatttatagctttcctattttttataaacttaaggcaccatgcatcagtggccttttggccatgtaccacagactacaaataccttgtttgacaaaaagaaaaggagacaaggcagtatagtgcactaaggaagcaccaaagcaagagtaaaattagcagcaacccaatctatttgtgcactagataatgcctgtatcggtacagagtagaaaccatacacacaaaaatatgatatagcagcgattgtttccaacaatatctgcaagagtgtggagatgcagaatgcacaactgataatgcttacctcatcgagaagaaatcggcacatatgaactgacttagcagatgttgcagcaacatcaacacaaagcagaatctgaaagatcaaatgaactcttcagatcaaatatcacgaatgggtatcattaataatactcaatggagacaaaagcgtaagctcctaactgtagttaaagaaccaagctgcgtgcgtaatgacaaaatatccaattcatgtgctgcatttgtattatctgtgacacgattaacagcatcctcaacctgaaaaaaatagataacaaaattaagaaactaagaagcattagcctggataccaaattcacttttttctcaaacgcgaccaaattcacatatgtttgctataaatttatcatgttcaactgtcctgcagttatttttgaaatgtcaactaaacacctggaaattaaaattcataaattttattctaatattaactaccgcagtcaagtctccaaagcacggcaccacatatccatagtatagctcattaaaaaaaagaactaaggcattatctacagcacagtgtgtatagcatgatgtatgcatgaatacacaagaaatatttgcattgcatgccatgatggcatgaataccacaagaaatatctgcatcccatgatggatgaagcactgaacatgacatgcatcgaa

SEQ ID NO: 110693 - DNA, 453 bp, Zea Mays
atcggcttcgtataccccgattaccgctacctagtgcggggataggggaaaaagatgaaaactgctgcttcgaccaccccagttgagcctgtgccgaagggcaaaaaggtgaaggttcttacccaccggccgcgttacattgaaccagccgtggtgcctgagtttggcgcagggaccacttctgctaccgaaataaaagaaattgtcccgaccgcgcagagcactgaagagccggctgtaatgccaaaggtgcttacagtcaagctggttgaaacgaaggttgataaggctgaagagccaaaaattgaagaaataatgaagatgccagagattttgagcccaccaacagaggcaatagtacagaaggtacaaatgggttctgccgtgactcctaagaggagaaggatggcaaatgtgctggatgttgtgttagaaacaacaaaaaccttgagt

SEQ ID NO: 110694 - DNA, 888 bp, Zea Mays
gtgggagcttatggctgcagaggccttctgtgctggccagttttctcaccgtagcgacggcaccaccgtggaacttctgtgcatcgtggacaacttcatcgctaccctcgctgttggtgagaccctttcctttcatttcgatttattatctgcttcatgtagcactcattcgcagtagagttcgggcatcagggcgctagggtgcgggtgccggtgatggccgccaccgcattgagagcgcaggcaccaccgtgtttggtcagcgatagaagaaggagttggtaggatatgagacattgatcgttgagcatgagactaggattagatctctagagtatccttttcggtttgtaatcttgatcgttgatttggggaagagagatcatgattaaattagctgatacccctttgcgccctacaccacaatcgtcgaatctgatcaggttggtccaggtcgtccccgcctatcccgctgagccaatctttataaagagaccctctactcttattgaatctacccaccatccttccttatgcagagaatgttacaactaggtccgaattcttgcaagatagaccctgagctttgaaaatttagaacccacagtcccatgatttttgaatttatataaattaattccgaaaatcaatttctagtacaaaaataatcccaaaaagcttaattaattcataactcctccatttacctttgattttagtggttcttaaaccttagatctggtatggacacatagaatatgaatacacattttgttcctatgttttgatgtaatgttattgtatccattatttgcttatttgtatatattgctatgagtagaagcgagatcatgaggaacccgaagcccaaacttggggaagtacctg

SEQ ID NO: 110695 - DNA, 533 bp, Zea Mays
catttctcaaaagaagataatgaccgtggaaaatttagccaaattgcgtgagtgaactgtccaaacatagtttaaggttgtaaggcaccttttttccaccatatagttgctaaaaagttggaatataaagaattcaaaacaatatatcaccttttaaacctcaaatgtcgtttctatgatattgagggcattgtattcacacgagtgggttttagagtacaaccagtggatgaagacattattgggctagctaatgaccttttgtgataccaggtttcctataatcccctctattcaaggcatacctagacagtgtttatgtccactcaagagaaacacaacacatcaatatgccacatcatttctcaaaatataataaagaccatgtgaaatttagccaaattgcgtgagagaactgtccaaacataggttaaggttgtatgacaccttttttccaccatacagttgctaaaaagtaggaatataaagaattcaaagcaatagatcaacttttaaactaaaaataacgtttt

SEQ ID NO: 110696 - DNA, 348 bp, Zea Mays
ttcgggtggttctgccacagctggtatcggagcaaattccaccacagagaaggacaataaaccatgaataccattttcaaaaattaaaacttgcctagaaactgctacggatcgtcaggactagaccgctagacctaggacgaaaggccttaggcatagagggagaaataggtggctaattaattaggccccgtgggccagtacttagactttttaaggatgccctaagagcaccctattgtttggagaggagacattacttccagcatgcatgcattataaacacaaaaagggaattaaaacttgagctaacccactttctttaaaaccattcgggccctctttctt

SEQ ID NO: 110697 - DNA, 1033 bp, Zea Mays
gctgagcttctgactaacttggtgccaagtgcttcttgtagctgttcccaaaaacgtgccacgaattgggctcctcgatctgagacgatcgtccgaggtatcccatgtaagcacactattcggtccacatacagttcaacatatctcttggtagggtaagttgtatgcacatggaggaaatgagctgtcttggtcaatctatccacaataacccatatggaatcatgatgtttggaggttcactgcattgctctacagattataattaacaaattaacaagcaatcccctttgacaatattcattattcatgaattcatcacaacaattggagaaatggagagtcagctcactactcactgttttagaaacagtctatgcatttgctctagcctctaggctctagaattcacaaattaataagaaattgctaaccaaaattgcatttgcgcactgcacattactcaaaatcaagctcatcaagtcacaaattaataagaattcatcagtgttcagtcttcagtggtgctcacctagcctgatgtttgccggactgccgtctgccggtgcctgatgcagtgatgccctgatagccggagtgccggccgccgggatgcacgatgtgctatatttgtagatgagttcagaaagttgatcacatgtgcaagaaaatgctaagcggaatcatgcctcaagcgcgtgctattctaagatacaggatgtgctattacataaaactggacgtgctagttgtatgtcatggcatttgcgacgtcctagatgcacgatgtgctatttcgtaaacctggcgtgctagctgtacaactcagatgatagggaaatcgtgctcccaccgcgtgctattcatagatacagatgtgctcttttgtaaacccggacgtgctagccgtatactctagtgctaagatacaggatgtgctattacataacccgctggccaattattgggcattacctagctgccatggcttcagttaagcaaatgtttgaccaaatcatataatcactcttaa

SEQ ID NO: 110698 - DNA, 557 bp, Zea Mays
gattcacccgctccgtctgtccatccgactatggatggtaggaactgctcatgtgcaaacggacactagcttgttttaagagggcttgccaaaatttactggtgaaaatcttgtcgcgatcagacataagagcagacgacagcccatgaagtttgtagatatgatggaagaaagcctgagcaaccgacactgcagtgaaggggtgagtaagtggcacaaagtgtgcgtatttagtaaagagatcaatcaccaccaagatgcaattaaaactaccagaccgtggaagaccctcaatgaaatccatggaaacagtgttccaagctgatttaggtacctccaagggttgcagcagaccaggggtgcgggacctgtctgatttagcttgctgacagacgagacaagcacatacccaatcatgaacaaaagagttcataccccaccaagcgaagacttgtttcaaccgtcggtatgtgacagggatacctgagtggccacccagagggctattgtggaacgcttgcaccaattttgccttgagagtatcatcctcgccaacc

SEQ ID NO: 110699 - DNA, 500 bp, Zea Mays
ccacctttcgccatttttggataacctgcgagacatacagctagtgtaatacatctcaagttcattcaacccatcagtagagcgctagcgcgtttcagaaaaagttcctaagactacgacgacaaggcatcgatcttatcatgcatataaaagcatcacaagcatgttcacggaacctatcggttaacttgatcgacacattacccctgttctttgcctttccaattttatcgcacaacaagaatcatccccatttgccaacgacaccaataatacctaccgacctagggtttaccacccgagcacagttacatgccgcacattagtttctaacatgattctcgcataactcgtaattcaactactcactaaccataaatcacgcacgacgactaccatatcaactagttaatttatttggacaccacccgtctagcgtaccactagtaccccgcattttgactcgacttataattatagaggaagcaacggctaccttg

SEQ ID NO: 110700 - DNA, 294 bp, Zea Mays
gcacgctttcaaagatagaacaagtcgtctagtgaagtgtccttgcaatcactgcgagaacaagtggcctcagaagatagaagaaatggagaaacacctttgcaaaagtgggtttatgccgaactaccttgtatggtaccgacatggagagtctattagacatgttgacgcggaggtggaacttgatgacgatcatgataggatggacgacatgttgcatgatcttggtagggatgttgaaatgaacgctgaggagctggggcagcttccacgcgatgctcaggaattcttccg

SEQ ID NO: 110701 - DNA, 505 bp, Zea Mays
aatgaccacacaaaaggccacatccgatgtttaccaaacacacaaacatctcgctgtcataagacctgctcccgacgaatagtagcaaggtaggtggaccgactagtaggctcataacggtcatgcaaaaaaggcgacatctgatgttcaaactcaaactcaacaatattagcaacaagacgaccctccatactagaggctagaataacactgacacgaacatccttatccaatcaagtcatgtaagcactaaactaagagtcataggaggaatctgatcatcatagtctgcgagcaactcctcgtcagtagccttctttagaatcacttgcgatgtatgagtagtgggacaagtagggcacaacgaatcactagtgaggaactcccaaaggcgcaaaccacacatgtagacgcatgcatgaaacctagccatgataattggtgtcattaaaagcatcataaatcatagaactagaacactaccagacaaagaggtcaaagacgt

SEQ ID NO: 110702 - DNA, 341 bp, Zea Mays
agccactataatttttacacaatttttggaaatttattaagataacttgtagttcaaacccactctaaaaacataaaggaaatcaagggaaagaaaggaaagataaacctcgcccccaacaagtccaacttgaattcttgacaattctcactaagactttaaaaagaattcagtggaacaccaacatgaacttaccacttagtttaactgagtgtgatccaaattactaagtataccaccaaaaatcttgtgtaaacaagatttaactctatctaatttaagtagatcattcaccatcaaagtttaattactaaagcacatatcatatcatgcatgtatct

SEQ ID NO: 110703 - DNA, 476 bp, Zea Mays
gatcatcggcggcgaggggaagaatcagatgatctgatctatttctggtcactgtacaatggtgttcttcattcagtgcttctgacagagcgatctgcagagccgtttacttccaattttatgtagtaacttgattgtctccctttagcaaagttatagccctaagatctagctacaacattgttatagcaatactaagcatattcttgctcgatcatgcttgaattcatgtccaaagtcaatgcagttgcactgtcagtctgaaattcagactttaacagcctgacagcccatctttgggtttgattatctccattttcttcgtaacaactatgcttacactcttaaacaaagttgttctcctttgataggtttacaaatttgatgtggtgacctagggtaaattctcactattttggaagatatagagctccaaagtggagtcaatatcactgaattttcagacttagccctag

SEQ ID NO: 110704 - DNA, 467 bp, Zea Mays
tatgaaatttttaagacaaagcaatagtctcaacataatcaaaatataataatggactccccctaaagatatgcatcaagtaataaaaaaaatgatttcgatgcatttacttcaaagaacataaagggagaagcattatacattttgatcaaggctcacaaatttagcaacagacaacttaagccttgtaatctcataatgaaaaagaatttagaatgcttacaaccacaccattgattattgcgaagaccttattgtccaagtaggtgttgttgtccttgatgttcttcctttttcatttgagtgtcctccctttgtagtcgtctctttttccttccaaactcattgaaaatactcaagagagatgttaatgacgcaagggagtatatggcgagggatgatttctttagatagctaacatgcataattcatcatccacaagtcacatagatgtgaagaaaaatcct

SEQ ID NO: 110705 - DNA, 634 bp, Zea Mays
agctgtttccagatgactttggataagtgcaaaacaacaagaatttcgttctggtaaaaagggggtcacaggagcgatttttacagcccaggggggcttttggattggatcgatctgcagcctgacagccatgactcacctgcttatttactgtgctggtttgctatccataggaggattgaccacctctgctgttttccttgtgcctgtacccttacgtgggggtcatgcaggtgaaaaaatggagcatgctggctctctttggccctctgtttatgaccctaaaggaaagacccagccggctgcaactgctgtcttggttttgggcatacaagcacctaatctgagatctccaagttttagccgattgcatatttgtccaccgcgtcacaccattctcacaactctagtttaagttctccatcttccacatccctctaattccactaaaaagccttgaactcacggtgggtactgaggccggtgatcacgacaggcattttttcccttaccgtggccaggtgcagtcaacatccctccgtctcttttctcaagttctagtatccttcgcctgtggtgaagcttacgcgtgtgcctgattgatttgtaccgcacagagctgcctggaacgccg

SEQ ID NO: 110706 - DNA, 363 bp, Zea Mays
tcttgatgggatactcagcataagtcaggtcatgttgaacactaaggccctccattggtagctgctcttcaggtaccctgagacacttcttcagttgtgacacatgaaagacatcatgtacatccgcaagatgattaggtaattccagttgatatgcaacctctcccactcgctttaggattaagaagggtccaatgaagcgaggagacaactttcctttgactttaaatcttcgcataccccaaagtggtgacaccttcaaatagacatgatcaccctccttaaactctagcagtcttctccgggtatcagcatagcttttctgccttgactgtgcagttctcaaattctcccttatttgat

SEQ ID NO: 110707 - DNA, 418 bp, Zea Mays
gaattacctaggacaaagagggggagggatagtatttttgtggtggttgatagatttctaagatggctcaatttattctttgtcataagagcaacgatgtagttcatactgctaatcttttctttcaagaaattgttcgcttgcaaggtgtgccttctactattattttagatcatgatgccaaaattttaagccacttttggagaacactatgtaataaattgggactaagctattgttttcaaaggcatgtcacaccaaaccgacggtcaaactgaggtagtaacattatctaccatgttgagggttgttttgaagaagaatttgaatatgtgggaagagtgcttacaacatgttgagttttcttaatagggcggtttactccaccaaggtaagtccttttcaggtagtgtatggg

SEQ ID NO: 110708 - DNA, 668 bp, Zea Mays
ttagggtatggccgcttgtagaaagctgggaaatgccaaatgagaccaccaccgactctagcaatgatggtctggttcgactggaatataccttcagattcagggagaagtttgatgaacccaacgacgactggctgaagtgtatcgaagctacaagtgatgaattgtttggagcttattccaaggccaaagataatgctctatccgtagccttcggaagacgggggaagaaaagactgaatatggtttttgatgccattggcttcatataccctgactaccactatccgctgcggggacaggggaaaaagaggaaagctgctacttcggccaccccagttgagcctatgccgaagggcaaaaaggtgaaggttcttacccaccggccgcgttacattgaaccggccgtggtgcctgagtttggcgcagtgacctcttctgctaccgaattaaaagaaactatcccgactgcgcagagcaatgaagagccggctgtaatgccgaaggtgcttacagttaagctggttgaaacgaaggttgataaggctgaagagccaaaaattgaagagataatgaaggtgctagagattttgagccctccaacagaggcaacagtaccgaaagtacaaatgggttctgtcgcgactcctaagaggagaaggatggca

SEQ ID NO: 110709 - DNA, 387 bp, Zea Mays
ctagaatatgtatatgtactttgtggaggcttgcttgctgctattggaggcgaggagggtgtatttatagcaacatgtcccaaagagcctttgcaccgaatccagaaaatctacaccatctaccagaccgagtcgtgtaaccttttctccgagaacctgattggtgccttccggtgcatactagaccaagtcatgtagcgtcttctttgagatcctgattggtgccttccatatggagttggcactagatcagtctggtgcaccaccagatcgagtgcgacatcagctagctattgtgccgaccgttgcgccgaagtagccattggacccaggagggtcggtgcaccactagtcccgaggttcagtgcgctaggccaccaagtcctc

SEQ ID NO: 110710 - DNA, 460 bp, Zea Mays
ttggatttgtgtaccctgattatcgctacccgccgcgggggcaaaaaagaaagggtgcaacttctgggaaggctgctgcttcggctgcttcaagcgagcccgcactgaagaggaaaaaggtgaaggttcttactcaccgaccatgctacattgaaccggccatagtgcccgaatttggcggtgagacctcttcggctattgaagccaaaggacctgctcttacgcagaggattgaagagccggctgcaatgccgaagactgacaaaattgaagaaccgagaaccgaagggacgaaaacatcagaagttccaagccctttggcaggagtggaggcgccgaaggcacaaaaagatatagcagcaacccctaagagaaaaaggatggctagtgtattagatgtgctggagacgataaaaatttcaagctctactccaggaaaaattgccaaggctttgaaaac

SEQ ID NO: 110711 - DNA, 396 bp, Zea Mays
cttagtgcagccctcgacagcctgcaagtgtactataatactttacatgaggaagtacatgtactgtatgttcgactgcacccggacgtgccttctgacgctactgcaataggagccggaccatcggggatagcaagtgaaggacctgatggggagttggacctttttaggccccctccttccatgaaccttgctgacgaacggtctcctgcagcaggaaatgaagtaacaaaggatgacaaagactagaatagtatagtttagatattatacttatgtaaaataagtaatgaagtcaagttgtacgctggagtctgtataattattacattttggtaatgtaatatgatggtgtatgctggcatgttatatttttcccaaatgtttctttgcctc

SEQ ID NO: 110712 - DNA, 340 bp, Zea Mays
ggaagttgactggttcattacgaagattatcttggttgaaaccctcgtaattttggtccctatagttgttctcgtcctgcgcttcaatgctgtgcatttctttagttgcttcgtcaatcttttctgaagctcagaaagacaaagcaccttctccattcgcttctccaattgttagttagttgcttcgagattgttgatctcttggtcaacctcttggtcttgtggttctgggctgatagccttcctcttttggtttcttgcctccctgaggagagcttcatccccttagtttgtgtccaaggttctgaggatggagccagttgttattgccttcttcggt

SEQ ID NO: 110713 - DNA, 475 bp, Zea Mays
ttcaagttatgaatttcctaaggtttaatgtgattaaaataggattaaatgttaaataaattttctaacagagttcatgtcaaaacagagacactaaatggtaaagaatattattacaaaattttagaaattggaatggttcaatttggagttaaaatgaattagatatgaattttccaagttctagcaattgtttttgcattaaaaatacatttactaattaatttattcattttaaacaggttctggactgggcatcaattctcagaaagtccaggggcctcgggtgcaagatcatcgagacacagagaatagtaccactggacggcgggtttattttgcgaaaacagggggtttctttaacaaaaatccctggccgaaggggtatgtttcgaccagagccgcacgatcctacctctacggctaggattagatcttcgctattataaaccagtgcacggttcatagccctcgg

SEQ ID NO: 110714 - DNA, 1171 bp, Zea Mays
gtagagtccgtgcacccgggtcccactcccctgaggccgtccgtggctccgtgcaagatggggattgcgcaagggtgcgaggtcaccatccccgcgcctggtcatcagtgtgagttgagattctgcgtctcctcgctcgatttacttgcagccacatgcttgcgagttgcggtacccagcttagctttttcgagtccttgctaatcttggtggggacgacggagacctgatgctatgcttccttccctccctgtgctgttgagttccgcttccacagctcgtgtatggccgacacggtaatcgctgcgaaacgaggtcatgcgcgtcttccttgtgctttcggatgcaccgaggcttgccatccaaaattcgctgcaatgcttagctagatcgaaggcctacttacgctcagaggtgtcagcttggggatccccatcttttatctcttgtcgtggttaaaacagcggcctgatatgtcaggtgtttgttccgcaaaagggttggacttcccacgttttgggatgagagtttgttcggaatagcatgctcaaagtcatggaatttggtcgcagggagtgatcaagtaggtactaggacagtcctctccctttggtggtgctgttgattccttgcaagacctgtacctctgtgctcagataatccagcatgtgctgcattcagatgggagattgaatgaaagtgtgtaataccagtagcttcctcaaatactgcagattgaatgcacgacaggaacattccaactttgttgtcggtatccattcttcatgaagacgtcagtatagccggctccactgaattcttcaaatggaataccttgttaattatctgcaaaattttgtaaccaataatggagcacttggaggctcatagaagctacatttactagctggatttttaaattggtttctctttggagaagtaggtgcaatcttttttgtaagcatagtcaaatttttaccctttcagaaagttcttgtgccgaaagcttgtggaatgtggtactgaggaccacttaattcaaaactaaagtggctaggtgatcatatttcaaggcctaaatatttagaatgcctcccctaatcaagacttttttccccttgtcaatctacatcagttgcactgtttcatagctggaaggttggtaatccag

SEQ ID NO: 110715 - DNA, 457 bp, Zea Mays
tgccccctacatcctagacatctatcctatcgatcctcaatcgtgtctacaacatgatccgctccaacatgaccttgcgtctgtcggtgtcccctgatgtcagccaccatggctagtcacctggcttcttgagtcccttagtcaagacccattgctcagccttcatctctctcagtccattgacataaacccgcatgtccttcaccttcgtcgtcgaccaccatctccaaacttcacacttgtgcaccacaagccaagagatatgttgcatacacacactcacgctccatttagtccacatgactcccaagacgctactccattgacaatcacttatcacaaatccaaaccataaaggcacatatcgtccttgtgttcacaatattatccccgatttgcgagttcgagtataggacatgtatccccatctccatttccccatggggaccccttaaag

SEQ ID NO: 110716 - DNA, 604 bp, Zea Mays
ttgattgataactcttagaactacgtgctccacttaataattctgcatgggaataggagaggacatcatgcatgtgttgtgcaccaaatgcttgtcaccctactgtatcgacccgagacgaggcatgacatgtacacatgtacctagtgaaactgttgtgtatcgtcgtttctcttcaagcaccatttttccacgttcgtcccgcggaatatttttacaaataactcatattgcttgaaatggcccccaagacaaattctcttcacatcgatcacatctaatccaattcgtttatcaacactctgcacgtcgtgtgagcgtcacagtcacccacacaataacacaaacccacgcacgccatgtcttttgttcatagcaacgaccgacatggcaagtgtgcccacgccaaatgcaccgtgacaagagcccgacaacccatgcacgccgctccgtagaggatgaggaaagcgattttagcagactcacacacgggtaacccatgcccgcgccaagttgcgaggtggagccgttatactcatcctaatcctcccagcaacctaactataaaaagtcgtaccaagacccctcaagcgatagcggtggt

SEQ ID NO: 110717 - DNA, 282 bp, Zea Mays
gcttctttttccatttccttttcggtttccaaggatttcttcttggcgggctctgaaggcccagcttcgatctcggcctggctctttccagcttcggcctcggcgagttttgtctcagtttgtgtttttgaagcttcggcagttttccctggagtagagcttgaagtctttattgtctccagcacatctaatacgttgaccatccttttcctcttaggggtaactgtaagatctttttgtgccttcggcactgtcacttctacctaagggcttataacttct

SEQ ID NO: 110718 - DNA, 415 bp, Zea Mays
aaccatggtcctaaaggtgacctcgatcccaagggtgaagggaccacatgaaatgactagagccatcaaaaatgaatcacaacacgccaagggaaacgtactattagggaccaacacaaccctaagatctaactagtttgccaagtatgtgcttgcaggttcataagtgtcaattgaggaattcaactcaatacttagctcaaacaaaggctagaaagacaaatcttggagaagataaactatgagtggttcaaataatgtttggataagttctaaatgcccttaggaatgtttttgagcacattagagagtttggaaagtgcattttggtactaagtttgagctagataggactttaagttggaaatctggaaaaaagactaaaactatgacttagacctgatggacaccctct

SEQ ID NO: 110719 - DNA, 531 bp, Zea Mays
tcggaaagcccgacccactctgatgaattctatcgtgactaaatttatctgaactcgatgactaagttttcagtgtaacataatttaacccccttttgtcatccgtgacatcgcgtctatggattttaattgaattgttctctagtcgagtgttcgagtagcgaacggaattcgtctaaattcaactaaatcaaacatcgactaaaatatcgaatccaatctcgtctagtttaatctgtctacatctcgctcctgtgacgatgctaacatcgtctccgggaattctgattgcgatgccgcattcggctcgcacagtttaagatttatttatttctaaagtgtcgagccttatgacaatttaaaattaatcgattaagacaaactaaaattttcacttaagtatttcgtcaattcgagctatctatataaattcggtaaatgcgctatttggggcaggctgttcaaataaaccgaaactggaaccattactggccaattccgtttcctgtttcaaaattcgagaaaaataat

SEQ ID NO: 110720 - DNA, 296 bp, Zea Mays
aggacatgcagcttcaaaatcaagtgggtgccatctgttcagatcaacgctgcctgcctcgatcggtagtacctgagtgcgcaaataccggatttatttggtaatacatctctaaggactgatgttgttgtagtgtggctgcattagatattcattttcattcactcggcaggtttccctcatcagcttgctctctgctttttcactgctgtaaatcaagcactgaagctttttccccgtgcctgtcagtttattctctgtgagcaggagtttgcctacggcctacctgaattgtc

SEQ ID NO: 110721 - DNA, 343 bp, Zea Mays
ttaatattctaattttgtttaggaactttggaacagaagccagaggaaaccaagatagacagagtggttgaaagacacataactggtatggagccgaaagtgcaagaacaaccgaaggtggcatcttccccagcgggaactccacaaaaaggaaaaaggatggctaatgttctgaggcctgcaaagatagcgtcgcttgtagtgccgaaaatttctgaagatatctgctggagaaagaagctttgccaacagctgaagcaacgccttttgaagatcttgagtacattattcgacatgcttcgaggaaacatttactaaagagcaaattgttgaagttcagcat

SEQ ID NO: 110722 - DNA, 447 bp, Zea Mays
cggaggcttctccacgtgttacggatgctgaaattttgcctggtccgagtgttgggcgtaggcggcgaagggcggtggcgaagcgtagagtgagcgggtttgatggtggtcggcttcgtgtgggcagggctggtaggcaggaattgttgtcctcgccggttggggcgagtgtgggtgagggggagttgcgaaggctttctgagggtgaggagctgaggataatgctatttaactatagggagatggggatcattccgaaggttgaaccaatgtaaggtgtgatgccctcgctgtacgcgtgtaactatagtttttatgataaggttgactgccttcgcgcacctgggtgtgttcgtaaggtgtttgcgcgcccggtctggtacattgttgtgtcggtccggctgcgcctgtagactttcggactgatgtaatgcgccttcgattttt

SEQ ID NO: 110723 - DNA, 425 bp, Zea Mays
cttgtgagagggagtgaggccctcggtgtttcaaccaaagctcaccatagtgtatcggtgggggagcgttcgaaagaggtccgcgggagtccccacatgcgagtggggagagccgggaatatcaagggagttaccccaccaagaaagcttggcccttgcgtgggcataattgcgaggaggaactccaacaacgaggacttgggggtttgggcttaaccgcctacccgataccttagtaaaaatcatccgcgtcatcttcaccattgtggtcaggagtttgtacttctactgagctcttacattccacatttacattccacattacattccacattaagtacttacaattgtgtgcttacattcctagcttagcaaacggctagatcataggattggatcctaggttgcaagtctttttatagtag

SEQ ID NO: 110724 - DNA, 315 bp, Zea Mays
ccccgggaaaatcagggcaaagcaggaaaaggcgcaacctccagcgccccggaaaaagatcaccttcagtaaactaggagtccagggctcgtcaacccggagaacgccgttgtccacctctccgacgggagaatggacacggatcacgaggaagaaagaaacgaatgagatcgaaaggtggcaagctggcctttctgcaccttcgtcctcaaaggagggcagaaagagggtcgccacgacaactgttccattctaccctgacgtcctcttcattggaagggcagagtcgccctccatctccaacgacgagtcgac

SEQ ID NO: 110725 - DNA, 532 bp, Zea Mays
agcgcgtggacgaggagcggcgccagggtgcagatggagagcaagaatatggaagggagcacaaagtagcccaagaggaggaggaacactggaaggagactcgtgcccacgacggtcgggcataggagggcggagatgcagtggtacatgacgccgatctagtgtgcacgggataggaggagcgcacgtgacgccaacggcagccaaaaagtgccaaaccctagagggaggaccgacgccaggtcgaagggggctggagtcgtgctctggtcccacaaagacgtgacatgtttcagtcccacccggctgcgatgcatgttaatgttcgacaacatattagattaaaaagagtataaagacttttatgtaaaaaagacgatggtggaaaccgggacaactagtgctttataatagtagagatagagatagagaaatattggaatatctctatatagggctgggccaagttagtcttgaggttggaggttgcggtaggggttaaatttagggttgggctgatagtttaaaagta

SEQ ID NO: 110726 - DNA, 489 bp, Zea Mays
cgccagtccaagttgtgttcgggatgagtggatagcgctcggggtcccggaaatatcaccgtcgtggataagtccggccggtaaaactaatccgaccaccgtactagcttgtcgcggtggaacccgataggctcgccggtgaaccgccgtcgcacggccttgcaccacgtatccgagtacctccaccgcatcgccatgattcgttttagcttccggtcgatcacctgagtagtcgccacgacggttgacacgagttcacttgcaccagtaacctttcccctctctggccgccacagcgccatcctcaattcaagcgccactgtccctggaagctataaatcgagcccgccgttagctccgcaacctcattacacatcacaccgtccagtatcgcccccaagcttgcaaccgtgagctccaatttcaagtttccccaattctgttctgaaacaccgcagggtcgagctcaccgcggccagcccctttccg

SEQ ID NO: 110727 - DNA, 739 bp, Zea Mays
ggagtatggccgggtccaggaacacctggagatcatcctcgctgctggcagcgagcggcggatgggtgtttgcaggagccgtcgaggaggtgaggtcctgcatcagaaaatcaagtgatgacgacatggaggccgccgatggtgcagccgagaatgggaacacagactcatcaaagataacatggcgcgagataatgatgcggcgagtggacatgtcaaggcagcgatagcccttgtgagaggatgggtatatcaggatcaatcggagcctgattagcaattgattgtaatcccctagattggctagctgccttgtatagactaggattaccttctatctatagcctaggtatgtttccttgtacagggaatagccttccttacatgtacctcccatgcatgcctattggctatatataacaggctccccaccctcaatgggtgtgtggtgattcaatccattcttcccctttctacatggtatcagctctctagatcctgcgcccatctccctgctgtgcgcagcgccaactcctccctgctgtgcgcagcgccaactcctcccccctggtcaccatgaccgacgccaccactcctgcccccgctgtgattgtcgccccctatgcgacgatcaatgtcaagaaccacatcccggtgactcttgaactggcaaaacccaacttcaaccagtgggaaccattcttcacctccctctgtggaaaattcgctctcctctcgc

SEQ ID NO: 110728 - DNA, 512 bp, Zea Mays
ccagaatcgaagcaagagcagggtccatagccggaggggcagcaggggcagcactagaactcctagcctcatgatcatgtgagcgtggaggcataggaggcagaggaggaaccccaaaatcatcatcatcatcatcatcagctgctgtatcctgagtgtcgaactgatgaagagctgcatcctcggcctgagagtcaaaaacaggagcagaagctggcacaggagtctcaggcgcaggacggtaggatccaaaaacgaggcgtgaggcctcaagtgtgccctgaaaccgaggaggctgaatcagctgcgcaaagatgtggcacaagtagtgagcatagggcaactgccgacgagcacgaatcccatccaaaacggtgtcctcgatctcacaaagaaggaagtccacgacgtcgaactcagagtgagagaccagggcaccaaggagccaaagctgaatatgtgtggtagcctccctgtatcccatcctcgacagaagagtccgtctgataagc

SEQ ID NO: 110729 - DNA, 395 bp, Zea Mays
tagggattggggatgtccaaaggtcacagtggacgagatcgaagggacgagtagtgcgagacatgtaagaagggaagggtatgcgagtgtgatggccaagctaacaagcatggtaaagtgaggcattagtgccgcggggcaggtgatgtccgaggtgcccgagagtctatagaggacgtcgtgactagggtggccaagacgatgatgcctagtggaggtggaagcgatagtagtgagggcatagggtgcaggaacatgggataagggagatggagtaggaaagcgaataagatataaggggtcggagctgtcgcatcaggtgaccacaacttgagtgctaagctcctgtatggtgagctcctatgatacaaactccatagaacattggttgtcag

SEQ ID NO: 110730 - DNA, 775 bp, Zea Mays
caacggaaaacatttcaagaatcaagacttccgtgaattttgcgcttctattggtacacgcgttgtcttcgcattagtatacaaccaataatccaacggagtcatggagcacacaaatggcaagatcttcacaacaatcaaaaagaggttactagaagacaaaaaaggcaagtggacagagtagctacccgaagcagtatgggcgctgaacacaacggagtcccacaccacaaggttcacgccattcaagctgatgtacggaattgaagcaacaaccccacatgagctcaagcatggctcgccccggaccaacccccaggccaccccagacatcgacgagctaacaacaaaagatttcctcgacggagacagggttgaggcccttgacgcactaaacaaatatcaaacaacaacaaaaaactagagggacaaagccatcatccccaaggagcatgaagaaggagacctcgtcctcatctggatagcaagaacagaatctagatgcaaacttgaaccaaagtgggaaggacccttcatcgtcaagaataaaacatctccgcactcatacagactcccaagtcaagacgacacagacctcaaacactgttgggatgtagacaatatgagaaaatactatttatagggcgacacgctgttagggccttcgtgcccttgtaaagacacacttctcggttgggcacacactcttttcctcgtagggggcgaggtttttaatgaggcgacgtggtgtaataacaaaaaataggaaattccc

SEQ ID NO: 110731 - DNA, 584 bp, Zea Mays
gccgctttggatctcccctcaccggagttagacaccttgcagccttgcgccacgtgccttggcactttaaccacaccgtcgtgactcatgttagcccatccagtgatcgccggtgaggttgccacggtaatggccaccaatcgtgtgcgccagtgcaccccccctcctctccaaccgccaccgcatgagttcaaattcaccggccaccgcttaagagccctataaattgagcacaacctcggctctgttaggtattccagcatccaatccactgctcgtgcctccaattactcaccagagcccacgaattgctcagtttcccaaatctgttttccatcaccgtgaacaagctctcattgtggtcagtgcaattcaggtccggtcttgccctctactctcttgtttcagcactcctacataccactgatgctcctcgacccattcaattaggctagactgccctagatcaccgggaacacccgtgctcatccgctgtttgcactgcctccgtggacaaagtcatttagagctcgaactgtgaaattgatcgaggggaaatgctcgttaggtgttgaattagggtt

SEQ ID NO: 110732 - DNA, 573 bp, Zea Mays
cgcataaataagagatacgtgtattttgtgtagtgtggattgattttgagtgcatggtcgcaagaaacgaattagtgcgcatatagacgaggaatgagtgggatgaaatggtgacatgccttcgtagtcatcatgtcgtgtgttcgtgacctaactgaaggtcgtagagaaaggtcgattacatgtgtgttattattgtcaccttgtggttctgtatgaattgcaaggtgaagtagtaggctctctgtgtgatgctagatgtctaggtagacgttcgtgaattgtggtgctcggaccgtcgagatgaaggttaagtcggtcgatgcctattaagtagttaaaatgattaatggaataatcttggggttaaaactagaaactagtgttctcgcacccgtttgggatgttgtagcccaattgcgcatggttatgatcgcgggtaaaatctgtagtgctcatgtggtgtctaaactaaaatgcaaactagtgggtgaaaagcgctttgatatacatgtatgccgaaattgatgattgtggtgaatgcgttgattaaatgtgtatgttagttctagc

SEQ ID NO: 110733 - DNA, 495 bp, Zea Mays
ctctccgtgcaaaagtcgcctaagggtgcagccggaatagcacaacaagtgcgcaaaatcgaagtctttttcaaaaaaccctccgtgctaaagtcgcctaagggtgcagccagaattatagatgcgcacaatcgaagtcgttcctaaaagactcttcgtgcagaagtcgcctatgggcgcgactgtatcaacgaaggcgcagccttatcatataaattatggttacatacacacagcgagggcatcacatattacattggctcaaccttcggaatgatacccatctccctgtagttgaacaacattatcttcaattcctcaccctcaaaaagatttcgcagctcctcttcacccacactagccccagccggcgaggacaacaattcccatttaccagtcccgtccacgcgaagacgaccactctccacctcaccacaatgacgcctgccacttcgcgacaattcactcactctccgtttcgccaccgcccttcgc

SEQ ID NO: 110734 - DNA, 297 bp, Zea Mays
gctagggagtctatgccttactcataggcgtctatgttgacgacttgggtgatcatcgacaccaaggaagaagagttggaggcgttcaaggctaaaatgcaggctgaaggccgctttacatgggaatcgaggtacaccaagacacctccgccatctcactccatcagatcgcctacgccaaatgcatcatcgagttgggtgggcacaccgactgcaacccgaactacatcgaggtccacgcaggctctctggctagtggtgatctccttggcaggcactgaagcagtagagctcagg

SEQ ID NO: 110735 - DNA, 857 bp, Zea Mays
gtcagaatccctctatccacgatgacggcgaaaactgagaacaattcgacatgttcttggtgatccagggcagtctaattcaattaaacgggtctacgagtagcaggggacttaagggcgtctagaacatcaagtaaagaagctcgaactgacctgcagagggctggccacggcgaggtgtgcacgatggcgcggaaacccaatttgggggaagtttggaattcgcgagctaaagtggctaattgaaggcgagggctggtgcactggacgcgtaacaacctaacggagctcactggggcattgatttatagggtccatcagcggtggcgcccaattactggttagcctccatggctcaaagcgacgtggtaaaacagaccaaggcatggcacgaccgaatgaacggtggcagccatggcgatgaccgtgcggccacgtcgtcgggcaagtgggcacggcgatagggtgaaacagtgccccaagttcatctcatgtgcgatatttcttaccctgtgtagttatctgcactccaccgggcatgaatcatagcgccggcgaggatcgtggcgcgggatcaccgatggcaggatacactgcacctgatcatattcagtcattgtaccatcgaaccgttcatcagagcgcgtgatagagcaacttcagagatgtttttcataaattttcatgtggcaactccctaatccgtctttaacaaagttaatctccaatataccagctccaattctaccataggaacttgggtcatttactcactcgattaggcttaaatcaacttcaaagtctgccagaactcactgttagtccatattcagtctcaggactgactgacaaccaaa

SEQ ID NO: 110736 - DNA, 422 bp, Zea Mays
ttctatgtgactacacaagacacaagagaaatggtaattgaagatatttgcacttaaagaaataagtgttaccatctttggctttcctccatgttgtaggttttggtttttccacacaggataatcctttaattcctacaacttcaatatcctgctcgagatgatatgagtagatataataactcaaaataactttgggtcaatcttagagatatagatcattgtaagattgatagcttgagttaatatgaattgaattgatcctctcaagcacatccaaagcttcatatcatctccttcccctgcaaggcttgtcaagcatatttaggtccccatctcttgatgggtccatcaaggttagtattcaaagatctaggaacccaaatgtcctttgtgctagcacttggtaaactcattacctc

SEQ ID NO: 110737 - DNA, 370 bp, Zea Mays
atgaacttgattctagaatttagcacagtgccatgctcgtcctcagttatcaccacatacatgccagtcttattagggtcagaaggctacatttgagctttgacgcacctatgacttcttgacctggcttcgtgacaagtttgagactcttcgttcccagttgcttgcttagttgcttgtcactcttgtgtctctcttatggatgctctcgctagtgtctgtaatgaggagactcgtcttcgtacagctggcttactaccgtcctcttcagttttggttgctcgttcttcgacatctcgacagattgctgctccaccgacagtgccttattcagttccatcttcctcatagggacaacgtggtggtcttc

SEQ ID NO: 110738 - DNA, 394 bp, Zea Mays
caaagataaagattatggtggaaggaaaaagaaaaagagagcccggatggttttttttaagaaagggttagctcaaaattttaattcctctttgggttttataatgcatgcatgctggaagaaacgttgcctctcaaaaagaaaatagggtgctttttagggcatccttaaaatataagtattggcccacggggcctaattagttagccacctatttctccctctatgcctaaggcctttcgtcctaggtctagcggtctagtcctgacgatccatagcagtttctaggcaagttttagattttgaaatttggtgttcatggtttattgtccttctctgtggtggaatttgctctgataccagctgtggcagaaccacccgaattattccagct

SEQ ID NO: 110739 - DNA, 419 bp, Zea Mays
ttatgactggcatgcagtacaaaaggaaacagcaggccaaggggcatgcggcaggacaaggggatcaaggctgggacaaccagcagtaattcagtaatcctaggatctatttccttttgagagtttccttttatttacagataaacttccttttattcagagagattagtttccttttattaagagataagttcccttctattgagagagaggctagtataaataggagatgtaagacaggaggaaagatcatcaaagaaattacctagccgtcttccctgtggaagtcggaacctgagctagcctgttttcccacgccgtgaacacggcatcccggcgtccctctcgcccagtcccccgccaacctccagcagtacaccagtacagcttgagggaggtccctggtaggaataggaatc

SEQ ID NO: 110740 - DNA, 325 bp, Zea Mays
ggaatttgaggaaggagattatgtgtacctcaaggtgtcaccacttcgtggaatgaggagattcaaagtcaagggcaaattgtcccctctctatattggaccattcttgatctttagtcgagttggggagatggcataccaactcgagctacctgctagtctatcgaatgtgcacaatgtgttccacgtatctcaactgaagaagtgcctccatgtccctgaagaacaattaccaatggaagagcttagtgttcagggtgatttgacttacatggagtatcctatcaagattcttgatactttgactagagttacaagaaataag

SEQ ID NO: 110741 - DNA, 486 bp, Zea Mays
gagactatgaggatgctagaacacaaactagagggggctaaacataccggaggggctctagccacggcgaagcttctcatggcggcgatggtgaccaactccagggaaacccgaagcgtacgagctatggtggatgagaggggctgtctgagggtgggttggacgcgtaacagagaggtggagcaaggggaacactctatctaaaggagctgattgcttgcttcgcgaatttgggatgagagtgcctacgacagtgatgagatattctcactgggctcgttcaccgtggcgcgcatgtagctcaatgatttgggtacttgtttcaccgtctgccacgctcgctatgacagggtgaagcaaagctacgcgtggcacatcatgggcgaccaacggatcaggatggtggtaattccaccacgacaccgggcaagtgggcattgcgggtcgaccgactccgtgcccaagttctcccctcgccgatctttt

SEQ ID NO: 110742 - DNA, 1277 bp, Zea Mays
ctggggtgttataccaaagtgatagagcttggtttggagagtaattttagttaagtaagtctggtctattgttaaggggaattgtaaaatccaagggcataaacagtgaggaggggaatgggggcagcagacctgatttagttgaattcagagtttcagttggtaaatgaagaagacccttttccccgctggtgttacttgaatatgtggatggagataagagtaaaatgtgtggccaagggagatgcctcttcccactgaaatatataagttttggactgtctgggagcagtgggtccttatctgctctcctctatgtctgaatttctgggcacagtggatatttgtgctgagcctgtaaacgagctcaagttcagtgatctttagtgcttccctcgactgaacagctggagccatgggtgaagtgttggaccaaggtctagaagcctcacctccctgtggaaaatatccactctaaaccattgaacctatccacaagtggaggacatatccattatgtttactagctgcagaaatggacaaactgatatttgagctggtcatggaatggtgaggtgtttatgcttgggaaccacgtgtattagctcctgcggtgctggcgccctggggtttcatctccactgagttttggacaaatatcagacaaagatcaaggatagttacctacgtatgcagtgcctcaagtgctaggttcagtggagctgttctcctgccctcgacctctagctagtgtccactacatgggagaggtagctctggtgttcagtcggtgtaaacctttcctagccaccaagtttgttgtactccaaagctgagcgccaacctccttccaatggtgataacgctcatgtttctctctgtctcctcgtggtcaagcatactcggtatgaccccgcatctctagctttgtgttctggtgtcttccactaatggtgaagctcaccgtgtcagttgtttattctctactgttttggtttgtgcagaacatggcctcaacgtcgcagaacgccgccgggaaccacctaatcatcgatcgctcgattcacgacttctccgatcaaaatttatgtgagcaccgtgtccttagtgctcccctggtgttttccaagtcctttgttagaacgctaccatcacggtttctcggttgtgggttcgctagatctagagcatcgtcgtggtcgcaggcaagataaatctgcggtagtagtgatctgggttattgaatgaatcaaactgctttgctttggggttggtgc

SEQ ID NO: 110743 - DNA, 1250 bp, Zea Mays
cacggttgcgcatggcgtaggcgaggacgacggggccgcgtgtggcgtaggcagaggtgatgcggtcgtgtggggcgcaggcgacatggccatgtgtggcgtgaaagagggcaacagatgaggaacattgacacaatcgacatcaaggtcgggaggtgaggagctagcaatgtggaaaacgtcctcatcaaagacaacatgacgagagatgatgatgcggcaggtgagaagatcatggcactggtaccccttgtgattaggggagtacccgaggaaaagacaacaagaggaccggggtgaaagtttgtgatgattggtgacagaggtgttgggatcgcaggcacaatcaaagatacgaaggtgctcataggagggggtggtgctgaagagggtgaagaacggagtgggatggggttgtgttgaagtggtaggtggttgtgttgagcgcctcaacccaataacggaccagaagataagcctaggataaaaggcaacacaacatgttagtggtggtacgaatcatgcgctcgactcgaccattctgtggggagttgtgagggcattgacatccgcagctgcacgtcgtgggagagaaagaaagtgcgagacatggagttatcaaactcacgtccattatcgcaccgaacagcccggatgatgtgaccaaactgagtcgacacccacacaaagaggtgagaaatactggtgaaggtgtcagacttgcggcggaggggaaaggtccacatgtagtgagaaaaatcatccaggatgaccaaatagtactggtaaacggagatgcttggaatatggggtgtccaaatgtcacagtggatgaggtcaaagggatgagtagctcgggacatggaagaagagaagggtaagctagtatgacacccaagctgacaggcatggcaaagcaaggtggcggtgtcgcgggggcaagggatggttgaagtgccgagagtcgagggaggacgtcgtggccagggtggccaagacgacgatgccaagtggaggcagaggcagtggaggccatggcatacggtgtgacaatatgggcggaggaaggtgggtggggacgcgaatgggatatagggggggcagagctatcacatcgagcaaccacaacatgagtggtaagatcccgtatggtgagcccctagatattgaactccatagaacagtggttgtcagtgaagcgacggactaagagaaggttctggatgatgttgggggtaacaaggatgttg

SEQ ID NO: 110744 - DNA, 300 bp, Zea Mays
caaccaaaaacaagagaaggagcagatgtgctcatgataacagagttccctcccccaagcttggatcaagcatatggacgtgcaaaccttgatagatgtggaactgatgggcatgcttgttgatggtatctgccaactcttgagtttctaagagaatgttgcggtcgtggtacacctgacgctacatatcaactattcgttggttgatctctttcatcatggagttgaggcatgtcatgatatgaatattggatatgtggcatgcagatgtagatggtcctgcaactgtataattagagt

SEQ ID NO: 110745 - DNA, 281 bp, Zea Mays
taagtttggtacttcttcctttgtagaatataatcattaaaaatagttatagctactgtttcagctatggtatgagtatacttatctatgagcaccaagatgtacagcacaatgctgtacagatttgcttcaaaaataacttcaaccatttaaatatcttatccactatcccatttggttcaatgcttaaaacttagaacaagaggtgtatatgtgttgtgatgaactttgaaccatctttatgtgggaaaaaaggcgtttacagtgagctttccgaagtt

SEQ ID NO: 110746 - DNA, 1947 bp, Zea Mays
gaatttcccgaaccttttcagaagtctgctgaacccaatcaggaccaaccagggatctctctcccaaggtctcccagcacagaggggagatacaccgcctgccaaacaaagcctcaaatggtgccatcttgatgctagcctggtagctgttgttataagcaaactctgccaatgcaagatgatcttcccagctacccttccaagatagaacacaagcacacaacatatcttccaaggtttggatcgttcgctccgactgaccatcagtctgaggatgaaaagcgacactaagagaaagcttggtgcccaatgcactgtaaagactctcccagaatttggatacaaatttggagtctcgatcagaaataatggacttaggtacctcgtgaagcctgattacttccttcatatacaaggggaccaattctgaagctgaattggtggtcttcatgggaataaagtgcaaagacttagtcaagcgatccactaccacccaaatagcatccctgccccgaggagaacgaggtaagcccaccacaaaatccatggtgatatgctcccacttccactctggaatctccaatggcttcagcaaacctgcaggctcttatgctcggccttcacgcgctgacatacttcacaggcggccacgtacttagaaacgtcaaccttcatccgcttgcaccagaagttttgctttagatctcggtacattttggtttcgccagggtaaacggtgtaaggcgttttatgagcttctctcaatatatccatcttcacctctgatttctaaggcacacaaaggcgacccctgaaacgaaccaaatcattctcatcaatggagaactcacggggtttaccatcgccaaccctctttcgagcttcctgcaataaacgatcctgctgctgagccgcacgcactctctccatgagggaagattgaataagcatatgagtctcgtcactagtggtgccgacatagcacaaagcgatccccaaatggtccagatcagcaatcaactgcaaggccacttttggaaccccggacctactaagggcatcagccaccacatttgccttcctcgggtgataatgaacagacaaatcataatctttaattaattcgagccaccgacgctgcctcaaattcagctctttctgagtgataatatacttgagacatttatgatcggtgtaaatgtcacaagcctcaccataaagataatgcctccacgactttagagcaaaaaccactgcggccaattcgagatcatgagttggataattcccctcatgcttcctcaactgccttgagccataagcaatcactctgccttcctgcatcaacacacagccaagtccaattcgctaagcataagtataaactgtgaaacgcttaccgttctcaggcaaagctaggataggggcgcccaccaacttgctctttaatgactgataactgacctcacaatcgctggaccagacgaagagaacacccttcttcaaaagtctagtcaaaggcttagcaatgctggaaaaatttggtatgaagcgtcgataatatccagcgagccccaagaaacttcgaatttcagagacactagagggtctcttccactccaccacagccgcaacattcttgggatcaaccgcaatgccctgctgattaatcacatgccccagaaaagccacttcggacagccaaaatgcacacttcttcaacttgccatagaactgattctcccttagggcacccagaacgagacggagatgctgctcatgctcagcctcggtcttagaataaatcagaatgtcatccaggaacatgaccacaaagtcgtccaagaactcatgcaacatcctattcattgcttccataaaagcagcaggagcattagttaagccaaaagacatgactatgaactcataatgcccatacctggtgca

SEQ ID NO: 110747 - DNA, 356 bp, Zea Mays
aaggtataaagaggattttgttttgtcgatcaagacaatagaatgtgcgatcaagttcaggatagatagttgtactattaagagggggactccaaaagttgaaatttgttatctaagtgctactaagtgtgaaaatacttgcatatacattggacctagtgacaaggtgagatcacttgaaaaccctttcaaaatgtttatgaaatgctagctcatttgctcacatgttggaacagttgtggagttggcacatttgaaaaaggttgaaaactgagctcacaattagctctggtgcacaatcagattggctagatggtcaccattggagcagcagtaagtgtagtgcttaccctggc

SEQ ID NO: 110748 - DNA, 322 bp, Zea Mays
ttcacacaaggcggctagcgagggcaaatcgagtaatgtggtgtctcgacttgtaatctgggtaaggtggatgggctagcggcggaatcaaataacagcgatggagaagttgaactacgattacgacacaacctaaaccagcaacaagactcgaacacggacacaaattcaacaaagcaatttgaaacgaaattgcaatgctaaacagggttataggacagcggatttttttgtatggcaattatctggagttataggatgaaaaacctaaactaaactagggtaagcctgacggtaatacctgagtctttgaataccactt

SEQ ID NO: 110749 - DNA, 991 bp, Zea Mays
ggtggctctacattttctctggtgtatagatggctctaagaatgaagtagggagaataatgcatatccaacctttgcaaaatttgaagcaagagatccacatgtgatacctttgatgaaagtagagcaaaagatagacgcacgagtgaagtagtttggcaccaaccagccatgggtggcttcacgatctcggtcgatgtagctttgatgctatgtccttcgtctccttctcgttgaagaccagaaacacgtttcaacaccgcatatatcatagtttgatgcggcatatcgagcacctcgtattcggtcgtcatctcaacaacgtccgacctcaagaaagtcatcctgacaacggtttagtggagtgaaaggagagtgagatgagtgaattatgagatgtggtaagagcaatttgaagagtggaagatgttaatgaactttttaaaagacaaaattttaaaatttacaatagtgcgaaccaatcaaaaactgtcacatgacaaacggaggtcggtagcgaccgtgccgcttggttgacagcccaacccactgcccggctctggttttgaagctgatatgacggaatccaccacccgatggaaccaccagggcatggatgagtgtcgactctagttttggatccaacattagcgtcccatatcgtcctcgtcgacgcagaacagatatgatagaatttgtggtgttggtttcgtgtgtaccagaatatgtcttaagtagtggagaataaaaagagaaacaacgtacaaaaactactcaacaacacgcttccgctaggatggaaagaaacataaaaaatccacaaactacagccaactaaaaataaaccgattgaaatgcacaccagtgtgactctcaaaacaaacaacgggtccatagtaggcaaaagcaactaagaaccaaatcgactaaggccctgtttagaagcaatccagattttaaaaatcagttcctatttcgtttctagaaactgt

SEQ ID NO: 110750 - DNA, 437 bp, Zea Mays
gtaatgtagtgttggatcgagggggcaattggtcgactcataatgagtcggtcttccttttgtaatgatccctgacttatggatggaagaatgaagcatgtttcatgccattcctctattgtgtattctgttcttttgtctgacggtctgatcccaggtaaccttattgttgaatcttaggtttctagaggtactgaccgagtcccattactctattgcgaccaaaactctcccgagacactggcttgttcttctgtgcccgactcagtgtgccaacctgtacatttgtcgacgtcctcttggctcctgaaccctaattcctgtttttctatgcgctttccagctttctgagttcccacatcttttcacgttttgttcttgaaccacgctgtttgaaaaatcgtgatggtacccaggaagagaaaacagagtgctgc

SEQ ID NO: 110751 - DNA, 319 bp, Zea Mays
caacctctgaaggatagagtctatcatgcttacttgtacaccagggtcaaagatgctacccgagttacaaacagacggattcccaatgaggacctgctaagccgacttgatctgatgttaaggggtagggtttcgaatgttggcacccccttatcttactttgcctggaacctgcctccgaagagtcccttctccaattttgtttccaatcctcctgttcgagatggcagcccgggccatagagtgcgaccctcttcagaggacattgaggccttaattgctcccctccaaaatcttctcgaggctgagaaacaggctt

SEQ ID NO: 110752 - DNA, 545 bp, Zea Mays
catttttgtagtggtgtcctagtggttacaagtccactgaatttttcttaacaattttgaaattgttttcataattctaataattgtctttctagtttgattagtgcctaataaaatattttaccttgaattttctctggactagggttccctttatttttcctaggttctctattacattagtggactaggaaaaatatttgcattcactgttcattattttccagtgcctttctcattttcaaaagttttgggcaaatatggcttttaataagtaatcttgtctaaatctttaatactgggggtgcttactatttttaaacagtgcctaagtggggtttacacttctacaaattttcttaagttcagcacagaagcataactaattttctttatttaataaggtttggtcagtttccttaattaattcccaactctaaaatttaaaacagaaagcacagggttcactatttttatatgacagttcataatattttgagtccactaaatctagtttgactagatttggctaaatatttctcaag

SEQ ID NO: 110753 - DNA, 520 bp, Zea Mays
cattttctgggaaagacaggggctaacccgcaagatcgccaagactcagtgaacagggtccctgggccgcgggttggtttcatgctttcccagggtctctttaagaaaagtgcctggacgaaagggtatcgttcgatatcggccgccagatctaagttttgcggaagggattagatctgacagcgagtaagtcgataggtatccaggatcgctagatcggaatccaacggcagagaagcgctttgccccaaatccgatcctatccgcctgatgcagaccaacggcgcagattgcatgccgtgaaaggggtgagtcatgccctaatcctagctgaccgtggttagatcaatggccaggagcacccacaatcacatcttctagtcctaacagcacataggaagatcgatggcccaggcgagaccacttatacccgacccaagcagcagcggcgcgccaactccggcacagcgggaccatttctgcccatccgagaccctcggttctagcgccccaaacacaa

SEQ ID NO: 110754 - DNA, 419 bp, Zea Mays
ataactgaattatagaaatcaacatgaaggagagtccagaagcgattaccatcaatcctgacatcacgaacacgaaaggtaggattttggaatcgcatatcttgaagaagggcagaccctccgctggcactaaaatcaataacctcttcattggcggaacgatgggcttgtgctttgtgaagcactaatccttggatactgggggcatgagcaggagggagattaacatcatcatcttttcctcccttgtcatcactagtagcttcccatgcctgtggattcgtcgcgggacgagaccgaccggaggggttcctagccgttcgtccgcgagctccatgagacctaaaggcctcaccacctggcatgacattgccagatccgcgcccgcgcttggatctggaccgaggaggagtgtcttc

SEQ ID NO: 110755 - DNA, 691 bp, Zea Mays
ttcaataccaaattgttggaaccagaccgccgccacatggcgcacccgctaggtcgtctgcacacacggcgcacccgcacacacaccccagaccgttgggccacaacacacacgcccgaatacacagcagcgggttttatgtttgttgggttaacactcaccccaaaaagctagtccattagacggttgcaccctcaaccatataaagaatgcttgcccccacccacaactcacaatgtggtactattgttggaaccagaccgtcgacacacaatgtgcccgcccggtcacccgcacacacggcgcacccacacacacactgcaggtcgtcgggccgcgacaaacgcactcgaacgtatagtagcagttttaggtctgttgggccaactctccccaaaaaagctagcccattaagggttgcaccctcaaccatataaatcttgttttcccacctacaactcacaatatgggactattcccaacataatgtagtttgcctctctctttatttgaaggcacacattctgagataagttccttccaaaagtattcatgtaaacttgtgaacaacagaacatcatgattttcattttagagaatactaagcagaggacggaacagactaggattcaatcaaaatatttggaagacatgaaaaatatcaaggttacagggatagaataccagctag

SEQ ID NO: 110756 - DNA, 425 bp, Zea Mays
cgaaaaacaattgaataaaagggggcaagagaaaaacatacgcaatagagcaaggaggtgggtcaggggtggggacatacctcacggcaggaggaggctacgactctttttactacttggcaatcagcaccattgaaattctaaaatctgcactgcaaataaatacggatttctataaatatataatgcacagtaaccaggctatggctctaccaaatgcaagcgctaaattcgtgcaagcaatgatgaaggacagatgtatatggaatgagctgtggtggcacggtatggtacgtctctaacatttaaaaggtatttatggcaaccatatgttgcgactacttgcccttacttgctcaaaaggtaagttaacaaaaacaaacatgcctttctcattcatcagatggacactaccctccttttag

SEQ ID NO: 110757 - DNA, 657 bp, Zea Mays
atagcattatcactactatcaaaatgcatgcattccgttttctactacttttcaaatgctcagatgaagagaaaatatgtaacacacatttataattccaaaaaagaataatcttttccatcaaagtgaggtggcttaccatgatgaatagataataaatgatcatttgagttgtacgtaatgcgggaataatcaaaagagtagttttgtttaaccgtcttttttcttgaaagaagagtcgtcgtccacctcctttggtgaagatgaagaaacatcactgtcgtagtacactataaactttatgcgcttctttttcttgatgtccttcttagtattgccgaacctggagtcgacagtctatgcttcctagccgtcgaggaggatctctttctggtccgtcacttttcccttgccttctgaatcaatctcttcgaacggtaacttaagtcgatcagtcagcaatggcgactactatttcgtgtggttgggggaagtcgccatatattgttgctgtgttcttcccgtggttgtgggggatgcgtggctcgaccttgtggtcgaggcgttcctttgcctggtcgctgaagatagcttcggccgtctctttgtcaaatgcgtggtagctggcgatcaccgtcagtttgatgatggtcttgg

SEQ ID NO: 110758 - DNA, 369 bp, Zea Mays
ctgtaatgctgaaggtatctatactcgggccagccgaagctaagaatgataaatccgaagagccacaggtggaaaaaatagagaaaatgcctgaaattctgagcccaccaactgaggcaaaattgccgaaggtgcaaaaggctcctgccgcaactcctaagaggaggagaatggccagcgtgctggacgctgtcttggagaccacgaaggccttgagccctggacctactaagaaaaatgctgaagctgccaaagtccaagacgaggccgaagctgggccttcagcgcccattgaggcgaaggctgtcgtgcctgaagacaaagctgatcagcaaacttcggataccagcatggaaaaaagcaaaatcc

SEQ ID NO: 110759 - DNA, 637 bp, Zea Mays
atcgtgtcatcgacacagtcgcggaccggcaggacacatgtataagacgtggtgacgcgtttgagcatgctactcgcggtggtttcgatggttgaggctcaaaaccactcagcgtgatagttcgtgggtttcactggatttaatcctccaaatccggcagtgtggttctagagggaaccagaggcgacatgtggcatcatcataaagggtacgtcaagctgaagcaactttgtgaagagggtgtggccgtcagatcaacacatcaagagttggcccattttgacgttggttgagtggatatgcactatgtatctaggggtagtttaggaaagaggagtaactctatacataggaggggaggactgaaccgtttagccatctcttttaacatttcattacccctttagcttataatcttcatttccctttatattttgttaggagatcccttagatgctttgaaccatgatatctaagttcatgcgatcttgaggaaatgtggtcgtaaccacacgttttccctctgggtttttttcaatttcatgcaaatctgggttttgttttttagttatttcttctcctctctatccatctagttttggttttcgaattcacctttgccttcacaagtttgggg

SEQ ID NO: 110760 - DNA, 385 bp, Zea Mays
ttgttggaataagtctcatggtttgtgggaaggacaacaacagtcttttggtctttgctacaggacagcagtcctgcagtctgttggtccttgctacaggacaacagtcctttggtctttgttgaagttggtctttactacaggacaacagtcctttggtctttgctgcagtatggacagcagcagtccttgctgcagtgtggtgtggacagtccttttggtctttgctgcagtatggacagcagcagtccttgctgcagtgtggtgcgggcggttagcatctgcttttgtaaagcagtccttgatgcagtgtggtgtggacagcagttagcatctgcttttgtaaaggtggaggacagcatctagtgtagccatagtgtaggac

SEQ ID NO: 110761 - DNA, 469 bp, Zea Mays
ctgggaggcaatactggaaatcatctttgtctgtaccattaaacactaaggcccctttcggatacttcagttctcgggcatagtgtttagcttcaaaaatttcgtcttcggataatctctttcccgaagcatgtcaaatgatataatcaagatctttagaaagtgcctcaggggcaagggattcggcctctctggccgcactcttctcaaaagctatattagtatctggagttatttctttggccttctgctcggtggcggcaagcttcctcttagtgggcaccgtgggctttgcctcagcttcagcctgggtttttgtagtctcgacttctatttgcttagtatcagctttgggttgcgttttgtcagcttcggcaaccttccctatgggcgcgtgacttatggaatcggttgtttccaaaacatctaatacatttaccatcctcctcctctaggagttatggcagaa

SEQ ID NO: 110762 - DNA, 1038 bp, Zea Mays
tttttttccaaaagaacagaacgaccacactcacagtagcttttagtagagaatttgagataaaattgatcttcctgttccctgcatttatggttcagttttttcacagcctataatatttcttcgatgtattgttgttctgctatcacaaggaaagttctcagctgatgaaattcttgaacttatactgggtcactccaattttgtatcgacaataacatgcaatgaagtttatgagtatccatatgcttgtaacaccacaggggggatgctacagccagctccaagtattttgaaattagttgatttttctttcatggaagaaaataaggcagaaattgctattgcagaaaagagaagagttgaaaccatcagattactaagggtactgtatgatattaagagcagacaacagaataatagccaattgagtggatgaagaaaattagttttcttgcttttgtctgtttatggtgcaacccttagtgaaacagatttggagttatttcaccttatgaatgagatatagtcacccgtgtgccaaaccattactgaagttgatcatctgtggggagcttctgctctaaaatttagagaagaactgaaactagatttttcaaaatcagatacgcgtaacacagagaatgctgaaattactaaaaggagaagggtgctctttcgggagaacatacctgttgattccaagctctgtgcaaagacatctttgctatattgctataaaagatctacaagggcttctgttttctcactggaacaacttcaatgggataactttgctgatagttttgaggtaatttctggaataatagtgtcaactgaagtttgggtattattctaggttttgtggtttcacaataatgttatttaattgtaccttgttgatctatcttcatctgattctggttggcaggtaacatctcaaaaaatggatgttcaggtttacgatcctttttttatcttgcgattctcaattcatactcttcacatgggttacattgaacctgctcaatttgcccg

SEQ ID NO: 110763 - DNA, 1495 bp, Zea Mays
ctctgtcaggcatctgaactgagcatggccatggtacagtgtttcagggaaagcagatatgggtccgatggccgcggtggaaaaatctcaccgccgacgacctatccgcgccacgattggtgccggagttgagatgttcgggcggcaagcatcttcccccgaagatctttttcctccggataggaccgccgcggtggaaggcactaaccccggctgccacgcggtcattcctccttccggccgtgtccgatcaccggcgccgctctcctctgttcggccacgccatcacggatttgacggtcttccggccatggttgaacgtggcaagctctaggggaatgccgtgttcggtgccatcgccgatcgccagctcgggctggcaatagttatcgccgtgaccgcgattgtgactctccgcggctataaattcaccccgacctcgccctcccttctcaaatcaaccaagccccgaccttcgtctccaaatcgcgaagcagtagcaacccttcctaacctcaactagccgccctggctgaagaattgccaattttccccaaaacagttcgccgcgccacccaaaacagcccgcccgtggccagcttgctctggtaagtcgctgtccgatccttatgttgttctagtgcccttgcattcttgcgaaactcataatgacatccggttgctctaattgaccatggtttggcgggaacgtatgctcccaagctcggtgtccgccgtaacccaccctcaccgtcgacctgctcttcgggtcttgtattgcccaaaccaaagcgtgtccaggatccctggtgaacccaggaacctctccctagcttcaatttatccagcccagccttcggtgatccggaacacataattcgcttgaacacccgcattgacaccgtggccagaacgtgatagaccatccctagcaaaattgattgaggggaaaggtgcggatggagcctaatttggttcctgtcgcttgagaactccagccgtggcgtcatccggtcgatctagctcgtcggagctcggctcctagcttggaccaccgtcgagggcttcatggtgtaaagaattagaagattgaggacctatctgcaaatcgtcagagactcttaagaatagtgactgaacccgttcgcagttagacagaaacgcgagggtctctgcgcaaaatggcctgagcgcgcgggcgcaggcgctcccctgtttcctgtgtggttgggctggttcgggcctgaatcagcccaatactgttgagtattttcctttttctttttcaacagaactttagaaatatgtagaaaactgtagaaaaatggtaaaattgtgaaactaatttttctagactccttattttccctagaatttaataaaaatagttttgtgatttttagagcaaataagaaattttagggcatttaaaatagcttaaagaaatgattctggatttttagaaaatagatgataagtccaaaaatgcccaaac

SEQ ID NO: 110764 - DNA, 478 bp, Zea Mays
ccactgccttggttgaggttaaagaagcaataggcttgtactctatccatttggtgaacttgtcaatggcaaccagcacgtgagtatagcctccctgagctttcttgaagggtccaatcatgtccagccctcagcatgcaaatggccatgttatagggatggtctacagctgttgtgccggtaaatgttgttgctttgacaagaattggcaagcttcacacctctggactaactcggcggcatcactcttcgtcgttggccaatagaaaccagacctgaaaactttcccaaccagagttctggatgctgcgtgtactccgcactgtccggcgtggatttcatccaatagctgcttcccagtagtcgaggaaatgcacttcatgaggactcccgtcgcaccccttctgtacagcgcgtcccctatgagggtgtagtgggccgactgtcttgcgatgcgttctaccgcagccttgtcatc

SEQ ID NO: 110765 - DNA, 362 bp, Zea Mays
cctccacggcttgtctcttagtcatagaagcctcgtcccagataatgagagatgctttctgtagcaactctgttgttccactctgcttcgtgaagctacatacaacgccatcgtcaatagtgagtggtatcttgaagtgtgaatgggcggttcttcctccaggcattatggaagccgcaacaccagatttagccgttgccactgcaatctttccctggttgtgtagcgtcgcgagcagcactctgtatagataagtcttcccggtgccaccaggtccatccacaaagaacaatctaccctgatcggtgtcaacggcagacataatcttatcataggcgaccctttattccttgttaagagtg

SEQ ID NO: 110766 - DNA, 460 bp, Zea Mays
atttactgtcctcgacattcgggacgtgtactggggaaggggatatgcggaatctattcgagggtgaagagttgaggctgatgttgtttaatttccgggaggcgggtcttattccgaaggcagagccgatgtaacttttgctggtttcgccctcgtgttgcgatagtgagtgaaaacactgccctccccccttcgcaatagagagggagggcagcaaaatatgatttgtattatttgtatggtgtggccgacaggccttttgttttacgtatgtaaactatgatggcatattgcatgccgcatttattgcgagattgtttcaatttgtaatcgtgttggtgcggcacttaggcgggatgaggacttcggatgcttgggtgatgtcgcacgcttgttgtgcatgcccggctgcacccttaggcggcttttgctcggtcgtgccttatagtgaagacttcgc

SEQ ID NO: 110767 - DNA, 320 bp, Zea Mays
aaaatgtgaagaatattaatgtgacttatgctagcaaactaagttgtgttgtttcaaacaatcgaggtgatcactcacacactcttgaaggtataatttgtaactaaaacatattatgagctgtggaattcaccatatatgctcggtaccctgtgatactacaagattatagtgattccaatttgatatcagatgctaatgcgatttacatcacaattgtatatgtgcttggacttagaggtggcactgtagaaggcttggaagcagaccatcttaataagatcaataatggaagcataacttgcaccattagatactcc

SEQ ID NO: 110768 - DNA, 296 bp, Zea Mays
taaatccacgtgtggaagttccaatggtcttaatgttgtcatgatattcttagaggggtggcttgctccaacttgcttccctgcttaacaagctccatattgtttatctttctcaatacaaacattggttagtcctaaaacaagttcaccctttgaaagtttgtaaagactcttcatcccaacatgggctagtcgacgatgctataaccaacttataatggttttatatattaagcatgtgtcaagttcaactttatcattcgaaaaatctactagataaagttttctttttaaca

SEQ ID NO: 110769 - DNA, 463 bp, Zea Mays
tttgtgttggcatatctagcagacataaatgaatgtgtagcaccagaatcaaataagatggttgcaggaattgcattaacataaaacataccaagtacgatgtcagcaccatccggagtagcatcaacgctgacttgattaaccttggcaatagaatatcccttgccagatcctggagtttgttgcctattctaaactggagtagtagcaatcctctgtgggcagacatttgcatagtgtccagtcttcccacacttgaaacacgtagtgcctggactctgtcctgaaaacttcgtcggggtgccagtaggggtagcctgtcgaggaggtggagtcctcagaggtgattactgaactaggcgctggcctctgccagtgcgaactggtgtaccctggggtgaactgtagcgaggacgaacactgttgcttccttgtccttgagacatagcctttctcttcaaat

SEQ ID NO: 110770 - DNA, 342 bp, Zea Mays
gttagaatttggcgaaggaccaagtctcccactacgaaggatcaatgtcatatagtcttatcatgatagcgccttagggtctgctggtatctagctgactgaattactgcattcaaacactcttcttccagtatgtcaatatcttctagcctggtagcttctgcttcagctatgttttcgaatatcagccttagtgccccaaacctgaggtcggcgggtagcactgcctccaaaccatagaccatgaagaagggggtgtttccatgcagagcttgactgggttgagttcttaggctccaaaccacataaggtaattctctgatccacttccatgcgaacttt

SEQ ID NO: 110771 - DNA, 737 bp, Zea Mays
atcgctccaatagggtgcgaattctagttgaatttaggttgccgctgactatgggagatcttattcaattaatctgatagctggagcaaaactagattctaatttttttgaacgaaaaggctggagctctgtcaatcaattaagaggaaggtattacaaaacacatgaatgaacatgtggaacccgacatccgcagatcaccataggcacaaacaacctaaaccacaacacacccgaacacgaccaccacgtaaacctacaactaaggcggatgcaaaaatgcacccttgaaacaagtaatagtctctctagacatggctaccacctgagccgtagaaggcgaacatcactcaaaaattctatgatttctctccttccgaatgttccacgtgatgaagatagacacgccattctagtcaatcctttagttctttggaaaagagaccgccgcacatttccactaatctacgatgttggggggtaaagagtggagtccacatggggggaagggtcatgttttcatgtgccaacacctggtcccaaacctcccgggcaaaaggccaacgtagacaaaggtgcagtcctgtttcaagagggccagaacacagggtggtcgcgtgatggtgaggccaaccacgagcgctgagattgtctacaattagaattttattttgaagcagaatccaagtgaaggtcttgcatttaggttctgtgcgggctttccaaatgaggtcagc

SEQ ID NO: 110772 - DNA, 439 bp, Zea Mays
caagtggccgatgttattcatcagacaccgccgccggcatcagcatcaaaaataccaattactgaagacgctggcgcggccgaagctgaagccaccgaagccgaaggtgccaaagccgaaaccgccgaagattctgatctagaaaccacacttggtgatattgataacatgcttctaaaaatggctgaggaagaagctgctgcggccgcggtggacacaacaattgagaaaggaaaagagccaattgaagatactttggaagaggaaaacttcaattttcaagatatactagggcaagagttatcagaaactgaaaaagaagaactgaagaaatatgttgtatcctgtgggtacaaaccaggggctttgctgtttggcggagtcaatgaagagaaattgagatgccttcggaatcgaaccgaggcaaaggtcgttagga

SEQ ID NO: 110773 - DNA, 448 bp, Zea Mays
gaaggggttgcaaagggcctgctgccttcaaatgactagcttttaccctctggcaagtgtcacactcggatatgtacttggcaatttccctcttcattctggtccaccaatataaagatctgagatcatggtacatcttgttgctaccagggtgcatggagaatttggaaaggtgagcttcatctaggaccttctttctgagttcagggtccttgggaacaaccaatcggtctccaaaccataaaattcccttgctgtcctgacggaagcacttgtatttctctgccctttgcttgatcatttccttaatcatttgaacacctttatcctcaatctgtgccctgactatttgctcttgcaatgtgggttccaccgagatataactcaagttacctgaagaaacaacttccaggtttagcttgcacagctcatcgcacagtgtggtgac

SEQ ID NO: 110774 - DNA, 543 bp, Zea Mays
actggtaacaaacctaaagttgattactttagagtatttggttgtaaatgctttattcttaacaagaaagtcaagagctcgaagtttgctcctagagtgggacgaggggcttcttgcttggttatgcatcaaatgcgcatggatatcgtgttttcaacaataccaccggtcttgttgaaatagcgatagacgtgacatttgatgagtctaattgctcgcgaaggcatgtttctaatgacattgcaggaaatgaagaaccaccttgtgaggccataaagaagcttgctataggagaagtgagacctcaagaaaaggatgatgaggaaggaaccttgtggatgactaatgaggtttttgatgtgggcgcaaaggtggtgggtgatgaatcctccacccaagcaaacccatcaacctcaagtcatccaagtcttgaagaagttcgtcaaccctaaaagatgccaaccattgtggaagatgaacctaaaagtgttgatgatgaagtgcctcttgatcaagtgggtgatgaggaggagcaaattcaaa

SEQ ID NO: 110775 - DNA, 452 bp, Zea Mays
gtaacaaagaagttctccctgccctttcgatgaaggcggatgggaatggacatttctcagtggatttccatgcaggattatcagcattgcaggccttttctatctgcgtctctttgcttcactgttctgaagcttcttcagacattggtatcgagaagtttaagaacaagctatactccagctcgctgaagattctcctgaaggaggaagtgaggcagttaattaattcagtcacgcccaaggagaagaaaccaaagagcaggaatgaaaagacacctccatctattgtcatcgaccctcccttttctcccatgggtagagtatagcatgtggataagcagagaaatagctcttgggagtggaaagataagaagaccagaatcttcccatcatgtacaacattgtttgttttgaccatcttcattttttgtgagatagaaaggggaagtaac

SEQ ID NO: 110776 - DNA, 326 bp, Zea Mays
gattcttgttgtatgccccttatcctctccatagaaaaggcataacattttccttggttgagagttgaatcttcctctgaaactccttcatcctcttccacctcttggagtcagtggtctgaacgtattttgctgggttcctatggattgataatgactttgttgtgcctcaatgtgtctgtctttgttctcgttctgatttgaattgtgtatggtcctgacatgccttggattgaaccgtccgccaaagcccctggtcatctcggaatatctcaaggcctcctcttttctttgtcgaaaatcattattcactctgatatattcat

SEQ ID NO: 110777 - DNA, 409 bp, Zea Mays
ggaaaacagaaaatagaaaacaaagaaaaagaaaggacctctccctgcgtttgggccaaaactccttccctcagcccactcttcttcccctcggtctgggcccaggaatcccgtgcggcccacttgtcctcagccacactcgccacttacgtgtggggtcgatctctcagcctctactggcgcgcgctcggtatgacatgtgggcccgcgtggacagcttcgtcttctccctctcctgctttctcgggtgacagctatggcctatggcgcgatgggagccacagcaaccccccaaatcggctctaatcccagaacctgaagctccgccgggcttccctcgcggtgaatcaaagactcccactcggattttctgttatcctccccagcattcggatctatctctctgctc

SEQ ID NO: 110778 - DNA, 408 bp, Zea Mays
attttatgtggggttttggcctttggtatggttggaggggggcctcgccggtgatgccccgtcgggtagggcgatgcggcatcagccgtggagtctggggaagaagatacaccccccaccgttgatctctctgcgaatgactaggattagatctaggtgtgagtgtgctgctgccgtcgatttggtagcgaacgggcaagatcatgccatcggatacctcttcggaatattaaatcaggatccttgatccatctttggacgatcgtgatcgactcggggttgctttagatctaggccataggtttgtgattgggcagtcctgcgctgtccacggattcataatgcactagatctaatctgaaccatcgggcgccgatccaacggctccgatcctagcgtaccccttcg

SEQ ID NO: 110779 - DNA, 1039 bp, Zea Mays
ctcgtgggccatgatttaccctttctcctgaggtaactacctcccacaacaagagataactagcctcttaacccactctgaggtagaccggcagggttcactaagaagtctttcaaaaggcttccaaacatattaacagtcaatctagattcaggggcaagggatattaaatcctatctaagtggcacataccacagctatacacacaaagatctagggttaataccgactcgtcaaagagctccggattaaaagccaatatgaaagaaagtatcttcatacttaactaataccagagccatatagcccccacggtagcactgtcaatcccggatttcacttatagataagtccttaaggagaggaatactagaacaaaagtctagcccccttgaatccaaattgttaaacatcatcttgggatcatcatttcatgtagccatcattcaatgtaactagtatttcatattcaaatcatattactttaattcaaacacttgcaataactacccatatgcaatttaacccaataggtatcaaggcacaagataaacaatatctaggatgtccttaaggtaacaaattagacacatgcaatatgaattatgatggttaaaagtgaataggtaacaaggatagtcccatgttatacttgcctttgacttgagatccttcttctatagatgacaaccttcaaatactcgattcttgatcaccacataattctcatcgacttgacacgatcataaaataccacacaagcataccagacaagcacatgcatagcatacacatattcatctaaattagaatagtacaacaatcaatgaaaacacaagatgaaaagatcataaaactaatctacgcatcactacgatcacgtggataggtcgttcactcaaaacggagctacggttgaaaagaaatgattttcctaagattttcctttataagataaatcaaaagaacactataaactttatcatataaactattttagagaatattcagattagattaatgagatttaaacttgaac

SEQ ID NO: 110780 - DNA, 508 bp, Zea Mays
gaggaggtgttgaaatataatacaaataaattgtccgtctcttttatattaacttaatcttttgagttgaactggttggtgaatccaacttaatatgtcaatccatgcatgcatgacaatgcaggctagatccccttctccccttttcctcatttaattaatttagacgagtccatgggcaggatgtactaccatgatttgtttatatgtgctttatatatatgatcgggattgattaagtctgttaatctgcagagagaccggaagtagtacgtactgtaccactactaattatgatggaatgagcacggcaaacaagacacatgtccttgtccatttcgccgggttttgtgggtgccctctccactagctactttgactttagggtttagaccgacctctttcacaggaggaacaagcaagtgtcggggaggaaaagtggagttagtgggtcactgtaagtatatactatatgcaagacaagccagcgctaaacaaaaatgcagag

SEQ ID NO: 110781 - DNA, 303 bp, Zea Mays
cgtcacagtagatctaccaaagtcaaggtgactaggtttttctgggatcaagatggtgtaatcttcttcgtcttcattaccacttccctctccaactgtgattccctcagcttcagcagtcggagtaccttcggcaataggctcttctgatacaacaagacccgactgcctcatcacctctgatattggttccgtcttagttacttcgacctcgtctccctcgcgagacactctagcagttgatcgcactctggccatttcaatgttttcactttttgacgaagctaatctcaaatgatgaag

SEQ ID NO: 110782 - DNA, 783 bp, Zea Mays
actttatctcgaaaggtgttaagcctgcgcaaaaataagagataagtgtacttgttttatgcatgtgatcgatgattgggatagtcgaggcgaatgaggagtatgattaatccggttagagtcactatgatgttgatgccttctgcgtaacctggggcacgtatgtgcgtgtgtgccgtggtgtattatagtggtagttgcgtaagatatttgattgagatgtgcgggtatatgccgtgatatggttatactcgcgacgaggaaggatgtatgccttgggtaacgcgacgcttaggtcgctgttgtataatcgaatgaaggctgtattgttgagcttgaatcaaaatgcgggaactagtggtacgctaggcaggcgttgttccaaataaatagatcggttgatgtggtagttgtcgtgcgtgatttattgttagtgagcgttgaattatgagttatgtgaaaagcatgttagaaactagtgtgcggcgtgaaactgtgttcgtgtggtgaatgcgttaattaaatgtgtatgttagttttcaggcgtgaattgacttgtataaaaattagtaagtctacttgttagttctcccttggttatgttaactctaaaaaatggtaaagtgttagaataattcaagtctctagaacgcggcgattcttgaattatatatgagctgaaatttattgattgctgttttgggctgcacgtactgttttcggtgtgctgtatgtttgatgaactaaattgtgttttctctagatatgtgctatagaaaagtt

SEQ ID NO: 110783 - DNA, 527 bp, Zea Mays
ttctataattatttctctgtttttaaacatctctggactgggcctcaattaatgggaagcgcaggggtcacggggataaaattcctaagacccagtgcacactaccccaggacgacgggttctattttagaaagacgcaggggttcttttgtgaaatgtggaccgaaggggtatggagcgatctggtccacacaatcgaccaccgacgctccagattaaacccacgcgtcatgaacacgtataatccgctccgaccgttagatccgatctcaacgcacaaaggacaaccacgcaccaatattgatctaagccgttcacgtccgcatcaacgatccagatcgcatttacgcaaaccgatatgccacgatctaatcctgaccgtccgtcaagatctgacgcgtgcacgtgcttcttcctaacccgggactcgccacggcgggccgtcatcccccacggcggcacgctcaccggagagccacctaatccgtcgatccggtgaagctaacctacggtgatgtgcaaaaaat

SEQ ID NO: 110784 - DNA, 341 bp, Zea Mays
taaccggcggagttaagcacttcccacaagatggaaggaaagccatcgtgagaaaggaagtcagagctgaaacgagtatctcctccactggtggggttgggtgaattcatctgctgaagggtatcaaaggtaaagattatggtggaaggaagaaaaataaaagagcctggatggtttttcaaaggaagtgggttagctcaagttttaattcctttttgtgtttataatgcatgcatgctgaaagtaacgtctcctctccaaataatagggtgctcttagggcatccttaaaagtctaagtactggcccacggggcctacttaattagccacctatttctcc

SEQ ID NO: 110785 - DNA, 274 bp, Zea Mays
ttaatctccaacctattggcctcttcctctacgcaagttctcaatggggtcccaggtgatcatatttggcatcggcgaggtttgcgtcagggggatcctttgtcccctatgctttttatcattgtgatggatgtgcttggcagcttattcaagcatgcggaatctagagggctgctgcatagctggggggctgcaaatgttaggtccaggctctccatgtacacagttgatgtagttctctttgtcaagcctctggatgatgatctggtttgta

SEQ ID NO: 110786 - DNA, 487 bp, Zea Mays
gttctagtctgttccccgtttaggatcgggtcgtgcccggactagcccgacaagctaaaaactctgaacaagctcggcacaccacctgtgccaggctaggctcgggctcgcatagagttaggatgtgctgaacttggatagggcataaatagcatgcttcgtgctgggctcgcgggccacgggcttattgtccatctgtagctcgacctagctagtagcgaaagcgacacgccaaatgcacgaggtgctggcgtgatgcacctcgaattgcgcctccggcgctggtgctcatcaattggctataatgtgcaactaaaacatcgggctcgcgccaagtgcacgatgagctggtgcatttgaacaagcatcctcccttgtaggatctcgccccatgctatcttcggcaccctaccctatcggcgatctccatgtgtcaggccatttctacaaagagcatgttcacttgactttagtccgtactgacttc

SEQ ID NO: 110787 - DNA, 640 bp, Zea Mays
gtagaaatagatcccaacgactagagggagccaattatcaggtacatagaaaacgaggaagaaccagacgacaaatccgctgtagaacgcatcgcaatgcagtcgacccactataccatcatagggggtttgctgtataggagaggtgcgacagggatcctcatgaagtgtattcactcggctacaggaaggcagctactagatgaaatccatgtagggcaatgcagcatacatgcagcatcaaaaatattggtagccaaagccttcaggtctagtttttattggccaacagcaaagaaggatgcgagagacctggttcagaaatgcgaagcatgtcagttcctatcgatgcaacagcacttgcccgcccagcatttgcaaactatccctgtaaccaggccctttgcgtgctgggggctggatatgatcggattgttcaaaaaagttcaaggagggtatactcacgtactcatcgctatcgataagtttacaaagtggatagagtacaaaccaatcgcctctctgacttcaacaaaagcagtggagttcattcaggaaataatattcagattcgagatacccaacatcatcatccaagacttgggatctaacttcactagctcagaattcttcgacttct

SEQ ID NO: 110788 - DNA, 343 bp, Zea Mays
aggagacctaacatgtcaagcatcaattttataacataagtgactcaacctctatcacgctttggcaaacatttccgaaacaccctatctatccttcacattcctaatcatattgcacgacataaaatatttcaatacgcattcaccccataaataacatcatcacacaggactccgacctaaccgtagaggaagcaatgactacttcggcatgtcaccacctctctacaggccaaatcaatatttaactccatcgatcgagtctcatatcacgcaacacttataatttactatctcaaatacaaccatatcacgacatgtacttgggacacttcggttcaac

SEQ ID NO: 110789 - DNA, 719 bp, Zea Mays
gttatttcatgcttatagtggatgatcatagtagatatatgtggatacaacttctggcaacaaaagatgaagctttcagttgtttcaagaaggtgaaggcgctagctgaaactgagtcaggtggcagactgagggcatttcgcagtgacagaggtggtgagtttaattgtattgacttcaaggagtactgtgatgagcatggcattaagcacttcactaccacgccatatacgccacagcagaacggcgttgtcgagagaagaaaccgcactgtggtggaaatggcgaggtgtttactgaaaagcaagaatgttccaggggagttttggggcaaagcagtcacaactgctgtgtatctgctgaatcgagctccaacgaaaagtctacaagggaggacaccttatgaagcatggcataacagaaaacccaaagtacatcatctacgtacatttgggtgtgtagctcatgtcaagaaaataggccctggtgtttcgaagctgtcagacagatcaacaccaatggtgtttattgggtatgaggcaggcacaaaggggtaccgagtttatgatcctgtggccaagaaacttcacatatcgcgtgatgtgatttttcaagagagtaaagcttgggactggaaacaagaaactcgagcaggatctgcaacaccagtgtttgatattgagttttactcggttgctggaagaggaacagtaccagcc

SEQ ID NO: 110790 - DNA, 546 bp, Zea Mays
tctggctatatcgttcaaaactattccaaagatgtcggtgggcggccaaatggatgccatggtgatggtagttctcctctgcgtgttcttggcaggctttctttcccccgctgggtggtgtaagactgtcttcaatcgtcttttctaaatttctccctatatacctcactatcccgccacgttagctatttctcttcccatatatctccatattgtacaacgattccccataaatccttcccctatagcccactataatcataaaataatatttttcatacctattcaccatctattatcatttttttctaactaaaaaacacagccgcgcacagaaaccgagggcagggcgtccctccatatccagggggagagagacagttaccgcgggatatagggtggggaagaggtcactgttgtaggaaaagagatgctcctgtagccgctaaagtgagaggaggggatgcccggaggaactgctgaagccattctaagtgcacacattcatcctgtaatatatagtactcatatagtactccgtactcc

SEQ ID NO: 110791 - DNA, 424 bp, Zea Mays
atcaaaatttgctatggacaactcttgtagaccaacgagagcaaacaaagcaagagaaggaacatcactactctccccactgactaggtagcgccgactgtttttccgaattaaggggatttcctcctcttcttcctcatcctcgtcaataatatgaacaacacacccattgtggtcagctctggccagatcacacccattgggtttagcatcatcaaggtcacacccattagggtcagcgtcagcagggtcacacccattgggatcagctctagtaaaaagttccactagcacttcctcagcagcaggagtagaagagtcggatcctgattcaaacatgacactcgctgaagcctcgtctttttcttcttcttcccctcggcaggagcagttggatgactggccaggcgaaggcgctttgggc

SEQ ID NO: 110792 - DNA, 349 bp, Zea Mays
cggtcattcaatcccctcatgaagcaattcttctttttcaaatccgtgtccacttgatcaatagcatattgggagagatgattaaacttgttgagatactacattacagaatctcccccttgcttcagacggatgaactcctccagcttcatctgtagcaccccttccagaacataatgttctctaaaggcctgtttgaactccgcccacatgacctgatgtcctgcaggctgaatggctgaaaaatttgcccacaaagtactggtaggacctcttaactgttgtgcggcgaataggggcttctgtgtttcagtacatcatatcagttcgaatttttgttccatcaccc

SEQ ID NO: 110793 - DNA, 660 bp, Zea Mays
atagccgcttgccgtgccgcagaggcggagtactagctggttgggtgacgacgactcacgagtacccatgtctcgagccctcctccgccagcactcctgtttaccgccagtccgccaacactagtatatcagattacagtttacagcttgattgcccaagcttaagaccacacgaaatttgcaaggagggagaggggccgcggagcaacaccagcagctgcgacgaccacgacagggaagaagggcatagacagtggtgcaatgcaatggacaactggcggacccagaaatcttcgacggcctgaataaagataataatcatatgccttgcctagttttcactcgtatttaactatattttactgcttgatgtatgtttacgtattcattaaaataaatagaggagtctggatgcctacacctgggtccgctcctacattggaccatgtttttttttttgtagtaggatgatatatagccgtgtcggtggaaggagacggacgattccacttcctgtctaatcaaatcaaatggctcaaaaggggaactaggatttagacatgccgctaataatatgttgatctgccgccagcaatattttattttgataaccagtctgcataaaattggtgaacccccaccaacggagataaccattct

SEQ ID NO: 110794 - DNA, 867 bp, Zea Mays
gctttggcggcgggacacggatcgggggttagcttgagttggttgggttagggtttgtgctagctattgagattcggtgggttttgctttcttgcggcggctgggggcactgctttagccggggtcgacgcgcgaatcgggatgagttacgctactgcatctttgcgatttcactttctgatcgcggtttaggcttcggatggagtgttggatggtttgatcgagctgatatttgtgggttgttggagatcattgactcgccatctttcggttttgctgggggcgccttctggtttttgaatcttttgacctggaatggatcgctggacatgtagatttaggactatttattcggtctttcctagtttgaggctaagtttcttcgtttttctgtgtggcttcgtggggttagctcgatcatttttgtttggatttgtactcgttgggaatttcatacgattcttgaccttttcctctgctcttcgtcactgaggtttggggttgtagttcatggtaaactcaaaccgaacttcagcaatgcgtgatttatcacttgtaggataccgtcaggtcaaaaaatgtatagaacttgatcaaactctttttccatagtctcatgtagcacaatgagcattccttcctagcttagttacatcaatagtgtgagcaagaggacgcataacagttctggacttgaggattcacttgtttgttagtattgattaaatggatcgtcaccttattgaacgtgcttctattggttcatgcaacctgaaagcagaatctatataattttcttatttcttgtagtaaatagtaccaaactgctggtgtaagtatggcctatttcagtttgatctatcaccg

SEQ ID NO: 110795 - DNA, 324 bp, Zea Mays
gagatgaatgatgacataaatataacaagctgatttgcataagaattaattagaggttgacaccacaaagattcccgggagaatgcggattcagattacgtatttggacgtagaccgactatcgagaaagcggattcggacaccgattggataacataacaactatcgagagtccgaataaatgagtctggacaggagttgcgagacgatattgactttcgaatttgcatttgccccgagaaataaaagttttaacatgctccaaatttggctgttcttgagatcgaataattccaaatttggtgaaacattcattagtaactt

SEQ ID NO: 110796 - DNA, 669 bp, Zea Mays
tcgtgctgtcaccgtcgcgcaccacgtgccttagcgctggctctcgtcacggtgaatcatgcggtgcatgtccggtgatcaccggagttactgccacgccataggacacgtaaccacgcgcgccaggcttcttcctcacctccggccgccagctcgccgtgggcaaattgtgagccaccgctctcggagtctttaaattgagcccaccgttagctccgcaacctcatcacgtaccccatcgtctagtatcacccccagtcctgccaccgtgagctccaattccaagttttccccaaccctattccgaagcaccgcatgatcgagctcaccgcggccagcccaatttaggtcagttcatgtttctctgttgcttgttctaacattctcatgtgcccttgatgctctccaaaccatccaattgaactagaccgccatgaatcgacgggaacacattcatctgcccgcaaggtccacggtcactgcggccagagcaaacctagtagccattcgtgaaattgaatgaggggaaatactcgggaggggttcaattcggtgaaagccactcgagagcgccagtctttgcataaattggcctgtacacgagctcgccggagctctgcacaacgttgctcgccgtgaggggcgtatttggggaagaagcaaagttct

SEQ ID NO: 110797 - DNA, 433 bp, Zea Mays
gtcaggtggcaggtcctgctggggctgctgcataggcgggtcgttgacaatcaattggtcccaatccccttgaatattatcaactggctgaaccggggcattttcttctggcgggaaattgagatcccaccccgcagcaggcacaggttgacccagaccaaagaactcgaggggaagctgttgaccatcctccggggccactggaaccgagtcctcatcttgggcctgccccccagcaaggtttgctgaatgatttcgcactgaactgtccacgagtcaccaataaagccatcggcttccgaaaaaacaatgaactgcgggacctcctcgcgagacgtgacccggaccctaagcatagtcttgtaaacattatgtctgtcttcttcccataagagtagtctgccaaaggaaccaatggcagcctgcagatatt

SEQ ID NO: 110798 - DNA, 965 bp, Zea Mays
aaaacctctcgcctagcaaagaagcttcgaccgaggggaacttcgtgtcgttagctaagaaagtatattctggttgggctacggccttaacgtattcacaaccgaccttttctaaaattgccgcaacccctcgtgcaccagcgaatgcgcagaaatccccgtgatcgccgagtatttcatcaaaagcttcgacttcaccaatccactggataaccccttcgggatcaccgcgaataaatttttgttccgaagagtaggctcccacttttgcaaaactatctttcagtttcttcgcgcattccatggatgtttcgtagcatctctctttggaatcccgaagctcttcaacattcttctgcaccctggatctttccatttcgcttatttcttgcttacctttgcaacttcgaaattttcattcattttcgcaagttttttcttcaaatctttgacttcgtcttgagcaataagcttggcttcgcaagccttcagcttgtccactaaggaaaacaatatcttatctttttcaaaagcttcattccttagcatgatgacctctgatcgaagatttccaagagttatctggcagccttcgtcatctgcctctttttgagccctcaaggctttacttagaattaatccctaaaaacaaaaaatatatatgtgagaacataacgataacaagaaaacctacaaacatagtttatctcacagcataagtatacataccttcaaactattgtaagtaaggctatctgcaagatcatcctttgacattgcagatagaccgagctcaagcttcgggaatcccacgttcctcatcatctcccggcatacagatatctccttattatccggaaggcaatacagaaaatcatcttcatcagtgtcgttgtatactaaggatccttgtggatacttcagatccctggcgtattgcctagctttggcaatctgttattccg

SEQ ID NO: 110799 - DNA, 544 bp, Zea Mays
ctagaagaatgcatccaagggtggctcgacatagagagaattttcatctataacttccaagggacgtgcaaatgccttgggaacccctaggacttgaaaagttgcaagcggcggtcggtcgttcatttatggtactagtacactagctcagatgcagctggcccaaaaccatcactgaactggtggtgattgcttatgatcatgcctccgtggaagaggcagtcgatggcatctttagcgtctgagcaagaaaccaccttgatcgcatggacgagtcacgcgaccacaacaacacgggggagaaactacgccaacatcgtgacacagacacccccaactatgtgatagaagaatgatcgctaccgtcgaccaaccaacctaaggtccatgacccatgcacccaccacatggtccctgcgagcagcacaaacagtgtgacaaaaaaacatggccatcgtgaagcttggccgatttgaaaaactcatgaataatgcacctataccacaccatttccctgagatcgacagtttcctagcgatcttca

SEQ ID NO: 110800 - DNA, 635 bp, Zea Mays
gtagagatggatcctccaccaccgcctccaccagcaggagttgacccactggttgcagctcagatgaggatgatgcaacaaatggcggacactatggcagatatgcgtgctcagatgcagcaggaacgctaggagatgcgctaggaacgagaagagatacgccaggagttgcgccaggagcgagaagagatacgccaggagagaagggcgcaacagcaacagcaacagcaacagcaacaacagcaagtaccattgcctccaccaccaccgccagttccaccccaagataagcaccgggagttcatgagccataagccaccgacatttgctagttctcctgatccactggacgcagatgattggctgaagtccatagagaagatgttgaacattgctcaatgcactgaccgggagaaggttttatatgcttccggacgtctgacaggtcctgctgctgattggtgggattcatatactgttgcccacgatgctgctgatactattacttgggcagagttcagtacgcagttcaggaattatcatataccagctggattgatgaagattaagaagaaagagtttttgtcgctgaagcaaggaagcatgccagtcagcgagtactgcgacaagttcat

SEQ ID NO: 110801 - DNA, 321 bp, Zea Mays
gaaaactggttgtgaacatgttaaagctgcagcccaggcagaagttatcttctccatagacgatacaagggaaccttcagccgaagctactctgatgggtgggaaattttattccgatgtttggatgaagggcagccgcgagatagcggacgaagtaataaagaaaagtgaaaaagaatcccatgatgcccgagtagaagcaaacgaagctgaagaagctgtcgaacgtgcattaattataggtacttccatttaatgcccttttgctttattattcgtttgtggcttcgaaccctaattatcatatgttttgctacaact

SEQ ID NO: 110802 - DNA, 546 bp, Zea Mays
atttacaacgatgtcatcaacatagacctctaaggtacacctgacctagtcagtgaagcattagagcatgcacctctggtacgtagctctgacattcttcacaccgaacatcatggatatgtagcagaacgtgccaaagggggtaataaaggtggtggcatgctggtcgatctccttcatggcaatctggtgatagcccgagtatacattcggggaggaaaggagctcgcacccattggtagagtctacgacctgatcaattcgcgggagagggaaatgatccttggggcatgccttgctgagccctatgtagtcgacgcacatcctccaactctcgttcttcttattaacaagcatgggattcgcgacccacacgaggtggtgtaattccctaacgaaccctgctattaggaatttcgtgacttcttcaatggccttgtgctttcttcatcaaaatggcaaagctgttgggcgattggcctggccgtaggttggatattcagggagtgttcgacgtcctcccttgggattcccagcatatccgtg

SEQ ID NO: 110803 - DNA, 357 bp, Zea Mays
gtaatggatgagcctcatggactcgaccttctagtagatgatcgagcctcatgtactttgcttttcaatgccctcatggataattttgtcatagttttttaagcctcatggactcggccttctggtgccctcatggggtctttttgttgttgataaccgggtttcatgaacttagtattcctagcgcccttatagagatatcaatgtgacaacagtaagccatgtgtgtattattgctgccctcctcacagggacattaagtccacctctttaaattatgtttaggtatgtgcctaacaacatatgcaatgtctgatacccttatagtgatgatcgagtctggtatgtggcctcata

SEQ ID NO: 110804 - DNA, 301 bp, Zea Mays
ctctgtgctgggagaccttgggagagagatccctggttggtcctgattgggttcagcagacttctgagaaggttcaggaaattcgtcataatattttggccgctcagagccgtcagaagagttatgctgatgtgaggaggcgggacttggaatttgcagtgggtgaccaagtcctcctaagggtatcacctactaaaggagttgttcggttcggtgtctccggaaaactcaacccgagatacattggaccgttcactatcttggcccgagtgggcagcctggcttatcgcttgcaactgcc

SEQ ID NO: 110805 - DNA, 371 bp, Zea Mays
attcggagttaaaatggaatttctattgattaaacaagcttccagatttatttttatattaaaaatcattttctgcaattgatttataactaaaatgggctctttgtccacaaatcctaatttctgatgaagccaggggtgtgtttgcaatttctggggacctagttgtaactgttttcaaccgcacgtggacggcgagttgattcgggaaaaccgaggggctcatatgaaagatggtgtggctgaactgctgaaggggtattcctcaatctaggctgtgcgatctgagatggacgcacgcgattagatccagccccttactgaaccggtatggagtgttgtccattagatccaaactcgacggacaaaat

SEQ ID NO: 110806 - DNA, 607 bp, Zea Mays
gtgctatctctttcttcattcctctccaccagtatctggttttgaggtctaagtacatcttggtggtccctgggtggatggagtaggctgagttgtgagcttcgtcaagcagaacttctcgagcctctccttttggtacacacagacggtttttgaaccaaaggactccttcctcatttgtcctgaagtccggaagttgttctttgcgagttttttccataagacctgttgtctcagtgtccaggcgttgagccttgcatatgaggtcttctagcactggcttgacttctaggctgccattgtctcccagacatgcattcagttgagctgattcttccttccaatcttccaagaagttggtttctttcttcccgaaaggttttcggctgagggcatctgctaccatgttggccttcccggggtggtagtggatctcaaggtcgtaatctttgatcaattccagccatcttcgctaacggaggttgaggtctggttgagtgaaaatgtacttcaggctcttgtgatcggtgaagatgtgacatttgttcccaattaggtagtgcctccatatttttagggaatgcactatggctaccaattccaaatc

SEQ ID NO: 110807 - DNA, 426 bp, Zea Mays
ctgggggacgccttcgtcttgacaatgaatggaccctcccatttcggctctagcttgccccgtgactctgtccgggtggttcggacgagtacgaggtctccttcgttgaactctcttgggacgaccacgttgtcacgccagaccttggtttgagcttggtatttgttgaaggcctgcatggcgaggacgcggtctccgtcgatgaggtctttagacgttggttcgtcgatgtcggggactactgatgtgcttgttcggggcgacccatgctttatctcctgcggcgtcatggcctccgatccatataatagacgaaaaggtgtgaatccggttgcccggcattcggtcgtgtttaaggcccagactacttcaggtagttggttggcccatttacccttcttgtcgtcgagaagtctttcttgatgg

SEQ ID NO: 110808 - DNA, 718 bp, Zea Mays
tgcaagcatcttggagccagtcagtagatacgagagacgcaatcctaaggctacatattaagatgcgacgtttggccacatcaataaaaatttggaaagcgcaacaagttggtaacattgagctacaattagccattgttcatgtcgtccttctctgcttagaaaaagcgcaggagcggagacagctctctgagattgaacttcacctgccccgctccttgaaggctaaatctttggggctagctgccatgcaaaaaccaagagcgaaacaacattcgagattgaaatggatcaaacaaggtgatgcaaatactaaattcttccatctgcatgctaatattcaacgtaatcagcatttcataaaagagctacaatcagaaacaggcattgtcatgacacaacaggacaaagaggaagcaatatttaacttctataattccatcttaggggttcccccagccagaaattcctccttggattggacagtcttaggatatgagcaaactgacctttcagacctcgaagctcctttttcagaaaatgaaattaagaggattattcatctcatgccttcgcaacgcgctccgggcccagacggtttcattgggctgttttataagaaatgttgggacattgtaagaagcgatctgtctgaggcgctttgtgggttttacaatttatgcactaacaagctgcacctagcgaacgaggccaatat

SEQ ID NO: 110809 - DNA, 390 bp, Zea Mays
gtcatgcctccagaaccggtctttgtcagctggataggtgcctcggtccgagcgctcgctggccgccggctgctccttccattgtgtgcagtgcaggacgttccgattccgacgtcagaggtcagatcaaacgtggagctttctgcgtcgtgacatcagctcctccttttcttttcttttctctctcccattcgtgctgaacgacgacggctgctgctggaagcaacacaagatagaatatggatagaaaaagcagtggacgaggacgaggccacccccggtcttgggaatgttgccatgccgccattactgaggctgtgtgcagcggcgtccgccagaccgctccctcctctcaatctggcggctgcagaagtcctctacgaccgcaac

SEQ ID NO: 110810 - DNA, 581 bp, Zea Mays
cagccttcatgaatgcagtagttgtgcctcgagaagctaccaaggcacataaatctctgtgcctgcttataacttcgtcgagagcttcaacttcattttcaatgtgattaaaggccccgaggatgtcttcggccgaaggggtaaccttttcagaagcagcttcaactgagttgaatatccccttaagccggtctacgcactgagtggcaaagtctacacacttgctccgaagattcttaatagactcgtgcagccttgtattcttttcagcttcggcttcgacccttgttttgagttctttggtctcttggtcgaagcgcggtgaactttcatccaaaatcgttcgagcttcgcttagttccttgcttagcttagtattttgggattgtgattccgcaaaggaaccttcggctgtctgcaccagggtgtctttttccttcagagaggtttcaagttcctttattttttcctctaagcctttaactatgacttcgtgtttcctgtcctcattatcctgctgcatttttagcgctttgcttagcagcatgctctgcaaaacaaattaaagttaaagcactcaa

SEQ ID NO: 110811 - DNA, 868 bp, Zea Mays
ggcgagctgagatccgcgcagtcgccgagggatttcggcggctgttggctcacgtcggcgatctagcagtagagaaatcctactgaggcagcgatctggtgtgccggtgttggcggattgggatgatccatccgccggtccttgactctgggtcctgggtgctcgttccatgttgaattggattcgagtattcgatcagctggttcggatggtcttatgtgacagtgcacgctatgagctgccgatttgtttgtatatatctgaatcagagattaggctgatgccgctgctatagcttggatggggaggatattggactgatgtatgctgttcgttgtagttccaggtcgatggtaatagagttcctgtgttgctagcccttaattctttgtttcattagataattgaccttcaatgtcaaaacttaaatcaaaagctgtctactacctacaagaatatcttcatgactcgccttaggtttacctgattcaatttgtacccggctcagttgagaattaggctgatgccagtgccaaagctttgatgggacataatatgggttcacaggggccggaatggggcgtgtgtgtgctgttcgttctaatgtgtgatttccagaaattaatttagtgtatagcttatgcatacttcagggccttagattgtttgtttcagtggctaattgaccttacataacaaagtagaatcaggtgaaaatctgcgtaaaacgtacaaaagaagctcattaacatggcttgtcttaagtgtttgtggttgaacttataccctgcctttaactctttcctgaactgaatgcttgtaatttgacttgctattctggtgcactatttttggcaatttattatac

SEQ ID NO: 110812 - DNA, 275 bp, Zea Mays
gaggaattgaaagcaaatgggtattggaatagtaattttgtttaaccgtctttttcttagaggaagaggagtcatcgtccttttgcgaataggaagaagcatcactctcgtagtagacgatcttcttgatgcacttgttcttcctctcattcttgtaagatcccgagtcaacgggcgtctcatccttggcccccctatcgttggggatctcctccttctcgtcgaacaccttccccttgcctttggagtccatctcttcgggttgtcaaacccag

SEQ ID NO: 110813 - DNA, 380 bp, Zea Mays
acttatggcactcgtgctaatgcagagcagggaggcacatgatgaaaatctaagccaaaatcccataatttagccatcatccactgcaactatgagcaacagctagcagcagtaacgtactcagcctctatggcagactgagcaacgctagactgtttgcgcgaacactaggaaaccaacaaagacccaaaaactgacaagtcccagaagtagacttgcactccaactccaagtggcatcccacaaaatcagcatcagaataaccgcacaaagacagaacataagaagagtaccacaaaccaaggtcccatcttgggtctgcttgatttgcagcccaagaaagaagtttagtgcgtccatcgtgctcatctcaaattccc

SEQ ID NO: 110814 - DNA, 590 bp, Zea Mays
tagggaacagaagtgtaaggctaataactgcatggttaagaaaataataatgacaccctattacaatacagggttggagccaaaaaactactgcagacaatggatccaaatacgccaatcagcactgccatgttgcaatcctatataatgtcgctgagaacggatctacctgatcatgatgcacgggggcctacaagggttttgatggtttagggttgaactgagctgtctaattcagctcatatgtatatttcagacggtcttccctctctaacacaggccagatttgatttcgttcattatcgatctctgcagtctgaacacagtttggcccttgccctacctctaagaataaccaatgcagctaaagtgaactataatttgggaagtgagggaataaatgcacttccagaaaaaaaatccccaaatcagaagacgcatgggactttgaggtctgagcgaccaaagtgcctacgtgtcaaaattagaactgctgaaccctccaaatcaaaagcaaaaccccagcgcagattgcagcggccatgcgaatctaccccaaaagccagacaattcccctcacagtccacgat

SEQ ID NO: 110815 - DNA, 642 bp, Zea Mays
acgagcgccatggcgtgcccatcgaggaaagcgtggtacagatcaccccttcatgttcccgcaatcataacatgtgggagggtaaaactaaaaagacaagatgtgccccctagacgtatctctatactaaacagagactcgagggcttgcctcacatgtgcacaaaaaggctaggcaaagtcacatggatgtgacccccaccccaatatgcctctaaagaaataggggtcatgcggctcagctcacacacacataaaagagggggtcaaacaaagggtaaaagtcattcctccggatggccccattgtggcaaacagaggctttagggctcaacacatgtgaacaattgctctaaaaccaaacccagaaaggtcaaaccatgcaatttttacaatgagcattaaatcgaaccctacttaaaaacaactgcagcacctgcgtgatctcttgggttggccagaagggtatcccctacctgacctcctaaaagcaaaacttcttgcccctaacacgatgtcttgtacttatcgatggaaaggacaagattgagaagactggatcgccacccaaagaaaagaaaggggtgagacaagcattaggaaaataaggaaccaagcactctaaaatgactattaccccctc

SEQ ID NO: 110816 - DNA, 475 bp, Zea Mays
attcaggcgtgaccgcgtgagtcctgccacgcttgatacagcaagctagaccgagtccaaacgagaaacccgaaaaagatctagagcccattcgcttcagccagctcgtcgggtacggaacaggctgttaggggactcgtaatgacagcgcttgtgcggtacagcggtaggtgtccgcacactcttcttctattgtttgtctactcactccactcccgtcctcgctccttccacgaaactacgttcactagctcgggatgaacagagtcgcctctctctctgctagtcaggtctactgatcgtccaccacacggatcagtttgtaattaccgtgacttcattgccacagctacacaattgcacgagtcaaagtcttttggctggctcctagcacccacacaaaacaacctcgcccggaagcatgggcttcagtgcttcagattacaaatttgacttgctagcttgggcactaaac

SEQ ID NO: 110817 - DNA, 382 bp, Zea Mays
gtcaactgtcaagcaagggcaagtcgaagcaatgaagggcaaatattttcatgatgtttctatagtgagggtcgggggcgaagcaccattccccttcctaaagctaatgagatagtggtttttaagagcttcatgaaagctaggcttcgctttccactccacaagatgttggtcgaggttctaaagacattcgagatataccttcatcaacttaccccgaagctcttatcaaagtggggggtttttatatgggccttgaggagtcagggactggagccggatgctaggtgcttctgcaatattcacgagctatcttaccagaagaaggcaaccaggaaagagcaatatcataacaaccttggttgttatagcttcgtgcccc

SEQ ID NO: 110818 - DNA, 453 bp, Zea Mays
aaagaagcacatgtactgctgaaattggatatctccaaggcattcgattcggtttcctggctctttcttcttgaaaccatggaacatgtggggtttggaaggcgatggtgcgacattataagcctgttgctgtcaacttcctctacacgtgtccttgtcaatggggaacccgggatgcctattattcataaatggggtctcggcaaggtgatcctcttcccccatgctcttcatccttgttatggatgccatgaattatctagtcaagtacgccaccaacaatctgttgctgcagccccttgctgtgcagtatgccaagcataggatctccttctatgcagatgatgtcataatctttttgaaacccttaaggacatatctgatggtaatgaaatctattctaaacctgtttgggcaagatgctgggttacattgcaatttaaccaagagttc

SEQ ID NO: 110819 - DNA, 405 bp, Zea Mays
ctttgaaccatgtttgaaagggaaatgtgccttgtgacatttctataaatgttttgttgattaataaccaacgcaacaaatgtggattaacatgtttgctatgtgtgtatatgcaggaatttaacttagataaatagaagttaagttggagaaacaattatataaagttacatcacttagacatagttgaattaacactaagaatatttgtctaaatcatgggaacactcttggattaagtgaaaataatttgaagaaaaatcagagaaaaagtcaagtatagttgtctggggtgcactagaccttgggtccatgcacaccaggccacatacacagaggcaccagaagaaggtctcggcggcctggcacactggactttgggtctgtgtgccccgggcaacttta

SEQ ID NO: 110820 - DNA, 441 bp, Zea Mays
ccaacccctaaaccctaaccatcgctggatttgggtcatcgccgacgaccttgatggtgaacacaaggaggcaaaacagtcagaaaggtccacaacaagaagaaggtatcttatggttcactctgcctaattcttagttgctaactattaccaagctggatctaaccaaacctagtgatgctagatacatcattcattcatcgacacacatgtgagtgcatcactgtgtttataaaaatggcatggaagggccaatgatgtagcattccgcacactaggaaagctggtccccatccataactactatgagagacacgactaatctaacatgcacgcgaaagaaatcctcaacatagggtgtgtaattgattgattgcttccattggcttttgcttgtattagaccttatgcagcacaatctaagccagaataatcgtgtac

SEQ ID NO: 110821 - DNA, 1090 bp, Zea Mays
gagcatgacttgtgtggtggatgaagcaagaagaccacaaaccatgtccctccagatctgtccaaacccaatctgctgcatgacatcaattaaaaagggccaggagaccgagtcaaaggccttggtgatgtcaagtttgaggagcagccgagataatctatgttgatgaaacagtcttgttgtctgttgcactaacatgaagttgtcctggatgaatcgccccttaatgaatgcactttgatttggggaaaccaattcattcagtcttggtgcaagtcggtttgcgagaattttcgtaatgagttttgcaatgctgtggaccaggctaattggcctgaaatccttaacttgctcagccccatctctttttggcaccatagtgatgtaggcagtgttaagtttccagaaattgctgaaacttctgctccaaaccgtagataccactgccataatatcacttttcacaatgttccagcacactttgtagaaaagaccagtgaatccatccggtcccggggccttgtcagagggtaaccctttgatggtctccaggacctccttttctgtaaaaggggagtccaaggcagccaagttgtatctaggtaggccaagagctgccaggtcaattgttacatccctctgtccatcctgcccaataagatttttgtagaagaggtccactgctgcagctttctcactctgctcagatagaatgtggccgccatcaactaacttggcaacaaaattcctcttcttgcgatgcctagcatgaatgtgaaaaaactttgtatttgcatcaccttctcctaaccatgtgatcctagatctcagccttgccatagtacgtttgaaagaagacaacaacagtgagtgttttttgaggcagttcttgaaccaattttcagctggggagagggctctttcgtcctgtgccatctcaaacctgtgaagcagttcttttgccaaggctaactgcaatctcacatggcccacctgtttgtcactccagctttgaagagatcttgctgttacccttagcttcaaatccagggtttggaatggacacctgatattgtgtaccgaattccaa

SEQ ID NO: 110822 - DNA, 343 bp, Zea Mays
aaattgttggcagcaacagcttcatcaatgcccaatgtcgttcctccaccagcatttggtaaccccaaaataaggtgcaccgtatcctttgtaattttgagctccttccctaggccggctcgaattgtcatgtcattatggtcaagtttttccatcagccaagctaaatgagatctactgccgagcacatcaactctcatatcaagaatactggagaaccccctccgtgcaatagcttggcactgtctgtcatttaatatctggattcttactaatacgtcttggggattgcatctcacattaagcctctgctgaaaaaatgtatacaatgaatagcgtaaac

SEQ ID NO: 110823 - DNA, 289 bp, Zea Mays
tatgtcttaagatagactgggcttataaatgcccctactagctcatgggccttctctgataatgggttctggtcataacaggcgactctttaacctagtcataagaaagttcgcattacatgtagaactcgctcgaaactgttatagagaaatcaagagagtggaagtatgcctgaacttctggagtgcagtacttcgtaaacatactagtaagccattaacagcgaaagcaaaccataccgatacatgactgacaggacaggcagctgcagaaggataatttatctag

SEQ ID NO: 110824 - DNA, 345 bp, Zea Mays
ggcgtcagtatctccaacactctgagtttgtgatctattctgaccatagaagcctttctcatctgactgagcaaaaattgactacaccgtggcagcaacgagtattttctaaacttttggggctccaatatcgtattgtctataagaaaggagctgacaatggagcagttgatgccctttctcgacgtccacatcctcaaccaacatgcttcagcattacttcagtggtacctcagtggatgcatcaggtcattgacagttatgttgatgatgcctattcacaaaaacttcttgctgccttgactgtggatgtttcgggttcagccccttttaccttacattcag

SEQ ID NO: 110825 - DNA, 491 bp, Zea Mays
tgtttaaccatacaaaacagcaaaagcaaagtgacgtggactggtggcgggatggctggtggctggcagcctggattgggtgaatgggtgcttgaaagggttgggagaagtagggttacttgttgcgctcattgcctattgtgatgcacacctaattttacttacccataggtaatcgagttcggattctgttttttcatatccataactaccatatccaatggggaaaaattctcccaaatttgtacaaatgagaattaaaatcttcccataccctaaccttaataaaaggaattttctatgggttaacaagtatcgggttcccattaacacctcaggtgctcaccaatgtgatgtcccacctcaaggacctcaccatcacctttgtgttcaccgtcgcgaccgccaactcataggcgatacaaaacctggagcaaatctactggccatcgccgtgcacaaagggacctctcttcattaacatttagtag

SEQ ID NO: 110826 - DNA, 383 bp, Zea Mays
ggcgccacgtccacccgatggtgacacgtcgttcggccggtgttctccgaccagttgaccggctggttctcatggccaccactgctccgactccctcacatgtccccttctccgtctgtaccgtgctcgctgatccccactggcgtcacgctatggagtacgcggccctgctggccaaccacatctaggatttgatgtgtccccctatcaccaacgtggtcatcagcaaatggatcttccgtcataagccaagtccgacgtctccctagatcggtacaaggcacgttgggtccttggggtgggggggggggggggtgatgtgtttgatataatagatttcagcggttcatttttgctggtgttggttctcctcagtctgtaac

SEQ ID NO: 110827 - DNA, 409 bp, Zea Mays
aggggttggtgcgatgacgctggagctcctcgctgcccacgcataaccgaacttaaagatcctagccagagagctcatacgaccgaggtgcataacgacaagcacgtttttaccgatgtagaatgcttcgttctaccatgacgtagtaactccttccacgagaagctacctataaccgatcccctccttggtctataaaagggggaggattggctgagacaaataggggacaatgtaggcaaagccgaagagcacaccgccacgacacccaatgcttagctaggtagtgaacactaggtacatagtccttagaccttactacacataagagaattaggaactcctccctctctcgcccgcttgtaaccgctactacaagcattgagtaacccgaaccagtataaatctt

SEQ ID NO: 110828 - DNA, 637 bp, Zea Mays
gatttttttctttctttatctttttatacatagcagtttgtgggaagggtgattttggttacacccggggtgttttgggacctcggggtgttacagttggtattagagggataggctatatgtcctagcaagaaaatgatgataaattgacacactgcacatataggatgggttgcttgatttagtattgctatattatgaattgtcagtgctcgtttgatttactcgaagttgatgttatgttatttttatttatttatttatttatttactcttgtggctacagttatgccgcctcgtagggctcgtggcagcccgcaagatcatagtggggattctatgagtctggcggcaatgttagccgcgatgcaggccatacagcaggagttggccattctgaggcaagccattcccattgctcctactggtgttgatcaggccgcaggtgctcagggtgccggtagtggaggagttcccgggggcactgtccctgtgggtgctactccaggtggtggggctgaggtgccccttcccgtcagtggtctctctccgatgcagtggatgggcatgaagttggacacttttgatggtagtggtactccggttgaggcggcggattggctgacttatgtggaag

SEQ ID NO: 110829 - DNA, 415 bp, Zea Mays
acgacgctttgcctcttctgcttgggagccattggaatctctcgggcggaacgagcgggctcagaaattctgaaaagcagagaagcgaatacggaaaaagtgaagttagggctcgaaaatcaaaaaggcacatcggcgtgagtataaatgggctccttgggttgggcattacctctaaagtgccagatcaccactcggaaaagtaaaagcctcagccgtcactcgggcattacctctaaaatgccagcactatcaagcgcatggacaaactttcaaacgcgcaaatgaaaaccaacacaacagtgattacttggatcaactacattctagattcataatggagggagtaacacaaactcgaagccgactcattatgagtcaacttcttctacccttgtcactacatttacattac

SEQ ID NO: 110830 - DNA, 403 bp, Zea Mays
gtggaaccttctatttgatgaggcaatagtctctgcctcggcgtctcagcttcgataactgttcgttatcattgtcgttcattgtcctatttgcaatgttcgtgctttgttcgacaaatattggatctactttaccgatgacatacatcgtggacttaaagaagcccttggcaacctacactacacaactccacatgaacaactccttacgttgctttcgaggaaactagcagacacgtttgctaacagtggtgccaacatagctgattatgacctgccaatcttatcgtcccgtggtgatgaagtgtttggcaaccgactgatagatgacgaactaaggcctgaaccattactattgtgtgagcatgctgtcgctgctgctgtctcgcagctaaatgctgac

SEQ ID NO: 110831 - DNA, 577 bp, Zea Mays
tggatgttgtcttagagtcgacaagggcgttaacccctgctcctgtaaaagaaactgtcgaagctgctgcagctcatactgaagtcgaagttggtccctcagtgcccattgaaacaaagcttgttggaactgggcatagtattgaacaaggtccttcagacgtcagtctggatctggagaaaaaaggcgtgcccgataaagttgaatctcctactcccaaagtgtctactgaagagcttgactttattattcgacacacttcgggtaaaaggttgttggaagacgaaattgcagaagccagacactatgtccgggaactgaagtacccgaaaggggccttggtgtataatggcaccaacgaagatgactttctatactgcctcccggacaacaaggaaatatctgtctgccgggagatggcaaaaaatataggatttccgaagcttgaagttggcctttctgttatgtcgaaggatgaccttgcagacagccttgcatacaatagtctgaaggtacaaaagttatggacttataagcagattattttttgtgtcttttattcttgtgctgatccttt

SEQ ID NO: 110832 - DNA, 499 bp, Zea Mays
gagatattgcatgacagtatctccccttgcttgagtcgcatgaattcctcctgtttcatgtgaacactccttctagaatatagtgctcacgaaacgctaatttaaattcatcccacgtgacctgatgtccggcaggttgaatggccacataatttccccaccaagtactggcagggcctcttaactgttgagcagcgaacaacgacttctgggtttcagtgcagcggattagtccaaatttttgctctataacccgtacccattcatcggcttctagagggtcttcggctttaactaaaagtgggggacgggttttggagaagtccaggtttgaagtctcacgtggtccctgcggataagcccttctgccttgttgctgaaattgagttcccgccatttcacgtaaaaagcgggtgttgtaggcggtcgcattgaccaaggcagcgatagcctcggccaatgttggcggtaccagtggtggattgggcgtgtattcccg

SEQ ID NO: 110833 - DNA, 453 bp, Zea Mays
ctccatcactactttgacaaccacaaagtcatagtagtcatcagatttccaataggggacattcttcacaacaaagaagccatcggaaggatagccaagtgggcctgcgagctaggagctcatgacatagagttccgacctcgcacaacaataaagactcaagcactagttgacttcgtatcagaatggactgagcatcaagtcccagacaacccggaagctactgaagtatggcagatgtacttcgacggctcgctgaagctgcagggagcaggagcagggatcctcttcattgctcctggaggtgaacaactcaagtatgcgctccagttattatttccagcatcaaataatgcagcagaatatgaagcactgatccacggttgaacatcgccgtgtcactgagcattaagaagttgatggtatacggagattcactagtggtcataagcc

SEQ ID NO: 110834 - DNA, 320 bp, Zea Mays
tacctgatattctcataatgaaaaggatttagaatactcacaaccacatcattgattgttttgtagaagtaggtggtgttgttcttgatgtcctcctctttcatttgagagtcctccctttgcagtggcttctttttccttccaaacttattgaaaatactcaagaaagatgttaatagcacaagggagtatataatgaaggatgatttctttagataggaaataaacacaattcatcatccataattcacatatacatgaagtaaattccttaacgttagtgcacatcattaggaaagaggaatatgcaccctttaaac

SEQ ID NO: 110835 - DNA, 424 bp, Zea Mays
cgtagatccatcagtggacgactgagattaaatcagatgcgtaccgattcaggcgaggaaatcgtagacatcgatctagtgttggacgagcaagattgggtgttaggataacgattcaatgggatgaatctgtggcgtcggatcgggatcatacggctcgggtcgtgtaccggttggggggtgatccaatctaatatgtgcccttgtttcctgatcggacagtcgagatcagttgataccgcgtcgtccgtgaaactttgcgaaagagtccgtggatttattgataaacaacccgcagtcttgcacagagtagtctgtgtctagagagttttgcagactgaccctggtgttttccggttattgtgcgcacagtacagttcactgaggaaattgaattaattaaggccagaaatcatttttagta

SEQ ID NO: 110836 - DNA, 356 bp, Zea Mays
tctagagtaagttacttaatgctggtacaaaagataaggccatactcctaattcactaagcctaaattggtaacttagatcagctcggccatacccaacaacttgacctacataatggggttacataacctatccaaaccattcagaagcaaaacaatccaaccaggttctgtctaatcccatttaactcaaagccacctactaaactagctgctccacctactactttatcttaactacatgtccctaattcggataacaacttcaagaacgcgacctcatcaaatcaaggaaggataagattcaagccagatcttaaaaagaatcaagagccacaatcttggatggagtctttt

SEQ ID NO: 110837 - DNA, 326 bp, Zea Mays
tgggaatgcattgagttgagctccgtcgtcggaatccaaggcgggtgtagaacgtgctgtgccgctgcaagcctgcacaaaatgctgcgttaccagtagcacagcacagcagcctctcgtgacactcgcttcacacactgccattctactggccttttgttgcgattgcatggattggccaattgctggatctgctgctgggatggacgatcacgctccatgaattatatctctcgggaaaaacagctacaagaggccaaggaaccaagccaccgtggttccgctctcaccgaccacgctgctctgcaacaaaactcagaaccgac

SEQ ID NO: 110838 - DNA, 395 bp, Zea Mays
cacgccgcgagagcctatgcagagttcgtctcgtatggtgatgagggtagggttggtgtcctacacttgatggaggcgcgtgctgaagtcaaagtgtggagtagagatggcgaagatggcctccgcctccgtgtcgagttgggacaaggcatccaccaccacatttgccacactaggcttgtattcgattgagcagtcaaagcccaacagtttcccccacctagtggcgctaggcatcatggtgaggcgctgatcaaacatgtacttgaggatataatgatctatcttgacgaggaagtgactgcctcataggtacgacctctagtgccgtatggcatggacaagggcgatgagctcccactcataagcgacgagggagcaacgacgtgaagcga

SEQ ID NO: 110839 - DNA, 376 bp, Zea Mays
atcctaaagtaagtgcaacccaccttaaaaggcataccttggcttgttatgcatataatggggagaattgcccaagccctaattcaaaccccttttggacaagtggagcactaggagtaagcatgaacaaaagggtatgaaaaccacatgatcatgacttgggccaattataaaagatgtagtacacttgataccccacaaatgatagtaagaaagtgaccccaaaaggaattcataaaaaccccaaaaggttcaccaaagggttaagcacaaaagaaaaatcagaattcttctaagtccaaaccccccctttccaaagatcaaacatgatcaccttgatcccaaacttaaaaccatttggccccatggacaaagt

SEQ ID NO: 110840 - DNA, 467 bp, Zea Mays
caaagcttggtatggggcatcccgaaggatcaggataaaaggacagtcggggtcattgctacagtgtcagttctccatgatcgtgggtcacgctggcgggtgtgatcgagaattacctctgccgggggtggctcctctcatggcccggcggctaccgctattcaggatgactgtcgaagcacttgactaaagccatctataaccccctagcgacgcggagaagccatctataaccccctccttggtctataaaaggagggaccaacctcgatagagacacgaggacacaaggataaagagaaccacagacacgccgcatagagatgtgggatcctcccctctccccccttcttgtaacccctactacaagcaaccaggtgctggtagcgcaagcaatcgaagactagagtagggacattctgctcgaacatgtataatccttgcgtccactaagcacaccatccgag

SEQ ID NO: 110841 - DNA, 1299 bp, Zea Mays
gggtgccctggaactgaggtggcctgatgagctgcacgaagatgtaacagaggtagtgcacatacggtagctgacgacgagcacgaagaccatccgaaactgtgtcctcgatctcacaagtaagaaagtcaacgacatcaaactcagagtgtgagatcaaggcaccaagtagccataattgaatgtgtgtggtggcctctctgtaacccatccttggcagcagtgtccgtctcatcacctgatatagatactttgctgcaggggtgaagtcagctggagagcgtcacaacccatctgtgaagggaggtctaaaaagggccgcgacgtgagcagtggctggtgcaactccgccatgagggagacgaggaggatctgatgtaccataacacacactgtgaagatgagtcgacgaatctagaaatccaaacagctgttgtatctggctggcatgcaatgtgacatcctctctttcgaagcgaaacatcatccactgatggtccgggtcaatccatacggtagcataaagtactcggacccactcctcaacgtatctgccactcgtagtcagtagagaaagaagacctgacagataggagagatgcacctctaaatcggcaccggctactagcagaaaggcaggtagatccaatagtcggtgcgctcgcagggcgatctgcgctgacaactgtgcctggaagaaggactccaaagtcctggtgctgaaaagatctaccactgcagggtccctctgagcaggcaaccaggactgcatgggtacgtgtctgaacctacatacccagctacagcggcacgctgaagatcaagcagtcgaggaccagcagctaacggtcacacctctgtcttgtctcgctccctgtagcgggctggtggaatgggtggagcggaaatgggagcgggagggggaacagtggaagcgggagtggtggaggtggtgggtatggcggaagtggtggatgcctctagagcgacatgagctggtgcagtgggaggtggagtagtagcggtggcggatgtagagggagcagatgagcgaggtcgagacgcaaggcgacgaaccctttaggctatctggtctgaggagatctccaactggccaccctgctctgcctgctctgctgctgctgccactacaagtgctgctcgggctgctctatccatacgtcgcttcttccagccttcctgcttctctagatatattgtcttgcccttgacctgcctcaaggggcgaggagggtcctcgtcgtctcctccccctggcgctgacacattcttcgtgcg

SEQ ID NO: 110842 - DNA, 597 bp, Zea Mays
gttcgcaaatcaaacccaaatctttcttcctccccaattgagttagtcgtggatttatgtgctgccgcggtgcccccactgattcaatctatccacccgtgtagcatggtacgatttggttcttcttcagtgcacctagatcgacattagtcaacgccatatgtcaatcaacgtgccgaaccatttgggtgttaactgaacctcttgctcctgatcagtgttacgggggtgttaccgtgttagacctgtttggttttcaagagcgaacagcttaactgcttaagtttggtagttcacatcgaaccggtgtctatgatttttctctgtcagacctttttataaggattcaaggtggctataatcatgtctgagaaacgagaactttacaaactaattttcctgtttccaaatagatcgtttttcttatttccaaatagatcgtttttcttatttccaaatagatggtttttcctgtttacaaatagatggtaaaacagagtacctgtaatcaaacattttaaaccggttgccattagtatgcacaatgcactgaagtatttagatcatgtcagtttagctgacattctaccacggaag

SEQ ID NO: 110843 - DNA, 411 bp, Zea Mays
cagcatctgaagtaccctgagaaaaatataaaagaaaatcaatacttgtcgtaagctagtgaagtgcgctagcaaaattcctgtagattagaatgcatttgcaaggcatgatggtataataatataattcaaagatcaaaggtcagtgcacatatcaaaaccagagatcagtttgtcggggaacagagcagaagagatctctggaggtcgatggaagcagtgactccaaacgtcctaaatcttacatggcatagtatgggaaaaaataaaatgatgactgctaagtcctccgcgtccggtgtaggtttaggagtgtaaaagattcacaccacaaatcaaaaaagaataggaagacgatggttcgatcggaaatgggtgctcacgtggatatcgtgggagagggggtgagat

SEQ ID NO: 110844 - DNA, 789 bp, Zea Mays
gcatggacacagagttgaatttcagttcggcctaccatactcaaactgatgggcagaccgagaggactaaccaagcgctggaggatatgttaagagcttgttctcttaaacatggtggtagttgggataagagcttaccatatgcggagttctcttataataatagttactaggccagtctgaagatgtcgccatttgaggctttatatggcaggaagtccaggactactccatattgggatcagactggagaaagatagctctttgggcctgaacttattcaagaggcagaagaacaagtccgtataattcgggagaatttaagggtagctcaaaccaggcaaaagacctacactgataatataagaagactgctagagtttaaggagggtgatcacgtgtatctgaaggtgtcaccgatccgaggtacgaggagatttaaagttaaaggaaagctatcccctcgctttattggacctttcttgattttaaagcgagttgaagaagttgcatatctactagaactacccgaccatcttgcggatgtacatgatgtcttccacgtgtcacaactgaagaagtgcctctgggtaccagaagggcagctaccgatggtggatcttagtgttcaagatgtctgacttatacggaatatcctatcaagattcttgacactttgactcgagttacaagaaataaagttattaagatgtgcaaagtgcaatggagccatcatggagaagatgaagctacttgggagagagaagaagagcttcacatagattttcc

SEQ ID NO: 110845 - DNA, 472 bp, Zea Mays
aatagttgaggattgcgggttgattagctaattcatcaggggctctaatgcaaaataaacacaacaaacgggtatcagccgatcacagccgtcagatcaaccatcaacggatttgattagatctggactcccaaccatgctttgcccgttgatcgcgagatcgacggcaactaccccatcagtctcggctccatccgatctggatcagacaggtgacattcgctagggcgaaccattatccaacttctaacctcgctcgtccacgcatatatccacggccaaaaatcgccaccccgacccgcgttttgggcacgatagcaagattgcccccacgatggcgccattgccgacaacggggatttcccgatttaacgtcctacgaccctggccaatcgatgaaacatgtagtgtggatcaactgaatataggagagccggtactcacccaggatggcgcgcaggagtttcgcccg

SEQ ID NO: 110846 - DNA, 496 bp, Zea Mays
gggcagtctttgatgaaatgtccagacttcccacaattaaagcagccacttgaggaactgggaagggcagggaaacgagcaccaagggcactcagctgattgttctgggcgggggcaggagagggaccaatgaacactggttgcttgaagggatatgtgggtggacaaggagaagaacgatttgggttgaagggacgaattatcaaccttgtccgcttttcatacccctaagatgatccttcacccgcatatctcttcatttttccttggcccgagttcttggcttcaactgacagtgttgtgcttatagccctgctataggtaagatccagacacatagccattttgcgctggagtcagtcattcaatcccctcgtgaaagcaatttttcttttttaaatcagtgtccacttgatcgatggcatattgggagaggtgattaaacttgttgagatactgcattacagaatctcccccttgcttcagtcgtatgaac

SEQ ID NO: 110847 - DNA, 429 bp, Zea Mays
attaggtcccggaaagcctagaggtcactgaaatatggaggatgtactttgatggctcgctgagactacaaggagcaggagcagggtttctctttattgctcccagaggtgaacaactcaagtatgcactccagcttttgtttccagcatccaataatgcagcagagtacgaagcactggtccatgggctaggcttcgcggtttcactcggcatcaagaagttaatggtgtacggtgactcactggtggtcataagtcaaataaacaaagattgggattgctcgaccgactcaatgggcaaatattgtgcagcagtgcggaagttggaagacaagtttgagggattagaattccaccacgtggaaagggatcgcaatgcagcggctgacgcattgtcaaaactgggatccagtcgggcccaagttccac

SEQ ID NO: 110848 - DNA, 497 bp, Zea Mays
caataagtctgtgttcgataggggtgctagtgcggactcattctgaatggtgaatcactaggattcaaacgaaaaacttgaaacacgggggttatactggttcggaccggagccctagtccagtgtagtactgatcgtagtattacagtagagcgtgttacaactggtgggcttgtgtgcgtacgaggggagagggaccctcttttatactttaagggacgatccttacaagtgagagagggagaaagacacaaagtgagagagagttctttaactatcgccctcagttgtattgcgtagtgggcccctctggggccaatcttggggtgtgcatgcgcacgttatagctccttctgacaggtcgtgtgccttcatattccttgcatggcgctctatcccatccatctacccttcaggaccctatagtttactctatgcccatgccatcgcaccggatgggtcccacagaacgtactcccggtaaggttgaggttcgt

SEQ ID NO: 110849 - DNA, 397 bp, Zea Mays
caggactgttacaaccattgccagttccaacatctttgtggcagataatttctatggatttcatcgtggcgttgcccaaatctcaaacttatacatgtattctggtggtcgtagatgtctttaccaaatatgcaaatttcttgccactgaaacacccattcactgcactgtcagtagctcgtctatttcatgatcagatctataagcatcatggccttccacagtcgattatttctgatcgtgacagtgtatttctcagtcatctctggcaagagctgtttcgtttggctgatgtgaagttgtgtatgagctccgcctaccatccgcagtcagacggtcaaaccgaaagagttaatcaatgtgtggagacatttctgcgttgctttgttcatgcgtg

SEQ ID NO: 110850 - DNA, 295 bp, Zea Mays
gctaagacagtaagggaacattatggtttgaagaccgactggtagttcctaaaaatgaggacctcaagaggaaaattttggacgaggctcacctctccaaattctccatgcatccgggaagcgacaagatttaccacgacctaaaacccctatattggtgtacaagaatgaagagggaaatagccaagtatgtgtccgagtgtgatacatgtcggagaataaaagcaagtcacctaaagtcgacaggtgccttgcaaccgctttcaataccttcatggaaatgggatgacatcag

SEQ ID NO: 110851 - DNA, 357 bp, Zea Mays
cgatggtcgtgccaccgtcgatcgtaaaatagacggttcaaattaagtctacctattggatgctgtagggtgagtctgagccatcgattgcgggctgtgtggctgtgatcacgcgctgaagtataatgaggatgatctaatctagactgccggtgtagatcgaatggctgagagcatgcaataccctttcactgcagtaggtttctaaaagaggccctaaaacctttataaattaaaccgcgggctaggatagtgttaaaatcattacatagaggtcctggattttgcagaataaaccctagcgaattcataaatgatacccgcagtccatagctgttgatttgagtaaataaaaat

SEQ ID NO: 110852 - DNA, 386 bp, Zea Mays
tcttccatagttaatgcatcaaatacgaattcgaagttgtggcagcacgttgtcctccttaaattatgcacgaacatgcgccttcttggcccctccttggaagaaaacgatcgtaacgacctcatatcttttggtaaatgggttctatctgtaggtgatggtacacttcctgccgaaaaaaggactggtgatcgtgaacccacatggatcacaattcccgatgacttgcttgtccaaactaataatgataaaatagccacgattgtatctgaagtatacccagatttctttatgaattacgataaaccaacatatctagcctcgcgtgccattatatgcccaaacaatgctacagtcgatgatattaataactatgttgtttcgct

SEQ ID NO: 110853 - DNA, 458 bp, Zea Mays
tcacgaagctaggctttataaggaaaaaatgcttttgcagaatggattgaacactagaaaatataaactagtgaactgagattcagtttgccagcctaaggactatggtggcctaggtttgcttgaccttagatgcatggacactagtcttttggttaagtggttgtggaggcttgagtcctcatatggtttgtggcaaagaattattaaggaaacgtaccttaaagattcccttttagttcagacaaagaaaaaacccaatgactctcaattctggaaagggttgatggaggtcaaagatttatactttaaatttagaaggagaattataggggacacatctagtatgtttgaggacctaaaatagtcttgtgatgctattattttgtcaaatactagagatagtgttagctagtctctagggacaaaatgtttttagtcaagtcggtgtatcaaat

SEQ ID NO: 110854 - DNA, 738 bp, Zea Mays
gtttgcgctacccattcgagtcggatcgtctctggcaacacccttgggggctgggttgcagcttgcgctacccatccgagccgaatcatccccggcaacaccctcgggggctgggtgagcgccaacaccatccttgagggccaagctctctgcagcagccacctctaaggctgaaggtccctcagtcacttccatgggagcggggcaatccaagtcagcttcctgaccctcaagaccacgctccaaggtcgatgaggcgcgggacgctgcccgggatgaccccaacctggcgtcgagcacatcaacacaaacatccatcgcgtcaccatctgccggttctgataacagatcctctggaaccatatcttcaagagtttgatcaaagttcgccagagataattcttgtagaccaatgagggcagacaaagcaggagaaggaacgccactgctttccccaccggctatgtaacgtcgactgttcttccgaatcagagggatttcatcttcttcctcctcatcatcttcatcagcaacacggacagcacacccattggggtcagcgtcagatgggtcacacccattgggatcagcttcagtaaattcaggcacgggcacttcctcagcagcaggagccgaaggaccagcatcccgatccaagcaagacactcgccgaagacgtctcttcttctttttctgcccatcagcaggagaagcaggttgattggctcggcaagggcg

SEQ ID NO: 110855 - DNA, 842 bp, Zea Mays
ctagaccctggacgatccgcaatacaaaatatttgtgctgtgtacggtccgcactcaggccccggacggtccgcagttcaaaaaataaaacaaaaatagaactactcgagttctgtccaaacactagtccttcaactacggacggtccgccacctaggaccagacggtccacattacaaaaacttcatgaaacatagaaactccgcgtttttgcccatcatctcaagttagacctacggacggtccgccatgctggcccggacggtccgcggtacctcaattcagcccacattcaagaaatcgcttttgaataagtttttctttcacgaaccaaagcgttgttagccctcacgcaaatgcaccaactatattagcaatgaggcactaaagacatgtcaagtaagatattgacccctcttgatagtacgactatctagcctactaacccggtcaattatcaacctctaagcaccggccttttgaccggtaaaacaaaaacctattgttatacctttgccttgagcattcaattccatctccttaaatgatgaacaatgggcatccataatgtagccaaccatgataccttttaccatttgtccatagcatgaagttcctccaccatcatcatcaagccacttgatcaatagcccagatcaacacatggcttgataattctataatgatatgatccactccatgttatcacatagccttcttggttcatcaatctcaacatagcttgctcttcaccgttgctttatgtccatcggtgctaagtccttgctcttgcttcaccgccacgtggtccctcacacatgagcctttgacttgcccttcac

SEQ ID NO: 110856 - DNA, 404 bp, Zea Mays
ggctgggacagattttgacaaaactgtcctttccccaaaagatgataaaggaaaaacaaggtctagtgtgcccgagggactggtggagggctcagattatgatgatgataaagtgaatcttgaagatagtgaagaagacttgctcagttctcaagaattggaagctctagcaaaaagtgttggggttgatataagcacaccacaagaagaggtggatgataaaagagaggatgcagttactaagaagtataatcaagcggagaatgaaaagaaagggaagcaaaaagtaggtgagcaggctgaaggtccaagaaggagtcccagactggaaacctctgaagagatgaatgtgactgagaaagctatttctagagctgcagccaaagatgcttttctatccaaag

SEQ ID NO: 110857 - DNA, 345 bp, Zea Mays
ttggccgacactcttaagataagagtgtcggttgcgtgttgaaccgacactcttaatataagagtgtcggtccccacacttctatacgaataagagcgtccaatttagagtgtcggctaagagtgtcggtcaaccgacactcttatactaagagtgtcggcttatttcagtaagagtgtgggtttttggccgacaccgtttgccttttttcttgtagtgcacggtgaatcttagatatagattatacttttattcaatagtaaagttctaatatagtgatctttaatttcgatggtatagacgagctccatgatatatgagatctaatggagcaccccccttttt

SEQ ID NO: 110858 - DNA, 448 bp, Zea Mays
gtcaatagtcattcacagacctaggtgaagagtttttttggtagtagagtaatgttggaaccattaatactctgcattcaaattgtttcgtcataaaagctattgcatagagcgtgaaaatctgatgatatgactgaccaacactatttcataaagttagtgttgtacccatccggtccaggagattttccagatggtaaagacgcaacaatagaattaacctctttcctcagtgaaaggtgattccaaacaagataggtcttctgttgcttgaatcaaagtgttcagatcaaaacccatgttagtaaaatcagatgtctcaagtcttttcttaaacacttcatacaatatctttgctttcccttcatggctagaaatgtgatgcctagaagagttgcgcaacgtggctattgagtttaacctctgtctgacagtggtgttggcgtgg

SEQ ID NO: 110859 - DNA, 569 bp, Zea Mays
gcgactaaagtcatttttcttccaaaagcatgtatgctaaggttcttcatgtgtgatcccctctgtttccctcacgtatggctcacacgccgatccgcgcacgtttggtgttgtctgaagggttggccgacgcgtcgtccccgccatctaggtccttagggatgcgctcctagagactgactagcgtcgacacaagatcataattaactcgctcgcaggtgtacgcagtcttgatagaagcatatgccatgatgatcccgcacgaccatgaacttggcataacacagtgttccaagtatggcgttgtaggaccctaggaagtccactacctcgagctgaagccgtttagtgcagaagttggaggggtcgccaaatctaatgagcgagtgatccgcccgagtgggtaggcttggtgctcgggaatgacgccgtggaacgatgccatgctttgccgcaacgcaaatcgtgcgatccccaacccgtcaaaggtctcaatgtacatgatgttggggtcgctccccctgtccatgagaaccttggtgaagcgctgagagcctacggctggctcg

SEQ ID NO: 110860 - DNA, 412 bp, Zea Mays
aaagattatgatttgtctattcattatcacccggggaaggcaaatgtggtggctgatgcccttagcaagtctggggttccaaaagtggccttgcagttgattgccgatctagaccgtttgggggtcgccttgtgctatgtcggcactgctagtgaggagactcgtatgcttattcaatcttccctcatggagagagtgcgtgcggctcagcagcagaatcgtttattgcaggaagctcgaaagagggttggcgatggtaaacccgggagttctccatcgatgagaatgatttggttcgtttcaggggtcacctttgtgtgcctcagaaatcagaggtgaagatggatatattgagagaagctcataaaacgccttacaccgttcaccctggcgaaaccaagatgtaccgaga

SEQ ID NO: 110861 - DNA, 618 bp, Zea Mays
cgatctaacgccccaggcgagataccccgaaacgaaatacctcgatctaatcacacacgttcgtggtcagatcgacgacccggatctaaaacacccctgactcgatctcgttcgtccatatttgatcagtgacccagatccaacgatccaggggctgtcttcatcccctagaggaccccaatgaaaccgaggtcacacggcggcggacagaacacatggccgcggagctcgccggtgatctacgccccgacgatttcccccaaaatttcgcgggctaaacaacgcaaagatcactgcgcatcaggtggaggtacctcaccggttcatgcagggccgatcgatccagtaagcaatgtaaggcgggtggcggcgcttcttccccaacggcgtggaatccgcgatgccacggtcgatgaagccacataggaaaaccaagattatgcgcaggaggcccaggcgactagcattgaccgcatgccaattccagagccgcgccgccgatgagatgcccatgaggcggccaggatcttctcttaccccgcggcgacaaattttcttctctctctcgctttgatgtcctcatcactccatggatgatggaggcaaggtagggccgac

SEQ ID NO: 110862 - DNA, 491 bp, Zea Mays
tcctaccctacacagcctcgcgtgcagaccacctagttagcaccatatatgaccggaccatccaagtatatcctcggaccattcggcctggtcgtggaccgtttgacaccttacgccgagccgtctgagtgcgcgcacgcagaacaaggagctgcacaatatgcacaatatttgcacccatcacaacagcactacgctacctcatcgacaacatattataaccatgtcataccacctcatatgcatagggccgaatattctttagccaatagagagctcgagaaatatagggcaagagagggtggcactaataggacacctaatacacattttgaatatccctaggaggaaagtcgacaaaataatatccggcaacatgagggtttcactccaaacttaatagatggtaactattaaatgtcttgagtcataagtcatcaaggctgttacactgtatatagaccgtgagaagccaccaagtccaatacaac

SEQ ID NO: 110863 - DNA, 541 bp, Zea Mays
tcctctttagcataacaaattaataccaaactaccaagtgaagcggttaacataaaaacaatttggaagctataagaaaggtctgaatgacaaaaaaaaataaacgaatgtagagtattcatatgcttagccccatattttcatatccagaacattgccaattatacaagatatgacagaatacaaacaaaacaatttatatggatccagctatgatatgcaaccaggcctagctgttctccttttctgacatgtagcttgcaaattgtgataggatgaatgatgggcacttgaccctgtcatgatcttgtatttcctttgtattatctagttagctgagcatggcactaaacaatgctaaaaaccattttagtacatgacaagcgtagtgtttggaggcatgtagtttgcttcaaatgtcccaagtcaaagtgatacttctaggtagcaaggatggagtgtttattaacttaaggcaaaaatatttcctctgagttccggtgctaattaataccctctccgatccaaattataagtggaa

SEQ ID NO: 110864 - DNA, 413 bp, Zea Mays
agagatgtatagtccaactcgtttttatcactgcccatggtttacccaattactcatactgctctaaaattggtatcgatttatgcaacatttttaggtattatacttttgagagagaactaataacaatagtcaattatttgtgatgctgccatcagggcaaacatttctcctcatattatataccaatttgttctataaagcattatttcgatctcttcgttgttcggcaaaaagagaagctttggaatagaacaaacaaggccaagaattcattttatctgggaaaatcaccatataactagcttttgatgaagcaaatgatgataactgcttggcaagaacgaaacaagactggtatccgcctaggatccatcttcaacaacagatagtactgctctcatacgaagaaa

SEQ ID NO: 110865 - DNA, 420 bp, Zea Mays
attaaagatccggttgtgtaaggacaggagattatgctttatgaaaacagaactctacttgctctacttttccttgttcttctcctacctcgcttctccctcctatccagtagttaacaattggtatcagattaggcgttcctcggatctccattcatggcttcgcccatcgattcacagctcactctggtgctggagaatcagactcgctccctgctgggcgagctcgacaagcgcatgcaggccattgattccaagtgggaatcgcgcgtcggtgctctagaatcccaagtcgctaaatcgccgattgatttggagtctgtcgctgcagacttccgcgccaactcggtttctcaccagatcgcggtggaggcggctgtcgacagccggatccgtctcctcgaagtggaaacctccaac

SEQ ID NO: 110866 - DNA, 592 bp, Zea Mays
gtatgagcgagttctggctattcgatcagaaaccgacggccaggattagatcgcggttctcatagatgggtacgttaagctcaccgtgggatccagattggatggttccgattttatgaagcctgatctaattctgcccctccaattagatctcaacggcccgagtcccacccaagtgaataggtacacacttcaatcccgcgggttgatgttagatcatacggtgcacggcgtcgagacgaagggggaagtccgcttttaatcctagacgcccatccccagatggatggtagccatactatcttccccctctcgccagcacccgagctccacggtggtgcttgtgattaccgcggtggagcactgccggcgagatgcccgaaccccccaatcggacgtgattacactatgtgcacaccaatgtgaattacatggagaagcccttactgtctctggtggtgtaggtagcactgcccttgacagcccgaggatccaccgcggcggtgcaccaacagcgagaaatcgacggtcacccctgccacaagcatgcgttatttcaccggggacgcacatgcccagaccacacgatgcc

SEQ ID NO: 110867 - DNA, 582 bp, Zea Mays
gttgtgtccttgagaaagcatttgctgaatttgtagaagaatcacatgatattgggttagcagatgaggaggacgaagaagataacacaaacattgatgctggatatgtagcacctgtggactcgtcacgcgacacaaacaatgatgattttttaaagagatgtcatagactattggatatgagaaatatgttaaattgttgtaatactatggtatttcattcaaatgattgatgttgtaataaactttcttattacaaattacactttttgcaagacaaattacaccctctccgcattgatttgtattcaaatggttcaatatgtggcagtattgtttcacttttgcaaaacaaattacaccatatattttctaactgtggaacaaggacaggagtacttcctcaatccacacaaacactacatatcacactataacaccactgctacagctggaccataacaataaattatcttctcacacaagaaaatggttaatgccacttccactgttctacttatagagtacaacacgaccctttcctttttggtttgatttatgcaatgctccaatatatttctt

SEQ ID NO: 110868 - DNA, 544 bp, Zea Mays
gtccaatgatattgcgcgcctctctaggaattttgtcgagtgtgataatcaggggtacccagattaacccgctaaaaaatacgctcaggaaaggttaagacatgacccccgaaggaaagcagccgaggcacctccttacccaaggctcaccgtggaggtcttccctacaggcactgaggcccctccccgagggtctcctgcctcagaaaaatctccgcctcgcccgaagtcaccaccgctccgttcgtctcgcccgagccgatcccaggcagataggacagaggcacccaacagccggtaggggacactcacatttaatgcgcacacctaccccacacagaggcataggagcacagtgactaacaagacaacaatcatatccatgcgcaacagcataattacgctcccgctacagtgcacgcacgtcgcctgccatccccccgatgggacatctaatacgataggagaagcagaccggccctcgggaatatgacgaccccaagcttcacagcatacatctcctaggtgtataaatacaacggtg

SEQ ID NO: 110869 - DNA, 293 bp, Zea Mays
ggacaaaatgttctagctttctgcttgaaaggtctgaaaccggacttaatgggcagccgatgctctactatctcacggcttaatcctggcatctcagtatagttccaagcaaagcaatcagaatattctttcaatagacccatcatttcatctctaggatcgatctccagggtcttgttcacaaaagtcggtcttgaagttttaccatcccctatatcgatctcctccaaaggatcggccgatgtaaacccctgtcctaatttatcgagatctctgaattcctctattatgtc

SEQ ID NO: 110870 - DNA, 593 bp, Zea Mays
cgaacagagagaagtgacaagttagaagcattgcgaaattatagaaggaaaaatggattgtgtttcaagtgtggcgaaaaatggggtcaacagcataagtgccctacccagatcttgttacatgtattagaaaaatcttgaatgccattgaattagacaatgaacaattcagtagggaagagaatgaaacggtggtggaagaacaagtgttagcagtccaagaaactgtacctgggagtaagaaaagaagtacactgcgattactgggcatcattggcacgcaacaagtcttgatcttggtagactcatggagtattggcacttttgccagtaagggattagtggatcatttgatgttaccaacacagagttgtgcccagacacagtttcgggctgctgatggaggaattatgagctgtactaaatgggtagcaaggctgcaatggattatttagggctattcgtttgtttctcaggccaaggtgttaccattacaatgttatgacatgatattaggtgaagattggcttgaggaagtaagtccattgtgggtggattacaagtcaaagcaactcaggtttacctatcaaggt

SEQ ID NO: 110871 - DNA, 698 bp, Zea Mays
ggaacttcgtcatctcttgtagcaggggccattttggtagtctatgtcatgtttgtcaagtaggtcgccatgctcgtcctcctttctctagttcctccctcctatgttgcttgggcttttaattttgtacactgtgatgtatggacatcacctgtttctagcctctcagggtatcaatattatttgttgattttggatgatttctctcattttctttggactttcccattgcacatgaagtccgacatttttagcaccctctcgcatttctttgcttgggtctacgtgctctctactagtgcgacaaaggtcgtgagtttgaccactcctcccattcattttgtcgttctcacattgttcagttgaggctctcatgcccctacacctccccttagaatggctaggccaagcacatgattcgcgctaccaccaacatgatgtgttgcatccttttctaagaatctcttcccaccagctattgggtggaggcgatgaacactatcacctacattcttaattgtctcccctacaaggtggtcggccatcacactccattcttcatcctcttcggcaccaccccctcctttaagtatattcacgtctttaggtgcgcctactataccaacacctccaccactgatcctcacaaacttgtgcctcgctccactcgttgtatcttccttggatactcttcagac

SEQ ID NO: 110872 - DNA, 381 bp, Zea Mays
ctggtatctagccaattgaatgacaacgttcagacgttcttctaatacatcaacatcttccagtctggttgcttctgcttcagctatacatttaaatgtcagtctgggtgctccaaagatcaaatccgctggcaatacttcttccgatccatataccttgaagaatggggtattttccatgcaagtcccggcttggctaggttcgcaggctccaaactacatatgttagttctctggtccattttcctgcaagcttttggctcttgtcaaacacctttttcctaagtgcatcaagtatcatcccgttggctctttccacctgcccattagctcttgggtgtgccattgatgcatacttgatctggatgctcctctgcttgc

SEQ ID NO: 110873 - DNA, 423 bp, Zea Mays
gccgggtcagagaagcgataggggcgttttgtctgaaggagctagctttggagtttggagctggaggcactatcgacgaaaggggatatattggcccttcccatgcaccatgagccgctctgcgttggctggattggctagctgggtttcgtctcatgcttatttcgcacaactgcacatgtctgccgctacttctgggtcaatcggcccaatgtttgtttatcatctatgcactctgcatctcccttgctgctccaagagtgcggcaaagtcttgtttctttaatctttcagcacattggtttctcaattacgtgccgtctgttgcttcttcgcgttttcattgccgaagtagtccagttatgtgctcttcagcagcttactcgtctttatacctatattcaaactccactttacaaacagt

SEQ ID NO: 110874 - DNA, 497 bp, Zea Mays
gattcatgctgtgtgagaagtagataacgtcaggaaggggtgaaaagatcctgggagaggtggagccagtcactggccggttcggccatcgtgtcccaccgtagttagtcatgttggcatcaccggagctcactgtttccccgaccgtgacactcagcgatctatccttcgggtcataaagatcgtggcaagcaaccagttatcatccctgaaccatttccctctcacgcgccacggtgagcaagccaccgtaaaaatatcctagccgcggtaacctcgatcccaatccaaaattcgtgataagctcagccggagtctataaattggaggcacccctattccgcctacttgttacgcgcccagcacaccacttctcgcctcccatcatccaccgtagcgcccaaattcgggttttcccccaaatcagttctccgcgccgccgcgaacaccccctccgtcgacccaccactctgtccctccacccaccttcctagccg

SEQ ID NO: 110875 - DNA, 282 bp, Zea Mays
gtatttaccacatgtttgtgctgggaacctagtaagatagggtttcactggtttccatgcattggtattacactgaattagcggttatgcagaatacccttaaccttaacctggataacacaatgcaagctgttatttggtttgcctacataaagctgtacattgttacacttgtaatttatttcctgcgtaagtggccagactaggccttgggctgtagagtgggtgcgggagggagtgtgcatagttgaatacacaggatgcgttacacatgtaattggt

SEQ ID NO: 110876 - DNA, 483 bp, Zea Mays
ctcgatatcccccttaaggacaacattaagggatggcgcctcgagtggttcaccatggagaatcacggcaaatccctcccccctcggtcaggaaggcaaccagacgttcgcacgcctagctgggtggagtctcccacttattcagaggtagccgaagccaaaggtgctgcttgctgaaatctgctcgttgaaggacaagggtctgactactgaggccgtagttgccgactttgtcttcaagaatattcaacctttgaaggacagagtctaccctgcttacttgtatactggcatcaatgattctacccgggtcacaaataggcagattcccaatgaggacttgctaagccgactggatatgatactgaggggcagggtatcaaatgctggtgctctcttagcttactccgcgtggaacctgcctctgaataggcccttctctcaatttgtctccaatcctcctgctcgagatggtagcccggg

SEQ ID NO: 110877 - DNA, 573 bp, Zea Mays
gatggagaacggtccaatgtatctcgggctaagcttcccagagacactgaatcgaacaaatcctttagtaggtgataccctgagaagaacttgatcccccactgcaaattccaagtcccgcctcctcacatcagcataactcttctgacggctctgagcggccaaaatattttgacgaatttcccgaaccttctcagatgtctgctggacccaattagtaccaaccagagatctctctcccaaagtctaccagcacaaaggggagatacatcgccttccatataaggcctcatatggtgccatcttgatgctagcctggtagctgttgttataagcgaacttgacaaaggcgagatgatcctcccagctacccttccaagacagaacataagcgtgcaacatatcttccaaggtttggatagttcgctccaactgaccatcagtctgagggtgaaaagcgacactaagagagagcttggtacccaatgcacggtgaagactctcccagaatttggataaaaatttggagtctcgatctgaaacaatggacttaggcaccccgtgaagcctgat

SEQ ID NO: 110878 - DNA, 772 bp, Zea Mays
caggagtcctcatgaaatgcattcactcggctaccgggaaacaattgttagatgaaatccatgccgggcagtgcggggtacacgcagcgtcaagaactctagtcgggaaggctttcagatccggtttctattggccaacagcgaagagcgatgctgtcgaattagtccagaaatgtgaggcgtgccaattcctatcaaaacaacaacatttacccgcatagcagctgcagaccattccagtaacatggtcgttcgcatgctgggggctagacatgattggacccttcaagaaagctcagggatgctatactcatatactggttgccattgataaattcacaaaatggatagagtacaagccaatcgcttcttttacctcagccaaagcagtggaatttatacaagacataatattcaggtttgggataccaaacagcatcatcactgacttgggatccaacttcaccagcgctgagttcttccatttctgcaagcaaaggagcatccagatcaagtacgcatcagtggcacaccccagagccaatggccaagtagagacaaccgaatgatactggaagcactcagaaagaaagtattcgacaagagtgaaaagcttgcaggaaaatggaacagagaacttccatacgtggtctggagcctaagaactcaacccagtcgggctctgcataggaatagcccgtttttcatggtgtatggatcagaggcagtgttgcctgcctatccaatcttcggggcgccaaggttaactttc

SEQ ID NO: 110879 - DNA, 517 bp, Zea Mays
ggtcgggcgtaaagactccagaacacgttgttttccaattgggccgactttggtcgtagtttgttgtgcgaaaatggtatccattgacgtcatacccagaatatttcttgaccctataagcaaagtcgttagctacttatctcaactcggcactcatagacggatctctttggccctgcaagtattcacaagttaaaagacgctaaattgagttcatagacggatctctttgacagactaagcaggtaccttacgtttgaaccaggaaatgaaatcgggcaatccatttctcgcaccctttctaagaagagtatcatattcctgtggagttgggtcccttgatcgatgccaaaattcatgaagaaattgttccatgtatggcgtcacctcttcaaggttggtcaatacatatagcatgatatgccgccactcttcatgtgtcagggtcttggtggtcgagccacttgcgcttccgagttggcctcgaaatatgttgaggttcgattcattgtcgcca

SEQ ID NO: 110880 - DNA, 651 bp, Zea Mays
ggcagccatagtgcacgctttaaagatatggaggcattacctaatcgggaacaagtgtcacattttcaccgatcacaagagtctgaggtatatcttcactcaaccagatctcaacctccgtcagcgaagatggttggagctaatcaaggattatgacctggaaattcattatcaccccgggaaggccaacgtggtagcagacgccctcagtcgcaaaccattcagaataaagggaaccaactttttagaagattggaagaaagaatcagctcaactgaatacatgtctgggaaacagcggcagtctcgaagtcaaaccaatggtggaagacctcatatacaaagctcaacgcctagacccagagatagcaagacttgtggaaaaagcccgcaacgagcaactcccggacctcagggcagatgaacaaggagccctttggttcaaaagtcgtctgtgtgtaccaaaaggggaagcacgagagatcctactcgaagaagctcacaactcagcctactccatccacccaggaactaccaagatgtaccttgacctcaaaaccatatactggtggagagggatgaagaaagagatagctcagtattggcccggtgtgacacctgccaacggacgaaggccaagcaccaaaaacct

SEQ ID NO: 110881 - DNA, 436 bp, Zea Mays
tattttggacctgagactcagcatcttaccctcttgaatattcttaaaggtcaggaacaagatctggataatctaatgtagatagtggtgcccaaaaatgtttggtataactaatgtcaactagtattcagtcaccaaatttttcctgtagaaataagcgagagctattcgatgtaagcgagtctaagggagtgggttcgggagctagctgaatcgagcggcttcgagcagctctgtccgctagatttattcggatggttcaatatatgagtataatatttctttttgagagccacttcgttctacaataaatcaattcaaacaacactaaaattagaaatggagccaccatacttcggaaccaaacgtggcctaactgaatcgttgacatcactttaccatggcccataaccacatgatcgttttttaaaacgac

SEQ ID NO: 110882 - DNA, 431 bp, Zea Mays
attgcgatgctccagagtcaaataaaactgatacaagtatggagttaacaaggaacataccatacaccacgtcggcatcctcaagcacagtctctgctgtcacatggttgactcttcctctactctggttctgcggagtcttgttctgtgcaaatccacgagcaggggtgttctggtgattcctctgattgttgctcttttgaggtgtctgctggttgcgcctagggcagttgttagcataatggccaagctcaccgcacttgaaacaaccattgggttgcactggtgcgtggttgcttctggcctgcgtgtttacggcgccaccttgacgattctgtgaactcccaccagacctctggttggtctaggagttgtttctctactggttctgactttgattatttctctagccttgttgtccagagtgttgc

SEQ ID NO: 110883 - DNA, 302 bp, Zea Mays
tgaagtctggcccttcctaataatagtactactgctattttagtccaataataatactaatgctactccagttggggcctcactattgtttctttatagagggaaaatagtattctaaagggagggtagacaaatagatggaaaacagcagatccatttcctctcatctgcagaccaaatgaatgttgccctttatgcaggcaaggcagctatcgttttttgggtgatcagtttggcgctgtgcattgtgtgaaatagacatttgcctgtaacatatgcatataaaagaggccgagcagcta

SEQ ID NO: 110884 - DNA, 308 bp, Zea Mays
gagagatttaggtaaatcaacatccgatacttgaggacaggttataacagataaccagataatagggcagaatcattaaaggatccagagaattggatgatatgaccacaacatgattcataaaggtaaacgtttactagatctaggtgaaaagagaggtcatcaaaccagatggcttctaggttgagcagaagagaatttaatgaggattttggacaaggtttccaaaaaaataatgtgaggctagacatggtttgcgtgaacagataataaacttttttctgacataaacaagtgcacaaggaagc

SEQ ID NO: 110885 - DNA, 637 bp, Zea Mays
ctgttacaacggtgacacctagaccatttgaatacaaaaaccacataggggtaggccatcaagacctacacattcgtagctcgtgcccagaccaggaagtcttgtagtttggaggccccagcccacctccaaagctgacattcctaaacaatccttgtgatcaaagtgagtttgttaggctctgaattcccaaagacacaagaattcctatgcttccatatctcccaggttgttaaaatgataagggaatttagtccatgcctcctttattttggtactaacttgaccaccttcctccaccacttaggaaaggaagtttcagcaatattgggtgccagctctggcatctttatagcctggaaaatataaaaccaaagttgcttggagaaaacacagctcactaacaggtgctgaatattctcatcctcttgatcacaaaggggacatgcattgggatggggcagccctattttagccagattgtccgcagtccaacatcattttttaaacaccaaccaaatgaagaatctgtagcgcaggggcgccctacttttccaaatcgtttttccatggggcataacgaattgatcccatgaagaaggccaaataggctgacttgcttctataatcccctgat

SEQ ID NO: 110886 - DNA, 549 bp, Zea Mays
aaaggctttgctgcaagatcatctcttctcaagcgaggtggtccgctagctcatgaattggctcggcatcctgttgtcctcaagatcaatgactggattttttgtcatggtggccttcttcctcaccatggtgagacccttcacctctccttggcatccttgttacccttggcaatttgcatacgtgatctcagtctaaaacataaatctggttcaaggtcagaacctgcccgacaggagcactgcataaaccaaaatgcaggataggctcttgcttgagcctaccattatcaagcaggaaccttgagatttaatcacaaatgttctttttaacaatacatattgcaccaagtgaaccgaagtacctcaattcctttcccttcctatttgcagttgaatatgggattgagcgtatgaacagggaggtatcaatgtggatgaaatgttcaggcgaagacagtggtgacgagacagacatccccttcatagctactagaggttatgacagcgtcgtgtggagtcgaatgtactcgcaagaccctgccgaaa

SEQ ID NO: 110887 - DNA, 568 bp, Zea Mays
gttagaggtagttctgggcatttttcattgctcgacactaccacttcggtgcccggcactgctacgcagaaggccggcattgccgcaccctcttccttacgattttgactcttagattttctaggaattggcagttccctgtgtagtagtttggcatatttagtcgacactagactgaatactactgtgttacacaatttcgttcatcttgtggggattgtgtgaaaattgggatcacaatcacggtgttgttcccgaagaagatttttagtggctcacattcatccccctttggtcacctcatcggtccttcaacaactagccattggaccgcggttcggtgcaccaccagactgtctaggttgctgagagccgctttgcaaggctctctacgtaaccaatccaatgcatacttgactagtccagtgaaccagtcgacaacccatttcttcaatcttatatcttcttttcttgggctcttttgatattgtgtattggacttgtattgagtatttataagtctttttggtcttcttttgatgtgttgcatccttagagcctggtcaaa

SEQ ID NO: 110888 - DNA, 1194 bp, Zea Mays
acaaaaacgccctgccaaaaatacaaatgttccaaagaataaaagttgtagacaaacccttttatttacttttcaagagagtgcaataatgatgttcattattgaattcaacagtgaagatagttttccaaaactgaagtcaataatcagaaaagatgagtcaagtctagatgatttccttgtgtacttttcccattttatactactgatatcaacaaagtaacaatgcagtttgtcctaaaagctaaaacattgtcacctagccttctacagtcttgaagatgattgtatgagcaccagagggaaatgttcgaacgcaaactgtcaggcaatgcaggggctaagaacttaaattgatagatcattgcatactcaaaattcaaaaacatgaatgaaacctgtgcagctgttggtgcaactggtcttgggtaaaatgtgttttgtctcatttcctcagtttcttggtgtagcgagtgctgctctgggtctgctttactagtgctggccatccaatctgctgagagggtccgcatatcagagagaatcctgaaagaatgcaaaggaaaatgagcaaaactttttagttttccaaatccattcccaaaataggagtacattgtcacacaagaaccagttcaacgattaccattcacaaaatcaataaaacagagaatcagaaatgtctgaacccattggaactttggatagcacatatacaatgtccactgtgaagtaaataacaggatggttgcaagagacagaattatttaccgggaaaggtccttcttctttctaaatgttgtacgaagcatagtatcaagtttatcctgtacaaaatcttggacctccatgtgtatcgtttcccacaaagcttcagacactaaagtatcacaatgctgcatcatcaatccaatactctttatgtaaccaattaattcaagcagagcccttcgttcttcagcagtatagttatagcgtactacctgcaatgcaaataagcaataaacatcgagtcatgaacacaaaaaaaggtgaaaatgtatagtcattatgagttttgaagttataaaggaatgatttatcacaagaccaaaaacaaatcaaggaaaacaaaagagaatttcacaatgctaacggattactaacataacttttccaatttccaccatgatgcatgcttaaataacaaagctt

SEQ ID NO: 110889 - DNA, 691 bp, Zea Mays
ggaaaaggcatatttgtgttcagtagaactcgtagtttttggtgataggtttgcgacaatcgcaaatagtgaatgaacatataaaattaataagtaaataagtcagattttgagtgaagttaacaatgtatcgagaaaaagtaagatgattggtgcttcattatttcactaatttaatttactgccaatataattatagtgaactatgtgattcccttagaacgatatttgtattggccaaggatgatgataatgatgatggcagaaatgcaaaatcacaggaccattagcagctgaacctcaaatacctacaatttgaacaaaaaacaaacagaagaataaccgtaaataagttgtattgtacaaacaatcaaaattatgcagaatttacattttgtaagaaatgtactaaactactaatgccccttcaaatcaaatctagataaggagtataacatcgagatcatgtacctcttttattatgggatgcaatgtctcactgatgtagcctactttagaagtgattagagacctcctcttgcctgcacagtacacaccaagtcatgaaaaaggttagaataaaacgattgtcctaaaacctatgtcaagccatcaagattcacatcactacaagaaaaaatagaatttactatgtctcacagaactggaactaagctagtatccaaatcac

SEQ ID NO: 110890 - DNA, 464 bp, Zea Mays
aggatggtatgttaagcttctgatcagagttcttccaagggactcttgtaactgctcccaaaagcgtgctatgaactgaggccccctatcagagataatggtcttgggtatcccatgcaaacgtatcacttgatcaatctagatctccgcgtatttctctgctctgtgggtggtatgcattggcaagaagtgagctgcctttgttagcctgtccacaatcacccaaatagagtcgtggtgtcgagaggtattgggtaatccaacaatgaaatcaatgctgatgtcttcccatttccaagatggtatgtgaagtggttgtaaggtgtcgggtgtcttcaagtgacttgccttgatcctttgacaagtgtcgcactcagacacgtacttggcaatctccctcttcatcctagtccaccaatatagagaccggagatcgtgatacattttgttgcttccagggtcca

SEQ ID NO: 110891 - DNA, 910 bp, Zea Mays
gtcatcgctaatttgccatgtttggctgacgtaatgatgaaataaattggtcacaaatgagttttagtaaaaaaacaccctacgtgtaccgtacttgacggcgtgggatccttggcctacatgggtcgcatttttttggtaaagtgggacacagcccccgcctggcgatgcggcctcgggccaccaactggaagtggcgacgcgcggcccgacgacgcatgtgctaagatttatttggcaaaaaaatttgctcccgcggagcttcgaaccagagacttgcgccttgcttcgaatcagtgttaccactagactactcgcttgttcttataaataaagaaagttagagtgcataagttggtcaattgggcctaatcagaacataatcgttagcgtagtacttgttcccatctgtcgttctgttaagatgttcctagccgccattttgcgatctgcatggctgttctgcttctgccttctgcgatctgcgcttctacgttctacgattgacgatctcagtctcggccctcaggttacggcacacaacgacgccggtgtcggtcgtccgcttgatcggcaactgggtagcgtcgcagcgaacgagcgatcttgtcgcctgatccattgatgcattgagtaagtccataagttttgatagattaataattcatccattcatcaagatgcaaattaaataattatctttcaagatgcaaatagtatggtaattatctttcaatcattgtttcttgcaaatttcatatttcatatgtttgggctctattgtaatctagttcaaaatttccggttaattattaagttttatgatgcataccctccaaaatcctaggtccgcggcaaagcagtggcgtcgtgcgcagagctacggcggacgtggacagaacaacggttg

SEQ ID NO: 110892 - DNA, 1263 bp, Zea Mays
gcacgagggcggccttttctccctccgttttctcttcttctcctttggtactccggttctgttgctcgtcttggtcctgcatctcttcttggacgtggttggattgagctctggagtcttggggctgctgccgtctgatgcctggaactcgtaggttcttcgaagtttcgcggctgcacacgcgtatttgctcattttcctccgtatgagcctatgcggtgtcctgttagttgtttgagctctttatgcagtcgtgttgcttgattggattggaacagtagtggtatttctgtacttctgttggaaactgatcgaatgcactgtgggcgtttggctgctcagttttcttagttcacttcacctcatcacctgatttttttcccagcagttcctttcgcctgattttttctgtgctcagtttaagcacttattagcttatactttatacttggtgtttttgttgctcttgttgtcccgttgtttaatgacatgacgttcgaatctggtactgttcaaagcccaaatgaggaggctctgtgctgcctgcactgagttattgcctgtctgtgtttcattggcgattggtggacagacttgaactttgacaagctgatgatggaggctgggacacgctggttccggccgaatgagatctatgcggtgctggcgaactatgcaaggttcaaggtccatgctcagcccatcgacaaaccaattagtatgtgttccacattcgccataaaccccttaccttactgcaccctgcacatgtgtttgtttctcgaatacgcaggaggaactccatatccttatattaagaaagggtgaaacgagtccaaaatagactatcacatgccagaagcagtagcaaactgaaaaaaaactgaaactgaaaacaaggatagagaaaaaagaactacaattacgcccaaaaacttctaagacctaacgctcctgcaatttcccctccgaacagcgatgtcttgaatgtcttgcagcagcttatggacattgggagcagatttatcaaacacatgcatttctatgtctccacagcccccaggccaccaagattacaagcgaagttaaaataggaaacagaacaaaagcttgtgtgccaagtgccgagtataagatggttgtattgtttgaccttgagcctgaacaatttgatttgtatgtagaatgtaccacagtaattatcccgtagttcatagccagttgctttattgtttagaatgctatggttgatctagtgctggt

SEQ ID NO: 110893 - DNA, 496 bp, Zea Mays
gaaaataaaaactagcttcgccaatgttggcgcactttctaacgaagacaacttcgtaagaggtgatccggaaggcccaattgattggatcagcaacgaagctgaagcttttgaggaagttctgagtggtcgcggggatatctgcgctttctcaggtgcccgagaaatcgtggctattttggagaaatcaggctacgaccatgtgaaaactttggctcaagccgaagctactttaagtattgaagatacaaaagacccctcggccgaagccaacttagtgggcggaaaattctttactgacatctgggagaatgacggccgaaagatggcgcacgagataataaaaagagtgaaaaagattctcatgatgcaaaagaagcgatgaaggcagctgaaagaactgcggaactagaaaggagaatgggtattgtttaataacttctaactttatgttttatttttgcgacttcgaacttatttacgttttctatcgcag

SEQ ID NO: 110894 - DNA, 353 bp, Zea Mays
acacggcttggtttcccaggctaaatcctgcatgtcctgttgcataaatcaaaggatgaaagataccagatggtgggtcctatgggtgtgcccctaaaacttcaaacccaaagctgtgtgcaggtccattccagaggtaggtagtctcaaactgtagagactaccttctaggggtcgggccgccaatttttctttggtatactggtatccagcctcgacacgtcgagcctacctcccagggggccaagtaccagagagaagataagaagggcaaataacatacagataagttccagttctacttgattaaaggttcttaaagtatgttacaagaccaaaagttattacatccg

SEQ ID NO: 110895 - DNA, 685 bp, Zea Mays
aagaagtcatttgtgctccagagtttggtactgaactaccattatttccattatcatatgatttgtcaagcacagcatagcccaattatcactcgctgcaatctgaatgtttatcatctccttttggttcaccgcatcattctttggtggtatgtcgtgttctttcaacacaattagttgcagctgagcaagggcagtgccataatttatttcaatcacgatgcaaagtgaaaaggacaggtgtgcagatttataattgatggtggcagctgcaacaatattgttagtgccctgcttgttgagaagcttggcctgaaaatgcatcgccacccccacccgtaccatatgcaatggttgaataattcagggacagtgaaggttacatccatggtacgcttgccattctcaattggtgactataatgatgaggtggattgtgacattgttccaatgcaagcatgccacttactgttgggtcgtccatggcaatttgatgtcgattctgtgcattttggtcgctcaaacaaatactcatttgttcacaaagagaagaaagtgatccttgtcccactaactcctgaagatatacatgcttctgatgttgctcgcatgaaaagagaagagagtgagaaaagaaaaatgagtgagacacacaacaatagtaagggagagaatcctaaaccac

SEQ ID NO: 110896 - DNA, 388 bp, Zea Mays
gttttaccccttacatttcttcttataattcaatctgaaagggagcctctacaaatagtggagataatgacttctgtactagtatacagcactgaatggtctcaccaggctgatgagcaccttatcgccagcgaggagccgccctcattgagccatggctgcatctgttgctgcccgtgaatcatagactggatcagcgcatcagatcgtacaccgccacgtggcccattggaacgaactgtgactggactcggccaccggttgtcaggtacagtcacccaagacaatgctggctcaacctcgcgaccattcacatcttctttggtcggtgcaagcggcaattactgatcgtctcacacgcgaaggatgtccaacgtcgccgcctggc

SEQ ID NO: 110897 - DNA, 367 bp, Zea Mays
gcttgatctaggccacattataggaggattgtatctgactgttggaaaccaactgacacgtggacaggtaggcccatacactcggaaaatggggaaatgggagagctcaggtgcacaatgagacaacaggaagggaactgtagcgtcttgttatgcgtgtcctatccatgtatagaatagaggtatttattggtaaccgagtgggtaggtgggccctcaagtaccgttataccccagttatctgctacattcccataatattcagtaaagtacaataagctaaacacactctagaatctacccaccgaaggggttacaggtgggctcgagccaccgtaggatggaacctgggtcccacggtaatctt

SEQ ID NO: 110898 - DNA, 334 bp, Zea Mays
ccaggagcagagggtccatttacccggagaactccgctgtccacctctcccacagaaacatggacacagatcactaggagaaaggaggcgaacaaggtcaaggatcgtcaaactgctcttctagtacctccgccctcaaaggagaacagaaagaagctcgtcactacgacggttccattttaccccgacgtcctcttcatcgggggaagagtagaatcaaatctcgtctccgacgatgaaccacccgcgccgggagaagaaccccttcagcgggaatctcgccgacgaaggaaccgacgccgaaatgttcggcgacatcacgaagccagagagc

SEQ ID NO: 110899 - DNA, 679 bp, Zea Mays
gagaaattcaatcttcatgaagatatgactctacacaaattatatgaaataaggaaagaatggataccagcattttttaaaaatgacttctatggggtaatggtgtctacacaacgaagtgagagcatgaacagattagtgaagcaatcacatgtagatgcgaacacccctctgcatgagttcgctaaacaaatgatgaaaatgttgcatagcaggaaaatgaaagaatcaaaggaggcattgatgagcaaggtatgtcgtgtttgttatcaataatgtatggcatacatgtttatgtaaatatgttgtttaattatgatattaacgtcttatagggaccaaggacaacagatacattgtataggttcgaagtgagagtctctagggcatacaccagagctgttaagaatagatttgaggaatcaatgaaatacgccactacatacagaatgttgaaggacacagacggttgtgataaagattggatcgtacaacatacaaaaagatctaataaaattgtgtggggacaacatcaattcaagataacagtggacatagaagctggggagtatacatgcgagtgcaaacagtgggaacatacatgtttgtacatattgtgttgattaaaagaataaaattgcatactaaataatttgttgattgtagtacaaattaatgt

SEQ ID NO: 110900 - DNA, 433 bp, Zea Mays
tcaaccgtcgccgggtgcagttcagaaatgaggcatgagccatgcagcagatgttccgccgtagagcgtgcccaagcatgaggcggtataccccggattttcacgtccaccagggccgggagggttgctgtcgacgcatgagcacatctcgtccatctcttgaaatgcagattgaaacgcggacctctgaaaagcctgcctcccccgtagaccctcgatactgtgtcctcatcggggagaaacaggaggaagtcttctggcatggcctgatgaatcgccattgcagccacatcgatgccgaaactgagagcaacttcctccagcacctcaacgccctgaacttcaggcctggtgcccaccaccgagacgaacagggcttttcgcaatgctgcttcttcacgcgtcatttccgtcgtaaaagccaagacgcaag

SEQ ID NO: 110901 - DNA, 445 bp, Zea Mays
tgggctaaatgcagatgagctgagcttctttgacatgtagagttgtctactttggtgctgttggagactgttatccattggaagctgcgacgacatacgtgtttcttatttggacggttagggttgttggttgctggtggtgtccatttggttgctagtggcctgtacattgatgcttgtttgtttctccaaataggacgtgtgaacattgatgcattgttgcttgtttgtttctatgagatgatgttaaatcttaatatcttatgatttatgtgatcatttgtttgcatgtagattatgcatggctataattgttgtgtcaagctaactctctgaagtgttactagtctatgttcctattttgtgttatccattcccgatcgtaaatttttttttcatattacggagccaaatgttctactaccgagtttttccaccgctcccg

SEQ ID NO: 110902 - DNA, 1213 bp, Zea Mays
ctcgagggctgcgggccggtggttcgggaccagagcaagccggcgtcaaccagcgcctccagatctgcatcggtgactgaagacatgggccacaggtcgcggggaggaaagatggtgatcttttccgccatcgaaacgaacgaatgggcgagaaaaagacgaagggctctttgggcagaaggtggaaacggcgttagaaggcaaagaactaagactgtaaaggtaacggtccgaagccctccctctcggacagctttataggacggacggagccaccaaggtgtgattcgaatacggttggatgacggccgtttcgaatcccacgcgcacgcgtgctgcgaacggtcggctgacaggcaggatgtctcgtcgcattaaatgatcgtgtcccctccgaggaaaaacacgtcgagtgtcgttcctcatcccgcctcaaagggtacgccctctcccgtcgactacactgccctttatcctctcgacaaccgaactggaaagaagtgtcttctgcctcgggcaaccccctcgggaaaggagcagcgaatcagaaaaagtcgtcttctacctcggtctgtcgcttgggttcagaggttcaaaggctcggcccacaacagggttcagacgaaccacctcaggacttcagggctccgagcccaatactgatcaggggttcgaaggttggccccttgaaagggctccaaaaccgtccagagcacagagtcagggatggctataggtacgcccgtacacggccctagctcgggctgagacccgaggtaccttaagacatatccgagaacccacgggagcgattcgtgacggtatcccatcgtagggaggcatcgagccctcggatcccatcgaacgggtctggggccaggcaaatcacccgcaggtgcctttgggacgtgtctctggacctcaagctaactccaatcgaaaggagcttggacccccgctcggatcacctgttagtagcttgatggaaacgtcatgctcgttgcccatcgagggtagcatgacacattccccctcttcctcctcgcagagaggcgacgaaggggcgtatgaaccaatagttgagacatccctcgatcgacctattgctccgtgcaagggctagagggctgccctcgcaaattacgcaaaaaggctcccacgatctgaccaaagatcgaacgggacctatcaaagaacaaaagccccaaaggag

SEQ ID NO: 110903 - DNA, 780 bp, Zea Mays
ggtgaccaccgatggggaaaaactggtgttcttggctaccgacggtggaatgggggaaacaaagggtggcttgggtgcgtaacggataggcgagactgagaggaagctcagtttcaagggagtcaccacaacggtggtcaattggaccgctgaatcacgacggtggcgatagcccgaggagttccatgttagcctgaacggtgtccacaggccaataacgtggcagacttatcgtggaccctttacgatggtgcaacatgagagcctccaaccagctgcgtggacgacctggagcgtccggtggtttgctacggcgacggtgaatgaaacacggtgaggacacgtggtgtccatggctagagcggaaactcgatcaccgaatctgagccagagatccttttaccccttcattgatccacgtctcagcggcaccaatcgtggcgcaagctcgaattacggcggagggaccaatcgtggcgcgcacatggaactcaatcttgttcagttcactttatcatggcgatgttcattcagcgcacctgacagggcgatttgaggagttcctttctcaaatttttatgtgacaacttgtttatccgactacatcaaagttgttgtccgtcatgccagcttcaattttgttataaggttcttgctcatacctccactcgatcaagcacaattcggttccaaagttgatgtaatgccactgtcagtctaactttgagaccaacacacgactaacagcccaacttccaagccattttgccccaatttctg

SEQ ID NO: 110904 - DNA, 601 bp, Zea Mays
tccctttctaaaaatatagcatttgcaatcgaatactgtaaaatatgagatatttggctttataccaatgagcaagtcatagggagttttctttaggagcttgtgacaatataacctatttgaagagtgacatgcggtgtttatggcttcagcccaataagaatccgacacattatattccgctagcatagacctagccatatcaatgagagtcctattcttcctttcaacaatgccattttgttccggagtatatttggaagaaaattcatgtttaatacccttgtcatcacaatattcatcaattctagcatttttgaatttcgatccattatcacttctaactttcttgatatcaaaatcaaattggttttgagccaatatagcaaatgacttgaatgtttgaaacacattagatttatcccgtagaaaataaacccaagtgaatctagaataatcatccatgatcacaaggcaataggaattaccgccaatactcacaaaagatgttggtccaaataaatccatgtgaagtaattccaaaggccgatgagtagacatttgactcttatttggatgagtatttgccacttgcttgccg

SEQ ID NO: 110905 - DNA, 350 bp, Zea Mays
gggggtagaaccgtttgtcgaaggcttctgccgagtacatgagcttcattatcaaacaaaagctagagaagatgggttgcacgaaaacttcggctgctacaattttgcttatcacaaagatgcgaagtctccagttatcagctatcgtaccaagtggccagctggctggaagactgaatggttttatgtcaaagttgatgagaagaaggagaagttggttcaaagcccattagaattaatcttcgaagagactaggccccggtgcgacatgaaatcggagagtccaagccaaattgcactgggcgaatttcgagttattgcagagcacattggtactatggatctggtgc

SEQ ID NO: 110906 - DNA, 332 bp, Zea Mays
aggtggatagatgttttttattcacccctattcaaggctaaatttttgggtatattccatctttttaaatatctttttgccgcctattctcatgttaactttggccttcccctgcttctcttgttactatcgcatcttaggattttactacacgttggtttttcaggaggtctttgttagacatgtccaaactatctcaatgggtattgaacaagctttccacaattgttgctacccctagcctattacatatatcatcattccggactcaattgtatggtcataaatccaacgcaatatacacatttttacaacatctttttgtaggtcaa

SEQ ID NO: 110907 - DNA, 612 bp, Zea Mays
gttggccttcccggggtggtagtggatttcgaggtcataatccttgatcaattcaagccatcttctttgacggaggttaaggtccggttgcgtgaagatatacttcagactgttgtgatcagtgaagatgtggcatttgttcccgattagataatgcctccatatctttagggcgtgcactatggctgccaattccaggtcgtgggtagggtagttctgctcgtgtggcttgagtaagcgggatgcataagcaataactttctcattttgcatcaagacacaccctaagccttgttttgaagcatcacagaagatgacaaaatcctggtgtatatctggcagtgtcaaaactggtgcgattgtaagcttttccttgatgatctgaaaactttcctcacattttggagtccatgcaaacttattgtccttttttagaagttcggtcataggttttgctatgctggagaatcccttgataaagcggcggtaataccctgccattcccagaaagcttcgtacttcactgacgttggatggctgtttccaatttgaaacggcttctaccttggatgggtccacttctattccttctgcagtcaagatatgccccag

SEQ ID NO: 110908 - DNA, 335 bp, Zea Mays
gaaatatcattgtacatctacgcttctctggcatgatcgatggaatgggcaatgtttatctgaaaagttcccggagctctggtcttttgcctcggtcaaagagattaacatccatcaaactcgattagcttccccaaatgaaatgtttcatacccccttctgctgaagcgttcgagcaacttcttcaacttcaagacacccttggtaatactcagttgcttgatcacaatgatatttggagatgcagtgcctcctccactcggttttcctcagtcggtttatgcacacttgactggcacccgtcaaacgctccctctatttgtttggttatggaa

SEQ ID NO: 110909 - DNA, 306 bp, Zea Mays
gaaaaatttagggagaaccgctgcggatagtcttacagtagcaggtagcgttgtcgctgcagcactttttccactgcatacttgcctctagctcggtatatatatagtaccatgcaaggtttctgactacggacaaccttagtgtttctcttgggcgattagtatttctctacacatgcaaagacgtccaacacctctaatgcgctcctctaggtttatatctactgtttaacgaagattacacacttctaccactcggtgattgtgtgtaccattgttgtacacgcaaggggtctatagtcttgc

SEQ ID NO: 110910 - DNA, 753 bp, Zea Mays
aaataaagtagtgtgctggtttccaaatttctccttatttcgtaaggcatagagatcgccctaagatgagtgatcgtaagcatgtttatactaagtcaagtgaacatgtgcatgttgcaccgccttaagtcattgctgacttaagccgattgctccgttagtagggtatagtggtcaccctaagttaagtaagcgtgagcatgtcgcaccgtcttaagtcactgccgacttaagccgattgctccgttagtagggtatagtggtcaccctaagttaagtaagcatgagcatgttgcaccgtcttaagtccctatcgacttaagctgattgctcccttagtagggtatagtggtcaccctaagttaagtaagcgtgagcatattgcaccgtcttaagtcacttccgacttaagttgattgctccgttagtagggtatagtggtcaccctaagttgagtgggcatgcagattgatagtaagtggttcgagtgcctttgagaatgaagactttttattgatgatgtattttctgattacagaatacaatgttgccctgatagcttttgaaatctagctaggggtaaaacttcctgaggtgctctgtattccatgaattctctatttctgtgccatccatttgagtaagccggtatgatcctggccgggtgacttctgctactacaaatggcccttcccataatggtgacaatttgtgccatccttccctcgttagaattcggcgaaggaccaagtc

SEQ ID NO: 110911 - DNA, 510 bp, Zea Mays
gtgatgaactacttggagcgtattcgagggcagaagacgaagctatgacagctgccttcagtgctcacgggaaaagaggctgaatagggtgttcgatgctattgggttcatttacccagattactgctttcctctccaaaggcaagggagaaaaaggaaagttgctgcttcaacatcttctggtgcaccgaagacgaagaaaatcaaggtcttgacatgtagaccgaggcgtattgagacggtcgatgtgctgaagttaattgaaagggcagaaactgcccctagccaaagagacggctcttgcaatgccgactgaagctgttgtagacccagccaaagagacgaaattggagaaggtagcagagcagccaaagatgctggtgacagcgttgccgaagctatcagctactacaacagcaactccgagaaaaaggaggatggctagtgttttggatgctgttttagaatctgtgaaaacgccacctgctacttctgccgaggcttctggcg

SEQ ID NO: 110912 - DNA, 411 bp, Zea Mays
gcccaacctactgcctatacgaggggagggggatagggagtagcagtagccagtaggcagcgtagcactgcggctcctactaccaagtaccaaccacacctccaacccccgccgtataccaatccgccggaggtctctattcagtccacttgcctttttccctcaccggtcactgcatcgagctatcggttcgtctctccctttccctcaggtgatgcatcctttattttgttgcagtggcgattttgcactgccttttgtggtcgattgccgatccttcttggtggtgttgctgcaggagtggtagatctgccggtgcggtccccagtttggatcttgatgatttggtgacttgagtggccgattttcttcgagcaaactggtatttgctcacatcggttttatgcgcgc

SEQ ID NO: 110913 - DNA, 522 bp, Zea Mays
ggctggtggggctagtggtggggaactcacggtggccgaaggatcataggtctccgataccaaattggtagggttcctaatcctacgagggatctctcctaatcgctagggatgagtgatcgagggaaggatatgacggtggcgctagggcaccttggttgggcggcggtggcagcacaaatcacgagagggagagattaggttagggaaaatcctagctccctaagataagctggaaaaaatatatggttctgcttaccctaatccaagagtctttacaagtacttatactcctaatggcatggataaattacagaaataagataattatgggccttagcccctctagctgtcggcaccacgtagccactaatgggcctgcgcatggcataggagatactggtcataaaacatggtcatgattatgagcgacctggaccctcacatgataattgaacttaaagatggagattaaagcatggttctttttggattgaagtggttcacttaagggttttgctt

SEQ ID NO: 110914 - DNA, 367 bp, Zea Mays
gccgaaggggtacagagctaccacaaccgtccgatcacagttacacggcccagattagatccttaggtttaataaatcggtattctatgtagaccgcacgatttaagatctatgatcgatggtcatgcgcgactcagtctttccctgcaccgtttgatcacgcatcgatgacgagggtttaatctaccgaaggggtatcctccgattagatcacagctgcacattggcgaatctacggtccataatcgtcgtcttccccccgctgcgctagcacagcagcaccgatcagctgcggcgatgccacagcccagcccaaagaaacgcactccccgacctaggtgattaaccactgccctagctatcgcaa

SEQ ID NO: 110915 - DNA, 579 bp, Zea Mays
gggcggagaggggtcggctttggcggcatgagtgagaggagggcccagcggggtcataggggatggggaggcagggattattgtgtgtgagggatgaagaattaatgatgatccaaataacattagctactagatttgattaagtaagagatataatagttatccagcgatttgaatcatttgattagtttgttttgtagatttagaaggaggttattggtgtaaggatgatttggttgggtggattttacaaactttaaggtggtgtgttatataggggtataaactaacatatagcctgtgctaatgctacaaatccggagacatgagtgtagggtcgacgatggcggcggcgcaggggtaggggttgacaatggcgcgaataagggggaggagaaactgggggtgacagggtcgcgagggagagaggttgagggatgagaaatgatctaaataatattgttcgttggatttaagtgattaaggcaatggaggttatccagtgatatgaaccgttggttttgatgttgtgtgtaactctgagtgcaatttgtttggtggacttagtggaggttatcg

SEQ ID NO: 110916 - DNA, 591 bp, Zea Mays
atgaatttcaggaaagcagcaataggcacagatcaagggtcgtcgtaggtcctcgttaaacgccgccatagatgcaattcgcaagagtctgcaggtcccatgtctgccgcgcggcgtcgctgcacggccacaacctccacaatctgcatctcgactgcaatcgatgttcagcagtagcgatccttctacgacgatgtctgatcggccgcaaccttcgtgagcagtcagtgatcggcaacgacaatccatcttggatgatgtctaattacaagttactcatgaacttaagttaactattttggttcatttattgtttagttggtgctcttatcacaaatccttaccgttggtatagtgtttctagtggtgttgaattgtttggagtggtctgtcaacatatcataattgtttagttaaccatatcataattgtgtccattaacagtatagttaacctatggggcttcaccttgcacaagtttatcaaagagaggggatttagaaaaaaattattaacattgtgcgactctggtagaccaaagaaggttgctagatccatacatttgttgacgcaactgtctctagtataata

SEQ ID NO: 110917 - DNA, 294 bp, Zea Mays
gccccaagaagcgtctagaccgactagagaagaaagctgacaagcatgacctaagcaatgattcagaagaccaaccattttataagtacgatgatgaaggtcgcctgattagtatacattgcggagcgaagtagtaaggaagttccttaatattagaagagttcaatgagaactaagaacctacaaataaccatgtatctcctttgctttcgtgctaaccttccttaatctcgaggacgagattcttttaagaggggtaggtttgtagcatcataaaaatcattaaataaaaat

SEQ ID NO: 110918 - DNA, 428 bp, Zea Mays
gcaacatctcttcgcaatcaaattcttcaaaattttgattggcatccacaaaatccactttaccatccactttatctaaaattccgacaactctctcgtcattaccaggcacttcacatggatccaactcaccatgttctgtccatatcgtgtaattgtttttaaccgtcttttcaacagatgtgattggattactcctgtatctctccaagctaccttattatcacaatcaatgcacggacatcatatctccttactctttctcaaattcgcgtgcttgttggccgcttcaataaagcttctcaaatttcgaatgtacgatggatgtggtcttggcacattgtacatccaacctcggtccattacctatccctatattgattaacatcaataaaatcattaattaattgaattcatccataaaacat

SEQ ID NO: 110919 - DNA, 331 bp, Zea Mays
tttgaaattgaaagatcatttgaaatttccaccttgccaagcccttgaacttttccttttgaattatcctcaaaagtgattttatcttgttcatcaacatcttcatctagtgaggtgaacatctgtgggttgccagtcatatgttgagtacatccactgccaattacttaatggctcccaccggtcttgcagttcacctacatgaacaaacaaatcaagcttcaatcttgggggccctattttgcataggaccagtaactttctcaatcaaggactttgcaacccaaatttgtctaggtctactcttgcttggtggacctaggaatgttac

SEQ ID NO: 110920 - DNA, 462 bp, Zea Mays
gaaaggtgtagtttctatgctattattgaaaggtcagaggaatcattgttatttggtattttctaagatggattcatttatatttttttataatgaattcatatacgctacatagtattggtttcttttagttttgggtattttttattatgaattcctagtgagactttcttgtgcattggcttactatgttagctctttctactctttcgcgctcaataaaagattgtacataatagtatgatagggattggcgattgatgacagtacaagattttattgttttgcaaaaaaactaaagtgattgaccaccatcttaacccagtttccaggtgaacattaaatgaggctcacctccttggaggagactgaagatgaagctcaaactttttacctttatcagtgggagtttcctgcaactgttaaattagaaagagtgagttgtatgtaaacatatgtaag

SEQ ID NO: 110921 - DNA, 374 bp, Zea Mays
aaaaggaagaaagtgaagatgaaggaaatggaagtgaaagtgatgaggaattagctcttttgtgaagaaatttaacaagttcatgaggaaaaagaagggtcagcctagaaggggacaaacataaaaaagaaatgccttcaatgatagaaaaggttttgagtgtggggaacccggtcacattgccatgaattgtccaagcaagaagaacaagggtaaggatggagatgataagaagaaaaagaagttctaacacaagaagagggatggcaaatcctatctagttgaatgggattcggatgcaagctcggatgatgatgatgattcttcatctaaactaaatgccggaattgctatcaaggaggctccctcacttt

SEQ ID NO: 110922 - DNA, 362 bp, Zea Mays
gtttaacatgctgtcctggaggagtaacttgatgtgaccgtggggtgtaatcataccgcccgagcagttgaccttgggccaaatggtgttgtgttacgcaaagcggcgtttgttgcttgactcattttcaggcgactttgaattgcttattgattacttgcgactgttcgatgagcgtggtaggaagtggatggcaactccaggcctctataaatagccttcttgcacaattgttctcttcactcatccttcgatcatctgctactttcttctccctttatcctcttctccatcagaccatggggaaaggcaagagaggtcgaggctctccgcgtcgtgctggcgacaagagaaagcacgat

SEQ ID NO: 110923 - DNA, 638 bp, Zea Mays
ctcactgacacttgcaaatacaccctcgcgcttctattccttcacatcccaaggtccacgacggcgagcggcgccagaccgaactccggcgaacctatactggctaaactacgcaacaactagccctcccctttgctggacaccgaattcaacccttcgtgactatttccactcacttaattgctggattcgagttctacatcactcggttcacggtgacagcgcgaggaatggaccgaccgaggtgttcccgatgatccaatggattctagctcaattggatgggtcagagagtatcaggagcatccaaggatactgaaacaaggaaccagaggacatgaacggacctgagacacgttggccacggtgaggtcacaaggtgcgttgcttcagaccaatttgggggaaatccaaaattggcgagctctggtgagcaattagaggctcggcttggtgggttgggtgcttgactaccttacggccccgacggtgtgctcaattaatagaatttgggggcggcggccagtgaatttggagttggcgcggtggcggatggagaaggaagaggtcactggtggcgcaattgtggcgttcaccggtgcagtggttcagagagggtaagctcaagtgtgccacgg

SEQ ID NO: 110924 - DNA, 785 bp, Zea Mays
aacccggtgactactatgactttgtggtcgtcaaagtagtgacagagcttgcgtgcagttagaagtactgcgtacaatagtttttgaacttggggatacttctttttagagggtcccaggacttcactgatgaaataaatgggatgctgtattggatatgcgtgtccttcctctacccgctcgactactaacgcggtgctcaccacgtgagtcgtgcaggagatgtataacagcagatctttctaccggctggtctggcatggctcgacgtggcggttttagcactggcggtgtagtcaagaactttcttcagtgcatcaagagcttcctgagcctctgaggtccactggaacttgtccaccttcttgagcaatttatagaatggtaggcctttttctcctaaccttgatatgaacctgcttaaagctgccatgttccagtaagcctctgtactttcttttgtgatcgtggtgcttccatcctcatgatagcttcaattttttccgggttagcttcaattcctcggtggctaacaatgaatccaagcaatttcccagctggcactgcaaagacacatttttctggattgagcttccaccggtatcgcctcatgctattgaagaccagctacagatcctcgatgaagttttctgagttttctattttaatcaccacatcatcgacataagcctctacccgcttgccccagtgatcggctaagcatgtttgaatagctctctggtaagtcgctccagcgttcttgaggccaaacggcatggaggtat

SEQ ID NO: 110925 - DNA, 1002 bp, Zea Mays
aagatttaaacaaaaataatctctatatgaatttattacccttgattgaaatgaatatttatagctattctctaaagaattttataaactagagattttaattcttaaaatacctattctctatcctagcgtgtatgaattttatatttaaaatcatttgtgtaaatagtataataaataaaataaattaaaacaaagcatactcatgctagaatacttttgtttgtacatttgtttttaaggatgaaactcagacctaaattcaaattgtaatttggatttgaaacagaaaagggaagaacaactaaatagaaaagaataaaacctaacctgggccgattttacccccctggcccaactcccagcagcttaccagcccaaccgcgcactcgctactcacgacaactgacttgtgggacccgtgctccaatcgctcaacctgggagctcttggttcctcgcccgacgttgcttacatgtggggtcccagccacctgcccctcttcctcctctgttcaccgcagctggtgctgttgggatcgaatcagatctccgctaccagattctacgaaatcatcggcttcctcactcagcgcgcgctcatccggtggatccgcctcgtcgggcacaacgtcttccatcccgcacctgggcgctcgcaggttgcaataaatcgctggatctgcggagttcgttggatcctggcgaaatctccgctcggagctcttatccccaatgtataaatgtgggtaccgcacccatatcgctccaagccaaagcccctctccccttcttatcccctcagctgcgactccaaatcggagaaactattgccgccagaggacatcaagcacgggcggtgctcgaggtgccgctgtggggggatcctcatcgtagtcgtcgtccgcgccttcggtggtgtcgtgggtcttccttaggccgtggagaaggcaatcgtgttcgtgtttcgcgagttcggccaccagcgtcgtcagaatccttc

SEQ ID NO: 110926 - DNA, 529 bp, Zea Mays
tgggtaacacttcatagtgggtagtcagtagaaatgtctcgcactcgttctacataggtaccaaagtcaccgccagctgtaaatgggttcggggtccaagatcgtagataattttttaaaaatttttgtttgttgtgttctgatcttttcagtaccagtagaactatcgctacgtaatggctaacgctattttagtatgtgcaaggtgatgtttgatttgttacgttggtgaaagggaccacatatacatgtagtacactttgtgacttgtgtggttcctttgtttgcttctttttttttcgagacgcaacgacccttgacatgacggaaattacttgactagtgggtagataaaacgacacaggacctccatttttttccatcgacgtttctttcaccttcctttacctgccagagcaagttttgttcgtcgcaaaaatccatttcataatgtgtcatcaggggctctttcatggacttccaaccacaggcagtcaggcacgccactggtactaggctactagcagac

SEQ ID NO: 110927 - DNA, 721 bp, Zea Mays
tcaatttatagtgtgcttgagcggtggctagtgaatttgatggagacgcgcggtggctggagaggaggaggggcactagcgcaaacgattagtggctttctccgtggcggactcaccggcgacgagccagtgatatagagcggcttacaacgacgtggtgaagcttcaaggcacgtggcatccgatcaacgggcggccaactccggtgaacttatctgagccggccacaaagcaaaaggggtacgacggctagcctccggtgttatcctgtggtgaagatcttttacctagaagcgttatctggtcaccggtgagcacgaatcacaacgacagtgtgaatccgggcgcacggctcaccggcggcgaggttctctgaacctgaccctatccattcacggtaccattggaaacgtccaacatagcgcctgacagagcaacttgcaatgcctagatctcgaatttttgtgccagaacataccaatccatctgcagcaaacttgtagccctttatttcaactataattctgctatagaaactaccctcaatcgagcaatgaatctaactctaaatcgagctctaagttcatcctactttactgctggtgaggattcagacttagggttgcctgacagcccgactttggatctaattatctcaaaatttctcatgacaccaaggcttaatccctatagcaaagttgtactcctacaggagctttac

SEQ ID NO: 110928 - DNA, 291 bp, Zea Mays
atctgcggccttcgggagccgaaagaagaaaagattaaacagggtttttgatgctattggatttgtgtaccctgactaccgctacccaccacgggggcagaagagaaaaggtgcgacctctggaaaggttgcctcttcggctgctccaagcgagcctgcgccgaagagtaaaaagttgaaagtcctcacccatcggccccgctatatcgaaccggccacagtgcccgagtttagcggggaaacttcttcagcgaaaggacctgctcctcctacgcagaaaattgaagagcc

SEQ ID NO: 110929 - DNA, 809 bp, Zea Mays
aactggcgcgcaacttcttccacaacttctgagccaaggacctctggctgtgttccggccatagagacaaacagagcacgtcggagagcaatttcctccctcgccagatcatccgagaagtccaaaacgcaggaggagttgagtgcgaagtcaatctccttagaattgttgacaaacaacaaggatggagccgggactaccgctccatcaacaggaaccagagatatgtgccgagggtgatcatccgtcgtcatctttccccttccgcgcttggaacggttccgcttccgcgtggatcgtaagccttcatggcctccaccactaggaccttcagcaggtgcaaattctgtcatcctagcctcctgcggtggggagatccttttccagaccgacttcctctgccatgagcccgaaccatcgttccttaaaggagcatccccctccatccttgtcagacgctgtcagataggaattctgtctaccttcttttcgtgcttcagtccgccaaaccgcttcatacgagccacatgtctcgtagggcaagagctcacctgatgcccgaactcaaagcatcgaaagcatcgagtaggacgacgacacgctgcagcaaggtgggaggaggagaaacagttgaagcacctgcctcggagatccacaagggaccctcgacgaggaaggtgcacattctggatcttcttcctgcgctcaaccacttgccaaccaaactcgtcccgatgcagtgccacaggctgactctgcaccaccgaggacacaccgaccttctccttctccttcacagcctctggagc

SEQ ID NO: 110930 - DNA, 802 bp, Zea Mays
aaattggtctggtgtttttagcatttttctacaattttctaggaattctcaaagtccagaagaaaaagaaaaaggaaaacatgctacaggattgggctgaaactggcctgggtcgacccattcgctggcaaaagcgcgccgcgctgtcgattttgcagagacacccttaccggttcaaaaatcagagtggcagtccttggcactattcatacgtttcactgacatttgcaagaacacccgctcgcttcaccccgaagtccacgatagcgaacagcgcggggccgagctccagtgagcttacaccggccgatttacgcaacgaccggtgctctactttggctgagaccaaaatcaaaccctaacaagagtttcccctcaacaaatttcactattagacctctaactcactctgcccacggtgaccgtatgatcaacagacattctaacgcgttcccgatgatctaaggcagcttagctcaattgagttggtcaaggagtatccggggcaggtgtgggtgctgaaacaagagggcagggagcacgaacggacctggagtacgctgaccacggtgagcaaacacacggggcaaggactggtgcaatggatgcgtaattatcctacgaagctgcgggtgcactcaatttatacaaggcttgagcggtggccagtgaatttgagttgggcgcggtggcgatcggagaaagaatgagtcactggtgcggtgattcgtggccttcaccgtggcggcctcaccggcgacgaaccagtagcagagagtggcttacggtgactcactacgac

SEQ ID NO: 110931 - DNA, 515 bp, Zea Mays
gcagtattttcccattgaatcgctcgaacaatcccattctttgtttatctgacttatgactaccagagaatctctgtataccatcagtctcttgatgcccagtgatatagcaatgttcagtccatgaatcagagcttcatattcggccgcgttgttagatgccagaaataacagttgaagagcatacttgagttgttcacctccaagtgcgataaagaggatctctgcacctgcttcctgcagcttcaacgagccatcaaaatacatttgccatacttctgcagtttctgggttatctggtacttgttgttcggtccactctgatacaaaatcaaccagtgcttgagttttgatggcagtatgaggtcgaaattcaatgtcatgagatcctagctcgcaggcccacttggctattctgccaatggcttctttgttgtgaagaatatcccctatcggaaaaccagtgactactatgactttgtggtcgtcgaagtagtgacgtagcttgcgtgcag

SEQ ID NO: 110932 - DNA, 599 bp, Zea Mays
ccgagttagagaggaagcagagaagaagcgtgcgactgttgatggtcctcttgctgatgatcaaggaaagaaacgcaaagaagagttgtgctgcgaaatttgtgaaatggatcacactccacaggtctgtccgacgttcaatggccctaaaccacacgctcttctatgtggttttgcaggaggcgattcgggtttcttccaaatccccacaagtggaggcaagggcatggcgcccaaaaaagataatgcaaccgcttttattactgcaatggaaggaaacattaccacagatttggtgaaagcagaattggcacgtcttattcctgtgaattggacttggtctgtccagcagcatgccgatggatttgtggtacctttcccctgcaatgttgagcttcaacgtatggttgctatgaaatatgtgcacactgctggaggcgaagggattatggttattcaagagttggatcaaaaaattgagcctgtccagtacctgcagaaagtgtgggttaatgtatatggtgtaccctatgagatcagatcttttcttccactttgggcggttggttctattttaggtgctactcaaaaggtcgatt

SEQ ID NO: 110933 - DNA, 304 bp, Zea Mays
ctcaacaagatccagtttgagcatactcatgctctgctatggccatagtcttttggatcacttggagtgcatatacaatttgctgaaatgtatgtgtcgacacttgtagcttttaaataacacaattctccagttgacataaagtcattttttatgtacccttatgattcctcgtgaaatcccaaaacgagaatcaagggcttccgataacctagcctcatcagtgcgcactaagctaggttgtgaatgtcttccattcataggataatcaatatcctttaggtgtccaccaacactaggttgg

SEQ ID NO: 110934 - DNA, 400 bp, Zea Mays
tgaatagggtgttcgatgtcattgggtttgtttacccagattactgctttcccgtccaaaggcaagggataaaaaggaaagtcgctgcttcgacatcttcttgtgcgtcgaaggagaagaaagtcaatgtcttgacacgtaccgaagcgcattgagacggtcattgtgccgaagttaattgaaaaagtggaaactgtccccctagccacagagatggctcctgtgatgtcgattgaagctagagtagaaccggtcaaagagccggaatcgaagaaggcagtagagcagccaaaggtgctactgacagtgctgctgaagctatcagctactgcaacaacaactttgaagaagaggaggatggctagtgttttgaatgctgttttggaatctatgaaaacgc

SEQ ID NO: 110935 - DNA, 676 bp, Zea Mays
caccagaagttgcagcaatgggagccggaccatctggaacaactaatggaggacctgatggggagatggaccttattggagcccctccttccatgaacctcgcagatgaacgttctcccgatgttggcagtggtgcagccaaagacgaagataattagagaagtgtagtttaagtaatgtccttatgtaaaataaataaggaagttgagttgtactagtaagtatgtataattattacagttcaccataatgcaataaagatggtgtacgtttggcatgtaataattcaggatgtttttcttcctcagatgccatcgcaaactcgtgctcatcacggggcgggaacttcccgcggcgtggaggaaactcccaacccaccacttgtacctcctacagtggctgaggctatcactgccttagtcaacactaccgccgacaacacgtgtttcctgcgtgaattggcgggaaatcaatttcagcaacatggaggcagaggtcaacctcaaggaccacgagacaccacatatctagagtcctcagagacccgtccaccgctctttgttaaggttgaagaacccctggaagcagatgaatgggtgcgggtgatggagcaaaagttcgggttgatccgatgcactgaaacacaaaagcccctattcgccgcccaactgttgag

SEQ ID NO: 110936 - DNA, 460 bp, Zea Mays
caaatatttacaaacctatcaccctgttagctccctattgatatgaccaaaaaatatcacaccaacgggaatgcgggatgctatatttgatatcctcaagggttcttaatggacatttgcgtttgcgtgtttcattcccttgatagtattacatgtttatgatttatttcttccataggactcaggttaaatgcaatctaatttatgtccatttcattcactaacgtacacttgctgaggaactacattatgaacttatgtctctttacctcttcctccttggatgcttggacttaagtgtcaattgctaatgttaggcttccttgaaactattggaaactacataccactaattgacagactagtatgttttgagcctctgaggattggttaaatgattttactactaaaggccccgactggttcctaggaattgagaagaattggaaactaattccac

SEQ ID NO: 110937 - DNA, 642 bp, Zea Mays
taaaggatgtggctgtttaccgatgttctgcttggtgtttagacccgtccttggtgcctgcttcaagggagctttggatcgtcgaacctccctttgccgttgatgggatgtcttctggcaggagaacgctgatgtatccaatccgcatcacattctcgtctgccccacggagggatggatccgatcctaagcttcatgctattacttcgggcggggatggttctggtcacgtgcagcagggatcccctcctttttcaagacctccccattcgagtgggagaaggggagaacatggtcattcgggacgtctctcagttcatgagcgtttgggcccaagagatgagaacatgcagcagcggagcattagctccggggtggcagtttcagatttgaggagaactttggaatctgatggggggaccttgtctcctaggctggtagagatgactgatgacatggttcttgtttcaccggtgaaggcgaagcagctgaaagtttattttcgtcaaagattcaagaatgtcctgaaccaggaggaagctggaactcccaattctgtcactgtgcttcctccatccaccacagacgtggcagctgctgacacagatccatctgagtatcctgtttcagatgttgacgctg

SEQ ID NO: 110938 - DNA, 711 bp, Zea Mays
attgtggctagtttatcatcagtagaacgagacttggtgagcacttgaggaactgaaacctccagcttggaaggcacgggcacacaactgtctgtccccgccgaagtgatagaagaagggcatttgctgaaccccttaaatgaaggcatgtagttacgcgatttgttcacctcgcgcacttcctcctgtaattgagcaagcacataggcaatatcgagatcgcggggtcgttgcattaaaacagtagaatgaacatcatcccttaaaccatctatgaatttagtggtatagtaaaggaaatcggcattgggctgataagcattcaactaatctactagttgggaaatttgtcaacataattggtaacactagaagtttgtcgtatatggaggagttgtctaagaaagatttcgtgctggtatttgccaaaccgttccataaccatgaacccaaattctggccaagacacactcataggaacgggggtgcccgatcttccattaggtgaaggtaactatcgatttggtagagatgtcacacagacgatccggcttccaatcaacacgactagaaccccacaatcgcagcaccacttctcctctggttatcaaccgtgcactgcgcgattgacctcgccacgagggctaattcctgcctgagaatcgaagacacaagcaagaacaagaaagaacacaatttagaatattgcgg

SEQ ID NO: 110939 - DNA, 438 bp, Zea Mays
cgcctctcgtccgcgcggcatccatcactcaccctacggcggcaatgttgatcgaccccagtcagctttgcttttccagtggcagtacgtatatggtcattatgaagctagctactggtcatcacagtgtggttagcggctgctattactgctattactgctattgctctgtctctgttctctaataacgatggtcctttttggtcccactcgcacatgggcatgtgagcctgtattgacccccacagacctgactgacacctgctaccggctcgtatttgtatttttccgcgtatatggacaggagcccagccttttgcagtttccgtgtcctcatcatacagaatccattcacagatccactagtggcactacgaatatcctaccagttaccactgacccatatgactagagtgcgtgttgtctcctactctaaac

SEQ ID NO: 110940 - DNA, 677 bp, Zea Mays
atttgctatgacataaattataactctactttggttgccactagtgaaagttatgtggacattcgaccacaaagtattttacataacatggcttagatgtaatgatttaaccaattctacataaataaattaattatttctactataaacaatgatctcattttagttttatgttttctttctaaaataaaagaaaatgtcattataataatcagaggtcaaaacattttaataataaattcaaccattgattagactacgatatttgaattattatgaacactgtgctacttatcacttccgtgttaagaaagtttctattacttatttagtagctctaaattaagtatatgaatctatgagtataaacttcttgacaacttctaaaattcataaaaaagttaattactcatctagtgttttcatcactaacacatgttgtaccaaattttgtcattcttctttctgatccaaaattctaacataattataaacaaataacatgaccgatactaatatgttatttcatcgcacatatactcaaaatcaatcgtttacacacatgaacttcaaatcacaatatttccaaattataacaaacaattacaaaattcatgaactaattcaaaacatgattttgaagatattaataaaaataattgggttgtcttcaagcc

SEQ ID NO: 110941 - DNA, 368 bp, Zea Mays
ttgcaaccggagccttctcctttgaggtgccttcgtcggcccgaggtttcacttgcctgcctcgatcatcgccgcaatcaccccctccgggtagggaccataaggaaatttattcaattcgaagacacggttcaacctcaccttggaaccgcgaatatcccaacttcttaacatttcagtcttcggcgcatattttccgacaattttaacagcccccgactccacttctcgcacgaaagcggctgcatcccatccgtgcaagtccacggtgaaggctgggcttcacaccaatttatcccccagggttggcatccagcgaggtataatctcacccaaagcccacccgtgcgccaaaggccacactccgc

SEQ ID NO: 110942 - DNA, 667 bp, Zea Mays
ggcttatttgcaaaaagtcctatttgaactctattggctaagtctgattttcattgggattggctcaactttggagccctatatctgccaagttataaagtttttgccctaggtcaccacatcaattttgtagatctatgaaaggagaataactttactatagagatcatgccttggtaccatgaagaattctgagataaatgtgccccaagttaggatgtcagtctgtctgaaacctgaaattggatattcaatgacatgggatgaactttaggggccattttgaagatgatcctgtggatatttgaacatgatgactatatttggtttatagatggatcattatacaacaactttgatactagccgatcagcaagttgccatatgaatttaggagaaaatcgagctcaaagttggtatgtcaggtcaactgaataaactgcgccatggtacagtgcactaaatatctcaggcttcagtctctcgccgccgacgatatgcacattcggattcgcgccgtcggtcgtcgcaattcatatcctgagctagtggattgtgctcgacgtgaaaagatcttgcctggataaacacaagccaccgcggtcactctgccttttgcccacttgtgccggcgacgtggccatgcggccattaccgcgagcaccac

SEQ ID NO: 110943 - DNA, 1542 bp, Zea Mays
gagctctcctcttcattggtcatttgccgtctctctagatcgagaggattgtgcttgcttgtctgattctggaaacaatgtagtgatcattggagtggagttttttgtatatgcatgctcctgctcatgagcttgacttgagcactgttccgcatacaggattcattccaagccaagggaagactcatgatttcgaccgaagcggccggattggaggtagaatagtttgctggttgtttccagagagagacagactgccttctctcaggctaggaaggaggaagagcaatataagtccgccaatggaggaatagcaaatcagtccgctagttcggctacagaatggaatggacaaaggagtagacttggaaaggaagggttatccttgaatggaaagtaagcactgcaggtatcttctgtttatactaatggtgccgctagcaatcggcctgttcgcccacataacccttaccactctctttggcttctcttctcttactgaaatcgagaaaaaaaagtgaatggtttggcttgtcgcggactcttctccataacgcctccgctgttgtgccattctctagtctcataactcatggatgtgccataggttcgattctattctcagcagcagcatcacaatcattggacccgacctcaacaggccaagaaacaagattgatctggttttcttgcttgagttgtgtcaatgacataaataagttgtggtgccattcattctatcatccatcgtgtaccggtcgtccctagttagagacaaccacttcaacaggagcgaggatggaatgctcgaccggaagggatcttaggctgggctcggccaacaggagaggctgaaatgatcgaatgaaatgagaggaataaggcgagatacgatagagatttctcaaatcaagagcttatccgtggcctatgctgctctgcccggcttctaattcttaaacgatctcttcaccggaactcgtaaaagatagggctcccccaggcctagagcaacgatcaactcatctgttgaatttcattcatttctgtgcattgctttttgtttgggaatggggatccggagtcttcatttgaggcaaagagtagttcttgttttggatcaagccggtagaaattcgaatcataagatttgcatgatttgtaatgtaatttggcccaggctgattcctctttctatttatcttgggcttaaccccgcttctcttcgaaaccgaggcattccccgtagataatttaagccaaggcttaggcgtagagctcaacaaagacagtctaggctcaaaaataaaaagtcaagtcagaatatggaatatgagtgggccgccaaggcaagacttctattctcccaactcctgagaactaataacaggatgaaaccggagaccaataggcgggccgggcatcttaccaatagatctacggaaaaactagctagatccggagaaactagctagctatatgataaccggagaaaaagagagttgtctttctctttaccagattcccgagtgagagtccgcg

SEQ ID NO: 110944 - DNA, 282 bp, Zea Mays
taggtttacttggcatcccgcagctgtactcatcttcggaaccaacttcttcaacatcagcttgtgttgcttcggcggcaggtgtgtccactgatgaaaccagcccagaacgcctcattgcttcggagatcggaacagtttcagcggcttcggtctcatctccatcacgctcaaccctagcagtggagcgtactctggccatttgaatttaaatttcttgaaaatcctttggaaattaataaccttctttccgaagctcttctcgtgacgaagcagaattta

SEQ ID NO: 110945 - DNA, 404 bp, Zea Mays
agcagcgcatgcatgttacagaagcattttgcgcttggctagagcccttggctcctcacggcccaaataaaagcccccatcctgatgatggcttcgtggaatctgatgaagggaaatttcaaaggtcttcagcacttcaaccagaaatttgcttaatgggaaccgaagccctgccttcataaagctcctgtaaacaacaacttcatcttctttgggagcaggagcagtgctatcccctccagctctcacaatggaaatatctcagaaatatctccctttcatagcatcaatttgactctgcttaatggatgatttttcgaagatggtgtgactcggccgccagggccgattttcagcatctttatcttcactttccacatcaaagcttccgctgtcgtcagaat

SEQ ID NO: 110946 - DNA, 385 bp, Zea Mays
gcacagcaccaccagcagcaaaagatgctactacaaagagaggggaaaggggggacactggatggaaagcatgactgatggcgtagtctttggaagattcatgatttcagggtcgttggtttgcatcttcagatatgttaggcttattgctagtacgtactactcactgtccaggctagcatctcaagacagcaagggacgcgaaggcaatgcaagtgaatctctcgcctagtactactgtgtagcgactgtaggcctatacatgttcggatatcctgctgccgtagctgctgacgctgttcggactactacagctgtaattcataaagacaaaatattatacatgttcggatatcctgcggccgtagctgctgacgctgttcgg

SEQ ID NO: 110947 - DNA, 489 bp, Zea Mays
cggtctcagggtagcgtcctaaaaacctcacaggattccatgcatcgaatatatggaatttccactagaaatctcatctgattgaccaaatcaacccaaatccaagacttttgaccataagaagattacacgtatgatgtcgatctattgtgtcaatctgttggttgtgtacgcagttagccccgatggtgattccagacggtaggggcaagtcgtgtacgtaacagagaaggacaaactgatctcttcagttatatccgatatgatctacttcaaccctttataaccaattgatctattcaaattgtgcatcaagtagatccatctcatgaacctaaatccagaccaaaaactacgcagaacctgctccgataccactccaggatcatggggaggctacactagcgcaatacaaaattttcgaccctataaaaccaagaactcctactgttatagatcatggaattaccactagaagggcagggcagt

SEQ ID NO: 110948 - DNA, 441 bp, Zea Mays
gcattctgtcatgttcagtgcccatatgactttgggtaattggtctgcccatttgccctttttgtcgtcgaggagccttttcttgatagcgctgaagatcttgccattggcgcgttcgacaatgccgttggattgtgggtggtagacagaggagaacactaccttggtgccgatggaattgcaaaattcccagaaatcctgattatcgaactgtttgccgttgtcgactgttagctcggacgggactccgaactggcagaagatgttttgccaaaagaatttttgcacggtcttcgcggttatcgtggaaacttctctggcctcgatccatttggtaaaatattcgacggcgacgaaggtgaatttgaggttcccttgagccgtaggcaatggcccgacgatgtccagcccccatcgctgaagtggccaggtgtgggcgat

SEQ ID NO: 110949 - DNA, 693 bp, Zea Mays
ctccgatttccaaggatttctcctttgtgggctctaaaggcccagcttcggtctcggcctgactctttgcagctttggcttcggttagtcttctctcagactgcgtctttggagcttcggcagttttccttggagtagagcttgtctttattgtctccagcgcatctagtacgttgaccattcttttcctcttaggggtcgttgtaagacctttttgtgccttcggcactgtcacttctgccgaaggacttgtaacttctaatatccttgttcctttgaccactatatgttcaatattatcggccttcggctcagctaatttgatcgaggatgccttcggctttgcagccggctcttcaatcctctgcgtaagcgcaggttctttggcttcagtagccgaagaggtctcaccgccaaatttaggcactgtggccggttcaatatagcgcggtcggtgagtaagaaccttcacctttttcctcctcagcgcgggctcgcttggagcagctgaagcatcatccttcccagaagttgcactttttcttttctgccctcgtgatgggtagcggtagttagggtacatgaacccaatagcatcgaaaactctatttagccttttctttttccggcttccgaaggctgcagataacgcattatcttccgctttagagtacggcccaagcagtacatcac

SEQ ID NO: 110950 - DNA, 437 bp, Zea Mays
ggacaagatagcaggcgatcaaatctaccccacagcacgggctcgggggctagtcgcaatgaccaaccagctagactggcaccaactgctcatcaataggctctctgacgggctctctcggaagatgcgatggaggccagacgactagatcgcaaagctatatccttttttcttgtcgacgaggcgatctacaaaaagagcgcctctaggatcaagcagagatgcgtctcaatcgaagaagggtgacagttgctcacatacgtgcatggggggacatgcggtcaccacgtgacccccagatccctcgtcgggaaagccttcaaacaatgcttctactggccgaccgccatgtcagatgtcaagtaggtcatccgaacttgcaaggaccgccagtactatgcacgatagacacacatgtcagtacaagccctacaaac

SEQ ID NO: 110951 - DNA, 556 bp, Zea Mays
cgattttgttgttaccctcaagggggaattggcgtgggtggagaccatcattgagactcgccaccgcaccaacatcgacttcgttaccaaggtgtacaaggagctagatatccatgcctcaaaaatccaagattccaggagcgagaggctcctaaatctagaaggcggacgcgtgtggtagtagcttcgggccttccttgggccccgagcatcctaggaaaatatgtgccttgtgttttgctcgctcaccaacatgtgggcacaactctcaaggggagcacctcttccattggagactcatatgggaagcgtcctcatgacatttcaacaaaacatgccatactccctgagacttctcaacaggactctagagcagcacgcgctatagctcgctactgacattgagtttgtaggggttgtcgaccatgtgtcgaggtctatcctagaccacatcatagatgaatctcaaggatcctctaataatgactcaaatgagggatatcttgaggtcatcctcgagggtgacgaggcctctcctcttgacccccatcaaaat

SEQ ID NO: 110952 - DNA, 456 bp, Zea Mays
tgataaccggagaagaccactggagtttgaagagcgtgaccaccatggaatgagaagattcaaagttaaaggcaagctatccccttgctttattagacccttcagaattttaagcgagttggggagatggcctaccagcttgagctaccagataatttgtatgatgtacacgatgtgttccatgtatcttaacttaagaagtgtctccatgtcccagaggaacagttgccaatggaagaactcagtgtgcaacatgatctgacttacacggagcatcctatcaagatcattgacaccttgactcgggttacaaggaataaagtgataaaaatgtgcaaggtgcaatagagtcatcatggtgaagatgaagctacttgggagagagaagaagagctacgaatagaatttccccacctcttccctagttcctcttaatctcgaggtcgagattatttt

SEQ ID NO: 110953 - DNA, 1028 bp, Zea Mays
tagctgattagttcatctacttagtgcaagtactctcttattcaccttagccatggtacctcggtctacaagccgccgcttggccttcaccttcgcttagttcctcgaagccctttccttgctatcttcaccctatcaagccattcttgagtcacatcatattgagcatctattcagagaatcatttcttcagttgtgaaccttgcttgaatgtcttctagatataactgttaaaaacaatcaagctctagtttgattctcatagaagcatatatggactggtagtaatatggtcaagccaattcacgattcctcatatcttatccactttggcttaaccaatcctcttaatcactttatcctctattctgatcatatgtatgtagtgatttctcaggtcttgtccatatattcaaaccaatatagagatcatattatatccatttacattgtcccattggttatttaacctcgtgttgaacctttgttcactgatcattatacactattcaagtatgttcatcatactgaatttcctattcaacacttagcaaacttgttagtcttttaaatgtgttgttatccaaatcagcaaaactcacaaaagggatgaatgcactttcagatctggtgggtgatttccccagttcttcctctcactgaggagcaggaccgtaacttcgagtctgataacgaaacatgtgttggttgtatcttgacactgttgtcagatcaactatatgacatacacatgcaccacgaagtggctcgtgatttatgggagaccctggaccggatgtatactgaatcagatgctggacgtgaactttatgttaatgagtagtaccatgaatacaggatggtcgatgaccgttctgtcgtggaacaggctcatgaaatccagcttctggtgggggaacttgcacactttgattgtgtcttgcctaacaagttcattgttggtgtcatcattgccaaattacctcctacttggaggaattttgccatggctctcaaacacaagaagg

SEQ ID NO: 110954 - DNA, 495 bp, Zea Mays
gagccaattttcttgtttatttgaataaatgaggctcttcaatatggatggagtatgctgggtagcttatgaaattaggtatttaggtctttgaatggcgcaaggcaaggcctgtgcacccatgcattgcccggtgcgcatcttgatacaatggctaagagataagcaaactcattaatgtcgctttgtttgatgcacataggagcagcctcctctaatgccatctcccaccctatgaattgcagctctgggattttgctcgtttccagcttgcagtgtttaaatgctgacagcgtatgtattaaattcgatggttgacttgttagtattctggagatattgcatcctgggtttgcgacttaatcgcctttcgattaagaaaagggcgaaaatttgttcctcaagtcatagtagcaacccactaatgtaatcccccaagattgcttccatatcccaccttggttaatgatgatgacacacaactcacttaaagtt

SEQ ID NO: 110955 - DNA, 369 bp, Zea Mays
tttggatagaggatcacagtttacctctagattttggaaaagttttcatgagaatatggatacgaagttgaattttagttcggcctaccatcatcagactgatggactgatcgaaaggactaaccaagtattggaagatatgttgagagcttgagcccttcagcatggtagtagttgagacaagagtctaccttatgctgagttctcatataataatagttaccaggccaatctgaagatgtcactgttcgagactctatatggcaggaaatgcaggattcctctacattggatcagactgggggaagacagttctttggatctaaacttattcaaggggcgaaagaacaagtccgtataattcgggag

SEQ ID NO: 110956 - DNA, 795 bp, Zea Mays
atgttgcactcttccacctgatttgagaggatgcttggttgtgatatttgttggagaaagatcccgggtggagcctgggcccgactggatcccagctttgacaacgcatctgctgtcgcattgcggtctctttccacgtgatggaactccaatccttcgaatttgtcctacagctttcggacggctgcacagtacctgcccatggaatccgtcgagcaatcccagtctttgtttatctggcttatgactactagcaaatctccatacaccatcagcttcttgatgctgagtgatacgacgatgtttaatccgtggatcagcgcttcatactctgctgcattatttgacgctagaaatagtagctagagtgcatacttgagtttctcacctccaggagcaataaagagaatccctgcacccgctccctgcagtttcaatgagccatcaaagtacattttccacacctcgataacctctaggctatctgggacctgatgttcagtacactctgatacgaagtcaaccagcgcctgagttttgactgccatgcggggctagaactctatgtcgtgagctcccagctcacacacccacttggctatccttccaatagcttctttgttgtggagaatgtcccctattggaaatcctgtgactactatgactttgtggtcatcaaagtagtgtcggagtttgcgtgcggttagaagtaccgcatacatcaacttctggacttggggataccttatctttgagggcccgaggacttcactgataaagtagactggatgttgc

SEQ ID NO: 110957 - DNA, 418 bp, Zea Mays
cagggtcaaggaatgacaactacaacttctatagtagaatagatagggtcaaactgctaggctggctccacgcatcttgtaaccccctctcccttggtctataaaagagagagggcgaccccttcaggggaggacttttttcggactctcttcttgcacacactagcacacttagccattccaacatccaagcaatacctggcctactaaacttacgatagcttcaagtgtaaagggattggagtcatctatggaagttgcctccattcttttcccgccaatgtcctcattgacataagcctcctatcccctgccacagccttattagggctactcaccatggcatgctagacttgtagggaacaacatacgccctatctcttcgatgagtctgctaatatattgtttgaggtgttga

SEQ ID NO: 110958 - DNA, 577 bp, Zea Mays
gtagaatcaagtccaaacctcttgataaaacttattctctgtactatggactccaactttgttatataattcttagtccagaaccccattatttagtcccaaaaggacctcaaactgggcaccaaacactgattttcagttttcaacagaatccagccaccaacacaatgaccatccatttttaggagcctgttactccactttttgtgtagcaccaagcctgtctcactctataaaacttgtttaccttactgtggtctccaacgttgctatggaaactatagtgtgaaaccacacagattaaccacaaaacagccccaaacaaggcaccctaacctgaaatttagatttcagagtctgaacacaaattcagtccaaccaatctgatagttcaactttgatccaccttttctccaattttagagtaaaaccaagtcaaactaacttaaacaaagttgttcaacatcatatggtatttacttcctccataaacatcacagcccaaaaccctctagatcagccacaaacaggctctaaatcagctatcagaacacagaaatctgatttcagacactct

SEQ ID NO: 110959 - DNA, 284 bp, Zea Mays
acaatggagaggagggtatgcatgaagacatggacaagcaaccagaatggagagaagtgcctgaatatggtcaaacaactgcaggggcaccagtggctcaagaagaggaaaaagaacactttatgacagctgggtgtgatcctgatggagatgagccgataggagcaaatgaagaatggagatacttcaaatttgttgatggtaaaaatgttcaaccagtgaatccagtggatgttcagacaagaaggagggcaagggctattccagaatttgatttagaaagt

SEQ ID NO: 110960 - DNA, 411 bp, Zea Mays
ggggcagctggcgagaaagtggtcgggatcgccatagttgtagtttttgtccttagacccaccatgctgtcggctcatacggttgttatggaaccgcgtgaaccggctggccacaagtgtcagctgctcaaagctctccacctgctcctctatgatagacaacaaagaagatagagcaaacatagaaggtgaggggttagaagcagaaccacctccagagaccaaggccatggtgggtgcaccagggttctcaatcttagcccgagtctggtggtcaatctctgtggacttgagcttgctgaagagctcatccacggtgagagactcgtagttgggccactcgatgatcgccgagaccttcacctcccaaacccttcgatctagagcatgtagtaatttcagtgccctctc

SEQ ID NO: 110961 - DNA, 374 bp, Zea Mays
ttccttacaatcccatgtaatcaaacaagtctttcatgtgcaccaacctagctgtgcatcatgaggcgtggaactcctccatgctcttgctatgtccaggatcttttgtcgccacagccaccttaaaaaccaatggcgcagctactaccgatgcagagcgcgtctgcatgtcgacgctacttaccacgacgctcacgcatggcagtctccggcatgtccaaatggcagagcaagaagccaccaccgccgcagtgcttagtgttaaagctactgtgttccacttaatgtaatgggttgtgtacttgtgtttatgtaatggacctaggtccaactactcttattataatacatctcccaacactgtttagggttag

SEQ ID NO: 110962 - DNA, 442 bp, Zea Mays
atctgtttgtgcttcttcttcactatccacttggctgcaagagcgcgccaccatgcagcatctgatacaacagcagttggctcgtgctcgtctgcgtatgaaggctcaagcagataagaatcgatcctaacgctccttcaatgtcaatgattgggtttacctcaaattacaaccctatgttcaatcctccttagctcctcgttctaatcagaaactgtcatatagattttttggggccttttcaggttctcggtaaaattggtgttgctgcctaccggttggccttgccggcaacgtctctgtttcatccggttgtgcatgtgtcgcaattgaagcgtgttgttccccatcctaccaccattgctgatctaccttcttcactggatggctttcagattccagaaaggattcttcaacgtcgtgtggtttgccagggcgacac

SEQ ID NO: 110963 - DNA, 452 bp, Zea Mays
acgaccttggcctcggtttgattccgaaggcatctcagttcaccttcattgactccgccaaaaagcagagcccctggtttgtacccacaggatatagcatatttctttagctcttctttttcagtttttgataactcttgtccaagtatatcttgaaaattgaagttttcctcttccaaagtatcttcaatttgctctttccctttctcaattgttgtgtccaccgcggccgcaacagcttcttcctcagccatttttagaagcatgttatcaatatcaccaagtgtggtttctagattaggatcttcggcggtttcggtttcggcatcttcggctccggtggctgcggcttcggcagcgccagcgctctcagtaattggtatttttgatgctgatgccggtggtggtgtctagtgaattacatcggctacttggataattctccgtttttt

SEQ ID NO: 110964 - DNA, 514 bp, Zea Mays
atggtgagttgctctgccacgtcccatttgttggctaatgtagggtcttctaatagtggagctccatagcgggtgtcggttggccccatgttgtagtgccggggcattaggggccatacgcattgttgccatcccattgatggagacccatcagcactaacccgatgtgacattgtgtcagcgagggtgcattaggtggcgacgtgccttagcgtggctagcgtgggacaatagtgtctgcctcgttttcatactaggagggtacaatcgtacaggcgtgcgcctgtcaggcgcctgacgaggggtcatggaactggggtccatagatgtactggtccttaccacatgccctcacgtctctatcttgcctagttgctcggtggagagttgcttggcctgtccgcttcgcagagttcctcagtggaggcttgctcgattggcttcacctctatggccttctacctaattgggccgccatgagtaatgggactactttggggtaccatattcatgg

SEQ ID NO: 110965 - DNA, 660 bp, Zea Mays
acataaataatctctattattttcaaggttccacagttacaggtactgtaactatttgtattgcatccaacacttcaaataccaagctttggcatatgcgcttgggacatatgagtgaaaacggtatgcatctcttgcacaagagaggttatttaaataatattggcaaattggaattttgtgaacattgtgtatttggcaaacagaagagagtcggtttctctttatctactcactgcaccaaaagcattcttgattatattcattctgatctttggggtcagactcctcattcttctatttgaggttgtgattatatgatcacttttattaatgatttctactgcaaagtctgggtttcttttctgaaacataaaatgatgctctgactgcattcaagcaatggaaggatttagtggaaaatcacactagcagaaaaatcaagaaactaagaaccgacaatggattagaattttgcaatagtgagtttaattctctttgtgctgatcatggtattgctagacacaagactgtttcaggtacgccccagcagaatggtgttgctgaaagaatgaatcatactattctggagcatgttcgttgcatgctttctaatgctggtttatgggataagcatgatttgtgggcagaagctgctaa

SEQ ID NO: 110966 - DNA, 449 bp, Zea Mays
gattggttgaaatgtttgatttggatctttgtttgagtgctatggtcttatggaatgatggccataagaacatataaaatttttaaaacttaagctattttccgtctagaatcttttctactcctcacttttctaaggatttcacttcctaaccaatcagatggtgaacccacgtcaaggacctaacaactggaaccagcgtggtcaacaagtaccaccaccaccacccccgaatcccaatatggagcagttcatcgctgcccaaatgcagattctgcaaggactcactgcggctgttcagcaattacaatagaaccaacagaatcagcaaccccagcagcagcagtatgcacccccggctagagataagcaccgggatttcatgagtcatcacccgccaacattttctcatgcggttgatcctctagatgccgatgactggctcaaag

SEQ ID NO: 110967 - DNA, 538 bp, Zea Mays
caccgaacaacctgcacaggcagagcaaacagaggccaaaacggagcaccaaacagtgcacattacagtgtctggtgcacaacattttgccttctttgttgatgatgtaatcgaggctcccgaaatgggtggtcgctctaggggtgcaaacgatacgggggccgccattggcccttgcggtagtgttgagactcttgggcggaaggggttaggatttggggaccatgaccatctccccttcgacgttgaggacgaagttgaggttcctaaaacagattgtcattttgggggtttgattggcatcatgtccggccatccagagcctgagagttcatcgagaacacgcaagtgccctacttggcacgccaactgttggtgtttcgaacctcgctccgacaagtaaatttgtatgtgcgggttctgggctacggagggtgtgctcagtgggcacaaggtttatactagttcgggcaaaacgtccctacatcaagtcttcgacgactcgtgctatgacaccgttgttgctcaatactcgtag

SEQ ID NO: 110968 - DNA, 1114 bp, Zea Mays
cgggggcggtggctcatgatttggagttggcgcggtggcggccggagagaagagttgcactggatttcctattgtccttcccttttgcacttttgccagaaatattattgttctgattttgagaactgtttcctgctggtctctggaaattagagttattttggcggagatagggacaatctttaatgaaatgtcccgcctttccacagttgtagcaaggatcatatttagtgctagtgggagtaggcaaacggggaacttggctatttgtgggtagagattggcgttgcatattagtgggatggatgtagataggagttttagcagtgtaagcggttgagtgatagggagtgttggtagagccagctgttctgattattaccttttgacgctttgatgggtcctgggaagacccagctccagatcctttccacattcttttagcattttggtgcacccgccccttgtcttctactacaatcgccacactgactactttgttaaatgtgaggtcataacatgtagccattttcttctgcagcttaaaactcagacccctcatgaaataatctcgctttttaccatcggtgttcacatggtcaacagcatactgagacaagtgattgaacttcctaagatatttcattaccgtgtcaggaccctgctttagcctcaaaaattcctctagtttcatttgcaagactccatcaggaatatagtgtgctctaaaagcttccttaaattcagtccaagtaacttgatgtcctgtttggttggacggtcacaaagtttgcccaccaagtgctggctggaccacgaagtaactttgccataaactgaggcttctgcacttctgtacactggatcaaactggatttttgctccaccacccaaagccattcatcagctttaagtggctcatcagcctttataaaactgggaggtcgagactccatgaattccatataagaagcatttctggcattattgggaaatactcaagccccgtgctaattctgattctggagcacttcacgtaacacatgtgcattatcagccgtcgtatttaccagtgcggcaattgcatcagctagtgttggagggattggtggcg

SEQ ID NO: 110969 - DNA, 465 bp, Zea Mays
ctattatccataaggaagaggtgttggtgtaccatgggtatgcagaacactgaattttcttctacaatcatagtgaaccctctcttagttggccttttggtttgaaataaaccattatagaaaaactaaagcaaacaagagtatatcgcgcactcctatcactatgaactttattccagaaaaatcaagcatatgcaacatgaacttaatcattaatcaggtcagttcagagagccaaaattgttcataaacttcacaagattttcgaagcagctggaccactcttttagatcgcaattcggttatccaatcgccttgcattgattgttaattcgaaatttgaaaaaagttcgcccaagcatgcgtgcaggactggatatggggatctcaaaatgtactaactacgattaatatgaagctgcaaaaacaggcaactctaaatttagatcaaccattagagagatc

SEQ ID NO: 110970 - DNA, 558 bp, Zea Mays
gagcagactggccctcggacgcaattctctgcctcgctcgacgccaagtctaacccatgggcgcaatctccgcctcgcccgacgacaagttcggccctcggatgaattctccgcctcacccgatgccgagttgggccctcagatgaattctccgtctcgcccaagctcagcctcggccacctacttcaccgcgaatcccgcgaacagccactccgccaaactgtggcgcacgtcaagggatggctcgtccaacacctcgggaagacttccgcctcgctcgagccgggctccgacctcgataagtgcagcagagaatctcgacatcatcctgcgcatggatgctaacgcaccccgtaagcaggcctttagcgcatacctcggcgttgttacaacaactatggcatcgacaacctctcctcgagggctcgggcgtacgaataacccctcggcctcagcctcagctctcagcaaggaaccagcaggcgcaagtcaacaatatagtgcatcgtcacgtcggcttgcagggcgccaagacatctctccttcgaatacaacacc

SEQ ID NO: 110971 - DNA, 734 bp, Zea Mays
ttattatcttttccttgtacccactacaattggtagctgtagagctcctggaagaagccattcgccgctctaaattatcgagtcaatatcttcattcacttccatactataatcaccagaagattctaataccataacctcggtccatccaaccctttcttatcggcgctagtgagcaagtccgcattcttttccaggcggatacgtggttgtcgatgaaaagctgccaaggttcgcagttcctgacaatgactcatttcaaggtaactggcccctttttttctggtccacacttcacactttcacgacttcagagtttagacagcatcacaacctgttacgttggctaaggacgaggttgaggtccagtcctcgccatgaaccggatgccatgtgtgggcgattgcagctgaagccgttcgtgtcgcagtgcaccagggacctcgcagcgtcgacgacatcctcggcctctctaacttcagcacagactactgagagcaggagctgattgtcatcggactgctctagccatttgcaggaagcgagcgaccaagccttgcagtattgcggctacgttttcctggagagtgcccgtgttcagaggattagtcattagtgtcggcgtcttagcagctacaggtggtcatttcagatgtatttttctctctctctctctttatcttgtgtaagggcaaacatgtggcgtaaggccctgtcggccctgtctgttttct

SEQ ID NO: 110972 - DNA, 563 bp, Zea Mays
tttcaacaccaccaccagcaactgcaagatttgcctcttgttgtttttgttccttgcctttctccctcttaggacgcttacagtcttgagcccaatgaccatatatatatcccacaatttttgcatctcccttttctcctaggtgtgccttgtgaagtgagtttctgcttactgaaacttcctgaactccgtccatcagatcgatggggagccttaggcttccactgacatgagtcactactgctactgtctttatttgaagacgactgaaaatgatgcttatgctttttcaagccaatcttcttcagctaacagtaaatgacctgttttatcagtgatgtgctcaaccttgtcttctagtcgatcttcagcagcacgaagtctgccaacaagatcttcaactgtaagatccttcatctcacaaaacatttcaatggatactgctacttgattaaaccggggtggtacaacacgcaggaactttttgaccacacgggtatcatctatagattcaacaagggatttgatatttgtgacaaggttagtaattctcatcccaaaat

SEQ ID NO: 110973 - DNA, 409 bp, Zea Mays
ggcaatcttgactatgtgtcatgtcctgaataaagtttccacaaagaataaagaaatcacaccattcgaggaatgggaaaagaagaaattaaatatctcatatttgcgcacctagggttgtttggctaaagtgaatgtgacaattaataagaaggacaaattaggacttaaaactattgattgtgttttacttgggtatgcttgccacaatgttggatataggtttgaaattataaaccctggagtatcggacatgttggttggtacaattaagtccagagatgctacatttttttagtacaagtttcctatgaaaattacacatgacatgcctagtaatgaaccaacgataccccatgagcattttattctggtagaacacactgagaaaacccatgtgcaaaatccc

SEQ ID NO: 110974 - DNA, 414 bp, Zea Mays
tagggtgtttgggttctcgtagaggctgataggggctatttatagcccaaatggccaaaagagatgttgatgaattgctagaaatttgacttctacaagcgcaccagactggtccactgcaccaccggaccaggtcctgtagctggtccttccggatcctaattgtcgccttcctaactttggtggcagtggcaccggaccgtccagcacatcagttagccattgcacgctcatttaagactgaagtagtcgttggactccgaggtctggtgcaccaccgaaccatggtctgatgattttttaccaaaaccgaggctgggcagttcctatacgacgaggtccgatgcctcaaacctagggtccgttgcaccaatccgtcgaggtcttcttagggctccctggacaggcgatccg

SEQ ID NO: 110975 - DNA, 1021 bp, Zea Mays
aatatttaagtatttaaggcgtgtaagccgctggagcttaaggggcacccttcattctttctctttcgattttatatggaatatttctaataatccagacacacatgtcacaagttagcaggtttcctattaggtagcgggtgtgggataagagagaatatatccttgcccaccatacccaatgggtatacgaaagtacccaataaaatgtctaaggatatcaaaatttaccatacccgtgctctaatcaggtatttaaccattgagtatcatgtacctattgcatccctacgggtaataggaaaagaaggaatggtggcctaccagatatcttacccactaccatccctagtcgagattacatatcttggcgccataatccatgacaccgatatcacgtagcacaccgtcatggatagtgatgtggcggcaactcaactacatatatcttggcattaagatcccatatactactcattgttctcgtctttcttatgtctctctcctattcctccgatcctaaccaccataacgccccttcaccggccactgtgccacacccctgcctgtcgaagctcgcccgtcaggtacatggtcgttatcatttcccctcttgttgtatgttgcatggcgcgtttcgaccgctatttgttgtgcccgttgttggacccatgctcattgccgaccaccggccacaaaatccaccctaggccttgaccccacccggtgttgccctcattcctgacctcgcctggcgccactgaaagcatctaggtctccagtgggttttagtgattaaagacaacataaaattattgtgactagcatgtgttttgcagagcatatggtaagttaggtcacaaatgcagggaattgcgctccaacaggtgaaatcaatccctcagataaaacttgaagcgacggctgaaaaaggtgattcaaaagatgaaggtctacataccctaagtgtcgaaggagttgtgggacacttagtatagggttaggccttttatttttactt

SEQ ID NO: 110976 - DNA, 314 bp, Zea Mays
gagagacaatatataaaaaagtcgagctcgtcacgcaagcacacgaacgggcaggacaggagagaatatgggaaagggagaccttgtctctatcgtccttcttggcgagaacctgtgctgctgtgaactgtaatttgtccacatgcatgcatgcagtacctccaacagataggacatggacatacaaatgtagtataggaggaggaagtcagtgcaacactggaggaataattcgggaaggaacaatgctgttaagttggcgcgcagaatagtttgggaaggaacgatatatagatgctctgattatgggggtg

SEQ ID NO: 110977 - DNA, 482 bp, Zea Mays
cgagtgcacgaactgcactatcagacgaaggccagagctgatggtctgcacaaaaacttcgggtgctataattttgcatatcaaaaaaatacgaaggcccctgtgattggataccgcaccaaatggcctactggctagacaattgagtggctttatgtgaaagctaacgagaagaaaagagagaagcttatgagtatggtgatgagccctttgaaattaagcttcggcatgatgagaccactatgcaacatgcatcttggctgtccatgccaactagccgaagtagaattgagggtggtggctaggcatattggcactagggattaagtgtaggaatacttggcaaatagaactttcccaacctctagcggatggggaatgccaaagaagaaggaagaagggaaaaagtatgaacttgtctgactcccttaccgcttcaaatttcagaagacatataaagagccatgcactgaatggctaga

SEQ ID NO: 110978 - DNA, 407 bp, Zea Mays
ggcggagtctagctcgcgcgggcatcactctggtcgacgcaagggcaagtactcctccaacaagtaaaagtccaagggaggattcgacaaggaggcgctcaagaagaagtaccttcaaaagcaaatatcaaggagcgtgcctttcttgcctccctcagtgacctcaaccacgactccgacaatgacgtatcttcctcaaacgacgaggagcttgagaggcgggtcaaggacaagctgaacaggctgtgcttcatcgccgacgccacgggagcctctacaccatggcaattggtgaggatgtggtcgacaccaaagatgacaaagacgtcatcgacaacactacttccgaggtactaccttccaccaatgatctcgccgttgagatagaagagctgaacgctgctttg

SEQ ID NO: 110979 - DNA, 378 bp, Zea Mays
gatcacacagagggcatatcggagggtgatccagccctcttctagctaatctgtcagcggtccagcacctgttgtgcgcaacaagccaaagaaaaaatctacatttaggcggggcccaagtcctccacaccctggaataatggcggaaaaggtagatcccatgaagaatccttcgtaagccacttttgctgaatagataccgtctggggcaatactgaaaacatgtttgtcttcaatagtaggctgcagcactatctcagacataaggttccaaatctgaaggtaatccaccaaaactcccaccgagagggcccccttaatatctgagatccatcttctatttaggagagcctcttgcacagttctttttgtgttcct

SEQ ID NO: 110980 - DNA, 481 bp, Zea Mays
acgacgtgccggagttgaccacccaattggtgggagagggagggctggcgaaggcatgggtgcgaggggagagccaagggaggtgcccctaagaagccactaggatgggagcagggtcgggggtcttgatcaacaagaggcaatcacttagtgggaaaaacaagaggcccagtttcgtggtgacttgcctaagggtgtagctcaacgcggtcacgaagaacaggattcatgacgcgatcaaaggcaacgaaggtgccccagataatctgaccgtcgtgaaggttgacgcgcacatcagtcgtggcgaaactaggcggagccaagaaagaggtgatgccagtggccagggcaaaggcaggcccccgcagtaggaggagggatgccatggaccagcagcagcccaggtggaggtccaagttgatgactatgtttcaaaagtcatggacatggagatgtcaagctaataatgtgggtacatgta

SEQ ID NO: 110981 - DNA, 284 bp, Zea Mays
cagagaaggaagaagactagttggtatgagttcgtaattcttccttgccttttctccacatcgttctcgttcttatatgtcttttgtcaagctgattacaaggcccacggcccaattactggatccactcagcaccagaaacgcggacgtttggcttccttcgacgtcggcccatcttctgaaggcttgtttcagcagcctccgttcccgcatcctcctccaattgctgcggctgtgctgatgtcctgacagactgggctgggggactcaagcggcgatcagat

SEQ ID NO: 110982 - DNA, 634 bp, Zea Mays
ccaggtttcttctttctgacattttgttctacaaatcagggcaaaggtatccgagactttcggggttttgtgaataagtttgtaacccctctgggacgagtatgtgtctgtgttgttagcgcacgtccatttgtccgacatgtctgatagttccatttcatgaagcattgtgaccaggagaagcatttgcccatatgcgggggccgatagcagcagatggaacagatcctcaatcatgggcaccatctttgcctggtttagggttatgtttgtattcactgagtaagagaacaattctaggaacttgtcacataatggggtgcccttccatctgtcatgccatagatggattgtggttccatcgcctgttttgatattggatatttcaaggaataccggaaggttcttcagaacatctttccaccagaatgaaccattgttgccatctggagggagcgaaccattgttgtatctatttctccaaatcagttggacccatggtatatctccaaaccattgttgttacatatagtaatttagttaagcttaaaaaactttgacttctcaaaacaaaagcgagatagttacttggtttctatggaaaggaaggaagaattttaacggtggaagctgt

SEQ ID NO: 110983 - DNA, 453 bp, Zea Mays
gtcggggactcaccggagatagccgagcgtggcctgtagggagcagtccatgccatggagatggagcaagggctgggcgctgagtaccatgtgagacggaggcaggtactggagaagctcgccgtgccatgagcacatccatggcgtcggccggccctggaggaaggaaggaaggagcagagggtgctttgtggctcaaatttatagtctcagggggttgggataaggctgattcggttgggattcgaagtgggagatcctaacaaccccagctggcgcagatcagggaatccggtcgcgagtccacgtattgcgcgagtttgttgcaggctggaagaagcttccgaccatgcggacccacaatgtagtgacgaactcgatgcgtgagaaaacatgtgctgatgtcatcatttgcggctagaaaacaaaaacaaattaaaaaaagaaacgtgg

SEQ ID NO: 110984 - DNA, 331 bp, Zea Mays
gggggggggtgttacagttggtatcaaaggaataggctgtaggtcctagcaagtggaataacaataaattgacacactgcacatgtaggatgggttttctgctttactattgatatgttatgttattgtctatgctagtttgacattatctgaagtgatgctatgccaatcttatttacttattattctcacccatgtggtagcagctatgctgcctcgtagggctcgggatagtccacatgttcctagtggggactcgatgagtccggcggcaatgttagccgcgatgcaggccatgcagcaggagttggccattctgaggcaagctatt

SEQ ID NO: 110985 - DNA, 534 bp, Zea Mays
ttttcatattaaaaatcccatttctaattcatttaattgatttaaaatagttctgaatcgggcctcaattaccaggaagcgcagggttctcggtgtaaattttctaagacacagagcacagtgttctctggatggcgggttgatttctggtaaacgcaggggctctttaacaaataagccaacgaaggggtatccgggaatccagaccgtcagatctaacatgcgcggcccagattagatcaacttcgtaacgaaccgctacgacctattgtccatcggatccgaacccaacggtcagattttaatggatccagatctaactctatccgttggattcacaatcaatggctcagatcaatcctcccagcgggtatgccagggatctgatcgccgccgtacaccccacatcccacggcacacacggttttcccccaatcctttcttcttccctggacaccacggattgaacatggcggccagggatcccagcacgacggacaccatggtagagcatgtgtcacgacacaaacccga

SEQ ID NO: 110986 - DNA, 706 bp, Zea Mays
aaccagcaatacaattttaacggttttgtggtttacacttgcatatgtcagtgtaagtagattatacaaaattttctcaaagggctataataaataaagatattgttctgattatacttcaaattacagctggcgaacacatgcaatgtcaagcacacaacaggagaacagaacacatcttagatgaaacagaagatattatgcttattaggtgcaacaaataccttagtgccacgccatatatattcattaagtggcacatgcatcatgtgattgagtgcaacaaagccgacgatggtgtaatcttatacgcttgattctatccacagcctctacacaagttctagtgaatggcattcctggtagaactattgatcaccttcgtggcctccggcaaggcgatcccctctctcctttgctttttattctagtcatggatgtgctcaattccctgattcaaatgacttccaggaataacctgatatcctgtcatgttctattgggagttttccttgtgctatattggaatccccctgaccatccataaaccctctagggctgatctagcaccgctgattgataaggttgcaaataagttatcaggttggaaggcctctgttaagcaaggctggaaggttggttcttgtcaaatctgtaatttcagcaactcccattcatctgatgcttgccttagatttgcccaaat

SEQ ID NO: 110987 - DNA, 351 bp, Zea Mays
gctttaaccaatcattggtagaagtggggcataagtaccggataagctcagctggggttgaggttttcacaaatcgtatagtctgagaggcaattctcaaaattgaaggaagggaattttgagcctagttgatagtaatgtcgggattatccttggatgtgatcatgggaatgaattggatgaaagcttgggatatcattcttgacaccgcaaatcgaaccttgtcgctaagggagccgcgaggcaccgaaatgtttcagacaaccttaccttgctttaagttgaccaacgtatcctttgcaacccaagcaacctcaatggaagagatcccaatagtttgtgagtttcccg

SEQ ID NO: 110988 - DNA, 507 bp, Zea Mays
cttcgttcgctgtttcgtccaatctaaattgttcctgcaaaatgaagaagcaattaaattcatttatagacgcccacagtaagtaaatttaaaatacataataaactcacccaaaatgatgaccacactgcgtcttggtgagtacggtcgggtccatatggtttgaggccccagtgagcccagtgatacacccctgtctctgccccattgaattgtaccacccctagatagtgaaaacgagctatagatcccagcactgtgttaactggtgcccggtgacctttgccactccatgccacctccacccagctcctctctcctgcagggtttatgaccctacgttggtccaagggttgtgtcggtggaactctaagggaccgccgaaacctacaaaattgtaaattgtgcactggtaataatatcaatccaacaaaaaatagaagacattgtcaaaataaaattacctgaagtttgttgcctgtgtcgttgtaacaacctcgtcatcgg

SEQ ID NO: 110989 - DNA, 289 bp, Zea Mays
ttgataaaattcagctgggaaaccatctggacctggtgccttattatgttccatttggaaaactgcctttttaatctcgtcctctttaaactcttctgtgagtaattcattttcaatatctgacacttgtgggatgtcaccccttaactcttcatttaaactgaaatggttagactcaggctcagcaaaaagttttttatagtatttagtgatgtattccttaaggttgttttgccctattattactccctcctcctgctcaagctgaaaaatcctagtctttctatgt

SEQ ID NO: 110990 - DNA, 443 bp, Zea Mays
cttgaactttggtggggtggcatccgaacaaacttgtttggatagggattcgtgtagctgatcgccttccatttggtgaggatccgaaactgattgttaagattgttaaacatagaataaattacctgtacatggaatgcctgcatgcactccttccttagatagctagaccacattcctgtaatctcgtgcatgctttctttcctacgatagctagactgcctgccagatatgcacgcataaaattctccatgtacattacctatataaaggaatagcacaaccctgagaagcagtgcattaggcctaaccaaacatggtatcagagccaaggttttaatgtccacaataccttcttctcccacaaattcctccaccaccacgtcctcctccaacatggtatcttctgctgctcacattccaattcatcaagtcgtcaccat

SEQ ID NO: 110991 - DNA, 639 bp, Zea Mays
caggtcgccatgggcttccctagtatttgtttgttgagaagaaagataaaagcaagaggctatgtgtggattatcgtgctttgaatcaagtgacaatcaagaataaatatccgctaccctgtattgtggttctctttgaacagttgaggggtgcccaggtgttctctaaaattgatttgaactctggttatcatcaattgaggattcgtgaggaggatattgagaagacaaccttttgcaccaggtatgggcattacgagttcatagtcatgtcttttggcttaactaatgcccctgctgcttttatggaagcaatgaataggatgttacatgaattcttggacgactttgtggtcgtgttcctggatgatattctgatttattcaaagaccgaggaagagcatgagcggcatctccgtctcgttctgagtgctcttaggaagaatcagttttatggcaaattgaagaagtgcgccttttggctgtccgaagtggctttcctggggcatgtgattagtcagcagggcattgcggttgatcccacgaatgtcgcggctgtggtggagtggaagagaccctctagtgtctctgaaattcgaagtttcttggggctcgccgaatattatcgacgcttcgtac

SEQ ID NO: 110992 - DNA, 413 bp, Zea Mays
gccaagtgggcctgtgaactgggatctcatgacatcgaatttcgatccttttcagtgggagatctcgtcctccgccgaattctaacgggggagggacaacacaagttgtcaccctcatgggaaggaccattcatagtagcagaagtcactcggccgggatcatatcgtctcactcaaatggacggcatagaaattaggaactcctggaatatagaacacctcaggaagttttacccctagctgtatttcaaaagctatcgggacgataatgtactctgtaaaatgggaaatatgtcatcaataaaaaagggcttcaagaatactcagtttgttcatgattgaccggcattcttatttaactcggggtgaccactatgccctgctaacgaagcaatcagcttaagtcggcaacg

SEQ ID NO: 110993 - DNA, 871 bp, Zea Mays
tcggcaccaccgcttagcgcccttataaattgacggcacggtctgctccgctatgttatcaccaagccaaagcatccatccctgccctcgattagccactacagccgttgaatttggattttcccccaaattggtcgactgcgccgccgtgaatcaccccatcgcggctagctgctcctaggtctgcacccaccctccgtgttcgtgttttagcaccctcgcatacttgagatgcttgttgactcaactaagtaagctttacggcatccactcgtcaagaacgccttgaattggtctcggtgatcgccgtcatcgtgggcaggcaaatccagggccgggttaatccaattagagcctgttctagggtcacctcgggtcggtaatacttgcccagtagttaatttgggcagccatcgccaatcttggttggtccgagcagcagtgtggtcgacggtgagcgcgccgtggacttggatcaatttagagaagaaacaaaagctaggggacctctgtgcatttgtcagtgagacaatgaatagtggctagggattcttcgccagttatttgggtaagcaggggcctattcgcaaagtcgacaccacgggagcgggcgcgcgcggtttctccccttctgtaggccagttgggctgaattcagcccaagactattcattgtttttcctttttctttttgtgctaggattaaaagatttctagaaaattgtagaaaaaggctaaaaatacaagaccaattttgctaggttcctaattttctatagtatttagtaaaaataattttatgatttttattccaaatagggaattttggagtatttaaaatagccaagacttatactcctggaattttagaa

SEQ ID NO: 110994 - DNA, 1089 bp, Zea Mays
ctcggatatcctcactgcgagagaaattgaactattgtctggagatggattggatcgactttaggagacctattcaggtggggatgctccgttcattttgtggacaaagcatggatcaacctagggaatgccaagaatgctagtgtatatgggttccctgatttgtgtagatccgactagacttatttgtaccaaaatatgaaaccaatcgaagccaatcagggactcctttgtaaactctgccttcggactatataaggaggtgtatggttgaaagatctaggcccttgtttgggttttggtaattcatgacaacgtttgtgaactatgccttctatttgagtgtgtgaagggaagttggtatagttcgcaagaaggcttaggcattgacatggatctgattgttagcatcttgaaagctcaaatcaagcataaaaaggtcatggctaaagcaaggtttggcaaggaaggaccatgcgtaatgcaatatagaagcgcaagctagagactcgggacacaatgtcccattcaggcggtgaatagcaagcagagggcttggagccagtgcactaaggcaatggtgaggagaaagctagaggctcaagacatgatagaccatcaaggccatgaagtgtgagtagagagtttggagttgagtgaccaaggcaacggagaagagtaggcgaggttaaggttgatggacttgaaggctatgtgatggtttgagtaatccacgacatctatgtagatcaagcaaacgattcaatgaacatatcaagtgacttaatgatgaggacatcacaccttcaagcacaagataactaaactaagaaaatcaatatcggtgtccaactcatccatatcatgacggaggcccatctcgactcattggagcccattttagattccaggagcagtcccatgtaaaattgacacccatggagcatatggattctatttttaacgatccacatataaatataatttgataacctaacaatggctttagctgacttagaaaagaggacaaccagctcaaagaagctgatcagtgcgaccaacatgggtcgattcgtatgatcaggttag

SEQ ID NO: 110995 - DNA, 604 bp, Zea Mays
ttcttcttctccggtttccaaggatttctccttggcaggctttgaaggcccagattcagtctcggcctggctctttgcagcttcggcttcagttagttttgtctcagcctgcgtttttggagcttcggcagtttttcctagagtagagcttgaactctttatcgtctccagtacatcttatacattgaccatctttttcctttttggggtcactataagatctttttgtgccttcggcactgttacttctgccgaagggctcagaactgatattttgtcttcgactccaggctcttcaattttgttaaccttcggctttatagccggttcttcaatcttttgtgtaaacacaagttctttggcttcagtagccgaagaggtctcaccgccaaattcgggcacttcggccagttcaatatatggcggccggtgagtaaggaccttcacctttttcctcttcggcgcgggctcgcttggagcagctggagcagcatccttcccggaagtggcactcttcctcttctgcccccgcgacgggtagcagtaatcagggtacataaacccaatagcgtcgaagactctattcagcctcttcttcttctgg

SEQ ID NO: 110996 - DNA, 340 bp, Zea Mays
tgcattaggcaccaagctttctcttagtgtcgcttttcatcctcagactgatggtcagtcggagcgaacaatccaaaccttggaagatatgttgcgtgcttgtgttctgtcttggaagggtagctgggaagatcatcttgcattggcagagtttgcttataacaacagctaccaggctagcatcaagatggcaccatttgaggctttatatggcaggcggtgtatctcccctctatgctgggagactttgggagagagatccctggttggtcctgattgggtttagcagacttctgagaaggttcgggaaattcgtcagaatattttggccgctcagagt

SEQ ID NO: 110997 - DNA, 875 bp, Zea Mays
gtccagcaaacgacgaaaggcgcgtctctcgtggcgtggcggaggcgccttttgctccccagctgcttgttcccgcggcttttgcttggccggacatgggggcggaaccggatcctcgctaatctggccgacaagccgagcctagggccgagtaaacaactgctgctgatatcatcattaccataaatatactatgtggagattatattatatatttgtggcctccactgaattattcagaagaagcaacctgacgacagggagagcccaaccataaccacagcaatgatcctcccccgtgcaaagaattctgctcaacgagggcatatacaacccggacgcaattaactgaagattccttctcttaacgcaccactaaccaaatgattagccaagatcccgaggcgccatcgagctctgaaactggttgaatgagggagaggaccaccacaaaagcgacgggctgctgctgagtgttgacaggacgggtccggtcaccagttggcagcgtgcacagtgcggtttatcattcatccccgagagcgatcatggcggtttggacttttgcaggccgaatttgcatggcccagagatgcccacttgttcagtatccgtctgtcagagttcagagttgcaggatggttctgcagagccgaatcatgcatatccacccgctcctggtctgctgcatgcatgctttgcccctgacagacaacaaagtacccaacccagcagacacagacggaggcgcagagcagcagcagccgagttccgcgtttcagatcactgtgtacaggtggtgaggtggactcgtgtttatgctgaccgtactcatacaactttaaatttgtaccctaaaaaatattttattgtgg

SEQ ID NO: 110998 - DNA, 401 bp, Zea Mays
caactgaactccagataagcataaatgcatgatgtggacatattcagatagagttagatagtcatcacggcttgaaagggataacctctggtcatctatataaggacaagggggtacccatgcatctcagatctcatctcgtcacattccatcaccacttcatagctcgttagccttctcatagcaaccacgcaaccactagattaataggagagctcaccctccaccacccatagctcatctgtaactcgtgtacgccagtaatactcaaatacttagcctcgacaggacatagggtgttacacattctagcagcctgaacctgtacaaatccttgtgtgatccgacgtgcatcagtgcgtaccatcgagtcacaatcaacgacgttgtcctgctcaaaa

SEQ ID NO: 110999 - DNA, 1058 bp, Zea Mays
gagattgtcgcctttggctcaggtgctgtttttgttttcttcaaaactttttcatcttccttcactagccgagcagcttgcctactcaggatgttgacaatccttttcctttttaccccttcggcccctttgtcaagcctctcgtaatccgggtattcgaagtttaatgcgtccatcacccaattcagccttcgtttcggccgggtgccgaaggtagcattcattaattggtcttccttcttggtgtagttgccaagaatttcgttacacattgtttcgatcatttctagccactctttgcatggcttcttgaattgcttctcaaatttaaattgataagggagccgaacaagtttgtactttttgcccccctcttttttcttaggcattctccaaccactagaggtcggaaatattctatttgccaagtactcttgtactagacctctagtgctgatttcggcagctaccactctgaattccacttcggctggctggcatggggagccaagctgcatgtggcacaagggccttgtcatcccgaagcttaatttcaatggactcatgaccatagtcattagcttctcccttttcttcttgtccgcttttatgtaaaaccattcgcttgtccaaccggtcggcaacttggtacgatagccaattatcagggcctttgtatctttttgatatgcgaagttgtagcagccgaagttcttatgaagaccatctgctctggccttcgtttgatagtgtagctcatgcacccggcagaaagcttcggcattaggactcataccctggcttcggaaagcccatatatagacactaagtctaacgattgcattgggtgtcaactgatgaaagtatatctcaaaattctttagaacttctccaatcatctcatgtagagggaattgaagccctgccctgaagaagctcttaaaacaacgacttcatcctcccttggttgtggaaccacctcctccccggcaaaacggacaagcttgctctcggcttccccaaagtagcccaaatttttaatcataaccatgtcgtct

SEQ ID NO: 111000 - DNA, 304 bp, Zea Mays
agcgggcgacatgtttatggtacctggttgcaaggcttgttgcctctagaacctgcggattcacgtaccatttgcaagacgatccacctgtcagtgaagtggtacctaaaaggtttggaaccttgggtaaacatagtcttaatagaagtgtaaatagcaaggttagacaaaactaccagcataggatctagcaagagtaccaacagagataataatctggagtgggtcctggccggcaatactaatttgatcagctaggaaggaggttgcctgctcaccccacaacacaacctcaaggggagta

SEQ ID NO: 111001 - DNA, 444 bp, Zea Mays
actcttatgccaactgccaccatgtttaagagcacaagctcttaacatatcctccagtacatggatggtcctctcggtctgcccatcagtttgaggatggtaggtcgagctgagtttagtcttgtatccaagcactcatgcaacttttgccaaaaccgagaagtaaactgagatcctcggtttgacacgatcttcttaggcacaccgtgtagacacactatctgtgccatgtacaactctgctagcctagctcctgaatatgtggtctttactaggataaagtgggctaccttagttagcatgtccacaatcacccatatagagtcatacccggtagatgtgcggggttgacctacaattaagtccatgccaatctcttcccacttctactcaggtatcttaagcgggtgcaacaagccgatagacctttgatgttcagctttc

SEQ ID NO: 111002 - DNA, 528 bp, Zea Mays
cacctctgatcctcctcgtcgccctcacggcagagttgctcctggtatagctcacgtcgcggctctgttccgaccgcccttctcagatgggtcgcgacgttctccggcagacttcaccacaacagccaagtttctatatcagcttatgagacggacgcttctacaacggatgggttacagggtggctgccactcatatttagctttggctacttggtgccctggtctctcactccgagtttgatgttgtggatttcctcatttgtgagatcaaggtcaccgtactggatggtctacgtgctcgtcgacagctaccgtatgctcactatctttgccacatctttgctcagctgattcggccaccacagttccagggtactcttgaggcctctcgcctcctctttgggtcgtaccgtccagctccagaggatcctgtgccgatacctgctccagtggttgatactcaggccgaggataccgcttttcaccagttcgagactcagggcgcaacagttgatgatggatttgg

SEQ ID NO: 111003 - DNA, 585 bp, Zea Mays
cgtggtttgggagctgggtgccggggatgaggtcgatctggtgttcaatgccgcgaagcgggggaagacccggtggcaagtccatggggaaaacatcagcatactcctgcaaaaggttagaaacagcagggggaatatccaaaggcggggtatcatcaagtgaaacgagcatactagaacatacaagtgcatagtagggcaagtgagtatcacgtaggtcatcaaaatcagcacatgtagcaagtaaaacagaagcatgcaacttgattaggggtggatggcataggtgcatgttgctttgcagtttttgaagcccgagcaagatcatcttttataatttggtcaggggtcatgggatggataattattttctgacccttaaacatgaaagaataatgattcaaacgaccatgatgtaaactatcattatcatattgccacggtctaccaagtaacaaagagcatgcttccataggaataacatcacaatcagcataattgttgcagccgccactatcgatgatgatgcgaaaagggaacacgtaccgagcgtgtaactttgattttgccaccatcattaagcca

SEQ ID NO: 111004 - DNA, 629 bp, Zea Mays
tctgatgctggatcaagtggaaaagtaggaactcataagaagagtgctgtttctaagaagccacgtggtagttacacccctaacttccggcgacctctcttgagtaagcagatgacaaattggttttatgccagtaccaaaagtgatatacatgagaagcaactcattctgggagaaatggtcaacaacatggatgtgccctcatctattacagaggcactttctttgggtcttaacccaagatcagattggatgatgaaggtatatgcattcagtttcttaagacagtgtttgctagaacgtggatcaaaaggcactcaggaagttgcacaaaattttgagaaggttatgaggcttgtttgtcgatatctagatgatccccatcacaaagtggcacatgctgctctctcttcactagctgatatcatgccagttttcaagaagccttttgaacattatctcgacaagacactgccccatattttctcccggttaaatgatccaaaggaatcaatcaagcagcagtgcttggcaattttgaaacatgcaaatgaaagttatcccattgattctctcttacccgccttacttcgttcgctagatgagcagaaatctcccaagtcaaaact

SEQ ID NO: 111005 - DNA, 352 bp, Zea Mays
cggtataccagttcataaaggctatgacctaatcagagccatccgatttagatcggaccactacgatcaccgcataccccttcgcgctgacagttttacataaaagaccctagctttctaggaaacaaacccgcagtcctggtagaagtatttcataacttaggaatttcataacttgaaatctataactccaaatctaatgattccagttccaatgatctcattttaatgtatagatttttgttgtatattttatttgcatgcttgatgtgatgttaatttatgctatactatgtatgtattgtgttgatacgagtagacgagcaagccactgtgaaaactgaggttcaac

SEQ ID NO: 111006 - DNA, 587 bp, Zea Mays
gtgcgctttaagagggggctttcccatgttttggatgcaaagggagatcttgttcgtcagatttctccatttggatgagtttttcgagctgatttttcacactattctggcccctctcggtgtcttttggcaggatcttcctctttgatttggaagtggcatagaaagctaggtcatttgagcttcaatgttttatgtcgtttgagctcacttaaccttatccaaggattgcccaaattagaatttgagaaagatcttctctgtcaccttgtcgtcatggcaagatggttgatgctttccattcctcggtgaccaaggtgatgaccatgtagcctcacgaattgcttcacatggacactattggtctagctcgtgcttgctctttcgggaggggggatgtggtaagtgctggtgattgtcgatgaattttctctctattcttgggtgctctttatgatggcgaaggatgaggcttttgctcatgctcgggattggatccttaggttgcaaaatgagttttccaaaaattccatgagagcgattcatagtgacaatggcacaaatttaaaaataatcatttgagacct

SEQ ID NO: 111007 - DNA, 322 bp, Zea Mays
ccaaagttcatgttagagaagtactcctacgtgtcgatcatgtggtgggtggcatattgagatactagccatcgatcttgttgatgctcgaaccattacctaggaagatgtgggcacatgactcaccaaggtggagaatagcagagcaaccagtgtgggagggagtttaccttgatgcccctgagtactaggaatagaaccagcatgtcactctcatgtgtttatgtgacatgtgcatgtcaattacctcctcgatcatcacctcaaagaggtctagcaatgtcttcatcactaaggcaacctacatgcactttttatggat

SEQ ID NO: 111008 - DNA, 345 bp, Zea Mays
ctcagctagtgcgatgagctcactcaatctagatgtgtcctcctcctcttcttcatgtaatcctgcctctgcaagagcgataagctcactcaatctagatgtgtcgtcctcctcctcctccgtcagctcaaccgtcgccattttatcctgaacatatcttgcatgctcctcatcgaccaaatagtttacgccacatccaatctctgcaaatataatgagcaaaataagttagcaaagtatagataaataaattgtactaacataattatagtatcatttttctcacccacttcccttaaggcgatcagcaagattatccaacatctgtttctcggcttgagccgc

SEQ ID NO: 111009 - DNA, 313 bp, Zea Mays
ctgccgactgtttttccgagtcaaaggaacttcatcttcttcctcctcgtcatccacattagcaacacaggcagcacccccattggggtcagcaacagatggagcacccacattgggattagcaacacaggcagcacccccattggggtcagcaacagatggagcacccacattgggatcaacaacagaaggggcacacccattgagatcagcagcagattgggtacacccattggggtcagtgtcaataaattcagttacaggcatttcttcagcagcaggaaccgaagtaccagcgtcccgatccaaactg

SEQ ID NO: 111010 - DNA, 423 bp, Zea Mays
tgggatatcagtggatcctagcaaggtgcaagaagtattgaattggaaaccaccaactgatgttagtcagtttcgtagctttctgagattggctagttactacagaagatttattgaagggttttccaagattgctaagcctatgacagctctgctagagaagaatgccaagtttgtgtggtcagataagtgtcaagcaaacttcgaggagtcaaagaagagattgactacagcacccgtgttgattttgcctgatctaagcaagaactctatctattgtgatgcatctcgactgggtatatccgctaggtcttcgttggcaccttccctgacgacgagcacccacatggtatgccatctcttcccctccctgctgtgcaaaactaaatcttctctctaaagtggctccactcttcccttccg

SEQ ID NO: 111011 - DNA, 730 bp, Zea Mays
tccttccggtgtagtggccacttgcgtgtaatatattcgcccagtcttcttaatattattgcccgctgaattatttgccacgttccccttgccttgatttgagttccctgagttctgctgattgttggatttattctgccttgtatatgggtagtctttgatgaaatgaccagacttcccatagttgaagcagccagttgaggaactaggaagggcggggaaacgagcaccagaggcactcggctgatttgtagaggtgggggcaatggcagggtgaatgaagacaagttgtttgaatgggaaggagggtggacgaggcgaagaacagttctgattaaatggtcggattaccaacctggtttgcttctcaggtccctgattggacctgtcacctctgaatcccttggttttcccatggcctgtattcttagcttctactaccagcgctgtgctaacagccctactgtacgtgagatctaggcaggtggccatttttctttgaagccggtcgttgaggcctctcatgaagcaattcttctttttcaggtcagtatttacttggtcaattgcatattgggatagatgattaaatttgttgagattatgcatgacagtatctcctccttgtttcagtcgaatgaattcctcttgtttcatgtgaagcactccttctggaatatagtgctcacggaatgccaatttaaattcatcccaagtgacctgatgtccg

SEQ ID NO: 111012 - DNA, 592 bp, Zea Mays
cgccgaccaggttgtgcaactcggtggagccgtggagggatggaggcagcaccagcgaaggagcggtcaccaaatatggagcaacgtccggttggaggtggaggagacgacggagatcgacgaagaggcctagtggcagtggggacagtggaggtacgcgttgagggcaaggaagaaagcacaagcggtgaatactgaagagacaggcgccgatggcaaggaaagaagaaggcctaagtgccagggagggaagcacatgcaccggggaagaaagagcacaccagtacaaaagagattaacgacggtttcggttacgcgccgagtgataaacagtaggactcggcttaataaaccactagcgaaaaccaattttcacggctagttctcttaacgtaaccatgagtgaaaataactcactttcactgacggttgtattaacaaaactgtcagtgaactttgtattataaatatcatttcgtcctcaccgacaggagctgtatctcacaaccaacttatatttaagatgattttggaggtccaaatttcacaaaatacaaaggagaggttttgaattttggatatagggtttcac

SEQ ID NO: 111013 - DNA, 826 bp, Zea Mays
attttgtgaaagtaagacataaatctgctatagaaactggtccatcattaagcctcagaaaagtgtagctaaatgtcacaatctaaacacctaatggactgaagcattactctgataatacgaatgtcatgttacatcatctccgaataaaaagtttcaaaattttaaagtccaaacagctagcgtgtccagagcaaagtagttcctatccagctggtacctaattttaagtttctagggttcaagtgcaagcagcagcgcgatgaacgtaggtacatatagggggcagtcctgttaattatatatcatatccctacacaagctggaacaacttgaatagcttatgaatgtctaatttctttgctgagttcccctctaagtactttgcttcttggctgacagtgttgttatcatgaccaaggcgtacccaaatgttgagaaaagagccgattttgctcaaggagatcgctagttacatgcttcttgagcgaggaactttttcctattggctgggcataagaaaatatagtgtagctaaaaggagaatgacgtgcataggtggacagactaaccgctgatcggaaaagcaaactggtgagtgatcttgtccacgctgcgccacaattcacccaggcagcaagcacccagagcactgaaaaaacagccgaaaaagaattagctaaccagcaaggacatatgtacacatataagcacgcaaatatacatatgtatgcagattctttgctgcattgcccatattttgtgagcttccagcaatgcagattcagaatttgttgtcacaagaatcaaacagctccatgcttgg

SEQ ID NO: 111014 - DNA, 348 bp, Zea Mays
ggagtggatgagaaaataacaataacaacaatttaagtacggtaactttgtgatcaccaaaaaggggtacatctcttcctagaaaaaggagcgggaaacactagctggatgataagaatctgcagggacattgacaaaaaagggataaagtacaactactataagaattaaatcttcagtaacaactcagagtgaaaaacaaactttagtctagaaagcaaacaagattcacaacttaaaatgagatgttccaacaataaagtgttgcatagtacatgacgccatacagaagaagacgattaattagtagacattagaaaaacaaagtgaacacttccacagaaacca

SEQ ID NO: 111015 - DNA, 361 bp, Zea Mays
gtttttcactgaaaatccttcaaaggaagcttccaagcttcgggtctcttgccttactgcttttgtcaacctggcatgtgatgacttgagagtcagatttaagcactgcccttcttatccccatgaccctaagctttcaaagccctaaaaggacagcttcgaattctgctatgttgtttgtgcaattgaactctaatctggctgcatagtaggttttgatttttgatggtgaaattagaatagcagctgcacctgcaccgaaggttccccatgatccatcacagaatattgttcaggcttcggtatctgttgggtgtacttcttcatgagccctaggtgtccaatcgacaatgaagtctgc

SEQ ID NO: 111016 - DNA, 647 bp, Zea Mays
ccggcccctgaggccagatggtccggtctttcgcaggatggttcggcccttaaggtcgggcaagcgtcgcaacatgattctagtgtcacggacggttcggtctccgagaccggacggtccacagccacgcagagaccatctagttcctctgagggaagcctaatagaggaattcagggatctctacgagttaggacaggggtttacatcggccgatcctttagaggagattgacataggagatggtaaaactccgaggtcgacttttgtgaacaagaccctggagaccgatcctagaaatgaaatgatcggtctattaaaagagtattctaattgctttgcatggaattacaatgagatgccaagattaagccgagagatagtagagcatcagctgcctattaagtccggtttcagacctttcaagcaggaagctagaacatttcatccagacttactcacatgaataaaggacgaaattcaccggctgctagaagctaagtttttagaccttgcagatacgcggagtgggtctccaatattgtgccggtggagaagaaagaatcaggtaagctcagagtatgcattgattttcgcaatttgaatagagcaactcctaaagatgaatatcccatgtcgatagccgac

SEQ ID NO: 111017 - DNA, 472 bp, Zea Mays
gtaccacctacttacgtcaattataactacgtgttatgctcaatcgtgttacggtttacaaactttttggtatgcgcatgtttcgggcatccgggcccacgagaagattgtgttcctgcaatctgcgtagccgtactagtccccacataaatattgatattacgatgtcttatgtttccgtttacgatacagtaatccatgtgtcggtccatgggccttcgcgttgatttcgccagcagtttacgtgtatcgggcccacgaatccagcaaccgagcatgcattttttgagctcacctcacccgtaacgctcgcggcggccgaaccctagctcaatcgccaccgtctgcttcttctccaccgcggttgtcgaaccctagattaatcgacgtcgtgagcttcttctctaccgcggccgccgaacccatagagattctccccccgtcgttccaccgccgtcgcattcaccttatc

SEQ ID NO: 111018 - DNA, 556 bp, Zea Mays
acgagatatgtttagttagaaaggtgtgttatcaaacgtggtgttggttggatgtgataagtaaattggaagtgtgggttgtctgagcactgtgttgtcgaatgtgtgtatcgaaatgcgttgtagtagtgattgcgttaacttgaacaaagagtctcaagtgcatgccgtgctatggttgtatttgagatagtaaattataagagttgcgcaatatgaggttcgatcaatgtagttaatattgattggactgtagagaggtggtgacatgccaaagtagtcatcgcttcctctacggttaagtcgaagtcatgtatgatcatgctatttacgtggtgaatgtgtttgttgaatgtatgtggtaattttagtgcactaaatgacacaggtaaaaattagtagtgctcatgtggtgtctaagctaaaatgcgaactagtgggtgaaaagtgcttcgatatacacatatgccggatttgatgattgtggtgaatgcgttgattaattgtgtatggtagttctagagcgcgaaataacttgtataaaaatttgtaagtc

SEQ ID NO: 111019 - DNA, 462 bp, Zea Mays
ggacgagcaaccgcccaacgcaaagaggacaggtgcgccttcaaaccagtgaatgatgtgaaggaaatacccctggacaccgagtgtttcgacaggcggacgagacgcatctgctctagccttcctccaaaataggaaaggcgctcgtcgacttgctctgtacaaaaagggacattttgcctagaaaccctctgacatgaagggtgccccgagggaagacatcgagcattctttgcgaatcaaccgtgggtctaacccggtgagacagcagctgcgccgctttgacgaagaaaagcgcagaccattggggaagaggtcggcaagctcctcgttcgggttcatccacgaaattaaccaccctgaatggctggccaaccctgtattggtatgaaagaaaagcgagaaatggaggaagtgtgtcgattacaccggcctaaacaaggcatgtccgaaggatccgtt

SEQ ID NO: 111020 - DNA, 496 bp, Zea Mays
ttggcaaattggaattttgtgaacattgtgtatttgacaaacagaagagagtcagtttctctttatctactcactgcaccaaaggcattcttgattatattcattttgatctttggggtcgggctcctcattcttctattggaggttgtgagtaaatgatcacttttattgatgatttctctcgcaaagtctgggtttattttctgaagcataaatatgatgctctgactgcattcaagcaatggatatctttagcgaaaaatcagactcacagaaaaatcaagaaattgagaatcgataatggattagaattttgcaatagtgagtttaattctctttgtgctaatcatggtattgctagacataagactgttacaggtactccccagcagaatggtgttgctgaaagaatgaatcgtactattctggagtgtgttcgttgcatgctttctaatgctggtttatgggataaacatgctttgtgggcggaagctgc

SEQ ID NO: 111021 - DNA, 290 bp, Zea Mays
ccgacaccttgtaactccacttggtaattaattttctttacttcaaccattttgttgaaccttacctatcttacccttgcttgttttctccactttgtcagtcttgccttaaatctgtccatggttatgcttttcatcattatcacctttacccttatcacctctatatcttaccttgatgtttatctcatacctgccctttaaaatcgcccctcttccgtctcgtaccttctttctcttggtcgtatcctcttttttggctcgcgagtttgtaacctcatcatttgttg

SEQ ID NO: 111022 - DNA, 660 bp, Zea Mays
gtttccagcgcgaggtcatacgcagtggcagacgcaaggggtgggcaatgtgggccacggccccaccttgatttttataaactcttatacatagacttagatatataatgaaataaataaacttttatatagtaggttggactaaatttaatgaagactaagctttgatctaactttttctcggtgcttcactactcagcccactccccacccgagtcgtggtgctcgtcgccacgtcgggatcctgcaccagtataactactttgccttctaatccgcaccggcagatgggtaggctattagtgggattctaccttggcatcacagcaacccccgccctcgctatctcacaagggtcccgtcgcgccgtcgcaacgcgacaatgtttgtcgcttgctgccaccatcttttgcctcgtcgtcgccatctaccgtcgcatcgtcgcctgccctcgctatcccacgcctattgtcgcctcaccgtcgtcattttgcggtgaagtcgctgactctccacaccgacgtgctgatgcgtccgcttcgccctaacgtccagtccccgccagtccacccttttgttctctccaactatccattagggtggccaaaatgaagtttcagtattcatgttattttagaacactactcatatttgttagaa

SEQ ID NO: 111023 - DNA, 356 bp, Zea Mays
tgaggcttgagtgctctagatgcgtaggcaataactcggttgtcttgcttcaaaacacaacctagtccagtgcccgaagcatcacaatacacatcaaatgatttggtgttgtcaggttgtgctagcacgggtgctgttgtcagatgtcgcctcaaggcgtgaaagacgtcttcacatttctaactccaatcaaatttcactcctttctacaacaactcagtcatcactttagctattatggagaaatccggaatgaatcgtcgatagtatcctgccaatcccaaaaaactccaaatctgtcgcacggtggtaggaggcttccaatccatcacttcttgcactttctcaggatcaac

SEQ ID NO: 111024 - DNA, 347 bp, Zea Mays
cctcaacccagcatcaggcacgtcagcgcaggcttccattgcaccatcatctactggctccgataacaaatcctctgggaccatatcctcaagagtctgatcaaagttggccagtgacagttcttgcagaccaatgagggcagacaaaaaaggagagggaactccacaactttcaccgctggcaatgaactgccgactgtttttccgagtcaaaggaatctcattttcttcctcctcgtcatccacattggcaacacaagcagcacacccattggggtcagcaacagatggggcacccccattgggatcagcagcggattgagtacacccattggggtcagcatcgg

SEQ ID NO: 111025 - DNA, 1103 bp, Zea Mays
gttggacggcacatggatgtctcagattaaatggtggatgtgcaagcgacgcgcacacgatggaggaatggcttcacgacggtgggctaccagagctagctacgtcaaccaatggagggctcggtcgaggtcaaaatttgctgccaagccactgtggctcacgatgagtcgattgagcaccatatcgaggtcgagggtcgaccggaggggcaagatcgatggtgcagtggtgttctcgatggaaggggaaacttcggtgagcaattcacgatttcctatcatgtgaccgggtcagggaatgggcgcatggggtttggtaccttctggtgcacatcatgttgctgtatcgatgtcgagggagcattagggttcaccggtcagtgatggcgggcatggtgggactcgtgtcaccatggttcgatcaactagggacgatagagctctatgaagtttcacaacttcctcacactctagggatcatggtgacaaaggtggggaggacggggcgtctctagtgagggtggaatgcagttctgtcacgtgggaatagtggcggcatcccttgtagtgagtaagaggtgcttgggtggctgggagtgcaatatgagggaagtagttggtgcgggggtgttccttttataagggagcaccattgattaatgggagacaatgacagagagggtggtgcgaccatttaaagctcgaatgccgctaggggtgctcagggttaaatgatcaggcatcagggaggaaaggaagggataaaatttctttactctagttgtggggtgatggggacaagggcagtgctcaagcaagggagggcgagttcagcgcagagatgcctgtcgtgacacgtggggggtgggagtgggaggttgaggttaacaggtggggttatggcgtcagcgagagagagagcgactgagggggagagaagtgccaacaggtggggacgaggtgtcagtgactcacgggcacatgttagtggtaagtgaggtcgggaatggtttgggctgagtggatctaggctggctcggacactgtgctgattcttttatttttctccatttcccaatttaagtttgaatttttaattcaaa

SEQ ID NO: 111026 - DNA, 304 bp, Zea Mays
ttgttcttatggtccttctgagaaatttcgtgtttgaatttctgggggagatttcgcatgcaacctttcattttcattgggttttctgaatttatatgtccccgtcataatttatgcttgggtctctgccgacatatgctaggcgtacttgtgccttctagtgaaattactttggtttccaatgaataatccctctcataatatgcatcggtccctgaaaattttgtctcacaatatcagaggcatcaactccgacaccaagtggaactcactgcggaataatattttggaatccaactccgac

SEQ ID NO: 111027 - DNA, 531 bp, Zea Mays
ccatattattgagcattccaaggttgagttgttccatctcccaacacaattcctgtgacatcaaatgagtagtgatgttgttcacttgacctttacagctcaaagcatttgccactacatttgcttttcctgggtgatattgtatttccaaatcgtagtcctttattaactcaagtcatcttctctgtcttaggttgggttctttctgcgaggaccaatacgtggggttatggcctgtcactgaacattatacctcaatgttcgagatagggcacttccctaacctactgcaggatgttttgcacgcgttgggaacctacgtccgacccctgtacaagaccaggcgagtgtacgagcctcctcgggcttgctactacatcactcgcattcatgtcagggtgatggatgcaggtgatagagtgttcaggactctgtcagcacatgagtctctgacgccgctatccacctacgctgcttcggtcagcgacgctgctaggcgaacgttgtggtctctcagccacacctaccggc

SEQ ID NO: 111028 - DNA, 334 bp, Zea Mays
aatagcagcaaatcaaatcggcacagcagctctgtaaaaagttcatgctaactacaagaaaggaacaacataaattggttctttcaattccttcctctgttgtcctcttaatggacagaggtagcaaactattagaaacggaagttcaaaaatcatcaagagatcattagcgagctattaaaatggaacttcaagaatcatcaggaggctgttcatggcatcaatctggatggaaataaatgaaaaccacacttacagaatctctactttatcgtcaaagcatcgcacgccagaccagctgcatgggctgctgtccatggggtcccaatcctgg

SEQ ID NO: 111029 - DNA, 338 bp, Zea Mays
gcagatccaagttaaaagcgggtgcattcaaactaaaatacattaattgctgattcaaggtttgagcacattgcctactttttcctgattttctaaaatatttgtaagattgattgtgagagtagagagaactctatgtactgcctaggcacaacaactgagaacctcgtggtggccaatggagttgccaagactgttggctagcttgtcatgcatttctacgtacgtacgtgtgtgtgcgtgcgcgctaacaaatcgatgacacgtacaactttcggaaagcgctggagcactgcacgttactactatcccagctccatacctgctcagcccccggc

SEQ ID NO: 111030 - DNA, 656 bp, Zea Mays
ctacaatctcctatatcataaggtccttgtttacttttttattatctttgaaggctaacaacatgtgttgtatcagtcatacaacatgtattgaacaatttgtcattcttcaaccattggagtaggaacatagacccacttctctttaagtcttaggtttttatatatcatgctcccccagattactgcatcttctgtaaagaaagtgtatcttcaacctttctcagttttggttgggtttactccgttaaactcaaatggtgccttaagaaccacctttaagttatattctttgctagtatgaataccggttcactacgctattttcctatcggaaccataaaatgcccatttaggaatttagccatttctttgctttacgggtatcgttgttatgaccatcgtactcccccgacaatcacattcatcttttatgatcacccttgccaatgcatctcattatctaaactataggggagtatggagtatctttcttaactaatattacattcctcccccttgaaatgcggcatgaacttttccgtcacaatttcgaaaaccattcagaactcttgtgaatgaagaactttgattactttcttcatccacatgattacatcatgtagaatgaagttatttcttaattcgtatgggag

SEQ ID NO: 111031 - DNA, 687 bp, Zea Mays
tgccgccacgcacaaggctaacggcacgcaagtcaactggaccaatcgaagtgccccggcatcaactggcccctcgacatgaaaacagtagcagcgggagtaatgacccaataggagatcttgaagcccgagtgagtcgacttcaagcggcgctgcaacacaggaccgatgcttgggtcgcggacggagatagaataaatgaactaagaagggacatccgtcacctgcaggatcagcttgctgatcgggacttagcacttgactgggcagtacagtcccgtttgctggcatgtgctaaggaagcaagggctcaggcccgaattaaggaacttagctcaactgtcgatgacctgcaggtctattgcaatacgttgcatgaggaagtccatgtactgtactcgcaattacaccctagtgcacctgcacaccctgctgaggcgaaagccggaccctcccacgttgcgggacgcgcgttgggtggggagttagacctttttgagccccctccttccatgaggttggttgacgtctcgactcccacacctgacgatgaggccgccaagagtaatgggaagcaggactaatggtgtaatagaagtagaagtagagtagtgtattgtaggttgtactggtgtatgacaggtaatgctattgtatactaggtattgtaccctgttgtaaaagtct

SEQ ID NO: 111032 - DNA, 537 bp, Zea Mays
gaggctgctgtccaccgtgggcagtgctcctgtgcgggcaaaccttggtgaagatccttcaactagtctcgcccttgtctccatttcatgtagcacggttacgactagaagtttgataactgcgtaactcaggccgaatcctggctatggggaaatactggtgccgtcgtggccagctgctgagagaggaaggagatcggtgggccgttggatcccggtcggacggtggagattagatctctggttaccgcttcagagttgagatctggggcgttgatccggagttcaacggggtagattagatcgtgttaaataaatttacggccatcgatcgaagatcctatggtcaagaataatccacgtatgactgtgaagcatttaaaccaggtccctataatttgcaaaattgcccttcgacttatataaaatatagaactcgagcttcacttatgtaaaataaaatttgaaaattatttctaatataagaataatccaataaactttagaaattcataactcctttgttttgactctgat

SEQ ID NO: 111033 - DNA, 457 bp, Zea Mays
gtctgggaccaggtcaacaattccgactcgttccggtgcgaccctctcgcctctcccatccatatgtttccacaacactccatcgttctgcactgagcaggaaactgcgtggttattggtgcagcgtcgacgaggcggcaattgagagcttgttcctgaacaactccggcggcgtgggtaattcggatcaggcggcgaggaggggaggcgccgggaagcaggagagccggctgctcgacccgaagcggctgcagaatgtcgcgatcatgctcaaggtgctgaatgtgacatcgagtgacgtgattggagcactcatgcacggtgagtttgtgctctcagttctttacaagtctggtccccagcgaagcttggaattttctaggcgttcttgtgcaatcccaatgtccacatgtcctcacagtacaatctggttactgctaaacaaagtacacacagc

SEQ ID NO: 111034 - DNA, 345 bp, Zea Mays
gcaacgccagaacaggagctgtggtaagcgaatgtttgagcgtattaaaagctgttgcatgtacttgggtccaaacaaagagcattccctttttaagcagatcagtcaatggcctagcaatcacaccgaaattcttgacaaatttcctataatatcccgcaagaccaaggaaacccctaagctccttgcaattcacaggcgtcggccaagaggatactactttgattttttctgggtcagtagccactccattcggtgtaatcacatggcctagataagcaatttgttgcttggcaaatgaacatttggacagcttaacataccactgttctgtgtatagtatct

SEQ ID NO: 111035 - DNA, 529 bp, Zea Mays
attattatcaggccattcttgatgatttttggtattacctttggacgttccctatgactgaaatctaacatattttccaccttgccttatttcttttcctatgtcgacacataactcgttcccattcaaggcatctagtgcgatgatggccatgaattcaacaaccatagcgctcatactttcttccactcccacaacattcaactttgtatttcctgccctacacttcacctcaaaatggtaaagctaaacacatgctttgcaccatgaataatatcatttgcttcttgttgttttaggctagtgtccctcctgcatattggttgaggccattgctatgctcctcaatattctacctactaaaacactcaacttctccacacccccatctcattgtctttggagccctcatatactcatctttgtgttttcatctatcgattctaccccaaccttttcaccaccgctcataggccatgtttggcacaactgctgcttactggaaaactagcaaatccgagaagcagct

SEQ ID NO: 111036 - DNA, 471 bp, Zea Mays
ctggatccgagcacatccgatccccttaagcgatagctctgtgtgatttgctacaggctcgctacctagatctcgagttgggggtaggaatcagggctctagtccgtgattgggtgttcctccggcgatgctccgccgggtgggaggtatgtgccgccgtcggaagcaccgtgggggggggggggaagacaaatcgtcggtcgcggattcacgaatggacagttaggattaagtccatcatacccgtttggtcaagtgtatctgtgcccttagatcttgatcggacgttccagtggttgggttgagcgctttaaaatctggtgtgttggtcatcaatcggacgggagccaacgcttaccggttgatgggcaggcatatctaatcctagccgtagatttaggatcgtgcgaccctggtcgaaacataccccttcggccatgaatttttgctaaagagaccccgccaaacttt

SEQ ID NO: 111037 - DNA, 372 bp, Zea Mays
gtacgcagtgtagtaaactctttgtcacaaccctttgattcatcatataaaggttcttttgaggcactttccagtccctccattttagatagccctttctgcgatcccacagaactcaacatttctggttccatatggcgcaacatttcttcgcaatcaaattcttcaaaatcttgattagcatctacataatccactttaccatcaacttttccgacaactctctcgtcatcaccaggcacttcacacggatccaactcaccatgttctgaccatatcgtgtaattgtttttaaaccctctttttagcagatgtgattggattactcctatatctctccaagctatcttattatcacaatcgatgcacgga

SEQ ID NO: 111038 - DNA, 824 bp, Zea Mays
ctagggcggatgtgttgggttccgccataacagaggttgatgagactgcgtcggatggtggtgaagagatggatttgggcggcggaagtggtggggaggatggcctggaatccggtaccaagatgttgtgacgtgttccaatggagttgaggggtgccggaggcggcgacccctagctgcgcaaggcgtagccaccggtgttggcagcacaaggttttgcccctcggctatctatttttgctggagagtaggtgaggaagataatatgatttattgcttgtctttcctgattacaaaatcctaattatataggcctaaggctaatcgactcttcccccaataataggagataaaactgctaagacctatccgaactaacaaatgagatctagctgctaaggcttatccaaactaacgaactcaatcacaactgattctatctattctaaccaacttgactgatctaatgttaaccactggcctgaccgttcccttatcctaggcttacgtgaataccgtttgccccacatgacaggtccattttctgacgcgcataggcgataccagtcataacattatttcttgtcatgtggacatttcaccgttgctcaaaacatagtcagaaacattcttgtaattttttggaaaatgttttgccgaacaaatacataccttcaatatcacatagtatagtacgatcaacgatgcctcatgctcatttcattgcttgaccatgaccagagtttggcactttgaccaattttttagcaactcgcaaattgcaatagattcaatgttaatcaacacaatatgtacattgcaac

SEQ ID NO: 111039 - DNA, 855 bp, Zea Mays
cccctctctatgcccgttctttcctgtattgtcggcaccacaacccctcccttgccattgccacatcgatgccacactacatcgtgacgcctctactcgctactcttggacccacgtcgacccctacctctatcacggttttcgtgcctcccaacaacatgttcttgaacttcatgatggtcagcttctctgggtgcattcgttgtcttcgatatggtcataaaccctattctccgtgactatgttgagctccacccttatgtatgccacgacgctactaggtcgcttgtattctccagtgccgtgattgccttcatgccgatcgagaccttgtcgtttccccctagcatgctcgccccttctagccccaactccatcccggtggctatataggggtgcctcacttggctctcttctcgcaccccttttctttgcttccctctccttgaaccgactaggttactgactctggtgcctcgttccacaccacctccaagccgtagctttccttcctccatcactatcgataatgggtcgactcttcctatcaccttagtaggtgacatggttctttctggtcctttgtacctcaataacatccttgtttccccccatcacatcatctagaatcacatctcagtctgtcacttcaccattgacaatcgttgttctatggagttcaatcgctgggggctcaccatatgggatcttacgactcgtgctgtggtttatcgatatgataggtccagtcccttatattccattcgcttcctcgccccaccatcctccaccaatgttaccagaccctatgctctcacctccactacctatgccaccaccttgcactatcgtctc

SEQ ID NO: 111040 - DNA, 670 bp, Zea Mays
ccgcctttgtgtgccacagaaatcagaggtgaagacgaatatcttgatagaaactcataaaacgccttacaccgtccaccctggcgaaacaaaaatgtacagggatttgaagcaaaacttctggtggaagagaatgaaggttgacgtttctaagtatgtggcagcctgtgaggtgtgccagcgcgtgaaagccgaacataagaggcctacaggtttattgaagctgttggaaattccatagtggaagtgggagcatatcactatggattttgtggttggcttacctcgttctcctcgaggcagggatgctatatgggttgtagtggatcgcttaactaagtctgcgcactttattcccataaagaccacaaattcagcttcagagttggttcccttgtatatgaaagaagtaatcaggcttcacggggtgcctaagtccattgtttcagatcgggactccaaatttgtatccaagttctgggagagtcttcacagtgctttgagtaccaagctttctcttagtgttgcttttcaccctcagactgatggtcagtcggagcgaactatccaaaccttggaagacatgttgcgtgcatgtgttctatcatggaagggtagctgggaggatcatctcgccttgactgagttcgcttataacaacagctatcag

SEQ ID NO: 111041 - DNA, 666 bp, Zea Mays
caggaacagcactggaactcccagtctcatgatcatgtgagcgtggaggcacaggaggcggaggcggaatcccaaaatcatcatcatcgtcgtcgtcgtcgtcaggaactgatgcgccctaagtctcaaactgatggaaagttgtatcctctgcctgaatgtctatcactggatcaggtgctggcactggatcctcaggggctggacggtaggagccaaagtggaggcgtgaggcctcaagggtaccctggaattgcggtggccggatcagctgtgcgaagatgtggcagagatagtgagcatatggcagctgtcgccgggcacgaagtccatccaataccatgtcctctatctcacatataagaaagtcaacagcatcaaactctgagtgagagatcagggcaccaagaagccagagctggatatgagtggtagcctccctataacccatccgcggcagtagcgtccgtctcatgagatgatataagtacttggacactgtagtgaaatctgccggagaacgttgcgacccatctgagaagggtggtcggaacaaagccgcgacgtgagttgtagctggagcaactccgctgtgagggtgacgaggaggatcagaggtaccgtagcacaagatgtgaaaatgagtcgatgactcgttgaatccaa

SEQ ID NO: 111042 - DNA, 851 bp, Zea Mays
gccgcagaagatctgttgttatacatttcctacacgactcacgtggtcagcaccgggttagtagtcgagcaggcagaggaagggcacacatatccagtacaacatccgatctacttcatcagcgaagttctgggaccctctaaaaagaagtatccccaagttcaaaaactactttacgttgtacttctaatcgctcgcaagctccgtcactactttgacgaccacaaagtcatagtagtcaccgagtttccaataggggatatccttcacaacaaagaagccatcagaagaatagccaagtgggcctgcgagctgggagctcatgacatagagttttggcctcgcacaacagtaaagactcaagcactagttgacttcgtatcagagtggactgagcaacaagttcctaacaacccggaggctactgaagtatggcgaatgtatttcgatggctcgctgaagctgcagggagcaggcgcagggatcctcttcattgcccctggaggtgaacaactcaagtacgcgcttcagctattattcctagcatcaaataatgcagcagaatacgaggcgatgatccatgggttgaacatcgccatatcactgggtgttaagaggttgatggtatacagatattcactagtggccataagccagataaataaagattgggattgctcggctgattctatgggaaagtactgtacatccgtccaaaaattagaagacaagtttgaagggttggaattccatcatgtggaaagagaccgcaacgcagcagcagacgcgttgttgaagctaggatccagtcgggcccaggtcccacccggaatcttcgtccaggaagtatc

SEQ ID NO: 111043 - DNA, 723 bp, Zea Mays
gattttatctttctcaagtgcctcattccgaagagttataacttccaagcgcgaattcccgaaggctatttttgtgctctcatcctcacattctttttaagccttcaaagctttacttaaaataagaccctaataataaaagaaatgtttacttaaaacaagcaaataatatacttaaaatgattatcagaagattgagggaagtagtaagcacaaacctttaagctattgtatgccaagttgtctgccacatggtccttcagcattaaggatagcttgacctcaagcttcaggtaacccatgttatctatcatttcacggcagacatcaatttccttgctatcaggaaggcagtataggaattcattcccttaatcaccttcgtacaccagggatcctcgaggatacttcaagtccctagcataatgctgagcttcgacaatctgcttctgtgttagctgctttcccgaagcgtgacgaatgatgaattcaagatctctagtcaacaccgcttcaggtattggcagtgatattctctttggcagactctcgcttatgtgctctgttggcctaatttccgaaggtccagccttagtgcattcaggagcagcacttacgacaacaacttcttctaattctcaagccctgtcttttaaaatcctagtaggggcaggagtagccatcttcaaaggcctcagaacaacgtctagaacattggccatc

SEQ ID NO: 111044 - DNA, 471 bp, Zea Mays
accgaatgcaggagaagactgtgaagtgttcgcctgcccccttgagaagtcgtagactaccctatttatatgcctaaggggagcacgaccctgtagatgagagctgccttcctgttgtagatagtgtattcgtgtcctgtagacaacatggccttgtactttgttgttgacttgtgcctgcttgtttcctgctgagagttgagacctaggccgagggctcagtcgcttactcgagcacacctggggtggggttgaccataccgtagtggttgacacagtgcttagtatgggaaaaagcttcttaagggatgtgtcagcttcactgtatctgatgacgttggtggcgtcctctatcacggatattgagggcagaactgggcttgggcgaggcggaggtctgcccgaggtcgcgaccgagcccattccaagattcgattatgtgcgccacagtttgaaggagtggcccttcac

SEQ ID NO: 111045 - DNA, 394 bp, Zea Mays
ctcaaggggaccgatgcctagaggggcaactgtcttggactttgggggcacccatagactatatctccacctccatgggctcactcagctcactcttaagagctatagcctctcctacttttgggtccgagttggtgcgggatttggtagaagccaagttctactgccattcactagggactcggacactataagaggtcttgagcattcatgagaaattatagcagttatgaggggcttacaacattcactaagggtgatcttaaatgtctagagacatggatgttcatgggagggctcgacaccgattagggctctcaaaattcattgatggctctaatctgcattagggccctaagtgttcacaaaagagcctaatagtgtctgagagatc

SEQ ID NO: 111046 - DNA, 334 bp, Zea Mays
tacaaagtttggagaaaaataagctcaaagttgtgctgtcagtcactctactgactgaattttggtcaccagtgacattggccagacttttgggtcaaattagagtaagatctattgcttgattgagggtagttgctatagcagaattgtagctggtatgaagggctacaagtttgctacagatgtattggcaagttgttgcacaaaaaatcaagatctagacattgcaattcggtctgtcaggcgctcttaatcgggtttcaatggtacagtgaccagattagaacgccagctcagagaactcaccatcgacgaccgtgtgcccatattcgca

SEQ ID NO: 111047 - DNA, 536 bp, Zea Mays
tgaacaatcctttagcatcaatggaggtcagaacaatcacaaggggcggatgaacatgtactccattgttgtccactatctcggtctagtacatctcagatgacctgtaactattcacataaacatgctctcagatgacctgtaactattcatagaacaattaacttaagtggtttcatgtgcacaaccaggactacttttagctgctggtcagtgagtgaaagtactcttgctataaggagacttactgccactaaacaactaggaagatagcatctgcagaatggaagcaacatcattgtgcatctgggtgttggccaaatagtcctcggcaacaatgtatcttgtctacgaccaaaggacggccatggtatcggtctgaaatcagagacactgcctatgtagcatattggtggttgtgactcgagcgggcgataaacaccatgggcaccaacgatacaatttgcattgtcgaaggagttgattgaaaagtccatgagctaatgaacttgacacaagaagaaacatgctctcag

SEQ ID NO: 111048 - DNA, 363 bp, Zea Mays
taacatctcacaacatttgcaaccaagttctaaaagtgtcggctagtgactttttatcctataggagataagggtcatgtcttcgatgaacatgtttttgcgccgctggattatgggagggatttcactgaagatccatccattccggcatttccaaatgctccacatcatgattatgacgatctccatagaccacggcttccttagctccgtcatgatcatcccgaccaccaagtgggggttggtcaacctggggaagtaattccgacgatttgccaacacctttttgcaaagctgcatctcaagaacaagtgagactaggtttcaagtttctgcagaatgcaattctcacatgtgtacgat

SEQ ID NO: 111049 - DNA, 449 bp, Zea Mays
gggtgagcaggtatgcagtgaggtacacgactatggggtcgtcctcaagcagctgctgaccttccaatgcatgcatcctggccatccaagcgggacggtttctctgaaagggtggaaagaatctgagcggggtgtcggccacttcttcttcatacagttgacacagggtcctcaatgccttgcgagcgatgacttggcaggtgtctttgaatctgtgcccagtagcagtgacactccattccacatggtgcggactggatccaatgtacacagtcacgacacatttctctgtgccatgctcgacgaattcacgaccatcatactctggctggctcctgattccgaggcggactgtgcatgctttcagcaacttgggaaaaccatcttcattctagcaaaagctggtttggcagcgaacctgcatctgacttctgagagaaggaaagggg

SEQ ID NO: 111050 - DNA, 309 bp, Zea Mays
agagcctccgtgatgtagctacgggtagaacttcctgagatgttctatgttccatgagttcccaatttctgttccgtccatctgagtgaggcgatatgatcccggtcgagtgacttctgttactatgaatggtccttcccatagaggtgacaatttatgccgtccctcccccgttagaattcggcagaggacgagatctcccactgcgaaggatcgatgccgtatgaccttatcatgatagcgcctcagagtttgctggtatcgcgctgattgaatcaccgtattcagtcgctcttcttcgagtacgtc

SEQ ID NO: 111051 - DNA, 622 bp, Zea Mays
ccctttgcctggcagttccaagtcactatcatccatgactccatcgcgtcaagaccgtgtggacccgttgcatttaatttaatctaatccatctttcatctcctgtctgttaccaaatttaatgcatgtaatcctcatgtacttatctgtatataatgaaacgtgcgacgaagcacaattccatctgccaaaggtctaatgcgatgatgacagctgcaaaacaaagaaaagttagaatcgagatggaccaccaaaaacttctgaaccaagcaccagtatcaactgtgaactgacctcacctcagacaatgtgggcatgtggcttgttagcacgatcagcggtgactcagagtcttcagaaggtaaagaccaagacatgtcttgagcgcaattgtgaccatgatcacgacaggaatggttaatggccgctgggatgctgcatcattcaaaacttgtcagttatttctcagaccagcttaacttgacgcgcagcaaatctcggtgtttggtgcaggaaccttcatctgagattctcagatcagctttcgttacacgcaaaagaagatcctagctagtgccaacaagaagcggatatatagaaccctgattgctttagaaatgat

SEQ ID NO: 111052 - DNA, 1135 bp, Zea Mays
ccatatacacatgtagtgtgtgaggttgatggttggtaactgtagcagggtttttaatgtccacttccatgcccatgtgcggagaggagatagaatccaaaaggaaagtggaaaagctagcctccattttgcacgcgcgggatggggaggctgctagagtgttgaacagtgcaaaatggggattgaaagctgctggagttggtctagtaaggagcatcatatggatatccgtacgagtacaaaggagggtacaaataagtgaaaggttgagaagtatgagtgttggtggaagaagtgtcgtgattttggaaaccagggggcagtgagatttgtgttcgctgaagggattagtgtggacttacttcgaatggtgaatcacaaggactcgagcgtggatctaagacggtgggtttatactggtttaggcttgcgctatagtccggtgtagtgttgaccgtagtattgatatggagcgcgttacagtaggtgtgcttgtgtgtttagaaaaaaggggtccttccctttgatagttcaagggctgaactctataatgggggacttgtattctgctgggaggagctcgaccgaggggccttgggcagcgtggttcttctgttactctctgtagggtcgtgcgtagccatactcctaccatgacgtattgtcccgttcgcttgtcgtacgagttccttttgtcggttttccgctaacattctcgttgtagtgcacggagggtcccacaagtcggtcgtatggagcggtcgtgcgtcgtgcggtctcgtcggtcgtcatgagcctgcgccactcgatgatccgaccacaccggctaatcgatagacctacagacgatcgacaatccgttgggccagaacgtcaataccgaatggcgtcaaaccatgtgagcggaaggtaagggcaagcactggacctagccttaacgtaacatacttttggcaatgactactatgccagcagacgctagatgtaagcgtgcaagtaagtcttctgatctgttagatgatgatctaaccatagatgcaattgtggtttgttaggagtttttttataaaactactcaagctcatgtggtatagtttaagtgttaaaagtgacatacttagacctattcaaatac

SEQ ID NO: 111053 - DNA, 448 bp, Zea Mays
ggacagtactacatttaaatgttggtactagaaagaagagtatgtcaagcatgtgcaaaaagcgactcaagaggctgatgagagtgcatcgatgcataaagatgtgaaccggcataacaaggccatcaatgtacaacgttgatcgacactcctaagacttcattgaccacgtgcaccatttcttaattagcgtggctaaggaaaataagcagaatggtttcatatgtttcccatgtgttctctataagaacatgaaggattatgcttcctaaacgacccttcaggaacacttttttatgtggggtttcggatctggacattagcaatgtttcttcttgatagatctcatcaacatgctcatcctcgatatgataagcagcatcactaggagtatgtagctgttcacaaggattcactttatatactatcgcccacgcttttagttgtt

SEQ ID NO: 111054 - DNA, 349 bp, Zea Mays
gccgccagttagcttttcctgactatcaggaaacaccagggatttttcttcccaacaaggcaacaaaccaattgttcacaggtcttggttgccgtctccacagctctcgccaccagatgccaaatcggtgggggtatagtggtatacacgtacacgcgtgccgagagatggacagagatggcgcacatgggggtgctgctgagaggacaggaggagagaaagagagaagcttgcaatggcttgtcctggtgtggtttggtttggtcccagcaagcacaagagtaggccatggcagtgccagcgcgtccaaccatcatattttgcctgtcaagtctaaagtcttccccac

SEQ ID NO: 111055 - DNA, 416 bp, Zea Mays
taatctgaggtgggagatgtgatcagccaaggtagcactatacaccaaaatatcatcgatgaaaaccatagcgaactttcttagataaggagctaggatcgagttcatagtgcactgaaaggtagctggcgcgttggtgaggccgaatggcatgacaagaaactcatagtgaccgtggtgagttttgaaagcggttttatattcatcccctggtttcatacggatttggtggtagccagcagtcatgtccagggaagaaaagaacgtggcaccagctagctcatcaaggatctcgtcaacaagtggcatagggaatcgattttttatagtgagggcatttaattttcggtaatcgacacaaaatctccatgtgccatctttcttttgcacaaggaggactggggaggcaaagggac

SEQ ID NO: 111056 - DNA, 318 bp, Zea Mays
atccggcaaacgtgggaggtttgagcctcaggaaatctcccatcctgtcttgcggtcttccaccattcgggcgttgattttccagacttcgagtgaggacctcgatgagtcgggtttggttggctagaacttgggctaaatctagaggtagttctggaggtgcggggaggtgggtctcactttcttctctaccggcttctctttcagctcttaggggaaaccctgctccaatctcggaggcggtaggcgtggttttatccgaagccatctgccagggggagagagtcactattatgcacatgcaaattgttttcaacc

SEQ ID NO: 111057 - DNA, 656 bp, Zea Mays
aaataagggcacatatgaatagtgacatcgagtacacctacccctaagagcgtgttagggagaggcgtgacagtaaggtcctccggcgtattcaatgtggtcctccttcttgaggtgttctctatactggacataagggcatgtatgataacttgtgtgtacatgcattgggtcccatgccacttggcttgtaattggtagccaatgtagttgatgtactaaaatgtattccatggtaccttttccatgtgcaaacatggctacaacatcgatacatgcactacatagtgatcttgagtgtcctgcaacttaagtcatggcaacagcacacttgccaggatcctagtacatacatcacatatttattatgttgtaccccatacttatccattaatcttttgcattggacttatcattaggtgcttagacgtgaggttcatgtcttagagccacactgtctctgattggcccgacatatccttctaccatgagatagaaatacacttagttatgctgagttgctaactagtatgagtgtccctgaccctaaagaacccaaatcccagtcgaccttggagtacgatgttagaaattctatgggcattagggccaatagaggctccatatggccaagtgtttaagtgttgaggggtcgg

SEQ ID NO: 111058 - DNA, 483 bp, Zea Mays
gcgctcttgggcgatatgttgaagatacagataaccaaacttgtcgagtgattatgcgcacctacatgattgtctaagtgatgaggacatcctccactattacccgttggcaaagacgcaattggcccagttggcccaattatagtcggacggcgaccgtgtgagcctcaaaattatcccacctcgcataacttgggaggaggaagccactttaaaaggaatagccacccttcccccattggactagtcttttggagtgattgggcctttccctgtgttgggtgtgcttaatgaaatgttgggctctgggcaacactaatttgttgggcctcagccaaccccacctgggctgggtgtatcatctggtatcagaactagggcccattttaagaaggtgggaatgatgaggacatcctccactattacccgttggcaaagacgcaattggcctagttggcccaattgtagtcggacgacgaccgt

SEQ ID NO: 111059 - DNA, 623 bp, Zea Mays
ttagatagtaaatagagtatatatttatcattaaaacgtctaagggagcctagaggctacggcgacgagagttgagagcggcatgactttgaatggcggagggcgctcacgacgtgccggtgcgaccactgatgaggtacaactccttgtgggttgagggctgttgtgagagtgaagggacaggtgtaggtgcaggtgcggggaatgattcgtaagtaatggtggtaatagattttaaattttacactataaaatataacgatcggattatattaggatcgttctctctattctatgcatttttgaaataaaattaattatagactcatgaaggaacttttagatcgtaatcgattacctcactactcgtgagggttgagggtgatgggtctgcatgtatggctatcggaatacatggaaactggtggcgtggtcgaccgtacactactagttcagatgacacacggaacacatgttcggtactccggccatccgacgcgctggatatggggcctcaataattccccctgccagtctgccacctgccacacggaccatctcgtagtactcagctacagggtcctcagtcctcagggcagagggcacacgtgacaccacgcgtg

SEQ ID NO: 111060 - DNA, 372 bp, Zea Mays
gcagtgtctcgtgcctcatcgaccttggagcgcggtcttaagagtcaagaggctgatctagattgctctgttcccatggaagtggctgaaaatccttcagccttagtggtggctgctgcagagaactcggtccctaaggatggcgccagcgtttacccagcccccgagggtgttgccggtaatgatccggctcgggtgggcagcgcgagctatgacccagccctcgagggtgtccgagcgtgttccccttctcatacttccatggatgtccacgtcgggtcttctcctctacattctgattgcatggcagcagcacgtgccttgggtcaggaagtcgccttagaggctgatgcacctgatgctagagttttg

SEQ ID NO: 111061 - DNA, 377 bp, Zea Mays
gcagattcttcagcttgcttaacttcttctcgggcgtcgtgagattctttctcgttctttttaatggcttcatcagtcatctcacgaccacccttcatccacacatcgaagtagaatttaccgcccaatgtagaggcctcagtcgaagggtctctagtgtcatcaactgagagaatggattctacctgggctacgaccttaacatgttcacaccggctttttctaaaattgccgcggcccctcgggcaccggcaaaagcacaaaaatccccacaatcgctaagtatctcatcaaaagcttcagcctcttcgcctatccactggacaacaccttcgggatcaccacgaataaatttctgctccgaagaataagctccc

SEQ ID NO: 111062 - DNA, 608 bp, Zea Mays
gttgatagctccaaggggtgaaaaccgcagaaggttgtcagcacgtgtagagccgtggactcaatagtatcctcgaccctgaaaccaaaagcctcggagtccaaagaacgccagccgggctgcaagggatgaggctccaaagtcatccttaccctacatcagggtacccggtgctcctcgaacaactgaaccgcgtactggggaggcgtagcgtaaccggctccctgcagcacctcccacaaaatgcggggaaagccctctcgtgcaagcccgtctgtgtgggaatgcatgtttcctccttccgtggatacgtgagaagtcatctttgtaagggaaaatgtaagcgaaaaagagaaagaatcccaaaaataaaaggaagctagtgcttggcttttcccatggttaagttgagatcttcgatgtagacttaaaatcttattatgggtgtctctttgcttatgtagctttttattaatattgacattttactaagaagctagaaaaataatgcatgcatgctcgtcctaagcggcctcacatcaagtatataggggtatagaaatcccccacctatctcatagcagcctgtagggcatattcaaatagcc

SEQ ID NO: 111063 - DNA, 1427 bp, Zea Mays
cttcactgttgcatctcgcattcggttgcaataccttgacttcagtttagatctatccaaaaacacgctgcctgtcgatatcttgccccgggaagcatggagtgaacagaatcaccacaccagggcgatgttcatctacaagcgtggccaacgaatagctgtttacgtacaagcgtggccaacgctgttcgttcaccgatcgagacaggaatgagcgttacattacacagacacgcagtgcagcaacagatgaggaggaggggctccgtcccacatcacatcacattcacatggggctagctatagcttgcttgcatacgtcctcgagacgatgctcacttgcccagcgccacctgcccatgagggtgacgacggtatgcacagcaaattaatcgcagcctccctacccccgggctgttagtactagtacagtagcaagattatatttatttcttgatgaccaccttagcttgctggtccacaccacacacacactctagatcagatgccgcgctgcagtagtacaaacaccagctagctacttgccagtggtgtggtgtggtggtccatgcatccatgcatcagcattgctgcaggattggtccgcgcgcacacacactcacactagataacgttcttcctcatgggaagcagcaaggagtggcagtaaaaaaaagggtgattgatggacgcatttgaatagtagtgttagattgtaatctgaccgcgttggtgaccgcggcgttggtgatgtaatctgacctaatgctagctgctgtgggtttataactaggacaacagatcctgcaacatggatatggggtagtcgaggttggattcccttgatcagcgagcgagcgaggataatgtaaaatttaaacctcacagtcccctccctccgagcagtaaattagtagagtgctcatggttagagataaataaactgctgccaaaatacgttgggacatgcatgtaattaaccaaaggtaaatcatgtggtgagttacttttgggcctcatctccaaggcagcaggcaaggcacacacggccatgagaaagacactgcacggacagcatgcatcatgggcgctgaacctgaaccagacgatatccttgtccgtgattccatatggctagatgcctctcaccagggtggtctgcagtaaaatgagcagtagtatgtattacagagctaattaaccgctctgctagcttatgcttaattagcagtaagtaaacaggtggtctgcagtaataaggaccactgagatgtaatgtactagcattcctggggctgtacgtgttgtgaagactgaggtcatgggctatcactatcatagagaagaagagaagatgtgtagctcctcctactgctacggaggagccatgccatgctgattgatgagcactatactatacagtatac

SEQ ID NO: 111064 - DNA, 459 bp, Zea Mays
agggtgatggatgcagggggtagagggtttaggactctatcagctcatgagtccctgacaccgctatccacctacgctgcttcagtcagtgatgctgcatgacagactttgtggtctctcagccacacctacaggcagcagctgcatgacacgaggttcagacatcatcctttgcgtctgagtggaggaagccagaccagcatcgttccaggtggagatggtgaggatcgcctcaatgccctagtggatgtagtagccggtctcaacaccgacctagctggtctctagggtgcacttagagctggaggatgcccacgccaggattgcagccctggaagccctacttcaaggactggatccgcctgaagcccaggtccccccatggcgttgtcccctccccgcaagaggatttgctatggggaacccggatccatcaccaggttgctctgaaaattttaa

SEQ ID NO: 111065 - DNA, 466 bp, Zea Mays
ctagacaataggtgaggatccaagaagaatacaataacctttagtagaagaacggtaaacaggatcacttgcccaagtggcatcggaatatgcatgaagctgaagtgggctatccgaggcatagagtaaacatctggatcttgtcccgcgtaagtatctaagcgcacgaagcaaatgaccataatgaactgaggtcggtgtggatacaaattggctcaaaatatgaacagcatgagcaatatcaggtttggtgatggtgagataaacaaggctacccacaatatggcgatattgagttgggtctgctagtggtgtcccatccttcggacgaagttgtaaatgaatatccattggtgtcgcaactgtgcgtgtattagtaagtccagagcgatcaaaaagatcttgtatatatttggactgagatagataaaagccttttggagtctgctgaacttcaatgcccaag

SEQ ID NO: 111066 - DNA, 294 bp, Zea Mays
gggcctaccaaaaatagcttatctgttggagcctactatttcaacacatgggaggtattttaaaaataggtttgtgaatgcctctactctgagatggtctaactagggcatgtttggatgacatgagataaaataaaagtgagtcattttatagaggctaaatatccaaacagacaaagttaaaggtgacttgaataataaaatgatatcatttgtcacttttagttagatcccaaacgtacccttataaagccaatcacccacatttcaaaattaattaaatatgtacttcgt

SEQ ID NO: 111067 - DNA, 641 bp, Zea Mays
gttttttgcaccttcggaaaacctgccgctcccggtagactaaggatttctggcatttttgtcactctttccacctgtggctctttggccttattatcttcagccttggctggcccaactgtagttatcttcggtactacactcggctctacagtactctgcataattgaaacaatttctcttgccttggcagctgaagaagtaccttcgccaaatttaggtatcatggctcgttcaatgtaacgcggccagtgagtcagaaccttcatcttcttgcccttcggttcagctgtgatggccgaagcagcaatctttctcgaagcagcaatctttctcttcatcccttgccctcgcagcgggtagcaatagtcagggtatacgaagccaatagcatcaaataccatattcaatcttttcttattccgacccccgaaagctgcggacaaggcattgtccttggccttggagtatgccccaagtagctcgtcgctagtagcttcaatgcacttcagctagtcatcatttggctcatcaaacttatccccaaacctgaaggtatacttcaatcggactaaattaccctcaccggaatcagtgatggtctccttcggcatttcccagctttccacaagcggccatac

SEQ ID NO: 111068 - DNA, 511 bp, Zea Mays
tattttcttagcgtttagtgcgaaaaatgggttttggtatacttattttgtgacttcacttgctccccaatcgcgatccaagcggccacgacgcgattcacgggctcgagaagacagtttcgcaaacctttggcccactccagcgctgggccattcgtccctggtttttttgcatcccgcatgtcttcgggggatcaagagtgtcacatcatgggtagtgggatccagtcgtgttgctgcccaagcatgttttcgtccgtgacctgtcatatgattattcgcagcagggcgcctactccaggttctccgctggcaatgataggtttgtctagtggagagcatcgtccctccccatgcaatccattagtcggaaggggaagagcgagttgtctcatgccccccttgacaatagaggtcacaataagcctcttttatgcgaggcgagcccctgagtcccctgttcgttatgggggatccatctggagggcacgccccatacttttactgctcc

SEQ ID NO: 111069 - DNA, 511 bp, Zea Mays
ccgctctgtgtgacgagttgcgcaagctaaatatggaagtggtttcgccaggtaccttggattatatctcagttgagccaaccttacaagagcagataatcttggcacagattagtgacaagggtgttcaagtcattaaggaaatgctcaatcaaaaagtggataagtataaatgctttcgttaggatagcaagggtgttctatggtttgaaaaccgactggttgttcccaagaatccagaactcaggaagaaaaatttggacaaaactcatctttccaagttttccatgcaccctgggagtaacaagatgtatcatgatctcagatccttatattggtggaccaggatgaagagagaaattgccaagtatatatctgagtgcgacacttgccaaaggatcaaagcaagccatttgaaggtagcaggtaccttgcagccactccctataccatcttggaaatgggaggacctcagcatggacttcattgtgggattgcccaacacctcccg

SEQ ID NO: 111070 - DNA, 900 bp, Zea Mays
tgaagaagggggtgggcattgaacttgttgtcctggaggtctcttggctgctctttttaaagctttctttcctcctttgaatcatatgagtgtgaagcctaacatcactacacctttaaagtgggagtttcatcgtgcgttgggccaggccatggcactattaaatgggtcgtgccttgggcccgctaggcacaacccatttggccatctatagtcaatagtctagtactcctccctcatcatcgtacctgatctcgtgagtgtggaaaaagatgagagaaaacacttcatcttgtttgaccccacaccacacagtcacatacctcgccatccgcactcacctaatctatgtgtttggatcgtgtttgaataactatcccatttaagcaatgtctacctatatgatatatagaaaccgtagcgatgcactggcaactaactatgaattagtcatgcaggagctcattcagcaaatggcgaatgtgcagtacaccgagaacatgacagaggaacaggttgatgctatggcaggaagtgagactttgcggcagcaagcttcactgttcggagcaacaagaaactataaggttgaagggacattcatctatctcagcagcatatttggatcaaacaattgtcttaccaaaaaatgtaattcttacgcaggtgttgagtaagtccacaaacaggctaagggattcgttgcttccaaaagatgagcccaaacttgcagttcctatgttactgcttattgcccagcatcgatccaagtaagatttttattaacttggtggggccattatcaggcatcttgcctttgttccatgtgtttgttccaaaccatgcaaatggcgatgcagaaatataaatggcgtgattgctaatgatttaccatcaaag

SEQ ID NO: 111071 - DNA, 444 bp, Zea Mays
gcctgggtgaagccgccatcgggagaagaatggcctgttgggaagctcgctctgcacagccaggtgcagtgggaaggccatctctgccgctccgatagtcgtaagtcttctcttaggcatgcacctacaccttctcctccgtttgcgctcggttttgtttagggggaagcgtcatactgctggtagttgctcgtcggagcagtgcctccgccgtggacccgcctttggccatgaacgtgtagtctgcaagcagtaatccatcgataggtggtctctatcaaattctgggtggttcacccattatttccctctggaatccggtcaacgtcggactccaggcgccggattgttgtgcgctggtggggtgcgccgccgcaggcctctgtgccgtggaacctgagcagcggattaggggtggcgcgctgatgtcgttggatctacgta

SEQ ID NO: 111072 - DNA, 377 bp, Zea Mays
gaggactcatgggtcgtccgatccttctcggttggctgagattagatggggggcgttgggtcgaccggttcgacttgcggccatgggatgagaaatcgacggcttgagtttagttgcgcgtaccgattcggtcaaatcgatctcgactggtgatcagcgtgtatgcggtcgtaagggaggcgacactgcgaaccgttgggttggaatcttacgctcgcggcaagtaccgaatcacgttatgatctggaccgtctgtttagatctgacggcccgtgttctgcgataccctttcggtcgacagctttacaaaagagcccctctgtttcctcagtatcaaccctcagtccttccctggtttagcctgagtctagggaatt

SEQ ID NO: 111073 - DNA, 1137 bp, Zea Mays
tccacgaccatggtgattttcacgatcgtgactacatgaacctgacacctacttcacctgcgtgaccatgatggctaatcataccatgatcgacatctcgattggtatgttcaccacagctaccctggcttcgatgaccacgatgaacgccgcgataggcctcgcccttcgaagatcaacttctcttgcttcaacgacatgtccgatctgctcatgtggctgaacaagtgtgacaactacttctgcgaccattgcaccatggagaaggtctggctggcatccttgcatttagatggcattgcagcggactggtttactagacggagcgcaacttgggcctcggttcatggccgtgcttcgttgagtttgtcaacttgcacttgggattgccaattcgctccaacttccttggtgaactcaaggccttacatcgcatgagcatcttggagtatcaggggcactttgtggcgctgttgtctcaccgtgaggagctcacaacatagcacaagatcgacctctttattgttagcctggtcaaccactggccttcgatgtcgagctccaacacccttccaatctacagtcagcgatgcgtctggcctaaggcatatgagcaccgccaggtcaaggcctcctctgccaccacccacaacaatacctaagtcattgagatgttatctgggagtcaacatcatcattcttctcctcggtgcttcttgttcacaagcatgatgatagttggtgttgttgcttcgactattgtgccctcaatgattgtactgtcaaagatagtgtcctcatcttggtgatggtcgagctcctcgatgagttgaaggacgcctgtctcccaccaatattgacctccggagaggtctaaggactaatatccagaagagcagtgtgttcccaatctgctgtggggaagaagatttgaattgtttacaagacttgctgccatgtaatatttcagattttccatgtaagtaccttggtctgcctttgtctcccaagaaactcacaagggaccaggttcaggccatcgttgattgagttgctagccttctgccaggatggaaagctgaacttatgaccagggctggtagagctattcatgtgcagtttgtcatgacggcaaag

SEQ ID NO: 111074 - DNA, 966 bp, Zea Mays
ccacaaaagcccattgcagagctttgacctctagtttactatagttaccaagtatttcattgcatttcacctcaatataatctaaccatccatcactaggctctccaaccccgtctttgaacttatatttgtagtgaagtctgatcaacctaggctccatgttcaaagcatctttttcagacatctttggcatctcccattcagctcctagtggccatgttttaaatgctaaaaacttctgaacgatatcccttgttccaatgtgtctacaaacaacattgaaagtaactatagcagcctcagctttgaagttgatataacattttggttttttatatccaaaacatgtgacaataggagtctggatgattccttttatatcagtccgctcattcaaatcattcttcatataaaaccactctcttgcccactcattcggccacttgctccggtatgcaagagctgggaacattgcaccccttcgataagcaaagttataatagctgaagttattgtgaaggcctctagttgcctcgtctgaaagtgtaattcatgaatttcgctaaaggcctcgcaaaaagcttcaacatcaagctcaacgccccggctccgcacaacccaaataaaaattactaaacgcattatggcgtttggtgtaagctggtgaagatatatgttaaaccttttaaaaatagcaactattgtcttatgcaaaggaaatctaagcctagctttcagaaaatttcagaacaaaacaactttgtcctcctttggttcgtcactaaatcatcgcctcctagccgcacccaatcgacattgttaatataaccaaagcggttaagtacctcaatgtatcctccttcgatttttgatttgtcgaagttcatgtgacttggcttcataggacgaatggtagtgttgtcttcttcgatatcaatgtcatagctatcctcaaatggattcacg

SEQ ID NO: 111075 - DNA, 1552 bp, Zea Mays
tgcaacacaagattgttgtgactaacatgtgctttgtggaggcaaagtgaagttatgtccctgatggagattgtttgacaatatatggttttgatgcccatgattatggattttgttttgtttttaaagaatggaaaacaaagtttaaggatggactagttctaagtttggagttgagagacacttagaatactttaggattttgttttttcttcaaccatactataaagacggtatgaactagtagcttgacctagataagtctaatgagttaagtgtggcgcataatatttgtctttatctctaagttgcctaggagaggaccaaaagaattatggatcaaaacccgtttataaagtttccaaatttgacaaattagatggttttttgaggcgtcatactttgattttagggtcgtcagatcatagatgactaggttgatgcctctatgtagtcagcctgagagagaaaaaatgttggactctatgaactatagagcgtaataccaatgagttgagtttgacaatttgtggaaaacaaactagagagctctagggtgcgttagactagtatggtggcatgcgtcggaccatatgacacaactatttgagttatgtttctttctatagggtcatcgaaccctttaaatagtggccttattggatcaatgagttgagtctgctgacctctgctaagtgaccatagggggtttcgcggacatcaaactgatccgacaatgagtgtcataccatacgctcgcaatagtaattcaaatggctagttctggcacagtacatatacaattactgttgtgtctcatcggaccatgcaatatggtcatacgggtgtacgttagacgatttgatgctcacgaattttgcctagagttactatatataatggctagttgtccagttggtggttataattacctcactaaccaaccatactagtgctcctacctaatttaatagctaaagcaacccatattgagtgtcagaaagagccattgcctagtgagagacttaagagttgaaattctcttggtttggagcctcattagtatataagagagtaatgagtgtgcacccattaatcttattgagcttggtacgtagagtcaagtgagagtttaatactcttgatgatcgacatcacttagacagtttagtggtgatcaagagtgcggtgaacactgatagagtttgtgggtgacccaactcaagacttatacatgatcatgagcggctcactgtgggcggcaaagaaccagcttgtaaagagcacttagtctttatttggaacaagggggagtgacacccgggtgctctaataacgagaattagtggagagtgctgactctctaagacgttggtaaaaacattgagaagtcttcaaacttttgttatattatatacatttacgtttaagcaatttacttcaagaatttatggtcttagaactgccatgtgagtatacggttagaaattagagtgcaaaactattaatacattagacactcggtgatgttgagcttgcaaataggaattac

SEQ ID NO: 111076 - DNA, 463 bp, Zea Mays
gagcttcaataggtctgtaacatttggtacccacctccggtgaactcactgaccacaaccaccatgcctccatgaaggagcagagacaaggctggtgcaaccatgaaggagcagagatttaaaatcaaaagatgcctcgagtcgcttggctttggtggtagatagatgaggcatctaaagagattcatcgcataagaagggaataaaatcaatagatgcgggactaattaaggattccagaacacaaggactctctacaggaggaaacttatgctagctttgtctatgatagcacatccccactctcaagtgatatgcaagtagccccatggctggcttcgtacaagcctccctagcttcccacatatgatggtcaatctaatcccaaacaattcctgatgagctatgaggcaaccattgcctccttcaatggaaacgcaacagtactagccaagtcattcat

SEQ ID NO: 111077 - DNA, 404 bp, Zea Mays
gttagatacgatcgaagttatgtgcaatgagattctaggcaactatacgaagaaagaagatcatttgatggttgctgccttcggctcccgaccgaagtgaagattgaatcgggtaatggatgctctacattttgaatatcctgattatgagcaattgaacaagggcgtcgaagggcagaaaagaaaaagagttgtcagtgttgtgggcagacaggccgctagaatggtaaaagaagatgaagaaaacctgaagaagagaaagttgagccctgagccgaaggcagttgctccgaagaagagaaaagctgcggctccaaagcagaaggcaattgatatagaaggagaaactcctgcaacaccttctgctaccgacgtggtagaaattctaaaggtaatgactgaat

SEQ ID NO: 111078 - DNA, 426 bp, Zea Mays
gtagattagaccgaagggtatcgtttcgtaaaatagaatctcggtcgttggatggtcgacgtgtgggcgagatcgggtcgtgcacataattgatcgcagcccttgatcacggatccgacgaaccagatcacgtaccgattcattaaaggctagatctaatcctaagcgttgaactcagatccaacggtaagaaaccctagataccccttcggcccggtaaaactgcaaataagccctcgggaagctcagaaaccaacccgccgtccactcgggttgttcactgagtctgggaaagtttgtagtttagcccctggcttttagtttatttacgcgcgcagtctagtaaccgaggaaattgagaaaaacaatatagaaactgatttttaatgcaaaaacaattctacaaacttgtttaattcatagaaa

SEQ ID NO: 111079 - DNA, 1417 bp, Zea Mays
tatggaagggggccctcctttatctcggcgccatatttaacttttttgaacactcgtacctatcggcaccttagagtgcccctttctttaagcaaacccataactagaaaaagaatggttttgccatcgggttgtgtttggtgatgactgaatgcacgaggcgctcaccattgcttggttacgacgagctgttcctgtcactgttccgcgtccagccctaagaaaagcttcatacatatgcttttattcacacatgttcgaaggatttagaatggggcgcagatccgctctcgctggatgcatcacgttcggcaatccctccgactcctaccatgtgtggtgccccattttgctggtaccacataagttgggcggtcttcatcctacttcccattgggggctcttcttcgctgcttgcaggggcacttgggtccaagtctgagtccatatagagcgtgtcaaataccaggtctccactgccatcgactaaccatgcgaactccaagtcatcacaggtggggacatgaccgcgggtcactagggccgcgatcaccgttgggacgggcgcagtcgaggtggtaagacgccagggttgctgctagagccaccatattaggacgacacttctgctgacgcctcacgcgcacgatttgtgtgtacctgaagagctagatactcgggagataactcggaggaaaggcgacataactccggataagcaggagcacctatcgcgttgaagatagactcagatagagttagatagacttcatgacttgtaaagggatatccctctggtcatctatataaggttgagggggtacccctacaaaacgttctcatatcatcccatctcatatctcctcaccatctcataccaactacgacatcattaaattgataggagaattcatccattcccgcccaccactcatctgtaacatgtgcacactagcaatactcaatactcagcaccaacaagatgtagggtattaagcacttcagcggcacgaacctgtataaactctcttgtgttctgacgtgcacctgcacgtaccatcaagtcgcgatcagcgacgttgtcctaccaaaagcatcacgtgggatacctcgtggtgcgcagttgggtcataaacatcgacaacgaccacttcgccttcgccatcgatggagaagttgaggctctcgaaacggatcatcgctttggggatcgattagcgtcacggctagccatctagagcttgaagaacttcgccgggcacgtgcaagggcactctgtggcacacgaactgtcagtgtttcaaacctagctctgacaagtaaatttgtgtgcgtgttccgggctccagacagtgtgcgcagtgggcgcatgatttatattggttcgggcagaatgtccctacatctagtcttcgat

SEQ ID NO: 111080 - DNA, 272 bp, Zea Mays
cgaaatcggccttaggccttctccacgtctttccgccacttggcggcttcatctctaggtttggtctatcacataacgctgccagatccactcttgccttcgcgttatcctttgacttataaggaatgtccataattgttgcccacagtgcctcggcaacattcttttcagtgtgcatcacgttaatgttgtgtggaaggagtaggtcgtcataataggggagccgagtcaagccagacttatgtgtccacatatgctgctcaccatatccc

SEQ ID NO: 111081 - DNA, 632 bp, Zea Mays
ccctcaggcgcttagtagatatgcttcgactcagggaccatgctatttactattctagcttcagattgctcccttctattgtgttgtggcatgttctgtgtagagcattgtgattggccttcaagttgttgttcatatgtaagggtcctggtatgcagcgctgaggcatcacccaatgatttgacgatggacttgtcaaagcaatgaagcacgaaggttgtgcccttgattgtttattgtggacatgttgtgggatataggggaaatactatgaagatgtgtggaaaacctcctttgactgattttactatgctttagcaattcccttatgcttttgtatagttacttggcaactctttgtggtgtggcccttgttctctccacagaagaggcagaacaattttcttggttgagagttgtatctccccccaaagctttagcctcctcttcctcctcttggagctggtgggcagaagttgttctaaaaaggttgttgctgggtccctatgtcctgaggttgattctactgcccttgggactggctagttttgtcttcatgctggctcgtattataaatgtttttgatatgctttgcgatggaaccttcctccaaagacccaagtcatctccgc

SEQ ID NO: 111082 - DNA, 292 bp, Zea Mays
tttcatttctaggatcggtctctagggttttgttcacaaaagttggccttggagttttaccatctcctatgtcgatctcctctaaatgatcggccgatgtaaacccctatcctaatttatcgagatctctaaattcctctatcatgtcccccacagaggaaccagatgatctttgtgtgatggcggactctccggtctcgggggccggatcatccatgatactgtccttacgctgtggtagatgttcggtcttaaagaccgaactgttttgtgaaagaccggaccatctagc

SEQ ID NO: 111083 - DNA, 367 bp, Zea Mays
tcactttgtctacgccgctaaaaagtatggacctaggttgatagccacccgctatagcaaattcctccaattcagatatatcttcttcagtcggctcctggccacctaggtgcctcaagtcaaaggttttgctctccgaagaagtttcttcaatatttttcatcttcgaagccaaaatttcagggacgactgcgtcatcagtttctttcccaagcaccacaccagcaataagtctatcaatctccgataatgtggtcccgagcaggccttcactatcttcggtttcttgtgccgcttcgttaggtttatcagctttagaaggtgcagcttttttctttgctcccgatgggggagttttacacacagc

SEQ ID NO: 111084 - DNA, 504 bp, Zea Mays
tttcgaagcattggcagttttccctggagtagagcttgaagcttttattgtctccagcacatctagtacattggccatcctttttctcttgggggttgctgtaagacctttttgtgccttcagcgctgtcactttttccgaagggcttagaacttctaatattttcatcccttcaactcttgtttcttcaatattatcggccttcggctcagctaattcggctgagggtgccttcggcattgcagtcggctcttcaatcttttgcgtaggaggagcaggttctttagcttcagtagctgaagaagtctcaccgccaaattcgggcactatggccggttcaatgaagcgcggtcggtgagtaaggaccttcaactttttcctcttcggtgcgggctcgcttgaagtagccgaagcagcagccttcccagaagttgcacccttccttttctgcccccacggtgggtagcagtaattagggtacacaaatccaatagcatcaaaaac

SEQ ID NO: 111085 - DNA, 516 bp, Zea Mays
gtcggggcaagaaaagattaaacagggtatttgatgctattggctccatattccctgattaccgttatccgttgcgagggcaagagaaaaagaggaagattgccgcttcggtcaccccagatgagccgaagagcaaaaaggtgaaggtcctgacccatcggcgcgttatattgaactggtcgtagtgcctgaatttggcaaaggtactgcttcagctgccgaagcaaagcaagttgcttcgattgtgcagaatgttgaaaaaccaattgcagtgccgaaggtgcttacagtttggccagccgaagctgaggatgataataccgaagagccacaggtggaaaaaatggtgaagatgccagaaattctgagtcctccggcagagacggaactgccgaaggttacaagagctcccgccacaactcccaagaggagaagaatggcaagcgtgctagacgccgttgcggagacaacaagagcactgactcctactcctgtaaaggagattgccgaagttgc

SEQ ID NO: 111086 - DNA, 1058 bp, Zea Mays
catggaggacttcgctgacgtagtagaccggcttctggacggttcggacccctgtgattggtcccgagtcctcaacctcctggccttccgtcaacatcatggtggtcgaaccaccaccatctcctgggggaacctgttgactcccctggggttgttgtgccaccctctcggcgaccagcaccatgcacaccgcctcggaagccgctgcaatgtacaagtacaacggctcccctggctccggagctactagtattggcagggacacaaggtgctacttcacctcttgaaaggctcgttctgcctcttcggtccaagagaatggaccagacttctgcatcagcttgaagaaaggcagtgccctctcagccagccttgaaatgaagcggctaagggcggctagggaccccacaagcttctagacatccttgatgcatgctagaggcctcattgcctcaattgccttgatcttctctgggtttgcttcaatgccccggtgtgaaaccaggaaccccagcaacttccctgcagagacaccaaagacgcacttgtccgggttcagctttgtgcgggttgcgcgtagcctgttgaagaccaggtcaagtcttccactaaggtcgaccctctcttagtcttgaccatgatgtcatcaatgtacacctccaccctgtccctaatcaggtccccgaaagtcttactcatcgcccgtacaaatgttggcaaggcgtttttcagaccgtaaggcattacgacataacagtaaagcccatccactgttacgaaagcagtatgtttcctatcctatctagacatctggatctagtggaaaccagagtaagcatctagaaaagataggagatcacacccggaggtggaatccacgatttgatctattcgttgaagtggatacgggtccttgggacatgccttattgaagctggtgtagtcgatgcacatccgaagcttcccgttcgccttggggatgatgactgggttggccagccacagtgggtgatggacctcttcgatgaagccaacgtccagcagcttcaggaccttct

SEQ ID NO: 111087 - DNA, 441 bp, Zea Mays
ctatttttgtgaggcatagagatcgccctaagatgagtgatcgtaagcatgtttatactaggtagagtagacgtgagtatgttgcatcgccttaagtcagtaccgacttaagccgattgctccgttagtagggtatagtggtcaccctaagttaagtgagcatgagcatgtcacaccgtcttaagtcactgccgacttaagccgattgctccgttagcagggtatagtggacaccctaagttaagtgagcgtgagcatgtcgcaccatcttaagtcactgctgacttaagtcgattgctccgttagcagggtatagtggtcaccctaagttaagtgagcgtgagcatgtcgcaccgtcttaagtcactgccgacttaagccgattgctccattagcagggtatagtggtcaccctaagttaagtaagcgtgagcatgtcgg

SEQ ID NO: 111088 - DNA, 287 bp, Zea Mays
ttttgcatgtttcttccctagttgattgtgatatgggagttccatagacattgatgtattgaacttgtgtggtcggtgatgcttttgtgtgataaataagaagaactaatgaaaagccgtagtaaattaaataaatgctcgtacttatggggtcgtatttgtgttgcgcaaatatacaaaatgtttgtcgtcttttagtggtgttaaatgttgtgcgctcgatgatatgtagttagctaacgctagtgtgtgtggttgcttatgatgtctcgctacttagtgtttaa

SEQ ID NO: 111089 - DNA, 535 bp, Zea Mays
ggtgttgtgtcttgttaaacacaatccttattgcttccttcatcgctgcatcttcatctgtgtgtcaaaaataaaaatcagcaaaaaaccccaataggtttgcaaccaagtagtataaaatattgcaatcatcttcaaagatacagttgcaacaacacaacactaattatgtgacaagcattttttgcagccaaagcatacctgtaagaatcacaaaaggctgctgaccacccatgcaacttttaaaggtctcaaaaagccacctgaatgtgtcaattgtttcatcccgaagaagtgcttagccaaaggactcattcttcaaattattgctgcaacccacaaacatggccaatggcatatgcttgctgttagtcttgtgtgttgtgtcaaatgtgactacatccccaaaatccttgtattctgcacgctgacttgcatgacaccaaaaaatgctctgaagcacctttgtttttgggtcaaaatccacatcccagtaaaagtattcattgtgttctttgcactccctgaaaaattg

SEQ ID NO: 111090 - DNA, 621 bp, Zea Mays
tgtccagggataaccgactgtccagatcccttcccaactgaatcaaatctgaagacatggatgcagtgacccgagcaggttcagaccccataagagcagaagtcaaagagtcatgagcttcaccaatatcttatagctccaacaagtcatccacttttgaatttgcaagggatagcaccaaaaccgcaggcatcaaaatagaaaccgaagagccagaagttgaaacatcccacaaggtagcagagtaccggagtctctccaccctaggcgtcatccaattaaaatctgaagccatcaagagcactgcctgattaaacatgcgggtcagggcattaactgacgccccacccgaaacatccgcattaaagcatgcaaggggggcgacaaagcagccgacattctgacagaacccgaggagccattcatcaatgaatcagagattaagggtctaaccccaggcaccgtcagctcagcatctgaagcaatcgggagagcgaggctatcaactgggaagcccttatcagagtaccggaggtcattaactgacgcctcaaacgagataatctcatttaagcatgcatgggggcgccaaaacagcagacaaactgccagaacccgagg

SEQ ID NO: 111091 - DNA, 365 bp, Zea Mays
caaggactatgacctagaggtacactaccacccagggaaagccaatgtagtagctgatgccttgagtcggaaatcgcaatgcaactgtgttatgatggattctcatatcaacaccctatgtgatgagttgagcaaaatgaagattgaagtgattccttctggtgctttgtctcatatttttgttgagccaactttgcgagaccagataatcatggcccaactcaatgacaatggagtgcagactattaaagagaacctccatcagaagacagagaagtataagtgtttccgccaagatgggaagggtatattgtggtttgaaagcagattggtggttcctaaaagtaaggatctcaagaagaaaa

SEQ ID NO: 111092 - DNA, 950 bp, Zea Mays
atgcttctcaacaaaagtcttactcataaaagtatgtgatgcaccagaataaaaaaggatgacggtgggattgttggcaacaaaaaatgtacccatcatcaccagttctccttctggggtggtagccacttgagtgcagtagactcatccatttttccttgtatttttgcccgcgggagtgttggtcacatttcccttgccttgatggatgctcccagaagtctgttgaaaattagatttattctgctttggataaggacagtccttgatgaagtgtctagacttcccacatttaaagcagccattagctgaactgggtaaggtggggaaacgagcaccaggggcacacggctgattgttctgagcttgggcaggagtcggacggataaaaactggttgcttgaaaggataggcgggtggacaaggaaaagagcgatttgggttaacaggatgaatcgccaacctctaccgcttctcggatccttgaaaagatccttcacccccatatctctttatttttccttgtcctgaattcttggcttccaccgaaagtgttgtacttacggccctgctgtaagtgaggtccaggcaagtggccatctttcgttggagtcgatcatttagacctcacatgaagtaattctttttcttcagatccaagtccacttgctctatagcatactaagagagatgattgaacttggaaagatattgcatcactgagtctcctcctttctttaaacgtataaactcctccattttcatctgcaaaataccctctggaatatagtgttccctgaacgcttgtttgaattctgcccatgtgacaatatgtccttcaggccgaacagctataaaatttgcccaccaggtgcgggcaggacctctcaattgctgggcagtgaacaggggcttctgggtttctgtacaccgaattaatctgaattttt

SEQ ID NO: 111093 - DNA, 342 bp, Zea Mays
ccaaacctacagtacaaaagctgcaagcatttcgacatgcctgagctgcgtgcatggctctggcgtgttcttgccatggcctgctgcgtttacgattcagatcagaaacatgatccctatctcacgctgttcgtgtccgtcaccaccagatcttgctgctgtcatgcatgctcccatctgaacttttggccgccgtcacgcgtgacgccatgctggggtaagcaaagcctcttgtccctttttggaacccaccccacctcacactgcacacctgacgcgcgcgtactactagtatgtggttcctctcctccgacacgttcaggttcacgctgtcgcgcgttt

SEQ ID NO: 111094 - DNA, 498 bp, Zea Mays
ccagatatagcaaattccttcaattctaatatatcctcttcggaaagctgttggccgcccaggtgccgaagatcgaagctttggtcttccgaagaggcttattcagttcttttttccttcgatgctgaagtctctacagcaattgccccctcagtatttttcccaggtgcaacattagcaataagtctatcgatttttgataaggttgtaccaagggggccaccactattttcaggttgttgaggaccttcgccagccatagcgggagtaatctccttttgaatcactagaggaggggtgtcaagaatagtcctcatcacattcatcatccgacgcttcttctgagtattccctccgccgagtgccgaatgatctttgtttacctctgcttcggcagttctctcaacatttttcttctgtggctgtaataagcttgttagctctgatcctagaggacttagcattgggaaaggtaagggtccggtcattacctctaga

SEQ ID NO: 111095 - DNA, 593 bp, Zea Mays
tgttgcctttggttttggtgttgtttttgttttcttcaaaaaaaattcatcttcttttactaaccgagcagcttgcctatttaggatgctgacaatcctttttcttttcacccttcggtccctttgtcaagcttctcgtaatccgggtattcgaagtttaatgcatccatcacccggttcagtcttcgtttcggccgggtgccaaaggcagtagtcattaatttgtcttccttcttggtatagttgtcaagaatttcgttactcatggtttcgatcatatctagccactctttgcatggtttcttgagctgtttctcaaatttaaatcgataagggagccgaacaagttcgtacttctttccccctcctttttcttaggcattccttagccactagaggtcggaaatgttctatttgccaagtactcttgtacaagatctctagtgctgatttcggcagctaccactctgaattccacctcggctagctggcatggggagccaagttgcatgtggcacaagggccttgccatcccgaagcttaatttcattggactcatgatcatagtcatcaatttctcccttttcttctcg

SEQ ID NO: 111096 - DNA, 612 bp, Zea Mays
aggcactaggtgtggagatgcaacaccagtttaccatggagtcgcagaagtcttcgggtgttgatcagcctcgtggctaggacgcgaggaggggcaacactggaggtccagcccacaagaggggcaagtctcagcatcagcgccaccatccctatcgtggcaaatcctctgactcgggtacttcgggaggaagtactcaaaggtttcgggccgttcctaagcccgggctggggctggtgtgtttccgttgtggtgatgcgcatcaccgtgcagagtgccagtggaatggcagatgttcaatctgtagtcaagaccacaaggatgtggtgtgtaggaggaatcccaatgggagctagtgacttcctcctcttctcagggcactgtcaacatgatgtcaagcgttgagcagcaattttcagttccacttcctccgcagcagttttatgtgcttgggacctctcagttcgtgccggtgcaggattttcctcagtatctggctgcgcctactcctgcaccgactactcctatgtcgtctcagtttggagctccgcgtctgcctcacccgacgacttagtggggttcttctgttaatttcacttcgggagcttcctc

SEQ ID NO: 111097 - DNA, 958 bp, Zea Mays
cgccagtgttctgtgcacctctgtgattattttgccccaagcctgttttcttgctgcacctagatacttgtacctcctttcttgtgccttggtccaactattatattacattttctaggccaacaactaagaggagtactggaacacttattcagcattgctatctgttactgacttgtgtgccacatatatatatttagtcagccttcccagaactccagctttctctcgatcagaacaggtactcctttgcaatcacacccatgctcattggacagtcacaccggtcaccgtttgccacctgcaatgctggtaagaacgttgtaagagcggggttagacgcttcataatttgtattccaccacctccaccaccaccctgagagatagttgtagggttcacattgtttgttgcctttttgtctctgttttgtgctaacaatgacaggaccaaagaatcaaatggacaaggacaaggggcctaagcttaacgacgatgagtgtgtctctcagatggaattgaaggagatgatgcgcgcgatgactgaaacttttaaaaaataccaggactctgcggcgacatcctatgagcatcttgatcgacaagttgatgaacttgttacacgcatggacgtactggaggctcgtcccccaccaccaactccagccccagctcactctcctatggacgacgacgacgatgacgacgatgtgtatgcaccgctgcgacaacgcctcgcgcgtaatcgacaaggtatgggaggtaatggtagacatcgtcatcataatcctgaaccagactatgatccatttgctaagattaagttctctattccatcgttcatgggttcttatgatgccgaagcttacttagactgggagatgacagtagaacaaaaatttaattcccatcttgttcctgagcagcatagggttagacaagccactagtgaatttag

SEQ ID NO: 111098 - DNA, 505 bp, Zea Mays
gcgagctccagttccttcaaaattcggagatgtcaacgttcatttgaggaactcaaggacttgatagaggctgaaatagtcttcacattgaatgatccatatagctgggtctgttcctccaaacttagggaaagacatctttggaatatgttgttgtaattgttacccttccctctcttgtcgcctagagctctcctctcttcccctagaatcctaccttctttattctaaaaaattcttttatgacctgctccctctacatcttcatagtgatccatatctctagccataacttccaaccgaagaagagaaacaattttacctgtttccaccatttgtttgtgaagcaatgtcctctcctcttccatggcctccaccttccctgtcagtttttcaatagccagcatcatcttctcccatcgaacttcattctacttggccttcatggtgaaggcctcgatcaccaaccgaggctgtaccgatggcttgaatgatggtgctgtga

SEQ ID NO: 111099 - DNA, 665 bp, Zea Mays
gaagattctgaatgatgttgggagcaacaagtacgttgtttaaatggaagggtacaagaaggaccacgtcgcctactgaggtgacgggaaggatggacccatttctaacaacaatagaagaggggggagaggggtgagggggaggtggatgagaggttacctgcgtctagagtggtgtggtacgacgcgctagagtcagccacctagttagttacactagtgggcgggcccaacgtcatcgtgctgaaggagtcggcaagggactgctggtcccacctgccacccaaggaccccacatgggctgagctggagggcccatgatgaggacatcctctactattacccgttggcaaaacgcaattggcccagttggcccaattgtagtcggacagcgaccgtgtgagcctcagaattatcccacctcgcttaacttgggaggaggaagccactttaaaagggagagccacccttcccccattggactagtcttttcgggcgattgggcctttccctgagttgggtgtgcttgatgaactgttgggtgtaacatcccaaaatcctaacctaggtttgaaaccctaaactacccctctcccctttttcatcctctaattccaagaactcccttagattttctttcatcatatgcatacactttgtttgat

SEQ ID NO: 111100 - DNA, 1246 bp, Zea Mays
acacggtccatctttgggtagagtcggcccatggctagggagcccacgcgcccacgcttttgcacaaaagaccacgtgctctggctaaaccaatccaagctcccccaactgttcaccaaagtcactgactaccgcacttaaacccctcggtcttgttctattcacaaggtctcggccacgacgccactccggtggttagcacaggtcgaacacctggccgcgctcacatgatctcgccgccggtgagttctccggtgaggaccagcaccctaacaccgaccctgaggtataccggtcaaatatacttcaagaatcgaaccactattgcactagacctacaccacccacggccatggcagcgagctaagtccggcgagcccgtacctgagccaccactgcagtagagtttaaccaaacaccacgggtagcatcagtgacatacctagattcctatgctcgcgaaaaaccggccgaggatgaagcaagttggtcgggcgacgacggagctgttcacggtgtcagtctgcggcggtgtgctcttgttccagccaaaacacagcagtatcgttggggataacagctcggtgagcttcactaatctaagggggacatggaacaagcacaacacagaccaatacttgcctgagttagcctagccacggcaaggtgacaaattggtaggcgtggtcacaactcataggagtttggcgcgtgcagctctggacagagcacactgatggctggggaaaggagaagttacacgaacctaaaggcacagggaccacctgctgcaaggaacccatgactagagctcaagggcagggaaagaagttcacttaaccatgtcttttagggcagctaaattggggcaggtgtccctagacttgcacaaattcagtgcaaatgtattcccagggtgccagcagtacatgggtatcccatacatggctttcatgcccaagttcctcacagatgcacagacacacccataaaactgaacctagtcagcactttcagcccaaaatatcaacttgtccaattactcaaataggaaatagagcagataaggttcactacccacaaatatccactatccagtaatacagacagaggaaggacagataaaaaaactccactgcggcaggatcaaacacatccaaaggtttgatattttctgcagggggaaaaagatcttctttagatatttagaaatcactgaattgctttaactggtctgatcctccct

SEQ ID NO: 111101 - DNA, 411 bp, Zea Mays
ctcattggggagatgctatacagaaggggcgcatcgggagtcctcatgaaatgcattctctcagatacagggaagcagctgctagaaaaggtccatgctggacaatgtgggatacacgcagcatccagaaccttggttgggaaggtcttccagtcgggtttctactggccaacagcaaagaatgatgcagccgagttagtccagaggtgcgaagcctaccagtacttgtcaaaacagcagcatctaccagcacaacaactgcaaaccatacctgtaacctggccgttcgcatgctggtgactggatatgattggacctttcaagaaagctcaaggaggatacactcatgtactagttgctatcgacaaattcactaaatggatagagttcaaacccattgcttctctaact

SEQ ID NO: 111102 - DNA, 568 bp, Zea Mays
tgcgttgtcagctctgccctatacctccccgcctacaaaatacctcagttgtgttcgctgttgttccctcctcccgtggagctaggatcgatgagttcagggaacgatttcgctagatgctggactccgtccatgcgcgccgccgtggctcagcggtgggaaggggatggatcttcggacccttggatcttgaccaacggtcacgattaggcagtaggcgtacctcttcacgtgatcgatccggaccattgatccagtggagaacggctgagaatagatgctttcggtgatttgatccgagccgttgagcggatcgaatggtccatattagattgtgtcccgttagatactgaccgtagatctgggatcctgtggtcgcgagcgcgcaccggttcattatatgggccgatctaatctaggccgttcgtgcccgatcggacgactgaaaccaactcataccctttcgccctggtaatctttcctaggagccctcctagaattttaaaactaacccgcagtccatctgtatacaaagatcattaccataaggtccttattttctccaaac

SEQ ID NO: 111103 - DNA, 442 bp, Zea Mays
gcttaggctggattcgactaaggccttgttcgtattggtcggattgggctgttcctggtcttttccgggcggagtagattggcccgggtggaatttggttggagccgctgaaactagaagcaaacctgacccggttcagattttctcctccttccacagcccgacacaaacactggcaccatctcctccagatcggatcctggccaaaacgacgtagggcacgacgctagcgacgtaggaggtgaagagacaacggcgcgaggtgacgacgtggcggcgccgcacacctccgactacaagcctccccaccaccttctcaccagtaacgctctcctatccacgtttcttttcttgttcttgatgttgctgggaggtagaggtcgtctgcgcgccgcgtttggtccatcctcgtccgcgccgcaagagaggagtgcaaacgatc

SEQ ID NO: 111104 - DNA, 494 bp, Zea Mays
ggtaccctcacgaccgccttgtagcaccggccggacacatttacgatcggagtgcggggcacatcgccgtcagagctcttcggtgattgccctctctgttgattgggtgggtcgtcggtgctgggtgctcgcgatttccagtgattgaagccgtgcgtggtaacgagttctgcagcgtggacctaggaaatacctcatcgacggcgggcttcgccgtggatcaatctccaccgcagttaggcagaccgtcgccaaactcacggtatggactatcccatatagattcgccttcgtcaagcatcgtattgcgtcatggttcaaaggataggcttcgtcagggctagcgggaccgctcaacgatctcctatggagatcaccgtagtctgtctgtcgggaggtaggagataagctcacggccctcggattttgaggcgacgatggagattgggtctggagaacggctcggccaggaagtgatgtgggccgtagatcaa

SEQ ID NO: 111105 - DNA, 1445 bp, Zea Mays
aaatcaaagaccacgcctgaatgaaatgagaagagacttctcttttcaccgtcatgtccttttgggagaaaaagagcaacatcaagaatcaagaaaatgaataacttgttttcctatttgctgtaagacacaaaactaaatgtaatgaaattactaaactgtagaaatggctaaacgagactagcctgacttgcttagggccttcattgttttctttgattgtaaaggttttgttgttattgttgtgcacaaatggtttaagactttaagcgtacttacgccaccatgttgcagctaaagctagactgcagagctgtatgacgatacaagttgttcaggacaacagcaggatctgcacttcttttcagctggaacagcgtacaaggaaaataagtacacataaaaaacaagagtcaaaatccctagactacagatagaaataaaagatggtggtgtgaacctcaattactacacgcattccagtgcggtcactttcatccctaatatcacttataccttccaatacctgcaaataaaaacacaacaattgtcggaattcttaatgtttccatcatgccgctagcaaaatatcaaacttatcacagaatagactcaggttaagaccaaccacacaattaagtctgctccaaataaacttaccttatcttcaacaagctcagctatcttttgtacaagagtagctttgttagtttggtatggaatctgcgcagaaatgtataaattagtaagttcgtgccctcctgcttctaagtaggtatagagaattgccagaacaaacagtagtagagatgtcagacactactccaaaacaaaatctttaactcatacctctttaataataatagctgtgcgcttgcttttctcgtcaattgtttcgatgtcagtctttcccctcacaacaatgcggccacgtccagatttatatgcttccaaaatactaattaagaggagggatgggtacacaagttagcgcaaagtcaaaaagaaagacaagaccaaagaaaaaagagaataaatacccttgatttcccaggattgtccctcctgtagggaagtcaggaccaggcatgcgttccagtagttcttggagctttcatatgcaagaaaaagaacacaggagtgaagttaagattaagattatgagaaatctacagactgagaagaaaaaagaacttaacagtgacaatgtctaattgactaattcgtttattttaagtaacacaactggacgagctcagctcaagcattaatcatattccatttggacttgttgtcttgacaggtgacactcatctagggagctaacaaaccacacaatgagaatatgagattattgttttgctatctttaacggttaacaaaataattccggtgattctgcaatggtgcatcagattcctaatgatcatttgcacatgctaagc

SEQ ID NO: 111106 - DNA, 740 bp, Zea Mays
tacttgaggtgtatccatctcccgggagctaatattggacatcggaggtcgaatccgatgttctccttcctccccattgcttatctcgttgattcgaggccccattagaacatgaggtggtgtaaccattaagttaccatcaacgactgcctcagtgtcttgacgaatcacaactccatctcctgccatcgccggcgattatccagagttggccatctccaccgccaacgattgatgcagtctgaagccttatgttttttcatatgaagacaatgatggatgctacactaaacgtgtaaccgcatccccctttccagggtatttccacttttttcaaactgttaccgataatggagcaagtcacctagaatccaaatatccctcaatcactatttacgccatattaactcaaagttttataccaaatggtatatactatatacacaacatttatagcgtatatgtgttacgccatatcttttaacatcttattccatattttatctatcccttccacctttatgctccatggaagatccataaattccgcggccacaattaactgaatccacgtctgcatgaggaatctaatccctataattccgcccactaccatatgataacacccttgccgttctgaccaacgttttacccataacacacttcacgatgacgtccaacctgcacgttccctgtcacggtccggtcgaacacccacgcgttcagttccagtggtcctg

SEQ ID NO: 111107 - DNA, 397 bp, Zea Mays
cgagaggggcagtgggtccctaagtactgttatacccctggttacctgctacattcctggaatattccccttaatgtggtcattacagtgggcagagtacaataattcagacatgctacgaaatctaccatgcaatggggcttacaagtgggcctagatgactacggggtggagcctgggtctccccgtaatatgtagtggcctatgcctgcatgtcgcacccttgactctacgaatccatgaccttgacttcgcgaggactaggagctcgctatctaggaaaaggccttcgggctgcgtctgaggctacagcgagccccctcctcgtttgacgtggaccttcgccttcgccccctaacgaacggagaggtgtggagactactgcgtgcctaatccg

SEQ ID NO: 111108 - DNA, 912 bp, Zea Mays
ggcaatgaaagtagtacaccatgtgagtctatctaaagctgggaatgataaagccctagagatgatggacgaattattagggttattgatgcgtgtggagcctgatataggtactggtgagagttgtggcacaagtgctggcgatgacatccaggtacgcacatcgtgttattatgaatacaccattattaaatgtcgataatgatccatgtatgtaatttaaatgatataggtcgaagcgtatgaaatagaagacttagttatagataatttacgcaatttagatgatgggaacgaggtatgcaacagaattttataatgtattatttatgctgctctacaacatttgtgtcttcactggagtttgtgttatttcacaggaaattgtaatagggtctaatacaaatgaatgcaatgctaacgatgatcaatgtaatatgccgatattaacattggaacataacactgatatgcgtctggttgatagtagtgctacgtatgtggaagctagaaaggtaataacattgctatagtatatgatgaatatgtgaatatgaaaactgacttagtatatttgatttgtagaaactggagtttcatatggaaggtgtaaacttagcaagaccagataaaggccaagcctaagggaagaacgatcaaaagtagtgagcaacaagttcttaaattgggtgcgaaaggagctaagaagatgagcaggaagtgccaaaaatgtggcatcgctgatggtcacaacagccgtacgtgtttaactgtggaggataataggatttgattggctaacctatctggacgtaagcgaggacgacctcctggttcaaggaacaaaatcataggtgcagcaccacagtggaatgagacatcaacgtcgaaaaaacgaatggtgtatgtagg

SEQ ID NO: 111109 - DNA, 747 bp, Zea Mays
ccctgcgtctgctccctgcagcttcagcgagccatcgaaatacattcgccatacttcagtagtctctgggttgtcaggaacttgttgcttagtccactatgatacgaagtcaactagtgcttgagtctttactgttgtgcgaggccgaaactctatgtcatgagctcccagctcgcaggcccacttggctattcttccgatggcttctttgttgtgaaggatatcccctattggaaacccggtgactactatgactttgtggtcgtcaaagtagtgacggagcttgcgagcgattagaagtaccacgtacagtagtttttgaacttggggatacttctttttagagggtcccaaaacttcgttgatgaagtagaccagatgctgtactggatatgtgtgcccttcctctgccccgctcgactactaacgcggtactcaccacgtgagtcgtgcaggaaatgtataacaatagatcttctgtcggctgatttggtgtggctcggcgtggcggcttgaatactggtggtgtggtcatgaactttttcaatgcttcaagagcttcatgtgcttctgcgatccactgaaacttgtccaccttcttgagcaatttgtagaacaataggcccttttcgcctagccttgatatgaacctgctcaaggctgccatgcatatagcaagcctctgcacttttttctgtgatcgcgtcacttccattctcattatggcctcgattttttctgggttgg

SEQ ID NO: 111110 - DNA, 449 bp, Zea Mays
ggtcaggtcactacataaaatctgaagcaaatcgcgctgcaaaaatgctctgttagaacgactaaaggtggtggccatggtacagtacccaaaaaaaatcttcagatgcatcacccctcgccgtcggtgaaccgtgcgcctggattcgcgtccgccgccacgattcgcgcctcaggtggatggattgtgctcgacggtaaaaatatctcgtcgcggatgagtttggggcactgtggccaccctgttactatgcccacttgcccgacgacgtggccgtgtgatcatcgctggggctgccaccgttgtctctggttacaccatgccttaggccatttaccacgtcgtcgcatgccgtagtgactgcccggtaatcgtcgtagcttcgcaaccagtgatcgccacgatagatcgccgcagtgactcatctcttcttcccagccgccaacgca

SEQ ID NO: 111111 - DNA, 422 bp, Zea Mays
ccaaatgctcagcttttcagctcgcttctataagtaacagtttagtcaaaatcgtccaaaatcaacgtaaatatggtatctgtcgactcgttgcgataatagaaaaccgtcattttatacattctaaaccctaccacacgtaatctgcacaatattagaattctctccggtcttcataactaaattctcaccgcagctagattctcaaaaggatcatgagaaaaaagctgaacaaaaaaggcgactgtgcagctactccgtgaatggttaattgaggcactgttagttctggagtaagtatcacacgtttactggacgcacattcggcactaaaatctgtagacatgagaattggatcaactaaaactatgacccgtgcgtggttcgtttgctctcagaacattcgactagcaaaagaccca

SEQ ID NO: 111112 - DNA, 1950 bp, Zea Mays
ccttcctccagaacatcaccctccaaagtatcggcagcaagaaactcatcacaatcagggcagtcatcattgagaattctagtcgtgcatgggtcagcaaccttgagagtaacagcatttaccgaacctttatgtttgatgtgtgatgtatctaataatatctccaaacttgaagtgcctgagctatacgaacaattatttacatcagttgaaagactagtttttgccctacttgattcaaacaaattgggtatctgtcctcctaggtactcactagaagactggcctgaacggtcccaatgataataagttccagacacttctgaatcttcacataacattgatagagggtgatgcctatctttcttactcaaactatcacaggattgcccgatattggaccgtttcttttttatggatgtctgagactgcttacccttttttatcccattggcactggacaaatcatagtcaaagcttggtccactttcaagaagaggtacatctgaaacaattcctgcaccagacttctgcttgggaacattgtttgttccaatctccctaagatctctcatacgctggaatccttgaactgtatcatcctcatgatttttatgtcccttccgcttcttcctttttgacgatgcatacctagtgctcgaagaggataaattttgtggctttttataaagtgtcaatgtttgacatgactcttgagctgaattttcttctgtatcatacaaactccttgcaccacgagattttttgctgagcccatttatatttatagattttgcagaacacatattctgggatgcacacaaatcattgccggtctcctcttcaaaatcatcacagttatttgaaaaatgggacctttcaatttcaagggcatgcaaaatggcatcctctctgcgaacatatctcccttcagcatgtgtcctcttttgctggcgagctagagccttggctttttctatacattcatcatattctccacaccgaaatgacttcacacgtttagatttctcaagattataccagtcactgtggcaaagtccaacatagcaagtaagatagatatttcaaactttagagtgcaggtcaatactttagtaaactgatgatgttcagtgctacaaacagaaaacatttgaggatgcaatggaagagtgataaacattaatttatgcagttgtttgggaagttaaaagtaaatattgaagcctaaaacatgtatacaacttcgaaacatcagctcaccagaatgaataaaaaattcaaaaccaacttcatatagggtaatattttcttaatatcagaacaatgtttaaaatacacaaagatttgaagagtatgttcatagactaaatataaaccaagaaaatatatcaatcactgtgcacacaattttaatgtatatgtattaatttcaagaaatgcatggattttttttgccgcccaagacatacatagaaaggtaaccttatccttgtcacctaacggatacttaagttacctaataccactctctgggttcagcaacaggggggtgagagatgcgttcagttgatgctgccaccatgggtaacaagaacaacatctagagctaaggcataatggtaagccgtaagcacccctatctagatatgtatgcaaacatccataaaaatacatttcagaaataataatttgtttgaggtagctatacacttcgtggaggccctaagatcaatccaacatacacagtaccctccctttcgaagttcccattgtacttaaaccaaaagtcccacccaaaaaattattatttgcccgacttgaaagtgaacacaacatgagtgatccaatgaccattagaccaagtacaaacagtagtagcaacagatcatcgggagccagcggaatcaacgcatgaacaaggagcataacagagtgattacagagggc

SEQ ID NO: 111113 - DNA, 285 bp, Zea Mays
tcccccaaccattggaaaacttagtggcttatatagattatcactacaaaacaataatcttacaggtaccattgaggaatggatcggaaagatgacaaatctacaatttttaacactacagtcaaacaacttcatagggaaaattccaccttcaattggcaatcttacacagttgatagatatcttctctgtagccaaaaacaatttatctggttttgtaccatctaacttctggaatcttaaaatatcgaagttggaccttagccataacaatttccaagggag

SEQ ID NO: 111114 - DNA, 313 bp, Zea Mays
actgggagagatggttgaatttgttgagatgctgcattacagtgtctccccattgctttaaccgaataaactcttcttgtttcatatggagcactccctctggaacataatgctcccagaatgctagcttaaattcctcccaggtaatctgatgcccagcaggttggattgctgaaaaatgtgcccagtaggtactggcaggccctcttagctgttgtgcggcaaacaacggcttttgcgtcttcgtgcatcgaattaacccaaatttctgttccataactctgacccattcatcagcttctaaaggttcttc

SEQ ID NO: 111115 - DNA, 757 bp, Zea Mays
cggcctgtgatttggcttcagtttgagcaattttatttgcaggagcagggctcaacgcctttgtagtctccagcacagcatccagtacgttgtccatccttctcctcttgggagttgaggcaaaagccttttgcctcttcggcagatttgccttcgtcggagggctcataatttttggcaccatattatttcttcaacctttggctcttcggccttatcaaccttatcttcgactgccttgactgtatgcgtcttcggcattacggtcagctcttcggcgctttgtgtaatcgaagtagtctgtgttgcttcggctgctgaagtggaccctgtgccaaattcaggcaccacggccggttcaatgtaacgtgatcggtgggtcagaaccttcacctttttgctctttggcacaggctcagctggggtgaccgaagcagcaatcttcctctttttctcttgtcctcgcagtaggtagcgataatcttggtatacgaagccaatagcatcaagtaccctgtttaatcttttcttgccccaaccaccaaaggctgcggacagggcattatctttagccttggagtatgctccaagcagttcatcactggtagcttcgatgcacttcaaccagtcgtcgtttggctcatcaaatttctccctaaatctgaaggtatacttcagtcggaccaaaccaccctcacaagagtcggcagtggtctccttcggcatttcccagctttccacaagcggccataccttg

SEQ ID NO: 111116 - DNA, 459 bp, Zea Mays
ttcctcgtcttcctttgccaaataatctggtggtatccggaatagcaatccaggaaagacagcacagaacatccagcggtggagtccaccacctggtctatcctcgggagcccgaagggatcctttggacaatgtttgttgagatcagtatagtcgacgcacatgcgccaatccactttattctttttgagtacaagaacagggttggctaaccactcggggtgtaacacctctctaatgaatccagccgcgaccaagcgagctagctcggcgcgaatggcctctctcttgtcgggcgtgaaacgtcgtagtttttgccggatcggccttgcctggggatagaccttcagtttgtgctcggccagttctcttgggactcccggcatatccgcaggttgccacgcgaatacgtctcggttatcttgcagaaactggacgagcgcgctttcctatttgtcg

SEQ ID NO: 111117 - DNA, 325 bp, Zea Mays
cggagcaactgccacgccactggacacgtattcaccgcgccaaggttcttcctcatctccgaccgcccacactgtctgctcaaattcagcgccaccgccccggggatctataaattgaccccgcagtgagcttcacaacatcatcgcgcacccagccaccaaatatcgtcctcaatcgttcacctgagagctcgaattcctatttcccccaaatcggtttgaacaccccgtaagaacacttcaccgcggccagcctattccaggtgaattcatactcctctgttgattgttctagcatccctaggtcctccttaagctttccgac

SEQ ID NO: 111118 - DNA, 659 bp, Zea Mays
tgtcagcccacgtcgaacacgtgggggtttacttctgccaaggttcaacgaccgatttgatcgccttagcgtgcagatcttggcaaaacccccgtgtacggtctcttccctgcaccaaatcctacctttttgatgtgagttccaagcaaggatacggtcggagtagagagatatgggggtgagaagtcggctctgtcagagctgtccacaccgagacaaaagccatgccaagtcgtgtcaaaaggcttagggttgggttcaaacttttccagggtgttctaggggtctttgggcgccattttgtcaattgggccataaggttttgagattgggattaaagtgaacatgtttgatctttgaaagagggtcggttttgaacttgagcaaatcctgatttttcttttatgctcttctctttggtgacctttttgggattcttcttaatcctttttggggtcacactcttactatgttttgtagggtattaagtgtattacaacttttataattagtccaagtcatgacaatgtgatttacatagactttttgccataatcccctctagggctccatttgcctacaagggatttgaattagggtttgagtcattctcttctctttagtgcatgataaggccaaggcatgacttctaagatggg

SEQ ID NO: 111119 - DNA, 345 bp, Zea Mays
ctctagactctagtggccacgggcctaaatccgtggaaggcagggtagccggtggcgttgggatgtgcttgatgtgataatgcggtcatgtgtgtgattgtccactgtataggcttacggaacctacattaattcatggacctctatcattaatttggtctaagagtagggcttgggctctagactctagtggccacgggcctaaatccgcggaaggtagggtagccggtggcgtcgggttgtgcttgctgtgataatgtgatcctgtgtgtgactgtccactgtttatgtttacggaacctacataaattcatggacctctattattaatttggtccaagagta

SEQ ID NO: 111120 - DNA, 364 bp, Zea Mays
gcaggattgagcacaaaatcgggagtaaacagccctacaaatcactctgtcaggtgactgaatgggctttcccatggtacagtaacctaaaacggatcagatcaagcgctcagctcatcgccgacgatctccgccatgatttgtgtcgccggtgtctcgattcgtgctcggggtaagtggataacatctcgggtagaaagatcatcaccgccgttgagctggacaccaatctggctagccgtcgtacctcccccttgttcaccgatcgctcgggtagggtctcaccgccgcagatccctcactgccgtccgccgcgtgtccattcactttaccatgtcgtggctaaatgtgctacacacgtccg

SEQ ID NO: 111121 - DNA, 696 bp, Zea Mays
tcgttcttttacgatattaatcatgtttaagctctataggagtaacttggtaataatatgtgttatggtattataaatactctctttgtcagtctgttcgcttagctatatatgcagctgcaacggtccaaacagctggctctacttgataataatatttgtcattctcattttttgagtagtcaatcatttttaacgttgaccaatatacataataaaaatattaatatttatagtacataattagtatcataagatagatatttgaatctatttggtagtacaaaatttcggagatacaaatgttgctaatattttctataaatctaggcaaacttcagaaagtttgaccaacacgaataccgtagcgataaacattttaggacggagggagtattgtatgatttttaattttttgaaaaatgataaaaaaaattattaacaaaactaagttataatgtatagggagagttgtataagagaaatagttgaagaagtcttgtatattaggcatatcttttaggggtatcataaaatataatatagaaagtgcaattagggagtgatatatgggagggatggtcacaatcagttttaaagtcgtatggttcaacccactatcgaaatcagcttctttgttgagtgtttaaagcactcggcaaaccctagaaaacaatcggtgaaggctttgccgag

SEQ ID NO: 111122 - DNA, 482 bp, Zea Mays
ctgctttcagacttgctgaacacaaaggtcgtcgcgccaatcctctacatcgacaacaagtctgcgcttgccctcgccaagaacccagtacttcatgatcgaagcaagcacatcgacatccgcttccatttcattcgagactgtcagcaacggctcgttggagacggatttcgtccgcaccgaagatcagatagctaatatactcacaaagccacttccgcgcgagcgtcttcaggaactgcggatacgaagtggtgtcaccagtattgaaccagcacaacacatttagggggagattgtagaagaataatttgtagcgctggtgtctagattttttagagtctaaagttagttgtgttagtggtcagcacgtcgtggccttctcgcgcggtcgttgcggaagtgcgttgagtagtctctgcttgcatgcagagtcaaatggtggaactagaaaactgggcatagtggccacgattttggct

SEQ ID NO: 111123 - DNA, 496 bp, Zea Mays
attaacactagctctaggtgccccatattggatgttagatctttgcggccccttgggggccaaaaaaggctcatacccatgtgttggtggaatcataccatgattccgatgtagagagaagctatgctgaggtgggtacaagggttgttggtaataatttccgtcttgttctgcataccctatctcagacggtctagtggcatacctggacagttcgcgcatgtgggcggatggttccaacatgttagatgtccatttggaggatgggaccatccaccgttaggctggacggtctggttaaaggttaagattgtccggccgtgcgtagggttatggattttacccatgtaggtgatggaggttgcagttgcccggtataggaattcatcgactttccacaaagtggcagggacggtgagtgcccatttgcggttgatgaaatcttgagtggcatcaatattgtgcaatgggaaattgcagatttatcaaatatgtg

SEQ ID NO: 111124 - DNA, 798 bp, Zea Mays
gaccataaagaaaggtgtgtttccatgcaaagctcgactaggttgagttctcaggctccaaacaacatacggcagctctctgatccactttcctgtgaacttttcattcttgtcgaagactttctttctgagcgcatccaatatcatcccgttggctctttctacctgcccattggctcttgggtgtgccaccgaggcatatttgatctgaatgctcttttgctcgcagaaatcgaagaactctgagcttgtgaagttggaccctaggtcggttatgatgttattcggtattccaaacctgaatattatgtcttgtatgaattccattgccttagctgaagttagagaagcaatgggtttgaactctatccatttagtgaatttgtcgatagcaaccagtacatgagtgtatcctccttgagccttcttgaaaggtccaatcatatccaatccccagcatgcgaacgaccaagttacgggtatggtttgcagttcctgtgctggtagatgttgctgttttgacaagtattggtaggcttcgcacctctggaccaactcggctgcatcactctttgttgttggccagtagaaacccgacctgaagaccttcccaaccagggtcctggatgctgcatgtatcccgcattgcccagcatgaacctcttctagcagttgctttctagtggctgagagaatgcatttcatgaggactcctgatgcaccccttctgtacagcgtttccccaatgagagtataatgagctgactgccttgcaattcgttccgctgcatttttgtc

SEQ ID NO: 111125 - DNA, 463 bp, Zea Mays
ctaagacacatgatggaaccaagtcgaatgtgaagaccacaaagaacaaagaacaaaagggattatatgacgccggactttcgcaactagagcgacataccataatatcatactattcttctcatagacgtgtcggatgcaaccgttggatcatggcctgaacaacattggaccaaacaagacattattcactaagaggcttcacatgttagtgtaaaaggtggggaggcatcaaactatagactataatccaaatgaggtcgccgaactagtccggcggtgtctagaagctcttcaggagctgtctgcaaggcatcagaccatggagactatagttcgccgagcatcagactagagggagtgagacaaaattctcaactagctggattgtaatagacagaatcaaacgattagtacacatggtgcgatcagaaagcatcggatcataagaaatggtatgaca

SEQ ID NO: 111126 - DNA, 418 bp, Zea Mays
gtcaggaggtgggcctccgcttccttgggtggctacaagaggagctggaggtgctcccgatgattgtgacgggcctcatgtccttcgcctccctcgtcacctgcgaaggggccgtgaatgccttgtcccgcgagggatgtgaacacttcaaggtctttgaccggtcggatgaaggcttcgagcgtggaatcttccaggtcaaggactaggtgttgaagcggtcggttggtgcgcttttcgataggatgtggggccctcacggccgtgagactgtccgagagaggttcgaccgggcaatggatcaggtaaaggtgcatatgtgtgattatatgtgtgggtatgtgtgtgtatttgtgtggttgttgaatgaatgtgttattgttgtagatggcgcatgatgaagaggtcgaggacctcg

SEQ ID NO: 111127 - DNA, 351 bp, Zea Mays
catccaaataaggccgaaatgtagtctgcaagaatagaacaacacaagatatagtttggtgcttcggagactataaatggtaaatatggaggaggcactattgtgacatcactaaccattgtcaccaatgttacaacctacagaccatatgggaaacaatcccaggcaacactccttttcgtggagagagctgcctccctcgtctctatctctctctaatacatggttgaattcgttgtgtgaagtggcggaggtcggctatgctcggcctgtgtgcggaatatagagtttatttgggagagcccaattctgaaaaattagaattgaagcataaacctatttttgaatttg

SEQ ID NO: 111128 - DNA, 758 bp, Zea Mays
cttatcttcaacattctgccttaattcagcagttaacagtaagttccagaggtgcagataatcaacaattgcccccacagatagggcccctcgaatatccgacatccatgctcttccagttatagcttcttggtctgtccttgtattgatttttcttttcggaacaacttgaagaagtcttggcgcaatatctgccaccctctgtccttgaatccattgatccttccaaaaaagagtattagcaccgttcccaacttccgtttgcatcgccatactgaagaaggtctggaccttgtccagaacttggatagtcaaggatgaccaaggtcggttaggcttcgttttttgcagccataaccaacgcatccgcagcgcccaactcagctccttaatgcttgaaataccaagaccacccaaatcaagaggtcgacaaactttgctccaagaaacaaggcaatgccccccatttatctctttgcgacctctccaaagaaagcctcttcggattttatcgattgcttttgtgatataagttgggagttcaattgccattgctaagtagatgagcatcccagtaagcacaaaccacacttgaactgttcgcccagcccttgtcatcaagtctgccttccatccaggaagctgatttgcaaatttgtcgataattggctgcgtctgttccttggttatcttccgtagtgttaatggaagtccaagatatttacaagggaaggacgaaattccacatgatagcaaac

SEQ ID NO: 111129 - DNA, 480 bp, Zea Mays
ctccaccctaagtggttcaatagaggagacaaacgagtaaaattcacaaaagtttgctaaacgagatcgagttgttacccctctcctgatgctacccaggatgttgtccacaggatgatctctctgaatgccctggtgaacttgagggtgaggcaccagagaatgtctctgaatttgatcatcactttcatcttgttcaatggcttcttcactagcaacttctttctcattttccacaatggttggcatatcttgcggtagaagctcttcttcaaggattggatgacttgaggttgatgggtttgcttggatggaaggattttcaccaaccactctagcactcccatcaacaaccctatttgtcatccaaattctctcttcatcatcgtccttttcttgtggcttcacttcacctattgcaagcttcatgatggcttcattaggtgggatatcattttctgcaatatcattagaaacatg

SEQ ID NO: 111130 - DNA, 420 bp, Zea Mays
tagacctcggagtgtattcgccatgtcctccttcacgtgtcgacccaacgaatcgaggtttggggcagtgcttggaagagtgtgtcgcttggtaatggcgcgtccgccgtcgggggcgctattggccgtgcccaggcatcgctggggaagacgagttgatggtcgttggttcggtgattaacggtgtacgcgtacctgttcgcggaatgatccgtgccattcaggggtgatcggatggatccaaagtgattgcgattatttaaaacaagaaccgttgatcctcgatctagtggcccagaaaacttaccggttcacatttgatggcaatctaatctggaccgtactctttagatctaacgaccgttgtgtccccataccctttcggccaggcagttttattaagggacccctgaagttttg

SEQ ID NO: 111131 - DNA, 683 bp, Zea Mays
ctccgctgggatgtggcaattgggtgttggatgtggtgttgctgagagcccctcctcgtgcctataaaacatggccttcttctccgcctcatctatcttggatcatcgtgcactagaataagggtcatcgagagcgccatcaagaactcgaacgcattgagatcttggagtcgccaccgccataattcgtcctcaccatcgatcgacgtcctgggtgtggtcgatggtcctcgctaggagccgtggggtatgctcggtgtcgctggacgtgggatgctcggtgtcactggcaatttgttgataaagtttaaataccaccgtggagcctctgttattgctcctcccgtacactatcgcccggaccaaacatctacatagcctaatcatggttcgagaccgttcggggcaccaagaattcagcgctagagtagaggaagcaccaccaggtcgttgtccaccgtggatggagctcttgcgcgctagttgaggtgagaacctcctttgagacttacccttcatatgtaattcatgtagcactagggattaggtaatcggtcgactgggtcatggcaccgccgaggcggccgaatgtcgcctcgttgatccatgggccgatggtcaggattaaatgaggaataacggcttggctctgggtggtgtgagtcgttgatcttagatcgggc

SEQ ID NO: 111132 - DNA, 1003 bp, Zea Mays
gtgattagttctttctgtttgtttcaaacacactacagacttggagctatgtgaatctgtaatagatcgacatggatttaaccaaacttcatatatagtgtttcatcaatattgattattctttcttacgtctgtaagtgtcagggaaaggaatcgcaatataacagagaggaagccagtcactaagcgttcctaaattagatccattgactctatctagatggacagagaggagatcgattcataaatggtaaataccttccagtgtctataaggtccgtgtggacctcttccctggagccatggtggacctgccgtggggaggccagatcaaccgccaccggattcgatgcggaagatgaaatcgccgttgatggatccactattgtgggtgggaggacggaggggaaaccgtgaggaggtgagggtggttaccgatagaaagtgcaaaaattatggaggtgggagagaaaaatgtggaaggctagggaaggggcgggtgatatgttttttgggtggcggttgtttttatggagtattggcgccaaattttacaagttaaattttcataataatgctgactaatttattattaggtatttgagtggatttccggtttaacaagaacaataatgatgatgaactcacgtgtgtggtggcaattgggtccaataatgtggtgcttaactttataattagtagcgttgtgagaggagggagtgatatatactggatgtcttggattgtgatgaacaagtaataaaataacataactccagttcctgcctctgtttccttccaccctctccataccgtgctccttcttcctccctcatctgcctccaatcagtagctaacaggctcccaatgtataaatgtagcatcttgctgtccactatgactaggcgaccaccaactgtggcagcggcggcagccaagggaaagcaatcgtatctgcgtttggaagaatgtgatgccctcgttcaggtgacctaatgctgtg

SEQ ID NO: 111133 - DNA, 618 bp, Zea Mays
aacaagacatttatttatcccatgggcatggaatgtaatgatttataaaagcgaagcatcacattgccatacaacaaaaatcatgacaacaccgatagatactatccactaaccgtttgaaaaactaaacttacttctcgcttgccactgcatcactcctcaatcacatgaccatcatgagcatcctccacacgattatataatagcgacctaagcgtcgtgttacacaatacatacatctttcctcgtcgcgagtataaccatattacggcatatacccgcacacctcaatcaattatcttacgtcaccaccactataatacaccacggcacacacacatacgtgtccccacgttacgcacaagacatcaaccacaccagtgactccaataggatttatcatattccccattcacctcgactatcacaatcgccgatcatatgcataaaacaaatacacctttcacgtagacacctatcgatgcattccccaacacataatccgcaatttaaaaatttatccgcacagcaaaccacacatcaaatacattattaccgaaacttaaaaaaacatccaaccctctttctaactcgtttcctttcaccagaaacttcaat

SEQ ID NO: 111134 - DNA, 694 bp, Zea Mays
ctagggtcggtgggtccacgcccgtgagttgcctaccactctggtgggcatcgtcgtactgggcggttggtttaaaaaggtcaatcacaaagatctcgatgggacgctagttcatcccgatgccatttttgtagtgtctaccgtttcattgtcccgtcgtgggagtcgcacaatgtactgcaaccgctttcctaagggtgacataaaaaacaaggccaccactagctccccctttgtcattgacccatcgaagtgcatgatccaacatttcttggtggttcgcgtcagctctaattgggtctcggtccacttcgcgatgaagtcagcaaggacttgtgatttaatcgttgttcacagggtgtaggagatcccatatcccatcaattcaagagcccatttggcaatcctcccataaatgtctgaattgtaggtcacgtcgcacaaaggaaacaaagtcaccatggtaaaaggatgcgactcgaactaatgcataagcttccttttagtaattagaacgacatacattaatttttgtacctaggggtagccagtttttgtgcccgtaaggacttgacttgtgaattagacagaatactaaagcgggtgcacgccttcttcttcctgcctctccatgacgagcactgagctaaccacctaggctgtccccgtggcgtagagtacgagtggctccttg

SEQ ID NO: 111135 - DNA, 691 bp, Zea Mays
aaagagatctttgtaaaaggaagtcgccaactgattgatgccatgatcgtcatgagccacaatatcaccgtgagaaagagtcaagattttcagtttcctttttttgtgcctgaccatcaaatgaaaatacttggaattctcatcaccctctaataagaatttatctctagctttttgtctaaggctaatgttttcctcattaacaatcttcctgagattagattccaaatctaatttcaaatatctgtctgcatcagataagccagaagtctcactggctttatccagaatatcaattttttcaatcaagtttttcttcaactttttgtaatgacctacaatattgctgttccaacctttaagcttctgacgcagacgtttcaattttaatttccaaacatcaagactattggacacaccaaccggaagagtccaaacattttccactaatttgtgaaaatcaggcctaaccttccaacacagctcataacgaaaatccttacgcaccatgggcaggaaatcagtttgaaggcaaaggggaacatgatccgaaaaggatctatttaacccaataacactaatattattataagcaagatcccagtcgggactagccaaaaatctgtcaagtttttcaaaagtaggatcattacggttgttagaccacgtgtatagtctatttttcagatca

SEQ ID NO: 111136 - DNA, 429 bp, Zea Mays
cgggcaccggtgagcacgaatcaccttgccagcgtgaatccaggcgcaggggtcgccgacggcaaggtgcactgcacctgcgatctcgttcagtccactataccatcagagttcttatcagggtgcctgacagagctatttgcagagcccagatctcaaatttccatgtgaccacatgctaatccacctttagcaaggttgttctcctacaatctggctttaatttcactatagtcaccatacttcaattctcaatagatcatgctcaaaatagctctcaaacgagtccctaatttactatcagtccagtttcagggttgtgctcgactcatagaccatcttcaggtctatttttctcccatttccatgtagcactagggcttacttacttaataaaatttgttctccttacatagctctacaaatttg

SEQ ID NO: 111137 - DNA, 1084 bp, Zea Mays
attgctccgttagcagggcatagtggtcaccacgagttaagtaagcgcgagcatgttgcaccgccttaagtcgttgccgacttaagccgattgctccgttagcagggcatagtggtcaccccgagttaagtaagcgcgagcatgttgcaccgccttaagtcgttgccaacttaagctgattgctccgttagcagggcatagtggtcaccccgagttaagtaagcacgagcatgttgcaccgccttaagtcgttgtcgacttaagccgattgctctgttagcagggcatagtggtcaccccgagttaagtaagcacgagcatgtcgcaccgccttaagtcattgtcgacttaagccgattgctccgttagcagggcatagtggtcaccccgagttaagtaagcgcaagcatgtcgcaccgccttaagtcgttgtcgacttaagccgattgctccattagcagggcatagtggtcaccccaagttaagtaagaatgcaagtcaatcatgaacaaactgagtatctttgaagcctttttattgatgacatatttcccattttatagagtacatcgtcgtcccgatagcttttgaaatacagctagggataaaacttcctgaggtgttctatattccaggagttcccaatttctgtgccgtccatctgagtgagacgatatgatcccggtcgagtgacttctgctactatgaatggttcttcccataagggtgacaacttgtgccgtccctcccccgttagaattcggcggaggacgagatctcctactgaaaaggatcgttgtcgcacggccttgtcatgatagcgtctcagagtctgctggtaccgtgccgattgaattactgcgttcagtcgctcttcttcgagtacatcaacatcttctagcctagttgcttcggcctttgctatgctttcaaagatcaacctcggtgccccaaacttgagatcagcaggtagtactgcctctgaaccatagaccatgaagaaaggagtgttcccatgcagagctcggctaggttgggttcttaggctccaaacgatgtagggcaattcccttatccactttcc

SEQ ID NO: 111138 - DNA, 701 bp, Zea Mays
cgaacacttcaccacatgttgtactctgcttgtcacgtaatacagtcaaggattcataacgccgcgattgttgttgggatacaccatcgggaaaccaacgattcgatatccgtgcatgcaggctaaagagatatttttaggcaacgtgagatctgtgggtgtagtttggtctagttttatgcagttaaccaaacaaagacggttatttggtcaacgcatgcgttgagactagatagatgtgcgcaggataccaatcagaagacatgtgcagttacgcagagacgacatatatatatatagtatttagagccctgggctctctctaactaatggaagccccgaccagaaaccgaccaggtgcgctgaccggcgcgcacgcttttttggctgactgtaatacctagttacgtcaattataactacgcgttatgctcaatcttgttacgatttacactcttttggtgtgcgcacatctcgcggcatccgggcccacgaaaagatcgtgtccccgcaatctgggcagcttacgtctatcgggcccacgaatcaaggaaccgatctctcattttttcagctcatctctcccgtaactctcgcggcggccgaaccctagccaaatccgcccccgtatgctgcttctcctccgcgcccgtcgaaccctagactaatcgccgccgtgagcttcttgtccaccgcgcccg

SEQ ID NO: 111139 - DNA, 286 bp, Zea Mays
ctgggtcagtcagtcatggagggattgattccaaagttcgaggcatgtggtctctataactttatgggccagaagacatacttcagtgagatggttgtgaaacagttcctggcaactgccaagattgacattgatgagtagtcaatcacttggatagctggctttaagaggtattttgtaacctttgttgagtttgctactgcaaacagtttggactatgatacaatctcagctaggattgatttgtacactaaggacatctttgaagaatttatacagttctatg

SEQ ID NO: 111140 - DNA, 508 bp, Zea Mays
atcttttggaacacaaacgggtttagagaccctgcgaaacacagatttgtgtcgaatttaaccaagcaacataatctcagttttatagctatttcagaaacctgtagaagggattttactgaccccttcctcaaaaacccgagtgcggggaagaatttcctatggcacgttaaggaacccaatggaaggtcaggtggaatcctaatgggtattgatttacaggtttttgatattggggctatagaggatggggatttttttgtcaaattccacctaattactaagggggtaattttaaatgggctcttgtgtgtgtttatggtccggcgcaggaggaccgcaaggtacggttcatgacggagctggccaacttgggagctagggaaagattgcccattcttattggggggattttaatatcctaaggaacccaaaagaaaagaataaacccaactttaacctagatggtcgtttttgtttaatgccgtcattgaaggcctgaacctcc

SEQ ID NO: 111141 - DNA, 294 bp, Zea Mays
gtgcaccaaaccaatattctagagagctctctttggacaagcagttggatggagcaccagaccagcaatatacccaacagctggatgggatagaccaacagttggataacgtggtgtcgacatggcgtgatctaatgggtcaccagactatccgatgagtactgatggactgacaactttccacagtgactactgaaaatacaagatgttagaggtctagtgtgcaccgaacttggcaatgtttgaggtatggtgcacaaaatttcagagcatattttgaattggaattttaat

SEQ ID NO: 111142 - DNA, 632 bp, Zea Mays
aaaggtcttcgataagaatgaaaagtttgcaggaaagtggataagggaattgccctacgtcgtttggatcctaagaacccagcctagccaagctctgcgtggaaacactcctttcttcatggtctatgggtcagaggcagtgttacccgccgatctcaagttcggggcgccaaggctgatcttcgaaagcatagcagaagccgaagccactaggatggagggcattgatatactcgaggaagaatggctgaacgcagtaatccaatcagcacgataccagcagactctaaggcgctatcacgacaaggccgtacgacagcgatccttctcagtaggagatctcgtcctctgccgaattctaacgggggagggacgacacaagttatcgccttatgggaaggacctttcatagtagcagaagtcactcggccaggatcatatcgtctcactcagatggacagcacagaaatcgggaactcctggaacatagaacacctcaggaagttttatccctagctgtatttcaaaagctatcgggacaataatgtactccataaagtgggaaatatgtcatcaataaaaaaggcttcaagaatactcagtttgttcatgatcgacttgcattcttacct

SEQ ID NO: 111143 - DNA, 460 bp, Zea Mays
gcattaggaaacaataattagcttctttagtgtgataccgcagttctcgaaaagcacatacatcgttgggatcacagtggagtgcttgctgctgttcccctctcacttccagcctgcatctgatgccatcaagcaagaactcactcaactgcccacacaggagttctcatgggtaccatatgctgatcactggcacaaaagacactgggacgatgttcacaacttaagcactcgatggttttgtccagacccattatgatgcaagcagcgtggccagcatagccgaggtatggtacatgtctctctggattcagttgttgaagtgaatttgcagtgttgggtctcactatcgttcgagcacaatggacatcggacctctctctcctactctcgcatggtctgggtctgcgttcctgtcccagattactgtggttctgatttgcttgtagatgtactcccc

SEQ ID NO: 111144 - DNA, 525 bp, Zea Mays
aggtgaagtactagactttgggaatatgatgagccaagttggaaggatgtgcctaaactggtagtttgttattaaagttccacactttcatcttttaagagaaatttggcataggaagcacaacaatatcataaagtttgtttctgagagatgctactcaaccaataatttcatgtggcaacaagttgttcctaggtcagcacaagcctactcccacttcgtatgtcatgcttttgttagttgttacacatgattgggtgagcgtgctgcagggcatgttttatataccaagtcatgcatcatcataaaatttgtgggactctcactatctttctttgcactcctgctcttcatagggctagccattcctcttatcatctatccctctttctgacaacaatgttttttcttggtggctccctcaatgcttgaaccaagaaaacaaggctaagtttcatgctatggcatgtgtgactgctagaattagacgtacaatcctactaggccttgtaattgtagtttttt

SEQ ID NO: 111145 - DNA, 409 bp, Zea Mays
gcagcgcaagtgggcacggtgacagagcgaccatagtgccccatcttcatctcttgccaaagatctttcaccccgcgaagttatccgcgcgtcatcaggcgcgaatcacagcactggcgaggatcgcggcacggggtcatcggcggcgagatacactgaacccgcgatctttttcaggtcactgtaccatgggattctcatttgtgtgcctgacagagcaaattgaagggcttcattatctaattttcatgtgacaactcactgatccgtttgtaacaaaattgctctcttataaaccagctttgatttcgttataaagaccttaatctaattctcattgaatcatatagaattcagcctccaaagttcatccgagttcattgtcagtcgaaccttaacccctgatccg

SEQ ID NO: 111146 - DNA, 403 bp, Zea Mays
gggaaaccaagtacctatagttggctagaaagcacgagacccgatagcccatacaaagcacactatttgagctcaacacgagcattgttcactgggcctgtctagcccaatccagtggtcatgccatgcatgagctaattgatattcaaatacttgatgtgaccctaactaaagtttagtaaggggaaccaagagccttctaacataatctgtaaaacgatttgtggagcgaggtgggctatacgagctatatctctataatttatacacagacggctccgatctagacagccgactttacaaaatcgttgatgttgtagtaggtagggactactactagctagggactccgatcctcggagacgtaaataatccaagatcccttctttcagctaacttcgtg

SEQ ID NO: 111147 - DNA, 362 bp, Zea Mays
ctggttggaagactttagtcccatgttgtgtgactggagtgccaagtggatggagttttctcatgctggacatacaattagattacagggcattcttccgatgggagtttcagacattgctacggtgtaggttgatcaactgttaaaatggtacaaagggaatgaagtatgggctttggttttggtacaggagtctagacagcaaaatgaggtagtgacacctcagttacctgcacagattcagaaattgctggactatccatcaggatattttccgactccctcttctttaccaccttccagagaatatgatcatgttatattcttacttcctggctctgcacctgttaattccaggccat

SEQ ID NO: 111148 - DNA, 617 bp, Zea Mays
cccgagcagaccacggtggatttggataagttcgccggagatagcctcttcgcggccttgcgccacgtgccttggcacgttaacctcaccgccgtgactcacgttagcccgtccggtggtcgccggagagcttgccacggtaataggccacgaatcaccgcgctggtgactcatttcttctccgaccgccaccgcgcccaacccaaattcactggccatcgctcaagcacgctataaattgagcatgtcgtgagctccgtagggtaatcacccatccaaagcaccaacaattgcctccaattgttcaccagagaccacgaattgctcatttccccaaactgtgtttccgccaacgtgaaaaagtcctcaccgtggtcagctcgtctcaggtccgctcataccctctgccctttcattttagtgttcttgtgtgcccctgatactccttgaccaactcgattgagctaagctaccttagatcgccaggaacgcattagaatgtccgttgatcatgcggtcaccgtggatagagcaggttagagtaccgttcgtgaaataagttgaggggaaacgcttgttagggattgaatttggtctcagccaaagtagagcaccag

SEQ ID NO: 111149 - DNA, 578 bp, Zea Mays
aaatagtcatggcacagattggtgacaagggtgttcaagtcattaaggaaatgatcaaacaaaaggtggacaaatacaaatgcttccgtcaggacagcaaaggaattctatggtttggagaccgattggttcttcccaagaaccccgagcttagaaagaaaatattggatgaggctcacctttcaaaattttccatgcacccaggctgtaacaagatgtatcatgatctcagatccttgtactggtggaccagactgaagagggaaattgctaagtatatatcggaatgcgacacttgccaaagagtcaaggccagtcatttgaaggtggcaggcaccttgcagccccttcccataccatcttggaaatgggaggatatttgcatggatttcattataggattgctcaatacctcccgacaccacgattctatttgggtcattgtggataggttgactaagacagctcatttcttgccagtacataccacccacagggcagagaagtatgcagaaatttatattgaccagatagttcgtctacatggaataccaaggactattgtgtctgaccgagga

SEQ ID NO: 111150 - DNA, 840 bp, Zea Mays
gtgattagcgccaatcttcatgattcgtgcgctgggactcatggttaatcatgggcagagaaagatctcaactcggggataagagagcaagctatctccagactgttcaccgcgacacctgtcgcgcagtggacgctagtgtcctcgtcggagttcactggtgactataaccgcgccacgtgcttagaagatgtaccatgtcgccgtagctcgtggtaggtagacagttcatcgccggagtaagtacccccggggcgcgccacgattgttcgcaccaatgactcatccttcgtctcggccgccgatcttgctgcgccaaattggacaccaccacttaacctctctataaattgaaggccgggtcagctgcgctatgttatcacgaagccgaagcacccgctcccaccctcaatcgaacaccaaagctcacgaatttctgatttcccccaaaccgggtttccgccactgtgaaaacgacctcgtcgtggccagcacaattctggttagttcataccgtctgctccctcgtttcagtgtactcatgtgcctatgatgctcgtcggctaacccgattgaactagaccgccgccaatcgccgggaacgcgtggttctttggttcatccgcgcggtcaccgtggcgagaccaaattagatcatcattcttgaaattaactttgggggaacattggttaggacttgaattcggtttcagccgaagttgggcaccagtccttaagtaaatgatccggtacaagctcgccggagctcggctctgcgctagtcgccgtcggggacatcgggcggcgaagaattagaactcgggggacatttatgtaaac

SEQ ID NO: 111151 - DNA, 309 bp, Zea Mays
gtttgtgctgtcgggttttggatctgaaactgaactatgttcagtttaggggaggggctcggttctatacaatgggcagattcagaaaactgaagtcgagtttcattgatttctagcgaactttggcgctctccgtgttggatccgtgaagaattccatcatggttcttatgccaaagtgaaagagcatcgatcagtgtacaactttgattaaggccgatttacatgttgcttagcgattgtcagagaaaaattcgtttgaaattgggctgttaggccggctgggaacttaggttcagtcgtctgctgt

SEQ ID NO: 111152 - DNA, 356 bp, Zea Mays
cccaagtggtggaaggagtggggtcgggtccgtcagccatagtagtggaagtaggctcgactggggcaaccggtggagttggctcgagagtaacccaatcgacgtcattgtactcctcctccacaaagatggtctgtcccatctgatctagacctgcaggctcaaagacaggggatggacaaggtgcagtctcatcgaatgtaacgtcacaagtctccataatgcggttagtctctaggttaagaacacgataagcatgagaatgtaatgcataacccagaaaaaccccatcagaagaccgggactcaaacttgtccagattaccctgttttagcacaaagcatctgcagccaaat

SEQ ID NO: 111153 - DNA, 284 bp, Zea Mays
attttttgctgccgagttgttaagcttggccagtaggatttcctgggctttggatattgcatctctgttattcccggacttaaaacgatgttttgcagccagcctaacacttgcccttttagtggtggattgcttctggagttttaaagtatgtctttttggtggggtcggaatcagaggtggctctggcggatgggtaatctcagcaatgaaattaagcagctgtggatgggaccctgttcccagagcaggcgaagcccctaaaggaacctgatagccgctat

SEQ ID NO: 111154 - DNA, 665 bp, Zea Mays
aacaagtccatacatgatccattattgtcgatgccctcgccggtgatggcggatagctaggtgggctagagtcagcgctgactacgagcaccttcccccatcaagttggcttctttgttggtgtcgtcaggtgctcgaccttctcttacaaggtctgatgcaatggctcgagagctataaccagtggttggggatgactagggagcgggcagcatgcacgagtattgagtgcggcgcagcgagggagggaaccaaggcacgactcgtgagtgtggacatgtggcgtgaggagggaggggacgagcaagagtagtgtgtgtgtgtggcacggagaggatgatgtttgggttagagtcattgtagttgcacaagatctcagatgagcatttgacctatttgtgatgatcgggtcaaaccatccaaatagatcagtgtcgacgtttgactctagaattccatgtcaccaagaacgctagtttcacaagttgtcgctagatccagcgcgtgacgatataaaccgcttgtgtagcattttcgatggtcgatatcgaccaccactgctccctcaatcataacatatatatatatatatatatatatatggtctattctagatatcctccctcacatctatcggtttggcctcattcttgtcgacatccccg

SEQ ID NO: 111155 - DNA, 601 bp, Zea Mays
tcagtcttgatcagaagccgggaagacgagaccgcgggaggagataacgatagcacctatgcacgcgagcccgcttgacaaggataccacataaacctatgccacccgatacaaccaatccgacctgccgaaaaaacccgatccgacctatacgacggatagatacgagtcataatttttgatccgtaataattcgtagattaagtacgggacatgattttttaagcaaaatctgatccaactaaaaaaactcgatccaaatcaaaaaaatctgaccaaaaccaagaaaacccgacccgaccgcgtttaatcgagagagagacgaaccaacctgatccaacccaacactgtgcacggcttagaaatgggcgtgtcaaatgatccacaatcctccgacccaactcagcgtttgaacagatttaataccacataccagccttgtcggactagtgttctgaccatggtcctggacgacgtctctgcgcacatcgctctggccggggcctgggcaggggcgcggggccggggatgcgaggtggggtgcgcttttgatcacgtttccggataggttccggtctccggaggacccctctttcctgat

SEQ ID NO: 111156 - DNA, 555 bp, Zea Mays
ggtggaaaccggagggggttccctgtcaggttaagtgactgtaagccaaacttccttagggatttcacaaggatcagagcaccaggcccagaggtcaaaggatctcgtgcgctctctgcgcctagcacgctcttgaacatagtggatggcacagctcttccctagtacccttgcaaccacatcctccccccagcagtgaacaggaacaccttcaactcgaaccttaactctaaactcgaagaaagtctttctagcataactatcttcggaccaatccccaaaatgaaagacccgaccacgatacgagaccgtattacggtcaagagcccactgctttgatctcgaatcagagaaaatgatgaagaattgttcagggaaatgcttgacaatttggtactgaccatgctgtagattgaacttttccctgagcatgtcacctgcctgaaggctgtccacttcatggttgttgctgtcgaaggagcaaaccactgccttgttgatcatctcatccctacgacgcctgattgagccggttgctgcaacaacgcagtgagc

SEQ ID NO: 111157 - DNA, 1235 bp, Zea Mays
gtaggttccaagcacagtatgacaagggggcaccagcatttgaaaccctatcccttagcatcaagtcaattcaactcaacaggtcctcattaggaatttgtctattggtaactcgggtagggtcgttgacctcggtgtgcatataagctgggtaaaccctatccttcaggggttggatgttcttgaaaacaaagtcagcgaccatagcttcagcagtcaggcctttgtctttcagcgagcatatctcagcaagcagcaccttggtctcggaccggtgggggactctgtccagtcgggcatgcggacgtcgggctgtctccccgatcgaggaggggggacttgttgtggttctccatggtaaaccagtcaaggtgccatcctttaatgctgtcctttagggggatgtcaaggtactctattttcctaccctgacaaagctccaaactagcaccaccaacaagttgatgctgtcctctggccataccgggccgccagtggtaaagatatctccatagcccgaagtggggaagaattccaaggaacgcctcacaaaggtgcacaaaaatggcaatttgaagaatagagttggggtttagatgtgtgagattcagatcgtaaaaatcaaggagaccgcggaaaaatggagaagctagcagggcaagccctcggatgaggaaaagcacgaagatgatagcttcatgagtgtcctctcttggaatggtcaccccatgctagattcgccaagaacacagctccttcggcggtagaaccccaatttccacaagatgcaagagatcagactcagaaatgacgaacatatggttaccggcaaatggaagctggctattcggatcaatgggtggaacgattggagcagcagcactttgtctcttcctcttgggggccatcgcaatctctcgaacgaagtgggcaggctctagaactcggaaaacagagaagcggtgtaggaaaaaagaaagaattagggttaagaactcaagaggacatgtcggcataaatatgagtcggctcgataagtcgagcgcgcaaagtgccagatcataactcggaaaacaggaaatcacaagcatcactcgggcattacctctaaaatgctagcgagccttcaaacgcacaaacaaaaaagcatgcaacagtggataagcaaaggaactgcattctttattcataaggggagttcattacaaccttgagaccgactcattatgagtcag

SEQ ID NO: 111158 - DNA, 507 bp, Zea Mays
aaggatgttatcaagaaagaaataacttggctcctcgttgtaggatttattagatatatttcacccgagtgggtttttaaccttgtcctagtcgagatgaagaatacataatggagaatgtccattgactacactgacttaaacaaggcatgtccaaaagatcccttctctttgccatgaattgattagatagtggagtctacctttgggtgcgactttctatatttcctagactattatttggttattatcagattccattaaaggaggaggatcaaatcaagagtgcatttctcaactgcatagaaacatcgaggcacttgtcgttaggggcataatggtcaaagttgagattcgtgcatccgacggtcatgatcgcttcacaagaatggttcacactgatggaagcttcctgatcatggcatgtgccaccccaaactccatcccaagttttgaggtccaaaccaggcaaaccatcaggtggcgggtttgagacccaaactgtca

SEQ ID NO: 111159 - DNA, 1184 bp, Zea Mays
ggcggaccgaattgggggaaaacggcatcgcggtggctctgtttgaaattggggttggagattgaggctactcggccataagaagctgtgctttcaccgtgcgcaatcaatttgggagaaggtggagagggcagtgcgaatttgacttcaatctagtcactgtgtttgcgatgatcacacctcgccgtgaacccaatggctatttatagccatggcggtccggcaatcaccccgcggctgaggatagtatcgcaatcgcatgtcgaccacgtcggtagaaggtacagtgagggagaactacgacatgagcgccaccgcggtggaattcactaagccacgacagccgccggtgagtaactccggctgggcctgggagatggcgccacgtacgggttatccctccccgacgttatccactccataccacccacgaatcaggacggcgactgcactaattttggcgcagagaggtcgccggcggtgagatttttctaccgtggctgatctgatccgtttgggacactgtaccatcgcgagctcccatcagagcacctgacagccaatctttggtctgatttttctctcaaatcttcatggcaactcataccaagttatgtggcaaagttgttcctgtatagtagctctacaactttgttatagcaaccctaggtagattcccactggatcttagtcgaaatggctctcaaacttggaccaaagtcactgtccatctgaagttcagactgtatcagcctgacagtccaactttgggcttcaatatctcctaaattttcttaacaactgagctcacattcttaagcaaagttgttcccctatcatagagctacaaagttgatgtggtgacctagggcaaaaaccctatactttaaaagatgcaaagctccaaagttgagccaatcacactgatttcagacttaggctatatagaggttaagtggtactttttgcaatttgccccaaaacttagggtttggcctgtaaatcttcccaaatgtgaaccatgtgactttatatgtttaaacatagtagtttttacactttggtccaaatgtgcacagtttttgcacataggcccctagggtttggacttaggtttttccagggttccaattagggtttttggtatctcagggatatgaatgtgattcaaattcattcttggg

SEQ ID NO: 111160 - DNA, 1122 bp, Zea Mays
actgcctccgcactttgaatctatgttgatccaacatctcctgttgtagttgagccaacaaaatagccttgtccactttggttggaacttgcacttgcaccagattctgtatttccactttaagccctctcacaaactggtccataaagaatatctcatcaaactcctatttatgaacaacaactccatacctcaccttctcaaactcaaaaatgtaagattccagactattagtctgtctcaaggccatcaacctcctcaatgcccttagataagcatatgccccaaatttgctagtcatatcttctacaaaaccttgccatcctaccatcacatgctacaatttgtatcacttccaccactgtgcaacactttgctccaaatgcatggcagtagaggaaacccaaatcgactcagtaatcttgtagatggtaaagtagcctagacactgatcaatccatatgataggatcttcaccagagaatttgggaagaacatcttaggcaataattgtgatgctcgagaatccttctgcaagtcatgttgagcccttctgccagaaccactcgcctcccctttctcctgtttacctctgggatgtggaatttccccttgcaaattcaaattatccccttctccctccaaaccattgatagaatattctaactcccttcccatctccctccaaaccatcgatagaatattctaactcccttcccatctccaacctcatctaagccacaaccctaccaatttcctccgtcttacgaaacaactcggttctctccaccgtcacgtgcttatccaccaacgttgccaactccacttgtgtcatcagttgatggtgcgccttttccaccgccaccaacctgttggtgatcacatccagagatgcaaacacccaactccagttgttctgattggtgcggtccttctctgctatcgcttcaagcaggaagggagtctacaccgagggtcgagcttgtggagccgtcacgccccctccacgagaccaacgacgtactcccttcgttcaaaaatcctcatcatctaagcaaataaaaatttccaagagtctatgtcgtttaaggtagggaccacagtttcacctcatcctcaggc

SEQ ID NO: 111161 - DNA, 758 bp, Zea Mays
gataggcgcgtggcgccgccaagctcgcaaatgacgtcctacaactcgatggtgatagtggggcatgtggtgtcgatgaggacatggttgtcgagggcgtaacactgtatgttgataaggacgacgtaacactagcggatgtaaggcgaggaagccgaaccgagaactatagaaaccaaggactagatgttctgaactctgacctcctgagcttggtggttggtggtgatagtggccttgtacgctagggaggggcttgacttcctcgtagtcaggggaatggtcgatagggtagtcgataggtcctataagagggtagccctttgttaaaagtgtcaacgatgaatcactcatgctccaagagggtagccgcacgttcacgctctagggcagtagcacaacggtttggcgtctacaagagccatagagagcatggaggaagacacaacgatgtcgtggaaggtgaacatagcaatgttggctccgaggatgtggtggggcactatggacggagctgtgtctgatgggagcattggagcagcgagcgaggagggagatgggggagccgatttccacgcgatgtgcgctggagggactggcctagggccgaattctggcgccttgccacccgacgtagccagctcatctagggggggtgctcagctctggagggggcggagtagggccattgtggtcggcacccggcgacggtgcgtgtagatgggggtggtggcctgccacccaatgtgaccaatccg

SEQ ID NO: 111162 - DNA, 739 bp, Zea Mays
atgcttaggtcatcgtcgcctcctttccttagtcgatcttgtagagctgcaacaccgaagtcttctttggataaaccaagctcagcccttaaattatttgcagcatcagcttcgtcaatgcccaatggctttccaccacctgcatttggtagcccaagtataagatgcactgtgtcctttgtaattttcagctccttttctgggccagctcgaattgtcatatccttatgatcaagcttttccatcaaccagcataaatgtgatctactgacaagcgtatcaactctcatatcaagtatattggagaacccctttcgtgcaataacttgacgttgtctgtcatttaaaatcttaatgcttacagtaacatcttgtggattgtatctaacattaagcctctgttgtaaaaatgtaaaaataaatatgttatacctctgtaatgagataccaataacatatacatttacatctgcatagtcgcaaatcagttttgggcatcaaaaaccctaatccacattacaaatatatctagacaaaccaataaacttgttttaaagaaaaacattaacaatataatagacattatttcagcgtaaaacttatttgcacgcatgaagtgatatatttgcattgaacataaatactaacctgtcggggggttccattgctttcgtccgctttgtaactgtcttcttcataaattttgaaggactgccatcaacgtcacgcttcttcatga

SEQ ID NO: 111163 - DNA, 596 bp, Zea Mays
caacaacaagcaagcgcgcgatgggagcgttcaggcaagcaagccaaaatgtgaaagaaagcgtaacgaaaatatcatggaccaacttgggccgtataataggagccttagcaataatgctgctatataaaagggacttctgaaatctggtgaagatatggaaaaaccgaaagctgattccatcaaacaactcttgtctcttctgctctacgtctagttctccttcctcaatccacattctctctatcagctacgctaacacacgcaagatatgcccagtcatcttcgggcaccaagcaaacagccacacgttgttgcaactcccaatttagtgcaaacgctggaggaacaaattagcgaagcctaacctgaaacttgtgcttgcaaaacacctgccatccgacattgcgttcagcagcttcacactggcttccaagattcacttcccacactggctgcttccaaagattcatttgcaggttctagtggactggaccagtggcatcttcaggctcaggaggagcatccggctactacctaccagctcctgctcaaacaagaacagctgccgcccagtgccaaattttgcatttaca

SEQ ID NO: 111164 - DNA, 293 bp, Zea Mays
gtcgtcggagtggtgaccagctcacgacggtgaagatctttactggggaatgcttatctgatgtccacggtgcacgaatcacggcgagtggtaatcgacggcgacggtcaccggcgatgggcagagggataggatcttcttcagttaacctttactgtaccatcagcagtctcattcagacagcctgaccgagcaagtttaagccgccatttctttgattttcaagtggtaacacaaccagtgatctatagcaaagttgtagtgctacaatccatctatatctttgctataac

SEQ ID NO: 111165 - DNA, 505 bp, Zea Mays
gtgaaagttcagctacattataaaaaatgtttgttaatttcgaagctgaaaatgaattccgaagctaaacctcagtaaaggtacctataagccttacacgctcgatagcttcttcagctcgcttggcttcttgagcatcgtgagatttttttcatttttctaatcacttcattagctatctcacgaccgcccttcatccacacatcagagtaaaatctcccgcctagcacagaagcttcagccgaagggtctttgatgtcatccgccgagaaaacaaatcctggctgagctacagccttagcacgttcgcaaccagctttctctaagatcgacgcggcccctcatgtgccagcgaatgcacagaagtctcctcggtcccttaaaatttcatcaaaggcttcgacttctccgctgatccactagatgactccatcagggtcgtcacggatgaattttttctcagaggaaaatgcaccaactctagcaaagttgtcttttagtttcc

SEQ ID NO: 111166 - DNA, 704 bp, Zea Mays
cgggtctggaatagtcggaaacagaaacaagagtgggataaacagggttgaggaaacgaacggaaacgaaaatactaacgaaaactcataatttaatacaaacacaaatgatattgatggttgactagtgatcgattggcaggacaataacgatacagagaagcaacattatattgttgtttggttgctaatggtgtacatatagctacatcagatgttgtttaagactttggaccacttgtcattgaaaatagacgatggttacaatggtcacttgtgctataatttgtcacataaaggcacgaggctttagtttatatactaatgcatattaggctcatctcatatctatcaaatacagaataaatacgggtcaaatccggataaaatgagatctcgcaaaagtggatggaatacatcatctctcgtttccatcatgtttccatattttttcgtaaatacgaaaacggtagagtcaaatatagaaaacgatatggatcgggactggattttacccgtccgttttcaaccatgtatgggactgaaaagtcgtggcgggcctagcggcccagcaaaagcaaggcactgtttgttaaacattgggggcggcgtgcttggtcaggtacccatctggtcttcaaggcagcagttcttcggtagctggcccaagaatttgccaccattcctactgcgtactaagggtg

SEQ ID NO: 111167 - DNA, 439 bp, Zea Mays
tagcaaccacatgcatgtatgcatgcatgatgcatccaaggagtgaatgcagtgaaacaggaatccaacatagggctgtgaccttgcaagtatgagctcacaatactgcgccatttaatgcctcttggtctatggtgtttccgtgatatctggaatttgagcccctgctcctaagaaacggtgctggagggagtaattacctttgccttcacattttatccaaacggtacctgaatggacaaatacgagcaaccaaatcaaacgaccttgtatgagcacagcttagcttaaatgagcctggctgagctcatacgagccagactaggtgatacaggtgaccaaacaggttattgatatcccaagtgccttatcggtagtatctaaagtatcaggatatttgaaaacaagccatttcttgaggtattgtggttgtttggga

SEQ ID NO: 111168 - DNA, 316 bp, Zea Mays
gtactaatgatatgcactaatcccgtcattatgggagtagcaagcatattaatatgctaatgcctcatgatgattagcttgcttgtgcgttgctaaccagcagctatagctagacgctaatatgccaccttgcaacaagagattcttcgggatcatgcatgcatgatagctgttgtgaagtaatgaaacgagattgagagagtgcaaaatgactgttgttattattgcaggggccctatttatatatatgtttaggggtgtgtctcttaggtagagtatgtcgcaccacttggattggtcacatatacaatatttt

SEQ ID NO: 111169 - DNA, 709 bp, Zea Mays
tcaaattgagataggagactagagattttagataacagacataatgtaatcacaaggtaggatagagtgatgagaagggtaagggagatgacaaaaaaacacaacaaaggatagagttaaaaactcgcaggtgacaaagaagaggatacgaccaagggaaaagtaggtaaagtacactgctcagattgagatggaaaagaggatattttaaaggtcggtataagataaacatcaaggtaagatatagaggtgataaggataaatgtgataaggatgaaaagcataatccatggacaaagttaagtcaagactcgcaaagtgacaaagtggagaaaacaatcaaggataagataagtgaggttccgatagaagagttgaagtaaaaattcagtaccgaaggaagttacaaggaaacaacgagattaccacgagtgggcaaaataaaatgaccgctcatggatcattaagagacaagggtagtcaaggaaatgttaactgaaatgtcttgaacaatcattatggtatgaaaataagcatacataagaatataagagtatgcaagatttcaaggatacgggcataccaaggtaaggaaatagaatgagccaaaggataacgacttagcaacagaataggaagggatctcagaagacaagaagttcatggatatataaactgaagagtttaagtaggcagtacaaattctgat

SEQ ID NO: 111170 - DNA, 454 bp, Zea Mays
gagcggtggcgaagcgtagagtgagtgaagtggatggtggtcggcttcgtgtgggcagggctggcaagcgggaattgttgtcctcgccggctggggcgagcatgggtgagggggagttgcgaagtcttttttagggtgaggagctgaggataatgctgtttaactatagggagatgggaatcattctgaaggttgaaccaatgtaaggtgtgatgccctcgctgtacgtgtgtaactatagtttgtatgatgaggttgtgtgacttcgcgcactcggctatgttcataggggcgttgcgcacttggtctagcacgtttaatatgtcggtccagctgcgcctgtagtcggtctttgcgtggacagtttctcgatgtagacttttgcacggatgtaatgtgccttcgattttgcgcactcgttgtgctagtctggctgcacccttaggcgactttt

SEQ ID NO: 111171 - DNA, 446 bp, Zea Mays
caggtatgggaattttgagttcatagtcatgtcttttggcttaactaatgcccctgcttttatggaagcaatgaataggatgttacatgagttcttggatgactttgtggtcgtgtttctggatgatattctgatttattcaaaaacggaggaagagcatgagcggcatctccgtctcgttctaggtgctcttaggaagaatcagttttatggcaaattgaagaagtgtgctttttggttgtttgaagtttctttcctgggtcatgtgattaattagcagggcattgcggttgatcccaagaatgtcgctgctgtggtggagtggaagagaccctctagtgtctcagaaatctgaagtttcttggggcttgccggatattatcggtgtttcgtgccaaatttttccagcattgctagcctttgactagactattggagaagggtgt

SEQ ID NO: 111172 - DNA, 345 bp, Zea Mays
ggagagcccaacaaccaccatgacatgtagagaaaccagcgagcctctgatttgttgaagcttgacaatacaataacgacgatgaacgcgacaaatcagaaggattagtcatgcatcctaactacgagagcgcaactcttgatggagatcaatttcctcgaggcagcgcgacgacgacagcagaaggggaagcctaagtcatagcctaaactcgttataccatgttaggggggtttgccatcaaggattgatgtattgcattaagcccttaggcagtttatatagagcacatgagtaagagacaaggcaaatcatggatatatatgacagtagacgagacacaat

SEQ ID NO: 111173 - DNA, 616 bp, Zea Mays
taacatgagaaaacatgatagtaaaactcatataggaaaagagtacaatgtgatgttagtattaggttgatcaaagagatactccccctgatgcaagcaaatctctaagtcgacgcataccaattcccttaacacatattcgaaatgtggaataaggtagcgacttagtgaataagtctgcgagattgtcacaagacttagtttgcatgaccttaatctcaccactttgttgaagttgatgagggtagaataacttgggggagatatgtttggtaacattactcttgatataaccttgttgcatctgagcaacacaagctgcattatcttcatagataatagtgggtgattcaatggaatgaatcccacatgatgattgaatgtgactaatcacccttcgaagccacacacattcacgtgaggcttcatacaagtcaataatctctgagggattagtggatgttgttactagagtttgcttggatgacttccaagaaatagcagttccaccattcagaaatacaaacccagtttgagacctaccattgtgggggtctgaaagataaccagcatctgtgtaccctacgaggctaggatcttgatttcttccgtagaa

SEQ ID NO: 111174 - DNA, 959 bp, Zea Mays
attgataatgtggtgatgaaagatcgggtcatgctgacttgtagttcaatatggccagcagctccagcagggtgagaaagatcgtcatcaggttctaaaggatttctcaaagttgcttgatgatcaggtaatgctattaaatagaaatatgtgcaaagtcattagttcaaactccctgatctgctttaacttgcaggctttaggacagcagtggctacctgtcaaaaaaaaagaatgccgtctttgtatggacatctaagcattaaatagcttttgatttgctcaaaacagccttgtgttcggcttcagtgttggctcaacccaacttcgctaaaccattcgatcaccattgaaacagatgcatcgggcagcggtgctgttgcaggatcaccatccattagcttacattagcaaacctctcggtgttaagaacatgggattatcagccttgctattttattggcagtagatcattggagatcctaccttcagcatggtccatttattatttacactgatcaacgcaacatgtcccatctcaatgaacaagtcctaaaataaaacaccttggcagcaaaaggtttttacaaagcttttgggactccagtatcacattgtttacaagatgggggtcgacaatggagcagctgattccttatctcgcagacctcaccatctggaatctatgcagtggctagctgatatagtggcaggctatgcacaagacccggaatctatgcagttactggcggaattgtcatcaggatattctcagcacaaatactacagtctggttgatggtgttattatcatttatcagatataagggtcgtaccggcgtgttcgacagctatttgcttggcctgctatgaaagcaactgtccgccaatatgtccgtctgttctcaagccaaaccagactgtaggtggtgcagcgcatttgcgcctagaagaagcggg

SEQ ID NO: 111175 - DNA, 357 bp, Zea Mays
tcatgaattcttcttgcttcatatggagcactcgttctggaatgtagtgctcccgaaatgccaatttaaattcgtcccaggtgacttgatggtcagcaggctgaatggccacataatttccccaccaggtgctggcaaggcctcttaactgttgagccgcaaataatggcttctaggtctccgtgcatcgaatgagtccaaacttttgctcaatgacccgaatccattcgtcagcttcgaggggatcttcagctttgacgaatagtgggggacgggtttccgagaaatccaagtatgaagtttcgcgcggtccctgtggataagccctcctgccttgcttttgaagttgctgtcccg

SEQ ID NO: 111176 - DNA, 390 bp, Zea Mays
gtcggccacctcgggcaaagccaagcgcccccactaagcatccaggaaagagagaaccgagaaagagagagagagagagagtttcactgtcggtcagagatgacgatggagcttgtccgtgacgcgcgtcaccggacctcggcatcgggctagggagatcggcaagttcgcgctggacgcagggggtgttccctgtgcttacagcgttgggagggcaccgcgttatcaccgcgcgaagaagatcgagtgggactgccgtagtgcgtcgctgctcgtccctgggctgagccacggtatgcctccattattttctcgccgttaccacccctttgatgttttagcttatacggcgggagtgcagggcaggtccgccatcatggcgcgcggacg

SEQ ID NO: 111177 - DNA, 315 bp, Zea Mays
catccgctcataccatggatgctacgatgcactatcgtatccactgttcttccctaaaggtgaacttggatggcatgcaaatatcccaaaggttggtgtatccatggatgaagtggatgcataccgtgcgacacatagggcaaataattcaaacgatgaagatgcaggttagttgtttgtttgtactttgggatttttgcacattattaactattctttcaacatcactcacttttcaatccttgcgtatgcagaatctcctacccatttatgtgtgtccgtacatgactactactactacaaattccagattcg

SEQ ID NO: 111178 - DNA, 436 bp, Zea Mays
gtggctctgtttgaaattggggttggagattgaggctactcggccgtaagaagatgtgctttcaccgtgcgcaatcgatttgggagaaggtggagagggcagtgcgaatttgacttcgatctagtcactgtgtttgctatgatcacacctcgccgtgaacccaatggctatttatagccgtggcggtccggcgatcacctcgcggctgaggatagtatcgcaatcgcatgtcgaccacgtcggtagaaggtatagtgagggagaactacggcatgagcgccaccgcggtggaattcactgagtcacggcggccgccggtgagtaactccggctaggcctgggagatggcgccacgtacgggttatccctccccgacgttatccacaccataccgcccacaaatcaggacagcggtggcactaattttggcgcagag

SEQ ID NO: 111179 - DNA, 352 bp, Zea Mays
aatgcatgtgaggaaaagtgttggttctactgatgtgtacagcgatgtgatttttgggtaccttattgcaagagattataggactaatatattttgtggttagaatcaatgttactggagtagatgctattgaagctaattttctaaatgtagcatgtttggcaatgggcagttaacatttgataaatatacatggattatgccttagtgttgctcttctgtcatgttggccatattgctagagatgtgattttacttgtgctgccgtgctggcaggtagtgtttgttcattccgaatgttttatgaaagctttggatggcaggtagtatttgttcattccgaatgttttat

SEQ ID NO: 111180 - DNA, 595 bp, Zea Mays
attaaactagggttctaatacaactcataatcgttgtaggaaccactttggcccatagatcacttttcgagcaacaactttgtgatttgacttaggtcaaagactgagttgatttagtttggacgtgacagtgttgtgaaggttgtaagctagcttggagtccttatcggtcgagagttgaggttagggttttgctgtaagttgacaatgttatctattgcatgaagaagaccaaagataaaggtcttgtgctagcctgaacatagacttgtgatccaaatggatagaggcgattaacataagtccatgtcaggacccaaggcatgtgttggttatggttatgagtttctaaatttttgtgaaaagtttaaggatcaggacactaacaaaaacataaagttatgggatttgatagtaaccggggaaaaaggaaaaaatgctaaaccaaatagattctacttgttagtgttatatattcccttcatttcaaaacataaatcactttagatttgtatatatatatatatatatattttatttttttatttagacatatattaggtatatatataaataaaaaaatgtatgtaaaaac

SEQ ID NO: 111181 - DNA, 419 bp, Zea Mays
taaaaaataccgcttaatgacattttaagagttatttttgaaaattgtcagagaaattgttcattgttggtttcaattatatggcaatctcgatttttacatcgtgataaaattgaaataggaaattgcaatgtttagatctaattaactaatttgttagagttctctttttaaaatattactcctatcaacgaagaaagaaatatatagagaagacattaaagttgctcctacatgcataaaactattaggactgatttggttattagtaaattgaagtagatccatgaaaaataaatcctcttgttattcaagtttaaatagtaaagtaatttcttcctatagatccctttaagtcaccgaaccaggccttagtggttctaaatcttttaaatgtgtttttaatggagtacaatttt

SEQ ID NO: 111182 - DNA, 759 bp, Zea Mays
gcttaattgaactatttatctagataaataaaatcaattaagaatataagtggtgcatcccatgttgagttgttttgttatgcatataaacttgagtggaagttcatagccaattttgaatcgaatttgaaacttagaagttgaaaagaaaggaaaactaataaaaaataaaaagatacatcacctacccgctcgcaggccacattccttcagtccaggtcgctacccttcctccttcaccgaactgggctaaaataacactgctcgcaggccacattcattcatttgttgatcgatgtctcactggcttgcgggccccacccgtcagcctgccagccgtcttcttccccgattctgcgcggagtatgttacgatctaggaatcggctgttacgatcctatacatccccttgtgcctataaaactatgcacctctccatgcccgccaccacctacgtatccaccgtcgagttcgccaccaccacttggtttgtatgccaccatctccatggagagtgtcgacgccgaagtagagagtggaacatgtcgccacagtcgaacccgcggttcaccatcgccaggtcctcgaggaattaccatggagcgtcgtcggggcatgtgggagctggcgcaagtgttggcgtgcacaggtagcagtggggtgaccgggaattgctcgctggagtcctccttcgccgcctgaaccatcgcttgccatgggcgaaggccaccgactcatcgtttggcggtaagtatgtct

SEQ ID NO: 111183 - DNA, 815 bp, Zea Mays
gctaactcagcagggacgctttgggtgagcaccttcaggcttccgagtctccaccgctttgccaagtccttgtccagccgttatagccatcggctcagcatgggtcgagtcagatgagtccccagccagcatactaagcacaacatctatctctacatcgtctgtgctagctggcatctcaaaatgagtttgcttctcatcattgggaagattccaaagaggggcaatcagagcctcaatatcctcgggagagggtcgcactctaagacccagactaccatcactagcaggagggttggacacaaatttagaaaatgacctatgaggtggcagattccaggtagaataggcaacaggagcaccaacatttgacactctgccccttagaatcatatccagtcggctcactagatctttagtggggattctcttgtttgtgactcgggtagagtcattgatgccactgtacagataagctgggtacgccctgtccttcaaaggctgaatattcttgaagacgaaatcagcgaccacaacttcagcagtcaaacctctgtctttcaacaagcagacctcagcaagcaacacttttgcctctgttatctccgaaagggtcagagattctacccagcttggagtacggacatctggctacctcctcgatcgagggggaagggacttgcagtgattctccacgatgaaccactcgaggcgccaccccttgatgctatcctttagggggatgtcgaggtactctgttttcctcccgcgacatatttccagactggcgtcgccaacaagttggtgctatcccc

SEQ ID NO: 111184 - DNA, 347 bp, Zea Mays
ttcttcacctcttcactgtttgatgcaagaaatttcaaaagttcaagaaagttgcctctgttgttagactcttcactctcatcatgtccacgaaatgccaatccttgacgcaatagaaacttcaaacacctaagtgaataagtcaatctgatcttataaagatgaagatcctctttactccacttatcaatgtgataatcaattgttgcctcaggattcacgaagccactatacctctcttgagccgcattgtgcgcactagaacccacatgtttcaaaagtgccttctctcctatattccaatttctccaaccatctataacaaatgcatctgcccccttgctctt

SEQ ID NO: 111185 - DNA, 300 bp, Zea Mays
tgtgtcagaatttccagatgtgtttccgaaagatttaccaggcatgccaccagagcagaaagttgagtttgctatagagcttcttcctggcaccgcccccatttctaaaagagcctacagagtatctggaccagagttggttgaacttaagaagcagatcgatgagctgtcagagaaaggttatataaggccaagcacctcgccttgggccgcccctatcctattcgtggagaagaaagatggcaccagaaggatgtgtatcgattatcgagctctgaatgaggtcacgatcaagaacaa

SEQ ID NO: 111186 - DNA, 1174 bp, Zea Mays
ctgtaaccggttagccagcagcttagtgatgattttcatactattattcagaagcgagattggtctgaagtcacccactactctggcattatccttcttcggtatcaggacaatataagaaccattaatgcttcgaaggcaaacatccccgtggaaaaattggtcacataagtcatagaagtcttgtgaaataatcggccagcattttttgataaagttggtattaaacccatcaggtcccggggatttatcagaaggaagggccgccacaatactatcaatttcttgctttgaaaaaggctcatctaaccaatgcaagtcactgcggcagagcaacaaactagaaagatcaaagacattgtccacgaaatcggaggagcccaagcgacgtttgaacgcattccaaagcaaattggctttgagctcatgccctgtaaagactgaaccactttcatctgagagcaacgcaattgtatttcggccatgccttaccgttgcatgggcatgaaagaatctggagcagatatctccatccgtaacccatttgatggaggctcgttgcttccaataaattttttgaagctgaagcaactcagcagccttgtgttgcaataactcgcggaaattccattcttcaatcaaaaggtcacgatgctcttcgataagatcaatgaattcaataatcaacttaatttgtctcacagttttgtcaatttttggcagagaccgctgccactcttttagaatctttctggtgaacttgaactttgctgttaaattcttcgctttgtccaaaaggcttggcagacccgtccatgaattttgaaaaactgccatgaactcgttaactgtaaccagaagttttcaaatctaaagatcttgggcttaggaacctttgacttaaaagaaatcaagcagggcacatgatctaaaatatccctgggcagcgttgtagcgagagtatcagggtagcagaccgaccattcttgcgacatgaaaaaccaatcaagtctctgaagaaggggctccctttgtttattcgaccaagtaaaggagaggccatggagggggatttccaacaggtctagctggctgattgcctcgttaaagctcagcatcaggttaatgtctcccctagcggaatttctattttcaggcctacgcataaggttaa

SEQ ID NO: 111187 - DNA, 293 bp, Zea Mays
gttggttatggatccaacgccatccaactagagtgcctaagccccagcccctatctgattgctaccgttgatcaccggatcaatggtggatggagtctcgtcttccatacggctggcaacggcggcggcactgcccagcacggcagcgccatggccgatgaaagtgagatttccgattccctgcccaagctttgatgcaaacggagctactctctacggcagtgatggcgaatctagggaaaggattctcaccgggatcctcggcatcgaatccactgcccacaaaaagagaa

SEQ ID NO: 111188 - DNA, 888 bp, Zea Mays
cttcaacactgtttgctcctttattggcacaagggatttaattcaggagcatatagccttcagggtatggccgcttgaagaaagctgggaaataccgaaggagaccaccaccgactctagcaaagatggtctggttcgactgaagtataccttcaaattcagggagaagtttgatgaacccaacgacgactggctgaagtgtatcgaagctacaagtgatgaattgcttggagcttactccaaggccgaagataatgctctatccgcagccttcggaagacgggggaacaaaagactgaacagggtttttgatgccattggcttcatataccccgactaccgttatccgctgtggggacaggggaaaaagaggaaaactgctacttcagccaccccagttgagcctatgcctaagggcaaaaagttgaaggttcttacccaccggccgcgttacattgaaccgaccgtggtgcctgagtttggcgcagggtcctcttcagcgaccaaaacaatgcaaactgcttcgactgcacatggcgctgaagaaccagctgtaatgccgaagatgcatatagtagagccaaccgaagataaggctgaaaaggttgaagagccaaagattgacgagataacaaaaacaccaaagattctgagccttccgttagaggcagatctgccaaagatacaaaagacttctgctgccactcctaagagaaggatggcaaacgtgccggatgttgtgttggaaacgacgaaagtcttgagtcctgctctcgtaaagaaagtcgttccaaccgaaatgaaatcgcaggccgaaaccaaaactaggcaagccgaagctgcacaagttcaagctgaaaccgaagctatgcaaattcaagctgaaac

SEQ ID NO: 111189 - DNA, 757 bp, Zea Mays
gcaatttttcctagagtagagcttgaactctttatcgtctccagtacatctaatacattgaccatccttttcctttttggggtcgctataagatctttttgtgcctttggcactgttacttctgccgaagggctcagaactgatattttgtcttcgactctaggttcttcaattttgttaaccttcggcattgtagctggttcttcattcctctgtgtgagggcagattcttcggctttagtagccgaagaggtctcgccgccaaattcaagcactacggccagttcaatatatcgcggccggtgagtaaggactttcacctttttcctcttcggcgcaggctcgcttggagcaactggagcagcatccttcccggaagttgcactctttctcttttgcccccgtgacgggtagcggtaatcagggtacataaacccaatagcatcgaaaactctatttagcctcttcttcttccggcctccgaaggccgcagataacacgttatcttctgcctttgaatatggcccaagaagttcatcgcttgtagctttgatacatttcagccaatcatcatctggctcaacaaacttaccttcatatctgaaggtgtatttcaacctaaccagccccaccttcgtcagacttgctaatagtctcctttggcatttcccatttctctacaagtggccacactctaaaggctatgtgctcctggactaaatcccttgtaccgatgaaatagcaaactatgccaaag

SEQ ID NO: 111190 - DNA, 381 bp, Zea Mays
cacctctaggtgcaatgaagaggatccctgcacctgccccctgtagctttagcaagccatcgaaatacatccgccatacttctgcagtctccgagttgtctggtacttgttgctcggtccattctgatacgaagtcaactagtgcctgagtctttattgcagtacgaggtcgaaactcgatgtcgtgagctcccagctcgcaggcccacttggctattcttccaatggcttctttgttgtggagaatatcccctattggaaacccggtgactactatgactttgtggtcatcgaagtagtgacggagcttgcgtgcagttagaagtactgcatacaacagtttttggacttgaggatacttcttcttagatggccccagaa

SEQ ID NO: 111191 - DNA, 513 bp, Zea Mays
cacaggctccagaccacatacggtagttctctgatccattttcctgcaagcttttcgctcttgtcgaacacctttttcctgagtgcatcaagtatcatcccattggctctttccacctgcccattagctcttgggtgtgccactgatgcatacttgatctggatgcttctctgctcacagaaatcaaaaaactctcagctagtgaagttagatcctaggtctgggataatgttgttaggtatcccgaacctaaacattatttcttgaatgaatttccatcgctttgctgaggtcaaagaggcaatgggcttgtactctatccattttgtgaacttgtcaatggcgacgagtatgtgagtataccccccttgagattttttgaatggctcaatcatgcccagccccagcacgcgaaaggccaggttacaggaatagtttgcaaatgttgggcaggcaagtgttgctgctttgataggaattggcatgcttcgcacttctgaaccaactctactg

SEQ ID NO: 111192 - DNA, 420 bp, Zea Mays
aagagattaaacaaccaagtgtaagaaaagagctacataaaaagaaaataatagaaaaaatatcataagttcttgcatcctttgtgttatttgtactttggatacatgacttacttgcttaaagtatttctaggaacatgtttaggctagcaactttgataacaactttggacacttattcaatattgctacctgatactgacttatgtgttgtatatagttatttctctttgtgtgtcttccaagctccacatatttacttcaaatccgtacagaaaaagatccttgtagcttggtgccactccctcacatgtatcatgaactaggttatttgtaccagctatatttttcctttgataatgaaaggatcatgatgtccaagagggggtgaatagcgatttctaaatttcttgcaaaaga

SEQ ID NO: 111193 - DNA, 298 bp, Zea Mays
ctttcaattaaaatttgagaactgtgagtggaaagtgcacatcgacgctttagatctttggttgtaaaggatgtagtttcataaagctccatattgtgtaataatgctctacttgttaacttaacaataaatgtgatgctttattagttggtatagtatacaagtcaattcgaagaaaatgattgagagagttaatttaaaaattgctattcttattccaagtttttagtgtcctaggttggagaatctaagtattgttagtttttcaatgctatcgtttagctaaggataacatagc

SEQ ID NO: 111194 - DNA, 535 bp, Zea Mays
gaagattctttaaaggaaaaaagatatcatgttgcattcagccaaaggctcaatcaccgaggcatggtctcaaaatgataaactgagcagagagttagacgaagctcgagcaaacttggataagagatcagagcacttcgaccgcgaatccaaggaactaaatgcaaaagtcgaagcagaagctgagaagaacgcgaaattaagcgaaactgtcaaaaatcttcgggataaatgctttggctttgccacccaatgtattggccaattgaaggggatattcaactcggtcagagccgcatccgaagaaatcaccccttctatcgaagatatccctggagccctcgagcatattgagaatgaagttgaggccctcgacgaagttataactggacatggagatttctgtgctctggtggcttctcatggcacagctgcaacattcatgaacgccggatgcaatcacgtgagggctgtaaataggccaaacttcggcttgtcaccgtttgatctggttgatattctggccgaagcccgg

SEQ ID NO: 111195 - DNA, 423 bp, Zea Mays
cattaatacaggctctttggcggagtaatctttttcaatttggccaacgacgaccttggaatctgtttagttaatgcaggtggtcactccaagactcgcagtttgcgaagtcctaagatgactgcttcgtactcagcgatgttgtttgtgcatttgtctaactcgagtgcaaagctgaggcgcacagcgtatctgtatttgagtctggcgggtgatgtgatgattgttgtagcgccggcgcctgcgtgacaccatgctccatcacagtggatggtccagacggtttcttcgtgacattgcagtggtttagaaggccctgtccagcctacgataaaattggccaaaagctgtgatttgattgttgttctaggctcgaaggtgatgttgtaaccggagagttccgccgcccattttgctattctg

SEQ ID NO: 111196 - DNA, 860 bp, Zea Mays
aacgtcagtgactcatgtgaatagtagcctaaggactgatccgcgaagaaaacttagaaaacccgccagggaccccagtgcaaagtggatttccatttaatcaattctgttaatcttttttttatgaccagagaacttagaaaatccataacttaatgaaatcttaataaagagttgtcaaactaattttgctagattttgaatattatggactttcatttaaaaatgatgaaccctatgctttctgttcttaattttagagtttaaaattaaaaacagaaacctaccaaaccttgtttaattaaggaaaattagtttttcttctgtactgaacctaagaaaatttgtagatgttcaaacctcacttaagcactgtttaaaaatagtaggaaccccagcattgaagaatatagtgtagatattcatgtaaagctattttacccaaaacttaggaaaaatcagaaaggcattagaaattaatgaatagagagtaaaattatttttcctagtttgcttaagtaacagagaacctaggaaaaataaagagaccattagttcagaccagttttaaattaaaatgttttatttagccttatttggactgaaaatcaattattagagatacaaaactatacccaaaatggataataaaaatccagtggacttacaaccaccagagccccactacaaaaatagagaacacctcagcccaactttttaagtaaggaaaataaatataaaatgctaatgaggcatttttcaaataaatcatgaacaacccctaataatgtgataatgggcaaccaaaaatttggtaagtccataatgagataaaccaccagagaaaaatgcaaacccat

SEQ ID NO: 111197 - DNA, 374 bp, Zea Mays
cgcaggacgtaacccttagcctgatccaaaagtttttgagtcaaaactattttcttaaaaaaaatcttgctctcatcccttcatttcaaaaatgctttcccctttccttctctcagaagtcagatggaggtccgttgccaaaccagcttttgccagaatgaagatggtttccccaagttgctgagagcatgcacagttcgcctcggaatcaggagtcagctagagtatgatggtcgtgaatttgtcgagcatggcacagagaagtgtgtcgtgactgtatacgttggatccagtccgcaccatgtggaatgtagtgtcactgctgctgggcacagattcaaagacacctgccaagtcgtcgcccgcaaggcatt

SEQ ID NO: 111198 - DNA, 667 bp, Zea Mays
tgacattgcttgttgtgaaatgagatggggacttcgcttgccatggcgatgtgtggatgcttatgacgcgtacctggttgcgtccttaagtgctttttgttcgaccgtgtcagataatagagacttttcacctttaaggtgatcgtaatagactttgcaccattagggtgatgtcgcgtatttatgcatgtccggctgcacccttaggcggcttttgctcggatgtcttatagtaaagacttcgtatgacacacttgtgcatatccggttgcaccctttaggtggctttttgcccggatttgtcttttagtaaagacttcgtatcgtgcacttgttgtgcttatccggctgcacccttaggcgacttttgctcggatttgtcttatagtaaagactttgtatcgtgcacttgttgtgcgtatccagctgcacccttaggcggcttttgctcggatttgtcgcatgcgagggtagtctaggctacctgtcgcggtgacttcgtatacgtcgaatgtcgaagaccgtcgatgtggcatttttcgacacttatggtaatgatgcttgttggagtttttttgcgggggcttttcggtggtatattacatggcgccgcctcgttaaaaacctcaccccccgggaggaaaagagtgcgggcctgaatgacatt

SEQ ID NO: 111199 - DNA, 630 bp, Zea Mays
tagtccttaacaaatttcactcgactagtaaaatagtactattattagctactagaaaaatattgctaacaatcagttaaactattagcaacatgtatttggattcaagaaaataattatgagtagctaattagtaattactatctttcttgaacctaagtaggatcataattaataaaaatcctatagtttttagagagccaagataggatcataattaacataaataatgtagtttaattttttgatagacagtactagggcatgtttagtttcattgtgctaaactttagcatcacttaaagagataaagtgctaatgtatgttaaactttagcattttacttttaatatcttctagtatattttagcactcatgtttggatttacaagagctaaagtttactaaagatgtagtgctaaactttagcattatggaatcaaacatgcccttagagtgtacataataagaactgcacattaggccttagactgccttcaacaactaccttattttattctatattttaaactttactctgcaatcagtataatccatagtataaataataaatctcttattttacatgatctagtgtacataataagaactgcatattaggccttagct

SEQ ID NO: 111200 - DNA, 551 bp, Zea Mays
aggtaacataaggtgtgctcgacacgaatgttcagtcgttgtaggtggaaattgtatttgcttaaatagagaggtggtgacatgccgaagtagtcatcgcttcctctatgtttatatgtcgagtcaaaatgtggggtactcgtggtacgctaggcgatgtccaaataaattaaccggtcgatgtggtagtggtcgtgcgtgatttattgttagtgagtagttggaattccgagctatatgaggattgtgttaaaaactagtaggcggcgtgtaactgcgttcgtatggtaaataataggtcggtagatattgttgatgccagtagcaaatgtagtcttatggagttttacgccgtgtgtaaatgcctccgcgatagaccccaaaaatgagctatttaggtgacttgtgtgttaactagttcaagttgagcaatggttgagaaacactgatcaatcggctccaacccatgttcttgagttacgatgtctaaaatggttcgctaggtcttctactgtgattagccaactcatgttaaacaggagtcgatttcg

SEQ ID NO: 111201 - DNA, 939 bp, Zea Mays
gtctagtttattcgtctagatataagcaaacactttattcccgctggctgcacttattctgggattcaaaagactgacgaagctttctaattcgtaatgcggacttctttcttttctcccagactgtcttttcgactgagcccaactgcccatatcaatcttattgctgagtcaattttgtagataactactaaaatcagcaagtatttgtccttaaatgaacttagttatcgactaagaaatacaagatacatgaagacaaacgcaaaaaaaaaaaaaatcagtatgataagctatttcgttgggcagaaacataaatttcaaatctcttacgagacccatgggtatcgagaggaaaataagctaatttactactcaattcccttaatcttggaggtgatttaagtttctacactagctcataaagattatattttttttgataaggtaaaatttatagtatcaagataatcatgagtcacaattcttttaacaactaaaacccgacttctatatcgcggtagatgcacagtctaaaaagaagactaacaacccaaacactctagtagtaatcaatcctaaaactagatcgtcacctacctgggtaaaaactccctcactatttgctgcaaacgttggcatgtagctaaaaccaactccttagacattatatacaaaaatcagtattgctctagcttgtgaactttttgaaactgttgcaaaaagaaattaagctagctctctttgcagcgaacaacaatctatccaaaattttcatttcaagtaaccggttgtgcttctttttttacggatcaagtgctagtcgttttcttgaggggaaggtagatatgaagttggtccttcgcagccctcagtaagcagccccaaccactgacctgccacaatccatgatagtgccaaatagcccttctttattcc

SEQ ID NO: 111202 - DNA, 588 bp, Zea Mays
gaagtttgatgaaccaaatgatgaccggttgaaatgcattgaagcttccagcgacgagatacttgggacatattccaaggccgaagatgatgccttatccgcagccttcgggggccaggggaagaaaagattgaacagggtatttgatgcaattggcttcgtataccctgattatcactacccactgtgaaggcaaggaaagaagagaaaaactgccgcttcggccaccactgttgtgccgaagggcaagaaaataaaggttctgacccaccggccgcgatatattgaaccgaccgtagtgcatgaatttggcgaagggacctcttcaactgccgaagcaaaacaagaggcccccgctgtgcagagtgctgaagaatcgattgtagcgtcgaaggtgcctacattcggtccagccgaagccaaagatgatgcgaccaaagaaccaaaattggaaaaaacagtgaaaatgccaggaattctgagcccaccagcaaaggcagaattgccgaaagtgcaaaaggctcctgccgcaactcccaagagaaggaggatggccaacgtgctagacgctgttatggagaccacaaa

SEQ ID NO: 111203 - DNA, 746 bp, Zea Mays
atactacacaataaggaagctgttggaagaacaaccaaatgggcatgtgaactcgaagctcatgacataatattccgacctcgcactgcaatcaaaactcaagcactagtcgatttcatatcagaatggactaaccaccaggtcccagaaaacctaaaagctactaaagtctagcaaatgtactttgacggctcgttgagattgtaggggcaggagcggggatccttttcattgccccaggaggtgaccaactcaagtatgcgcttcagctcctgtttccagcctccaacaatgttgcagagtatgaagctttagttcatgggctaagcatcgccatttcactaggcgttaaaaggttaatggtatacgatgactcgctagtagtcatcagccaggtaaacaaggactaggactgctcaaccgactcaatgaacaaatgctgcgctgcggcgcgaaagctggaagataaattcgagggtttagaatgtcaccacatggaaagggatcgcaatgcagcagcagatgcattgtcaaaattagggtccagtcgggcctaggttccacctgggattttcgtccaagaagtacaacaaccaagtgtcaccgcatagcatgctgaagaatgcaatgccatggaccaagcagaaatagatcccaatgactggagggagccaattatctggtacataaaaaacaaggaagaaccagatgataaggccacgacagaacgcatcgcaaggcagtcg

SEQ ID NO: 111204 - DNA, 392 bp, Zea Mays
gctgcacaatggtttcttgatgccgaaggtcgatttcaccagtctctgaatgatatctttaataccctcccttttatccaagtcgttcttcatataaaaccactccttcgtccaattatttggccacttactttgataaaccataacagggaaccgtgcatcttttcagtattgaaaattgtagcatctgaagttgttatgcaacctttcctttcctgtcaccttcatttggtgatgcagttcatgcatctagcaaaagaattcagtgcttggttcatcttcttggctttgaactacccagataaatacctcgagtctcattaatgcattagaaatcaattgatgaaggtatatctcatattttttagcacttcgataaccatcttatgcag

SEQ ID NO: 111205 - DNA, 996 bp, Zea Mays
acctaaggtaatccaggttttaagaaatatcgtacggtgatttaaattctactcagactataacttaatagaggtgtgctattagaacttctagttttattaaaacttgagtataaaattctactatgtgtatgactcctatttacatgtacgagttttagcaaagactgtataaaaagatatataggctataggcagtaaccaagaatttaagccaattcagaatttattctttgtttctccacttctttcttttacctcccaaaccttgtgaaagtatcaaactgaagttagatagtttgagccagatactaccatagtggcttcgtagaatggttctaacaagatacataacttctttgacatctcccaatcattaggcgaaggctcatgtgtggatttgtgggtcatttcgccttaaagcttcatatgctcttctatacttcaaagatgtcttaagaatatgataggtcgaatttcaccgggtgaggacaccgaatgtagggtgtttctcaacatcgagtacaacaactgtgtggtcaacttgaggaggaggtgccaccaatgaagatattattggcggagcaggagaaatgtcgagcacgaccgatggaaaggcagtagtgacacttcacaccagggactttccccttagatgtgataaggttgtccttccctctctggtctgcatagatcaatagacgatattattaagtcaataacagtatcaagtgcctgtgctaattattggaagaggagagagggcgatagtgacgacagcgcgagtgagggagagggcgcggcgaggatgcgagggagggggggactagacgcaacgaggtcgcatgggaggagaggggtcgatgacgacgacaatgcgagtggggggagagggtggcagggacgtggggagggggaggcttttgtcaatggagtcgcaaggtgatgatgagggtgagagatgatccaaataatattgtccattatacttgaatg

SEQ ID NO: 111206 - DNA, 354 bp, Zea Mays
tcgtgcgccgcttcgagtgaagggatctcctgatgaacggagcccagcgcaccatccacgactggatccttgttgttggacgccccgatcagcgacttcagatcagctttggcttgagtcttcttcaacacctcagcaaactccgtgaccttcctctcgatctccggcttccacttctgaacatcgccttgctctgtgagcactcccttcatcgtcgcctccatgctgctaatcgcagcctgcatcgactccatcctccgatgtgtttccttgtttccttcttcaattttcgccaggagttgcgccaacggatcgtccggcttcggtggtgccatcttcgtctgcagccgcgtg

SEQ ID NO: 111207 - DNA, 616 bp, Zea Mays
aaggagcaagtgcacaataaaatcgagttagaggggcgacctatctttggttagcaactcgaacagccgaaatacgtaaacaaaaccacatagcagaatagattatataccttaggttcatgtcccaagagttggagttgggttccatgtccaaatctggcatagcaccacctctccaagggcaatggatcacatatttagagctaacatcacaaaatctattggttcatgcgtccaaaaaacaagggattttagaaatcgaaggaggataacagaaacgaagggaatacaactggaacaccattcttacctcaaatctgctgcctgtgggcttggagaaccaaatgttgagttatgcgtgcttgagtgtccaatcctctgtgcgccgccggggagaactcaacgctcgttcatttttagtccaagcaaacagaggcaagatgaccttatcttgacctaaggacagagctatttttttcccgtgggctggagagctgtaaaagaacaagttgatggattatatgaggctggatggcataacaacagtgagggatcagttgatagtggcaatgcagcgaagccacctttccggggtggggatcttgcaaatttctca

SEQ ID NO: 111208 - DNA, 608 bp, Zea Mays
ttggtttccctagaggttggattgggtcggggaatcaagtcatagtgttctcaagtagagaatttttagtggttccgattcacccccctttggttgcctcaccgatccttcatgaacgactatgtacaattcatcaaatggacgaataagtgtcattatgggaaatcggtggatggtcgtctagccaaccgacacacatgtagtcaagcgatccaatagatgtacaattgtctcctctaaacgcggctctaaccacctaaggcaggcaactctaggcatgccacctatcttgacctgtaagctagggtgagtgtgtgttgataggtgaattgctctatagatgcacaacaacaaataaaacataataattgacttgatccaacagatcggcccatgttggttagaatgacatactcccttgagccaattgttcccttttctaagtgggctaaaatagttaaatcaaacatgcattaggagcgaccaaaaagtagataaacctatctaaagcatgatttagacgatcattagtcctacatcgacagaatccatgcacaacaactcacaagaaatgttgaacctagggatagataaataataaactatgc

SEQ ID NO: 111209 - DNA, 494 bp, Zea Mays
aaataaattagcgttggaaattttagtttgtataagtgatttcggctatagaaatcacttattactagtttcttggttgtgactgtcataaggaggagtagtacttattttagtgggtggggacaaaaaaaacgaaaactaacaaaagcggtgaaacagtagcgacatttacgccaaataaaggaacaaagaggacttgtgctgggagcacagtgaaaggaagcatcacacacacaaacaccacaggccgcagcagatcgatgagaggcggcctgggagagtggactgtggagggctcccatccaatccaatccgaaccaagacccatgcatgtctacaggccagacttgctcgttgcagggggtaagtgcgtgcccccctcgtcgcagacagagagtagtgagagactggagacggtaacagaccaaggccactgttccaagtggaccacgctacatgtatatatccccattccacttccacaccccacacaa

SEQ ID NO: 111210 - DNA, 493 bp, Zea Mays
ctcgtcgttgctttaggaatgacggccgagttacggtgggtcgtgtcggtgttttagagataacgaccaaacggttgctgatgataccggtgttttggaagtaacggccgaatcctttggagctaccttaccgatttagtgatagtggccgagtgatggatgtgacgccggtgttttagaggtaatcagccgagtgactaatggcaatgtcggcgttttagaggtaacaaccgagtgattgacggcaatgtcggcgttttagaggtaacagccgagtgattgacggcaatgtcggcgttttagaggtaacgaccgagtgacttattgtgatgtcggcgttttagaggtaacagccgagtgactgatggtgttgtcggtgttttagaggtaacagccaagttagaacgggccgcgtcggccgttttggaaataacggccgagtgatgacatggcacgccagctttttaggaataactgtcgggtgatgactggg

SEQ ID NO: 111211 - DNA, 841 bp, Zea Mays
ggaatatataaggatatcatcaatgaacaccaccacgaacttgtcgaggtagtccatgaacacactgttcatcaagtacatgaagtaagctggcgcattcgtaaaaccgaatgacataaccgtgaactcatacagtccatacttggtgatgaatgatgtcttcggtatatctgagggtcggattctgagctgatggtagcctgacctcagatctatcttcgagaacacactggctcctctcaactagtcgaataagtcttcaattctgggcaggggtacttgttcttgataataacctcattcaaggctcggtatgcacatcctcttcgtgccatctttcttctccacaaacagcactggggctgcccaaggcgaggtactcggtctaatgtagcccttctctaacaactcatcaatctgcttcttgagttccaccaactctggtccggacactcgataggctctcttggaaataggggtgatgcctggtataagctctatggcaaattcaaccttcctttcaggtggcatacccggtaactcctcgagaaacacatctgggaattctgatactacattgatagcctctgctggtttaatctcttcaatatgggcggtgacttggtgacaacttccttttcttggtctagacaagaccaactccactaacacttcttctcctgataaggacactaacttcaccattctcttatcacatctaagactggcttgatacttggttaaccaattcatccctaggatgacatctatagttgtatcctggttacccataactattaaatcagcggggaactctacccccccttatttgaactcttgc

SEQ ID NO: 111212 - DNA, 307 bp, Zea Mays
gttggactttgttttttaccattacctctaaactattgtttcgagggcatctattgggagctgttggagctactctaaggtctggcctagcacggcgggggcccaatgcttgtataaggcgagtggtcgaccgtccactcccacgtcgaccccacttcccgtatcactccgtcactcgtaaccctaaatccctaatcccctttggtccctccgtgtttggcatctcggccaccgaccttgcccgatgcctcgctcgatgacgactagaggacagatggctctctgtcaccgtcgtcgatagtgctcc

SEQ ID NO: 111213 - DNA, 540 bp, Zea Mays
gtcaggagcacgattgttattaccttgctagcggtgtgacataccttctatgttttgatgaagacggcgacgtaggcgcaaatctctggtggccgcttcatcataattaccttcttcatcaaacactgcatcatcgggaaggcgtggacgaggaggtggtggtggtggtgcttttgttgcgtctccaacacagcaagtctgtcgatgatctgggacaatcatcgatccagcctctcgtaagtcttgccaaggttcatgtcaatgaaggcatcatgcactgacttgtggaccgtctcctccatttgctccttcaggagcttgttgtttgcctcaagatcttggtggctaacacattcatcgaagtctatagggatccttgcttcttcttcgtcgcctgccatcgaaacacaaaaacaggaaacaaacggtgacggttatccctaataatttcactacacactcctctcaggtggaacacagaaacacgctctattgtatcttaccaagctcttacaagtgtctgacgaaatacaagcaaag

SEQ ID NO: 111214 - DNA, 467 bp, Zea Mays
tttcttctctcctctggtagagaccgggtgaccttcaagaatttggggatcttcagctcttaggggttgaactgggttggatgaagcaggatcttggatccatagggctctacgttggttatgggttaccaagtaggcctccatcaacttctggacatgctcatccttggtttgcttcagggcttcaacaacaatgacttcataactttccaaggtagttgcacgggtttgagctgtggtgatatccacatggagcttacagttgcgcttctctgcatcttctgctcgggcaatcatctgacggtggtgccgagccaagaaatcatactgtgcatccagggtgatcagcaggtatgcagtgatgtacacgactgtggggtcgtcctcaagcagctgctgcccttccaatgcacgcatcctggccatccaaataggacggtctctctaaaagggcggaaagaatctga

SEQ ID NO: 111215 - DNA, 1049 bp, Zea Mays
gttggatgaaatattttgtttctgtgatgagttcaagacaccagcggtaatggcatgtagaaccatgtctcctacaaaacgcagcagcaacaacacaggttctattcagcccttcacccgtcagactcggcggaggagctcagaagttggtacacctgagtcatcacatcgcatgacccactcgagtgcaatgaaatatcttagacagaatgatattaaaggcgattctgatcagtatgctatagctaatgaagtacttaaagacgaggcaaatttggatgcattcgcctggctgccagacattaaggaaatgatgggtttcatgctgcgaacctagaacgtaaaggtaagccaggcatctaatgtgttcatgttttaatttttcagctgtatttgttcaaacttactgttctcaaagcaggtgcatggtagcctgaacgcaggggacatgaactcttgagcgcctgcctgctgctaagccaatgtcttgctagcatattttcccctgctgatcctttgctagtatttaggttctgcagttgcagccctcccatactgcagctcataatttgtttattgccgctttctttgttcctttgcattttagtttcattgatgattagtagctcagtgctttggttgatatgcaggccaagcccctgccgccggcatatttgcatttaggccctagcgcgcgtggccgccattgctgtgaagctttgcccccatagcttcttccacacctacgacctatgggtggccgtcgttgcgtccaatcgccattcctttccgtcgctgacaacagctgcctgaaacaacctcaattactgccctccagctctccttcctttttccgcgcatggaagccgaatcttctgcttcttgcatcgctggtagttcctcttcgtggaggtccgacaggcgtcctggttgtgctgctccgcggaggcccatccgaggcatctccgctggcgcatctcgccggactcactcgccttattccaggcgcgtgcgcccgccctcaagcgaccgaccttgtcagtcttcac

SEQ ID NO: 111216 - DNA, 597 bp, Zea Mays
acccagcttccacagatatactcaaatttcacatggggacagttttaaggaccagtcaatgtgtaataaatttttttcaggaaatatattaacactcagttttaattgtgtattgctgcattgtgagaagtagataacatggttttcaagatatcacatgttttattctgttctctgtacgcgtgtagcatattcatgtccaataacaggtaattgctataactaatgtccaattaaagagataaatgctaatatgaccatatctattacttcatcctgtactgctggtacatagttggaaattgcttcatattctactagaaaatgaacatagcatgaagcagatattccagttttatttcctttttgaagtggaattaccagttcaccttaaaattatcgttatttatatattccatttttgttttcagcttgaagtagaataaccagtttgccttaaagttgttgttatttatgtggtgttatcatctgtgctttcactttctttatgccctctatcccagtgtgctccattttctatcaaaccaaaatgattgtattattttatatcccttgcaacgatccaacaactatatg

SEQ ID NO: 111217 - DNA, 492 bp, Zea Mays
aaatttcggaatgttattgcactcataattggtgaataagtttcgttgaaaccaacgtcgggtctttgcgtaaacccttgtgctactagccttgctttgtatctcactacctcaccattttcatttcgtttccgaatgaaaacccacttgtatcccacagggaagatattacgtggtgtaggcattatagccgagaaaacttctcttttgtaaagcgaggctaactccgcttcaattgctgccttccacttgatccaatccgagcgcttagtgcactctgccatggtcttaggatttagatcattttgaaggtcctcagcaattttcttggagaaacatatgtcgacattggtagcttttctatcataggtttcacgggtctcaacatatttgatggcaatttcatcaccccttagagactcatcaaaatttcccaaattgatgtgtctagggttttcctatgtcccagcctcagcaatgtgcacatccgag

SEQ ID NO: 111218 - DNA, 816 bp, Zea Mays
tagagtcattccctttttgcgtccggggtagtctggttacaaaatccatgcctatttcctcccacttccattcgggcactgggagaggttgcagtaggcctgcaggtttctggtgttcgacttttgttcattggcaagtgtcacaccgggccacatactgtgctatctctttcttcatccctctccaccagtatctggttttgaggtctaggtacatcttggtggttcctgggtggatagagtaggccgagttgtgagcttcattgagcaggacttctcgtgcctctccttttggtacacacagacggttcttgaaccaaaggactccttgttcatctgtcctgaggtccggaagttgttctttgcgagctttttccataagtctcgctgtctccgtgtctaggcattgagctttgcatatgaggtcttctagcattggcttgacttttaagctgccgttgtctcccagacatgcattcagctgagctgattccttcttccaatcttctaaaaagttggttccctttatcccaaaaggtttttggctgagggtgtctgctaccacgttggcctttctggggtggtaatggatctcaaggtcataatctttgatcagttccagccatcttcgttgatggaggttgaggtctagctgagtgaagatatacttcagactcttgtgatcggtgaagatgtggtatttgttcccaataaggtattgcctccatatttttagggcatgcactatggctgtcaattccaaatcgtgggtggaataattctgctcatgcggcttgagtaagtgtgatgcataag

SEQ ID NO: 111219 - DNA, 885 bp, Zea Mays
atcctaggagagagcaaagtcttgctctcatttatgaagccaaatagttctgaaagcatcaatgtatttgatatgatttggcgagaaatcatccatgctacctgcttccctctcaagggatgtcttcacgcccccttcatcatgaagatgattgaagtggtgactcagttttgctttgagaaaggaacaagacatctctcctacacccccttctggattgatccaaataatccagcagggcgtctgaggaaagccccctccagctctcgtggacatgctgctgccggtccctcgcgttcctctcctagtcgcggatctcccacaccatgtggtcgtggtcgtggtcgaggtcgtggtcgtgggatgggagctcgactggcccatggtattgcagccttcttttccatgtgcaggaacatatcttccgatgtgcatgagctggcgggacgtcaacgggagactgacgacaaccttcgtcgtcaagcctcttccatgggtatgccatttgctccgcgctcacctgatgtgcctcttcatcctcctccaccaaaatcaatgaatggcactagcaggcctatggggtgccctttatgtcagctgaagatgaagaagaagaggaagaatatttcgatgatcgtgagcagtttgccccgcctccccaccagggggatccgggtcaatcttcttcttatcctccaccccaggatccatcgggcagctatcctcccccagctcagcctggggaagaaaactttgcatctaacttggcgtctcaattctttggcccgcctcctcctctgtggtgatttgtggttgatggtactctccatttttggtgctagttgccaaaaagggggagaaggattgtcagcatggcagcttggc

SEQ ID NO: 111220 - DNA, 336 bp, Zea Mays
caaatattcgtcctttgataaacatcgacaatttctccctcctgaccatccattccgcctagacatcaagaactttacggaaggtgacgtagtgacagaccgcccacctgcaacgatgactggtgccgaaattcgtcaacagatagatgggcttgtggccaatacagaagatggttttgtgggatatggtgagcagcatatgtggacacataagtctggcttgactcggttcccctattatgacgacctgctccttccacacaacattgatgtgatgcacactgaaaagaatgttgccgaggcactatgggcaacaattatggacattcctgataa

SEQ ID NO: 111221 - DNA, 283 bp, Zea Mays
cagccatactggccataaatcccaaaatccctgaaacttggtaacaagcaatcccatgtgtggatataattccaaccatagcagtagaaactaaactagacaccttatccttgagccacaactatgtaatagtgcacttgttgtgtctgtgaatgatgcagatgtgtccagctattgtttatctcatctgtactctgaaatgatctctgcctgtctaggacctttgattcaccatgtgttgtccataccggtgaaccaaagcacatgatagcagtgcattagc

SEQ ID NO: 111222 - DNA, 550 bp, Zea Mays
cgaaatcggccttaggccttctccacgtctttccgccacttggcggcttcatctctaggtttggtctatcacataatgctgccagatccactcttgcctttatgttatcctttgacttatcaggaatgtccataattgttgcccatagtgcctcggcaacattcttttcagtgtgcatcacgtcaatgttttgtggaaggagcatgtcgtcataataggggagctgagtcaagccagacttatgtgtccacatatgctgctcaccatatcccacaaaaccaccttctgtattggccacgagcccatctatctgttgacgaatttcggtagcagtcatcgttgtaggtgggcggtctgtcactacgacacctttcgtaaagttcttgatgtctaggtggaatggatggtcaggagggagaaattgtcgatgtttatcgaaggacgaatatttgccaccctttttcaaccaaatgaacctgagagcttccttgcaaactgggcatgggaacttaccgtgaacacaccaggcgcagaatagcccatacgccgg

SEQ ID NO: 111223 - DNA, 336 bp, Zea Mays
gtcaggactagaccgctagacctaggacgaaaggccttagggatagcgggagaataggtggctaagtaagtaggccctgtgggccagtacttagatttttttaaaggatgccttaggagcaccctttattccggagaggagttgttatttttttcagcatgcatgcattataaaatttgaaggattaagaattaaagaagtaaaaattcaagctaacccacttcttttcaaaccatccaggctcttttattttcttccttccaccataatctttacatttgatacccttccgcagatgaattcacccacccccgccagcggaggagacactcgttt

SEQ ID NO: 111224 - DNA, 699 bp, Zea Mays
cacgatttctatataccattaacatatagaataaacactactattggaggaataattatagcagcatccgaagcgggatccgatttctaattacattcatgaaacctagattatgattccaccttgtcacccggttttgggacccccttgtaatgggtaaggattgagtcgcgaagggctagggggggaggaacacgttctcaagggtggtccggagtcgtgtaaccgcttagcctagtccagcgccctatgccctgcacactccaccatcctaggatggttgttcccgaacctagggcttggcccttagaggcctaaaccttaccctgaccaaggaacatgtctcgagaacctgctcggcaaggttcggaaacaaaatccagaatattgaagcgctcagaacaacgacccgtagatacattgttgagcaccataacaaggttgtgtgtagggacaccctttttgtaggtcactaggcgaggaggcgaactggagctgcgcaaggaagagcggtggcgactgctactcccctcaccaggcgaggcctagcgctgcgacgtatcctgtgacacataaggtggatcaccggggaacccgatatcgacctctgagtacaatgtgcctcagcattaaccgcggacgagacagatacctacccactctagcggtgggcgctacgaccaaagtacacgggtcgca

SEQ ID NO: 111225 - DNA, 548 bp, Zea Mays
gtttccaccacattggcacttaccacatgacctaggtaggacacttggttttggggaaaggagcacttggatagttttactttccattgttccttgtccaacaatgtaaagacctattgcaggtgatagagatgatcttcccatgtgtgactataagccaatatgtcatcaaagaaaacaagaatgcacttccttaatagagaatgtagtgtgtgattcattgcacgctagaatgttccaggtgcaccaatcaatccgaaagccataactcggaattcatcatgacctaagtgggtttgaaatgtcgtattacgctcttctccctcattaagcagaatctgatggaatccagcccgcaaatccaaaattgaaaaccaggaagcccctaatagtccatctagcagttcatcaatcactggtatatgatactttggtttgactataagggcattgaggtggcggtaatcaacacaaaagtgccatgactggtctttttttaaccaagatgacaggggatgaaaatgcacttgtgctgggttgaatcaaac

SEQ ID NO: 111226 - DNA, 996 bp, Zea Mays
gttgaatcttcatctaggcaataagaagccaaggactagaaccagatgctgattgcttttgtaatgttcatgagttgtcctaccagacgaaggccataggaaaagagcaatatcacaataactttggatgttataccttcgtgtaccgatcagatgttaggtatcccatgccaacctttcggaagaaatggccgggctcgtggatgaagcaatggttttatgtgaagaatgacctgagctagagaagcgatgttaaggatgtaatccaatggcctgttcgatcctgcttcgggttaaagaggccagctatcgtgaacacagaaaaatctcaagcctgcctggcagcgttgaacgatgtgtgtggttacattagcactagagacttagtgcaggagcacatttccttcaaggtatggcccctggctgctaagtgggaaatgccaaaagataatggggctggtttgagtcaaagtgctggaagaagtagtctagtatatttgaagtaaccttatcgctacagaaatcaatttggtgagccagacgatgattggtttgatgccatcgaagcaacaagtgatgagttgttaggggcctacaccaaggctgaggatgaagctatgaatgccgcctttggtgcccgaggaagaagcagattaaataaggtttttgatgctattgggttcatttaccatgattactgtttccctacccaaaaaagggggctaaagtgtagcgaaagcttcttttgctgcgctgaagtaggaaaaaagtaaagatcctgactcatcggccaaggtcatattatacggaaagggcattagagttgactgctttgctagttatagagattgtgagtgttttaccttcgaaggtaatgattattattttttaaattcaactttaaactatcctgctggcattcttattaaaccttttgaatttttgggcaggagcaagaggaaatcaagaaatcatctgctgaatcgtctaagactg

SEQ ID NO: 111227 - DNA, 274 bp, Zea Mays
atctctttttctcatcagctttcatgtaaaaccatttatttttccagccagtcggccactttgtatagtagctgaggactggtgccttcgtatccttgcgatatgcaaaattgtaacaaccaaaattttcgtgaagaccatctgccctggcctttgtctgatagtgcaactcatgcacgcggtagaaagcttcggcatccgggctcatcccttggcttcgaagggcccaaataaagacgctgagcctaacaatggcgttaggggtcagctgatg

SEQ ID NO: 111228 - DNA, 430 bp, Zea Mays
aggaggaaggatctgatgagaacgtggctatagaggggagcgatactgtggcagacaaagtaacgtgtgggggatctacgagagggaggcaacgcctcaccttgacaaactgcagatgtgcctcctttgttcgccaggtctaggaacactgaagaagcccgagggcatgtctatggaggtggaggtgatggggattcctagcgaagtagaaggggaggggtggggatgacactacggccagcaccagcgtggtggttcaccctcggattcagtcgaggcgggcacagttgttgcatcgtggagggggaggggagattagggatcctggcgaatcacgactcaaggagtaaaggctagatatctagtaactttcaggtccaaggacccagggaggagaatggctagtacctgttgagagcgtcaagtcggt

SEQ ID NO: 111229 - DNA, 816 bp, Zea Mays
ggctaaagcaatattgagagcagactcgagccccaaaggaggattaaagctcccgcctagggcaacactcaaactttagctccgacaacaagcagcagattcctagcatccgggtcactgatctctaatgtgaccgaaccgacaagagcagtaggaggacttgtcaccacgggttcctcagattgaaccggtggcgatccgacatgaatgtccatggaagcagccaaagaggaaccaagcttggcacccttggggcctaggtcatcctcagcagcacccttgggggttgggttatcctcagcggcaccctctgaaggtgaagcaccctcgatcatacccacagaagctgggtaacattggcctgcaacagcaggagcctacatgttcccacaaactaggccgcccttaaaggttgaagaagtatgagaaactgtccgggttatttcctgcccgactggattactagctaaggggatgtcatccgggacctccgtacggatgacagcaccttcgatttcaggaggatccaataaaagatctttagggataatctcctccagtgcatggtcaatggaagacattgttaacttctagagactaaccagtcctgataaagcctgaattgggacgtcgttgctgctattgctatgactgttcttacgaatcaatgggagaatttcctcatcctcttcatcctcatcaagcacacgtccaccgactttggcaccatcacaattttcaatatcatccttgaggttggcgctcgccgagccatcgccgaggactgagatagtagagtcagcacccagttccaag

SEQ ID NO: 111230 - DNA, 362 bp, Zea Mays
gatttatttgtcatgaaggtttacattttgtttttttgggagaatcatagtttttaacatatggtgcacaattgattcactgcttttaagaaatcacaatcacgtggaggcccctagcttgtatgcttggttccttgatccatcacctgccttgattaacagaaattgccatctgcaatgtagtgacatcttttatacttgaagtattttttgatgtcatttgcctgtcactagctctggttcagaatgtgccctttgagttatatacttcatgtgctggtttctaattagcatgtaactttttctggtgaacttttaaaggtttcctgcacactttttttattcctgagatccactggtgt

SEQ ID NO: 111231 - DNA, 881 bp, Zea Mays
ctcatttccaggagagcgaccagtactctgacatggtccatggtccattggtcagcagtttatagaatcacaaatggagtgtctaggtatgcgacaagagcacaggtatcacattggaatcagtactgaataccaccagaggtaacagcaattagggaggtaaagacaagatggccaaaaaggagaagcatacaggataaatcaaagtttggatatatgaaacacgtgcaaacgtaacaagtaaaccataacaattaaccaaagcacaggaaataacatggagcacgcagaacctgtgacatacctaattcgtagtagcatatttggtggtgcgagcacgtgggcagaaggggaagcacgttgcaaattcctgatcgacaattgtaaataataagaacaagtaaagacataaacaataagaacacatacatgtaaaaaagaaaatacggatagaaccaacaaaaggagggcaaaaaagagacaaagcactattatgcagcagcaaaagcctccattcaggtgacgccgacatcagaagcaactattcccaaactgtaggtaagcaaaggaagttaaactaaggtagcaccaatatgtggtaagggtctatgagaggaagcaaaggacactaaatgatctcagaatatataaccaaaaaagaaccaaatatagacacaaccaggaaaagaagagcagtaaagaggtgaagggcatatgcaggaacacattttgacaaaagggtcccaccaacatcatccgggctgtagcaaggcagggtgttccatagcacaaagaaccacaactataaataagagagacaactaagttccgagcacacttcagttacaagcacgagatactcagcaacggcccgaacgacc

SEQ ID NO: 111232 - DNA, 406 bp, Zea Mays
gtcggtgcatgcaactcaatatgataccaaaagtccaaaaccaaaggtctcgagtttgaatcatagttaggcgaagttaaataaaataattgttgtttgttcctattccacgcctgaggcttgatagagtctcggcgtgagggggacgttagaatacatgtgaattgttcacctctctcgaatagcttaagcttttgggttgagttggtcgatgcatgcaactcaatattgatgacgtagacacgtcgagtcatcatcaagagggcaatgacgaagttgatgcaatcaaggccctcgtggatgtagaagaaaggcagcgatgcaatcaaggcagacatggtgagaatgggagggttgacacagtcaagccgcctgagccgaagcgcatgctagggttgccagtcct

SEQ ID NO: 111233 - DNA, 955 bp, Zea Mays
acatgactatgaactcataatgcccatatctggtgccaaaagcggtcttcccagtatcctcctcacgaatcctcaattgatgataaccagagttcaaatcaattttggagaacacctgggaacccctcaactgttcaaagagaacctcaatacgggggagtgcatatttattcttgattgtcacttgattcaaagcgcgataatccacacatagccgcttgcttttatccttcttctcaacaaacaatactagggaagcccatggagacctgataggcctaatgaaacccttagccagcagatcatccaattgccacatcaattcaacctgctcctttggggccattcgatacggggccttatgaatgggctgcgtacccggaattagcttaatctcaaaagctgcatcgcgctctggaggaatgcctggaatctctgccggaaacacgtcagcaaagtcacacaccacccggatgtcctgcacccgcaaggcagcctcaccctccaccaccatggagaaaaagattcccgacttccttgactggtgatccagaagcaattgcgccaacaaggataacgtgaactttggggaacttcccaagaataccacctccctacccgacggtgcctgcaataacactgtcttccaaaaacaggatataactgcgtgatactgggataaccaatccatacccaagataacattgaatgcccccaaggaaatcacaaccagattggctgaaaagacctcatcagcaagaatgacggaacatccctgacaagctgaacagctactaatggagccattagcagaactaaccaaaattgggtgacccaacctctgcaccgaaagaccagcccgcgacacaaaatcctccaaaacaaacgaatagctagcgccagagtcaaaaagagcatgggccacaaacaaatcaactgaaatcgtacctgtcac

SEQ ID NO: 111234 - DNA, 455 bp, Zea Mays
ctctggactgggcctcaaatactgtgaagcgtaggggctctggtgaaaaagagtccaaggctcaggctatcactggactggaccgcgggttaattgcctaaaaacttaaggtctcttctgcaaaatgtgcaagccgaaggggtacgggaggatcgtggccccctgattagatttaaatggcccggattaaatcgtgactcaagtgaacctatgtgcgatctcaacctctggatcccccatcaacggagtaggtttgaagtgactaaatctgctctaggtcacccgatcacggatcgacggctacgattcaactgaacgaaggggtatgatataatctaatctcagtcgtccgagaaccgatcgacggcgccaggtccatcttctacccccagcgcgacagagcggtggcgcggcatagaccgcgatggccgtcatgggcgagcccgactaattcg

SEQ ID NO: 111235 - DNA, 738 bp, Zea Mays
tgcagtgctagtaagaaccttgtaagagcggggtaagacactttataagttgtgttccaccaccacccctaatagtagttataggttttatactgcttgtttgttgcctttgttttgtttttactaacaattacagttccaaagaccaaaacgaacaaggacaagagccctaagcctactaatgatgagtgtgtctcccaactggaattgaaggagatgatgtgtgtgatgagtaaagctttcaacaagtactaggattctgcagtgacatcatatgatcggcttgatcgatatgtttctagacttgttacatgtatggacgcgctagaggctcgtcccccataagctccagccacaccagctgtcgatgtagtagtgttctttcatgtggaggacgatgacgacaacgctgatgttgatgcaccactgcaaagatgccttgcacataatcgacaagatatgggaggtaatggtagatgtcgtcatcatattcctgaacccagacaatgatccacatgctaagattaagttctccattccattgttcattagttcttatgatgctaaagcttacttagactaggagattaagttctctattccactattcattgatccatatgctaaaatttaattcccatcttgttcttgagcggcatagggttagacaagcattaagtgagtttaaagattttgctatcatttggtggaatgaatttgttgacacatatgttgcac

SEQ ID NO: 111236 - DNA, 680 bp, Zea Mays
aagagaaaccttgtccaactccacatatgacaaatcacatttgcctcctacatactcaagcttcccttgatttatcacaaatcccccactatgatggaacctaattgacaaatgatccaacctacatttcataaggaaatgttaatacacttcctaaatcatgcagaccttggactacagctacgtcgtcatccatccacccacaagatatggaccttcccccaaaaacaatctgccaactccaaaactaccagcgacatggacaagtgggtactcacctctcgctcatgatgcaaagtgatcagacgagcagcgtccgatcatgtactcatcgatcgcctcatcggagatggtgaaggcggaagtgcggaggctccgagggcgctaggcagtcgaacaacagaaggatggacgggctctccagcttccaacccaaacccacctgtaggtacttgacatggggccgatgaggactgacaagcgggccatagggccaggctggacgagcgcgccacctaggagccacgttgggtgcccagtaagcaaaacagcctcctaataccgccttgaggggtaatatgtaccgacatacaaagtttaatgtgtggaatacctggttttccaggtcggggggttaagtatcccacccttcaaacgccagggggttaagtagacttttt

SEQ ID NO: 111237 - DNA, 453 bp, Zea Mays
gacagatatcacccgtgtccactagaaggctagaaggcctcgtgaaagactttgggcccattacttcacaaggccatcggccaagggaggaaccgctggcggaatggattgacgcaagattggatagactcgagcccagacggctcattgggtttaagcattatccacagcgttgattcgattctcccgcgcagtgccctcagacaatggaactaaatgaggataagtcggcaggattataggaagataagtttagtcggttcactattactaatgtgcacgttgttatcatacccacatgtaacgccccacagtcgagtatataaagcctagagggcaccccatcaaaagacaggtcactcattatccatctactccattctttagcatcctccataatagagaatccccctgtaacccactacacaaagatccacaccaagaagtagggtg

SEQ ID NO: 111238 - DNA, 678 bp, Zea Mays
ctttttcttgggttagcaaggattaccaaacgagctctattttcttcgattgaaaggcaagttctgctattatgaccatctgcaactccgcacttcttgccccgttcatcttttttctcctttgccacctaattttgcagtccttacctcatcgtttctaattgttcttccttttggtttcacatttattggtttatccatacttactcctccaatgttaaaatctagcttctgcataataaattaaacacatacacgtcagttgtgccctttaacacattagttgttattgatacagtattgtattttcgttcattaccttcctagactgtttgttcatttcgcaaccaccccatccttctatcccaatgcctcccaccatttttcttatgccaacgacatcttgtcaacatattagagtgtcgtaatttattatgctatttaacataaatacaattcttatgatgcataaactcttacatgttcaactcttactaaagcatttgatgcaccaggctcacacccagttttatcacccacgatttcatcaccaatgtcctgcaacacagacttattctaatacaataaacattaccagcaatgttacaataaaaatttattcaaattagtgatgtaacacataattttcttacattttgatcaaattgttcagtttgg

SEQ ID NO: 111239 - DNA, 347 bp, Zea Mays
agtgttagttctgcaggagaggtgcttgagacaaggaaaagtagggagtcaaaatcatgatgaatgttgtcatcttgaaacataactaagttaaaaacattgtcatggtagccttttttgccgtgatagaaaccatcaaatgcatgaaattctttcagtcgattgaaaaactcttgtctaaacttatgtcagtgattttcttttaaatcataagcatgaagtgcatcattttacattttactgtcctgacaaagcaaagcactagcactggtctgacatcatccaagcacgccataaaattactatttctaactttggttatctgtacacttatggttggaagcgat

SEQ ID NO: 111240 - DNA, 576 bp, Zea Mays
aaaagaccagataggcaagagccgagacaacatcaaaaccacaccaactatatcactgaattggcacaagtatgcagacaaaaaaagttgatcacattgttctagaatctaaaatttaggaataagattacatggctggtcattaagtagtgagaattaaagaataacataaggtatatatactagacaacgtctgattagttcataagcaagtatttccattttaaccaatatatctttgttgtcaatttcagcaggcttagcatcaataactacaattgcttcctcaaaatataactttataaagagaggattaaaaaaagaccccacagggttacggcgcgccggcttgagcacgacgtcgagcatcttgcacatgtcttccccgccactgcctacgtgaccgcaaggcgaaggttgattaaggcattggataggccgattcatggaaccgaaggagacgagaccgggggcgtagttgtggcgacgacggtggtagacgaggacaacagtggtgagggagggtgacacgagtgattgctcgaaggtggccttgaggactactaaggaggaggc

SEQ ID NO: 111241 - DNA, 337 bp, Zea Mays
ccttcatgcactttagcctctgaggcttcaagaagcttgtagaactctctcacatcctctggaaaagcttgattattttgtagttctgggtactcattcctaatatcatccaacatctcttccattcggtctacatcctggtccccatctgactcaatagtatggtccacctctccatgctcatgccataccagatagttcagcataaagccatgtttgaaaacatgatacgagagctccacttttttcaaccgaaccaagttccgacattttatacacgggcacctcgctaaacgagcatcaccagcaaatgcgagtgccacaaattcatctgcaa

SEQ ID NO: 111242 - DNA, 1192 bp, Zea Mays
ttggtgttggaaagtgagataggttaatttagaaaggtgggttattaaacatgtgtgccgaagtgcgttgtagtagtgattgcgtaagttgaaccgaagtgtcccaagtacatgctaggatatggttgtatttgagatatttattcgaggtgcgcaggtatatgccgtaatatggttatactcgcggcgaggaaatatgtatgtattgtgtaacacgacgtttaggtcgctattatataatcgtgtgaaggatgctcgtgatggttatgtgattaaggagtgatgtagtggcaggcgagaagtaagtttaattttcaaacgattcgtgggtagtatctcgatgttgtcatgatttttgtggtatggcaatgtgatgcttcgctttgtcaatcatcacattccatgcccctttggataaataaatgtcttgttgatcgattagaggtcttatacgagtgttatcccagcccaataattattgggggcaagtagcgttcatgagtcaatccttgctaaaattgaagaacagtccgataacatatgcacataagtgctttaggtcttcagtagccagtgtaagtcttatggagttttatgccatgttttaatgtctctatgttagacctcctaaaatatggtgttttaagtgacttacgtgttaactaattcgagtggagaaatggttaagaaaaactaattaacttgctcccacctatgtttttgagttgcgaagtctaaaatacttgctaagttttatactggttaaccaacttgttagatgactttagttaagctcgtggtcacgatgatttgcttgttgtagtctaaatacgtatggttatgttcgcgaatgaaaagtattagtgctcatgtgaggtctaagttaaaatacaaagtattgtgtgaacaacacttcgatatcgattatcggggagaatgtgttgttattaaatatagtacttctagggctcataatgacacggataaaaattagtaagtccacttgttagttctcacttggttattttaactctaacaaatgtcaaagtgttacaataattcaagtctctaaaacgcggcaattcttgaattgtatagaagctgaaatgtattgattgctgttttgggctgcacgtactgttttagttgtgctgtatgtttgatgaaccaaattgtgttttctgtagatatg

SEQ ID NO: 111243 - DNA, 362 bp, Zea Mays
cttgatcatcccatggtggttgcatgtaaccctagactattccagtctgcgaacgtaggggcatgatgtcacctatctcgtgatgcctctgaagaagatgaacactcgatcgaactccacacctccaatcgagacagcgaaggcatcctttaccaacaacactaagaaaaccacagtcaccttggctgaccaaacctctacatctcctatgcaggcaccacctaccatcgccacctagctagcaaaagaaatatcccttcccctgtcacaaagagctagtcacttaccccactaaaggactgaaatggcgaatagaggggttgaatgggagccattaaatttctccaactagagagcacatg

SEQ ID NO: 111244 - DNA, 365 bp, Zea Mays
aaccgtggaaaggtgaaccacctagaggctgaagcaatccaggatgctcaggacgtggcagtaggtatgtttccagtcgaatcctacccaccaaaagtactatttgatactggtgccacacattcttttgtttctacatcttgggtagaatcacataacatccccatagaaccaatgatcccacctttaagagttaattcagttgggggaaaagttcagtccgataggatttttccgaatctaaggattgaaataagtgggatagacttccccactagcctagtagtcatgggaactcaagggttagatgtcatcctagggatgaattggctacacagaaatcaagccactgttagttgtgataa

SEQ ID NO: 111245 - DNA, 353 bp, Zea Mays
gaacatggtttagaaatatggatagggccaaggggaatcataaaaaggacaaggaaatgattacacactatcgatccaagaaagaaagataagactatcagtatccataaatcttagactttgaaggtgagcctccttcttgaaatctatttttcggctactgatagtggcggctgagttttcaaagatcttttttgttcctggttttccacatcacccaaagggcaataaggcaagtttcgaggaaaaaacttgtgagggaggattttgttggcatggattatcctctggtgaattgggatggaacagtcctagaaaatgatgataatgttccaacatccagcagcaaagtc

SEQ ID NO: 111246 - DNA, 447 bp, Zea Mays
cacatggtggaattctaatccttcgaatttgtcctccagcttccgtaccgctgcgcaatatttgttcattgagttagttgtacaatcccagtctttgtttacttggcttatgaccaccagtgagtcaccatacaccattaatctcttgatgccgagtgaaacagcgatgcttagtccatggactagtgcttcatactctaccacattgttggatgctggaaacaggagctggagtgcatacttgagttgctcacctctaggagcaataaagagagtccctgcccctgctccttgcagtctcagtgagccatcaaagtacattctccatatttcagcaacttctaggctttccgggacctggtgctccgtccactctgatacgaagtcgaccagtgcctgagtctttatcgccgtgcgagttcggaactctatatcatgagctccgag

SEQ ID NO: 111247 - DNA, 677 bp, Zea Mays
aggtggatcagagggaggatgtgagaggcgttatccaacgtcctatatggtcacgcttcggcattagaaggccatccatcgcacttgggaatgaagtgcatgcgtgccaaattgctttcaacaccatatgcacctatatcggcacgagagatttagttctagagcacatttcttataaagtatggcctcttgccaacgaatgggaaatgccaaaggaagccaccgctggctccaaccagagtggcttagtttatctgaagtacacttttcggtatagaagtcaatttgatgagccaaatgatgattggctagatgctatatagacaatgagcaatgaactacttggagcgtactcgaggacggaagatgaagctacaacaattgccttcggcgctcgtgggaaaaagaggctgaatagggtgttcgatgttattgggtttgtttacctagattaccgcttccccgtccaaaagcaagggagaaaaaggaaagtcgttgcttcaacatcttctgatgcgccgaaggcgaagaaagtcaaggtattgacacgtagaccgaagcccattcggacgcccgatgagccagagttacttgaacaagcagaaactgcccccctagccatagagatggctcctgtgatgtcgattgaagctagtgcagacccggtcgaagagctg

SEQ ID NO: 111248 - DNA, 331 bp, Zea Mays
ccagggggtatctcatgtgatccttttgggcaggacgacattgttcaccatgacttgatggtatgtgcagaagcacgtcggaacacaagagagttatacaagtttgggccaccaaaatgtgtaataccctacgtcatgttggtgctgagtattgagtttgatgatggtgtttgggttacaaatgagtagtggatggcggttggtgaattctctctatcaatctaatgatgtcgaggttagtactagagggatggtgagatgagatcgttttgtaggagtaacccctcagccttatataggttatcggagggatatccctttacaagttgtg

SEQ ID NO: 111249 - DNA, 825 bp, Zea Mays
ctgggggacaacaccagcttgttggcggcgtaagtctggagcttcgtcgcgggaggaaagcagagtacctcgacattctcctcaaggacagcattaaggggtggcgtctcgagtggttcattgtggagaaccactacaaatcactccccctcggtcagggaggcagccagatgtccgcacacagagctggatagaatctccgaccccttcggagataacagaggctaaagtactgcttgccgaggtctgcttgttgaaggatagaggtctgaccgctgaagctgtggttgctaatttcgttttcaagaacatttagcctttgaaggacagagcctaccctgcttatttgtacagtggtgtcaacgattctacccgggtcatgaacagaaaaattcccactaaagatctgatgagctgactggacatgatcctaaggggtagagtttcaaatgctagtgctccggtggcctattctgcatggaacctgccaccacttaggccattttctgagtttgtgtccaaccctcctgcttgtgacggtagcttgggccttagagtgcgaccctcttctgaggacattgaggctttgattgctccacttcggagtcttctagaggatgaaaagcagactcattttgagatgtcggctagcactgatgacgcggagatagatgttgtgcttagcttgctggctggggaatcatccgactcaacccacactgagccaatggctatcatagctgggcaagaacttggtgaagaagtggagagtcagaaacccgaaggcgcccgcccaaagcgtccacgccgagtgagtcgtccgac

SEQ ID NO: 111250 - DNA, 439 bp, Zea Mays
cgggacaatgtggtctaaaaagaattaagaagtgcactatggttcatatatgcttgatatcacagtagtaaaaaacatgctctaggcactcgatgaatgaagatctttgttattgtaatttggttcataaaacatgatgtgatgtaataagcatgttaaaacagtaaatcatgcaattttccaaggcaacaatgactttggacttgaaccaaccgttaacatggatgtgcatgcaaggaagagagagagcaaacaaaggtgggtgtcactgaacttttgtgaatattggtcttcagtctagtgacatggcgatggactccttagctcctaacctcgtccggtcgtctccccttcccagccttctctccaccagcccctcgtcaatagccaccccggttctgccgaccatcatcagattccaccacctcgatgacaagac

SEQ ID NO: 111251 - DNA, 496 bp, Zea Mays
cctccgtcggtgagcttctcgcggaggaggttcttccccgggtatggttggctcgtcatcggagatgggagatgattctactcttcccccgatgaagaggacatcggggtagaaaagagttgttgtggtgacaagcttctttctgtcctcctttgagggcgaaggcgccagaagagcagcttgacgggcctctatcccgtttgcttcttttttcctcgtaatccatgtccactcttccgtggacgaggtggacaacggggttcttcgggtaaatgaattctctgctcctgacttgcaagaggtagtcttcgcccggggcgctggaggttgcgctatttgctgcctcgttccggctttttcggagattttcgaggaaggcttcttctccggtggatccgctgtacgatgcagaattccttccttgtctgccacggacgaaatggtcccgaagcagaacacggatccagggcggagagcaatcttgtgttggaaaatg

SEQ ID NO: 111252 - DNA, 427 bp, Zea Mays
catttttaaacatagaaaggagcactatgtttcttatgacctactaattagaacaattatctttaggagcttaattttccaaatatattacctggggatcatccttgttttggaacaacatagaatgcattggcttgtactgtttgaagttaataaagccttctcttcactgaaatacatcttttaactgttagacattgcaatgatatcccatgattagatacagtcatgtaaaacacacatctagaagcccttcagtaaatactgccattttctttaccttcaaattttatatattgttgactcttgccacttgttaccttatttttctggggggtgaacaagagatagaagaacttatggtcggacttgaaacctacctggtaagcaacattaagccccttcccgtctgcctccatgacgtttg

SEQ ID NO: 111253 - DNA, 294 bp, Zea Mays
aattagtcggaggataacggttcggctaggggactctatgctgtccgatttaatcgggtcgatggagtgagatctggcattataaaaatattgaccgtggatctcagatccaaaggccaatagcgcgtaccggttcattatgagtaaaatctaatatgtgtcgttgatgagcgatctagcgaccgagatccaccaataccctttcggccgaatagttatgcaaaagagaccctcagttttatttaaatgaacccaccatccctcccttcaccaagatcatctcaacaggcccag

SEQ ID NO: 111254 - DNA, 363 bp, Zea Mays
aaaaaataggaggcatgtatcagtttaaaaatcattcgacattggtgacataacacagacgtaaatgaaggggtgaaaggaatgtggaaccctagctttagctgggcagtaaaaatgaggatgcataaaaacaaagaaatcatatttaagccgcacctgaaaggagacattggtcagtagtcggtgcgtgctctggtcgagttctgagagaagacgctagcaaaatcctgacaaactgcacaactaaaaatgccagggccaaattgtcggtgaattttctgaacatggaactactagaatatgctaggacctaggaattaactcccgagactagctacacacaagaaaaaaatcactcttgga

SEQ ID NO: 111255 - DNA, 418 bp, Zea Mays
tttataactcctgacatcatggaagtttcacatatgatcacagaagtaatttccggtttttatctctaacgcccactctattctcatttctcaaagataaaagcttcatcctatcattcattcatcttcttcgattcgcttccattctacttttgttattggccaaattctccccattctagctcttacatgcacgagtactaggaggcagacctccaaaacgggtgtcgttcaagatttcacctgcttagttgaaggccgacaaacacacttttagggagtgttcgtaaggagcatgactactcgctagtcgctttgtcctctccttcccaacgaatcactagtgatcaggcatgactacccctctacactgcacagagcaaaacaggtacaactataggcactatgtcgactagtg

SEQ ID NO: 111256 - DNA, 1768 bp, Zea Mays
gacgataacaagagttcaaatcaatcttagagaataactgggcacctgtcagctgttcaaagagaacatcaattcgaggtagcagatatttattcttgatcgtcacttgatttaaagcacaataatccaaaaataatctcttgcttttatccttcttctcaacaaataataccagaaaagcccatggtgacctgctaggcctaatgaaaccattagcaagaaaatcgtccaattgccgcttcaactcaacctgctcctttggagccatctaatatggggccttatgaataggctgcgtacccggaatcagcttaatttcgaaagccacatcgcgctctggtggaatgcctggtagctctgctgggaacacgtcggcataatcacacaccacacggatgtcctacactcgtaaggcagcctcactctccaccatcatagaaaaaagaattcctgacttccttgtccgacgatccagaagtaattgggacaacaaggaaagagtgtactttggagtgcttcccaagaataccacctccctacccgacgacccctgcaaagacactgtcttccaaaaacaggatttgattgcgcgatattgagttaaccaatctgtaccccaaataacatcaaatgactcaagggaaatcaccacgagattagccgaaaaggtctcatcagcaagaacgatggagcgacccgggcagactgaacaactacttatggagcccttagtagaactaaccacaattgggtgacccatcctttgtatcgaaagatcggcacatggcacaaaattctccgaaacaaacgaaaaactagcactagagtcaaaaatagcatgtgcatcaaacgaatcaactaagaccgtacctgtcaccacatctccatgatctctgtcatccgtagagggtagcacatatgctctaggaacacccgcagaagaggaagcacctggagtgaaattaatagaagaggaaccccaaggagtcacaggctgaggcagacgaggagctccaaactgaggtggtcaaggagcggtcggtgcaggagtaggcactaccaagtattgaggaaaacctggaataggcaagtactgaggagtcccgggtatataaaattgctgctgaggggtggtacagaaaattgttgctcagtggttgccatcatgttgacagtgccctacgaagaggaagaagtcactggctcccatttaagtttcccatttggattcctcctacacaccacatccttgttatcttggttgcaaatagagcacatgccactccagtgacactcagcatgacaatccgcttcaccgcaacgaaaacataccaaccccaacccaggcttaggtacagcccgatacctctgagtactcccacctgaagtacccgattcagaggacttgccacgataggggtggtggcactggtgtggaaactttcccttctagtgggctaaaccctcaaggtagcccctccccgcagcctggccacgaggctggtcaacactggaagtcttctgggactcatttgtatactgatgttgcatctccacgcccaaagcctgctccacagtagttcgaaaatccaccagcggaaaggcgcccaaagcatgcctggtagaaggtctcaggccctgacgaatctggctcgccttttctaactcattgtaggccacatgtggaacaaagtggaccatcttgttaaagcccacttcatactcagtaaccgtctttttctcctgcttgaatgattgcaagtctatc

SEQ ID NO: 111257 - DNA, 431 bp, Zea Mays
atttcacctatttgtcatcatgtgaacaccatattcaaaagcaaataattaataaaagaatatatgccattgaaagtatgcatcatgctggatattatttttgtggagtgcattttgtggctatacaaataaaataaaataaagagaatactagtacctagatgagaatttaagatttaaaggggatcctagaatttagaaaagagaagaaatgaatattatgaggagaaaaataagtaagtgaaaatatattgtgccttaactagagtacaggttcacaacactgtttggattcaaaatttgaatggaaatttaaatcatgaatttggaagacaaaataggaaaagggaaataaaataaaaagggaaaacctgcagctgggccaacttcatgccattcggcccatctaccaattgcctacgcgcagccca

SEQ ID NO: 111258 - DNA, 322 bp, Zea Mays
aacagcaaacaaacggtgatggttatccctaataatttcactacacgctcctctcaggtgcaacacaggaacacgctctaaggtatcttaccaagctcttacaagtgtctgacgaaatacaagcaaaggatggtacaatcggaggctggttcgggatacttaccaagagggagtgaaaccgcgattgcaaggtcaaagctgtattgatcagaagaaagtatgtggagcttgggaggccaaaaattaatatcaaggattagcaaaaatcgagtgcagattagcgaagttcaataagtgtccaaagcacaagtcacaattgctg

SEQ ID NO: 111259 - DNA, 936 bp, Zea Mays
atggtggtcacccttagttaagtaagcgcgagcatgtcgaactgtcttaagtcatcgccgacttaagccgattgctccattaatagggtttagtggtcaccctgagttaagtaagcgtgagcatgttgcaccgaattaagtcattgccgacttaagccgattgctctgttagtggggtatagtggtcaccgtgagtcaagtaagcgtgagcatgttgcaccgtcttaagtcattgccgacttaagccgattgctccgttagtagggtatagtggtcaccctgagttaagtaagcgtgagcatgttgcaccgtcttaagtcattgccgacttaagctgattgctccgttagtagggtatagtggtcaccctgagttaagtaagcgtcagcatgttgcgccgtcttaagtcattgccaacttaagccgattgctccattagtagggtatagtggtcaccctgagttgagtaagaacgcaagacgaataattcccgaagccttttttattgatgatgcatttcccggtttacagagtacattgccgccccaatagctttttgaatatggttaaggataaaacttcctgagatgttctatattccatgagttcccgacttccgtgccatccatctgtgtgagtcgatatgatccaggccgagtgacttcagccacaatgaatggtccttcccatagaggtgacaatttgtgccgcccctcccccgttagaattcggcggaggatgaggtctcccaatgcgaaggatcgacgccgtatggccttatcgtgatagcgcctcagagtttgctgataccgtgctgattgaatcaccgtgtttagtcgttcttcttcgagtatgtcgacatcctccaacctagtagcctcagctcctgctatgttttcaaagatcaaccttggtgctccaaactttagatcagca

SEQ ID NO: 111260 - DNA, 438 bp, Zea Mays
attgcttgcgagattctcccacttgactgccgagactggccaagggaatgcaatccaccaaatgacggcagctgacaacgacacggtttgaaaaaaaaaaggagcgaaaggagcttcttggatggcaacgccggttactgatggtggatgaaatgaaacgagagccgtcattcgggagaaaagaaaatcacgctgtgccaaaaagaagtcgacgagctgtcacgggcccaactgtttgatcgcgatagctcttttgcctgtgtgttggtgcctggtggtcctcaccttgtcccaaatttctttttagcgatttgtacgctctgacaacgacgccttcgctctagtttatcttacactatcaggcgccggctgtcatgggcacacaagtcaccaatgtccactggctgattagaatacgtagcagagcaaacttctcct

SEQ ID NO: 111261 - DNA, 552 bp, Zea Mays
ccggacactcgataggctctcttggaaataggggcagtgcctgggataagctctatggcaaattcaactttcttttcaggtggcatgcctggtaactcctcagggaacatgtcggggaattccgtcacaattctaatatcctcgattgggttggcctccttgtcatctactgacaaatagtgataggctccttttctagttcaggcaagtacaacttagttactacttcctttccggatggggacaccaacttgactattctcttgtcacaactgatggtggcttggttcttgtatagccaattcatccctaggatgacatctaacccttgagtacccattactactaggttagcggggaagtctatcccccttatttcaatccttagattcggacaaatcctatcggactgaactttcccccaactgaattaactcttaaaggtgaaaacattgattctatggggatgttacgtgcttctacccatgatgtagaaacaaaagaatgtgtggcaccagtgtcaaataatacttttgctggataggattcaac

SEQ ID NO: 111262 - DNA, 512 bp, Zea Mays
cccggaggcggtaggcgtggttttatccgaagccatctgccatgggaagagagtcactatcatgcacatgccatttttttaactagttattttattcattacatcaagccattacaatacaacacactgctaccataagttcatcacacacgagtgctatctagggtactcccgaactccttctctaaagtgtccccaaattccttgagaaggtcatcaaggctggccagggacatctcctcggtgtcggacgagtcccttaacccggcagggggtagggttggagggttttcttccttctgctcagtctgacatccttggcttttggtcttcttgcggatttttcttgcgggggcgagcttcttcagtttcttgtcatagtccatttttagggtgcggtaagcttcacaggtattggtttcttcgccttcagctattgaaaggctctcttgaagggacaccttttcccctgaaagttccctgactttttgctccaggctttccacccggga

SEQ ID NO: 111263 - DNA, 376 bp, Zea Mays
aacttggtcatgccttcgaccctgctcacaccacaaagttccgcaaccagtgtgcaagataaggtgtgcatcccataaacttccaaatttatgctgcaaacagtacaccgtctgttactgaccccttctatgcagacttttggtattggcagcagcactgtggttccaggtgctactcccgctataacaaaagaactgacatccacgcctaggaagaggtaaattccgcttcatcgcaccccaacacagctttattacaggccttcatggttcatacaaacaaaaaatgtaactgataatgattagtgtgcatatactcaatttgctcgtatctgaaatatgtgattcacatacatccgattcgcaaggatgaatc

SEQ ID NO: 111264 - DNA, 365 bp, Zea Mays
gcaggatgcagtccgcaatctagttgattcctcgcgagctgatatcgtgtgtttacaagaaacaaaaatggctgatctgtctcgaggggttattctctcttcgctaggctctgactttgatatggttgtcaccctgctggcggttgggagtgctggtggagttctgattgcctggcgacatcatattggttactctggagtccacagagtggattccttcagcgtctctgtccagtttcacttttctgctgatcacgtttggtggctcacctgtgtttatggcctctaggccaatgaaggcaaactgttatttctgcaagagttgagatcaatcagacatgagtgtctggggccatggatcatct

SEQ ID NO: 111265 - DNA, 707 bp, Zea Mays
atgagaaggcctggtgttgtggtgcctgaggacatcattgccgatgttctcactgcacctgctggcatgagcaaaccttcttcctctgctactcctgctagtgaggttccctacaaaaatgctcttgcatagtgatttgttcgaatgagaaaatactttttcattgagttagtattcttgagacagtgtatcatggatttcatgcgcgtgcgaccgcgctacgcttgaactgattgttctgttagccgggcgttgagaccaccctcaaatatgtgagcatgttgttttactttgaggcattcctgatttgagctgactgcttcgttagtagggtatagtaatcacccctattcatgtaagcatgagcatgtcgcaccaacttaaggcttttccgacttaagccaattgctccggttgggtatagtgatcaccctaagtcgtgtaagcgtgagcatgtcgcaccgacttaaggtgtttccgaattaagtcgattgctccgttagtagggtatagtgatcaccctaagtcgtgtgagcgtgagcatgtcgcaccgactcaagtcgtttccgacttaagctgattgctccgttagtagggtatattgatcaccctaagtcgtgtgagcgtgagcatgtcgcaccgacttaaggcgtttccgacttaagctgattgctccgttagtagggtatagtgatcaccctaagtcg

SEQ ID NO: 111266 - DNA, 464 bp, Zea Mays
taatgtgagacgccatgtccccacgttttggaagaaatggccatgatcttggatgaggcaatggttttgtgttaagaatgatttggttgagagggaggatgcaaaagatataattcagcgtccaattcaatcacgcttcggcattcgaaggccctcgatcataaatagtgataaggctcaagcctgcatgatagccttcaacactgtgtgcagctacattgacaccagagacttggtccaggagcacattgctttcaaggtatggcctcttgttaatggatgggagatgtcgaaggagaccaccgatagttcaagcgaaggtggtctaatttatttgaaatatacatatcgctacagaagtcagttcgtggagccagatgacgaatggctcgaggccattgaggcaaccattgatgatttgttgggggcttatacgaaagacgaagatgaagccaagaaaatcg

SEQ ID NO: 111267 - DNA, 433 bp, Zea Mays
gcaccgtcgtgctcgtgccccggcgttgtgtgccggcggtcgaaggagcaagatgagagagagatgcgagggctgtccatggccgttgatctggccggggccggctgagatcaagtcgagggataatgattcagcgttcggaatctcgaccgtccgatcgtggtggggtgtgtgagattagatcgtgaagtaatgaacccgagtcgttggatattgatgggtggtccagattaaatccagccatacccttcacctcgtcgcttactaaccattgatcctagaataggcggtggagattagtgtgaggataacgtttcgactcgattgcaatatgaccgttagatctagatctgagggatgttatcgcgtacccgttcatatttgtggcgttatgatctgggccattggttcagatctgacgatcaatatccac

SEQ ID NO: 111268 - DNA, 662 bp, Zea Mays
caagaatatctcttactaattaaaattagggccagggaattttcatactttgtttttgtgctagtagagtaggaaagtcatacaggaaaaatctaaatggttaagaaaagatatttaaagcagcaaaaagagtttcaacaagaataaatttgggcactagtattgataacagtatcttctcttttcttgctgtgcatatgaaaatgctaggtaaatcaatcacaagaagaaaaaaaactgagtttttgtttacatcatggacaatgtcctagcctagcataaatgttgacttgccacctaaaatgacctgaacacactttggttcagcatatgtatcacctgcttacatactacggagcgtagcttccttcactaaatgacactgtgattctctagattacgggtacaggccgagggtatgcacactggtcatgcttatactggtctaaacccatttccgactgggtcaaagaagatgaccggactaatgctgcatgaccactgaccaagggcggacttagcataagccacagggattcaaatgcatcctagttttttttcctggaagaggaaagctatcaagtgatatacaatgcccaggagcagggtcaaaggcgacgattgaactaaagactatcctggtgtagtagactcagaaggcg

SEQ ID NO: 111269 - DNA, 539 bp, Zea Mays
tttaagtcgcggatccgtcatgaggactctgaactctccttaaaaataacattatcttcccttggagtttttttctctctctctatctctcgacgttttcgcctcttttctgaacttgaggaaagaacaatgtatgattatgctcatgcatgattcaaacaggtcagagattggctgctgccagcgggagcatgtggctgatctaaaattagcgctggaaagacgagcgtcgtgagaaaaaaggaatctggctttgattggagaaaacgctttccggtggtggtggcactcgttttggagctgcttactggtgaggctagctaagctgaacgtaattccgaaccaattcctctcctgccaataattgttctccttaatcctatttgtagttcacttgcctgcatatttaaattgccgttcgttgggggcagattcatctgtgcaccgtgcgtgtcatataagaaaaggcaggaaccgaatgcaatctttcagacctcagaagtgcatgtgaaaagtctgcagtcatagtggctcaagaa

SEQ ID NO: 111270 - DNA, 479 bp, Zea Mays
cagcttgtcggcgcaagtttagagcttcaccgggggaggaaagtggagtatcttgatattcccctcaaggacagcattaaaggatggcgtcttgagtggtttatcatggaaaatcattgcaaatctctccccctcagttagggaggcaactagatgttcgcactcctagctgggttgaatctcctaccttttcagagataactgaggccaaagtgctacttgctgaaatcttcttattgaaggataggggtctgactgctgaggctgtggttgctgactttgttttcaagaacattcaacccttgaaggacagagtttatcccgcctatttatatatcggcatcaatgattccacctgagtcacaaatagacatattcccaataaggatttgctgagccatctggatatgattctgaggggtagggtctcgaatgctggtgctcctttagcttactctacgtagaacctgcctccaaat

SEQ ID NO: 111271 - DNA, 284 bp, Zea Mays
caggtatcgcactcggatatgtacttggcaatttccctcttcatcctggtccaccagtataaggatctgagatcatggtacatcttgttgctaccagggtgcatggagaatttggaaaggtgagcttcatccaatatcctctttctgagttcagggttcttggggacaatcaatcgatctccaaaccatagaattcccttgctgtcctgacggaagcacttgtatttctctgccttctgcttgatcatttccttgataacctgaacacccttgtcttcaatctg

SEQ ID NO: 111272 - DNA, 447 bp, Zea Mays
acgagggatgagaggagggatgcggcacggttttataacctaggcgaaagggagccgagcccgggtaggtagtattccacgaatttcggcttcgatttcggtaggcgcatgcgcgagctcggaatccccggacagcactgccgttctattgaggaagaagtcctcccttggagagtgggacccagccgtaagcgaaatccgagagaaggggaaaaaaagaaaagggagggaagtgggctgccagggagaggaaagagtgaagatgggccaccgttgaggactttggacccgagagccagggagttcttctttttttctgttttcttttccatccttttcttttctattcccatctattttcgaattctaattttttttagactcaaacttgtttcacatatttgaatacaactacaagaatttcattatgaggtgcgcatttctata

SEQ ID NO: 111273 - DNA, 339 bp, Zea Mays
atgatggtcaaatggtcgagatggaggcaattcagttggtataacaaaaatgtcactgaattcccccaacaacacctgcaattctggatggatctctttgctgttctcctcaatcacctcctccaacaatgcaaacacccagatatcattccctcgcagccatttctccacctgtagagtagaaacttcctccacaacctgatgttgtgcagtattgcctaccaactgaacctccactcctttgtcaacaaaactaataaccttatcatcccaattacaatgcatgggactgtgtctgcacaaccaatcatagcccaaaatagcatcatatgctcccag

SEQ ID NO: 111274 - DNA, 605 bp, Zea Mays
caaatattacagtcttgttacaataaaggtacattgaccatttaaaaatgtttttacaataagtgctagtcttctttcaggatcttctccgcaactttatttagcaatttattgacgacttcgtcaacaatagattcaaccatattaatgatctccagtgcttccttcgtttctgaatcggccaggggatcgaacggttccggtggcggagataattcagctgaaatggaaaaaattaatcagtccaaagccacaaaaaacaaattccgaagctgaacatcaaaagatattacctatacgttttttgcgctctacagcctcttcagcttgtcttgcttctactcgggcgtcatgggtgtctttttcacttttcttcataatttcatgggccatctctcggccaccatttacccagatatcactgtaaaatttcccgcccattaaacttgcttcagctaagggatcttttgtatcatctacggagaaggcagcttcggcctggaccatggtcttgatatggtcgcatcccgccttctccaagatggctgaaattccccgcgcatcggaaaacgcgcaaacatccccgcgatcacttaagatttctt

SEQ ID NO: 111275 - DNA, 390 bp, Zea Mays
tgaacaccaagttttacatgttaaaaagccaaagaaagcaggaaatggttcaatgggaaatatgtagatgaatttcttagtctcctagaaacgatcctttgtagtgccaatacaagtcgtccaccgtatctggattcgtatataagatattggcgtaatcttcgggacgctcttgatgtgaaaattttcttaccaaatgaggataaattatttcttggtacacatgtttgctttatgactagctatgctagagagaatttaatattcaaactatatcggaagtatgaaggtgcaagcagagacgagatttctatttggaatagagcaataaatgatgctatttgtccatcgacttggcactcagacctgtccttcgtaccaattttgatg

SEQ ID NO: 111276 - DNA, 515 bp, Zea Mays
cgacgaagatcaatcaaagaagaagaaacaaaagtttgaatcgaaagtattaacttcgaagaaaagaaaggactcaatcccagaacaaaaatcaattgatgaagaagagaagacttctgcaacatcttctgatgctgaaatagaggaaattctaaaggtaatgactgaaactctacctgtcaaactaagtccattggggcttcatctgacgaagctttttcataatgaaaaggagcccacaaagacaaaggcatctaggccaaaaaggcaaaggattgttaccgtgacagaagtgattgaaacaacaccaccaagagctccagctccgaaggtgctggcaattgaaagcatgacagctactgaagctgtaccttcggaagctgccgcagaagaagccagagccaaagatgccaactccgaaggtattaatttagagagcatagccgctgatatagataaaatgctgctaaacatagccgctgaagaaactgctgcagccaccaaagagaccacgg

SEQ ID NO: 111277 - DNA, 657 bp, Zea Mays
agttttgttacaacaaagctacattgaccatctgaaaatgtttttacaataagtactattcctctttcaggatcttctccgcaacttcatttagcaatttgttaacgacttcgtcaacaatagattcgaccatattaatgatttctagtgcttccttcgtttctggatcggccaggggatcgaacggctccggtggcggagataattcagctacagtggaaaaaattaatcagtccgaagccacaaaaaacaaatgcagaagctagatgccgcgaaacaatacctatgcgtctctcgtgctctgcagcttctttagcttgttttgcttgtactcgggcgtcacggatgtctttctcacttttcttcataatctcgtgagccatctctcggtcaccatttacccagatgtcattgtaaaatttcctgcccattaaactcgcttcagctgagggatcctttgtatcatccacggagaaggcaacttcggcctgggccagggtcttgacatggtcgcatcctgccttctccaggatggctgaaattccccttgcaccggagaacgcgcacacatccccgcgatcacttaacatttcttcaaaagcttcgacctctccacttatccattcaataacaccttcagggttgcctcttatgaag

SEQ ID NO: 111278 - DNA, 303 bp, Zea Mays
gttttaagtctggtatttagggaaatgtcataatgcttgtttttagggagaaagctgcagtgacatttcggtggtgctaagtgctaacaacgacaacaaaaatgtcaggaacatggggatcattgcagaaataataaaaatgtcaggaaggactgaactcataacaatgatttgttcgctgtggttttaattcatcggcttctacttttttataatattttatctctataaattatagctgcagcagtctatttaggagattataactttttcaagtggtgctgcgcggtctggactaggatt

SEQ ID NO: 111279 - DNA, 1011 bp, Zea Mays
ggaatatcaaccggggcaatctgaagaatatcaccagggatcaactcagcaccaccagcaggcatcagaactctagcatccagtgcgctgacctctaaggcgacttcctcatttgaagcaccatgccatcagaatgtggaggagaagacccaacgtggacatccatggaggtatgagaaggggagcccacttggacacccttgggggctaggttgcagcccgcaccacccatcggagccggatcaccaccggcaacaccctcgggggctgggttgcagctcgcgctacccacccaagccagatcattaccggcaacaccctcgggggctgggcaaccactggcaccatccttgaggactgggttctccacaacagccacctctaaggctgaaggactttcagtcaccttcatggaaattgaacaaccctgaccaacctcttggctccggagaccgccttccaaggtcgatgatgcacgagacactgctcgggataactctaatcccacatctggaatgtcggaacaaatgtccatcatatcaccgtcagttggctcggacagcatgtcttcaggaacgacatcctcgagagcctgatcaaagttggctatggataattcttgcaggccaacaagagcagacaaagctggagaaggaatatcgctactcccccactgactctgtaacgccgactgttcttccgaattaaagggacttcctcttcttcttcctcatcctcgccaacaatacggacaataaacgacacaaggtcacaccccaatgggatcagttctggcagggtcacacccactgggattagctctagcagggtcacacccattgggatcaacatcagcagggccacacccattgggatcagctctggcagggtcacacccattgggatcagcatcagtagggccacaaccattgggatcagctccagtaaagagttccaccggtacttcttcagcaacaggagcagaagggccaacatcctggtccaaacacg

SEQ ID NO: 111280 - DNA, 755 bp, Zea Mays
gccattatacgtttaaatagatcgcgactcattctatacctgttcaacgaaaatatgaatagttaaataatttacgcatgatccaaaatagataaacaaacgataattataccaaccttcgtctgaaatcagttaagctaaatgtagaattgcccgctaagtaatcttgatacattcttgcatgtcctgcttgtctgtctcgaaatttaactaaatgtccggggatagacccaccatgctttcttttactgtgtgaaggctgatgaaagatatgatactcggcgaaactaatttcgtcatcatcgtctgatgacgactcattcaattgcaacagtgattgtcgaatattcatggctctgtggctgagccagatgaaacctaatcacatgtactctgattaaatggactggtcggctccgcatgatttaatcgacaacaaaaacaataatcaatacaagtggtctcacatgagctttccggcgtcgacctggaataatcagcagcgcctggggaaaaaaaatcaacgccaccactgtacgccaggacgtctgcacgtttggtggcggcgcaggaagagatggcagcgcaggaaggttgagatggcaggtacaggtacgtacgacatttgtgggactttatggatttaaattttgagaaaatcttgggatctgttggagatggtacccatagaatggaattaagagatttagggagatccttattctcttgtattgggagattattttttgggctct

SEQ ID NO: 111281 - DNA, 886 bp, Zea Mays
gtctacaactcccggcggtcaaagttcgtcgacggtggcgatccggctagtcggcgatggttgggttcgattcctccggcggaaaatcttcacggggtgtcggggagacgattcctcgagggaatttgactgggttggctgaggaagcgagtccacgctcaccgacggaaaccttgctccggcgagggtgattgcgtggctctggcgaggtggagcgcaggccggggttttggagagttctagggaacctaggtgaacagggtggtggttctggttagggtggcatgtgactggagatggtggttcattgtgaccgagcttgggcagcaatggcgggcgacggtgttcttgctctcggcagaattccagtgaaggctggtggggcaatggttgggatggaaaggcgaagggtggagcgacctttataggtgcgagcacgagtgacgctgcatttccctgcctcagctcacgacaggagctcgggccctggttggcgagcgtggagcggccaatggcacgctctacagctcacaccaacggccgaacggttcagtctgtggtgttttgtcacttacaaacgcctataggtcgcgaatcaggctgaatttggacgcaatctctttgtgtgatgtcctcccctcccttcgctctatcgagaggtgcagaaccccaatggtttcgtgttagggactccaagttatctctagccaaatttgggtctatcagaaagggtagaaccaaggcaaaactcgtgttttgtcttgtccaagtgtcgagtcccaattccatcctctgacatgggttaggttagttaatttgacacaactttgtcaattggagtgactggatttaacgtcgatttcgtaatgaacgtggggatgctctg

SEQ ID NO: 111282 - DNA, 435 bp, Zea Mays
ctccgggattacctgcaacaccacgacacggtgttccacgtcattgttggccttgacatacttgtctccgtctcattcatcgtctccattgtgttcatggaaggatgggagatcgccaactacgtctgttccgactggatcaaggtgtccaccatctgcgagtacacccgacgtccatcgtggcagaagtcgctgtgggcgcgtcgtaagctcagccgcctattttggctccgacccatgcgacaatgggatgaccgattctgccaggtgtcaatattgcagcttcggttctgctactatggctgcatctcacagcaagtcgaccgaatcgtgaagaagaccgtcgcagtgcccgcaacggtgaaatctgccattgtgaagacgctcagagcaaaccagggtaggctcgggaacggcgagctatccttgcaaggc

SEQ ID NO: 111283 - DNA, 790 bp, Zea Mays
cagaggtagttgcgcccgcccgtgatttccgttgagctaaccccagttgagaaggaaacgaggaagaggaacagtgggtctgcgccccacctgtcagccgaataacgcgcgcggcgcagaggtggtgtggctgagcggtgggccccgcccgtcggtgtaatggtgaatgagctgggctgcgcggtatggaatcagaagtgggccgaaatggttattcacggcccaattaggtttcgtctcttttttttctttttattttctgtttcatttcatttttaaatctccattttgaattcaaacttgtttgtgagcttcataactgagttaaatacctaaattaaaatattagtatggacaaaatgtattctttcatatatttattttcctctattttgtataatctcttccttctctcttttcttaattctaggattatttaggatttaaatccccatctggatatttaatgtatttcttttcacattattataatattgtcacaaagatgtacacacaaataaaatattcagcatgatgcattgatttagtagcatatctttttattaattgtttttggacatggtgttcacatgtgatgatgcacaaaggttaaactgacataaggagaaattgttttctctattcatattattacaaagtgggtgttacaaagacacaacctagtccagtgcaagaggcatcacaatacacatcaaatggcttgctgctgtcgggttgcgctaacactggcgctgtggtcagatgttccctcaatgcatgaaaggcatct

SEQ ID NO: 111284 - DNA, 382 bp, Zea Mays
gtgaagcaggcagaggggttcgaggctgtggaggcaagggcaaagaacgacgacaagtttgatctcagctaccttgacaaccaagtcttcttttggtctgtccgcgacatcttcaacagggatctcctcaataaaaaggtgctcattgccttgcgcctttattttttcttgtattcagattccattttgacttgccaaggtgtcgtagttttccttgcgtttggttagttctgtttcagcatgtgtgtggtcctctgctgcatgaagccagcaacttgtctgctcgcatagacaagaactaaccttgattttgagcagacgcttttatcaggttttactctcatgcttcaaaattgttgggtgtttttgtgtgatacccccg

SEQ ID NO: 111285 - DNA, 467 bp, Zea Mays
cgtaggaaaaatacttggttcacttcaagaagatatgatggcaagacgtacagctctccgaatatttacaacaaatgcatgcatgtattctacaatgaactatctacgtatataagctttctccaatactatcgacctcaagacgacactacaatattttcctagtgaggtccctttgggggcgagatccaagtccaaccaagggctctctacgtggccgcggacaatccgccccctaccacagatgatccagtgacctattgtggatagtcaaatgacctatcgcggaccattcaacatctcgcagagccgaacctaaggtcctgctcatcacgaggataccatagggctcatggctatttggccctaagaagacatcatcatagaggtggaattcaagaccatattgcaggtagtgttatttgtctaacatcttatctaatcttacaaagatgttcaccaagttc

SEQ ID NO: 111286 - DNA, 411 bp, Zea Mays
gtccatccccacgaccgcgtgacgtgcgcgttactccgagcgttcaacgcacaacgagctattctcggcatgctctttcctaagcgcacagccaccacaaatcggcgcatgcagaccaacgactggaagataaaatgcagctaagtaactaacagaccgactaaaatgcaggacttaacaactgataaaaattctcccccttaagtcttgcacagcagccttgtgtcgacgatcccaagcctggaacgtagatagatgaaccgaccacgccccaatgccttcatcagtatgtcagccaattgattattagtgtcaatcaactcaatcctcatcctgttttcctcaacacactccctgatataatggtaccttgtatcaatgtgtttacttcgctcatgaaacacaggattc

SEQ ID NO: 111287 - DNA, 281 bp, Zea Mays
ctcatgctaactttacaatggatgggtgtttgcataaagactcaagaacatagcacacactcttctctttagcatcctcacaaggctctatctcaattcacacacaaatgcctagctctatgctcaattctctcttttgtggcacttgggaggctttggtctctttaggagtgttgctctagtgtatttgagttatttctcagttcttgtgtcttgaatgggctagttgtgggtgtatttataaccccaaccacccatatagccgttggtaccaactccca

SEQ ID NO: 111288 - DNA, 650 bp, Zea Mays
ggcacatgacactcttgcccttctttgcccggaggtgcctcatgtgtgcccccaaggtctccctgtcactccttctacgcttacgctccccctgaacggtgaccccctcgggaagtggaggaagaatgggcgctagaggcccgatcccttgtggaggctacaactaaacatcaccaatagaaaaaaaacagaggaaagaagaagaaaagaaaggggaacgctcaccaaatcacctgatacacatcgagaaagagggtgggggaagtcctcatccattaagaatcctgacgacagcacggtgatgaccttgactggcgcttccattttagatagtgcgagcggcccagaggagtggtggtcaggatcattgatgccagaatactaatgcattggcccctagcgagccatcagaggttgaatttggtggtgcataaagacgtgcaccagtctcgcgctggtgagaccttgctacttcagcgtcttgagcgtcgtcagaagaggttccaccttgcccctcagactcggccttgcgccccacgattctagttgcccattgacaccggctcccgatcgatgaaacatggggcgttgtcggccgtattcctgacatagaaccactcgctctcataccacacggaggtagggagcgg

SEQ ID NO: 111289 - DNA, 362 bp, Zea Mays
gacaagcttcttgatgccgagtgatactgcaatgctcaacccgtggaccaatgcttcatactctgccacattattcgatgctggaaacagcagctgaagtgcatacttgagttgttcacctccaggagcaataaagaggatccctacacctgctccttgcagctttagtgagccatcaaagtacattctccacacctcagtaacttccgggctatccgggacctggtgctcagtccattctgatatgaagtcgactagcgcctgagtctttattgctgtgtggggccgaaaatctatgtcgtgagctcccagctcgcatgcccatttggctatccttccaatagcttctttgttgtggagaa

SEQ ID NO: 111290 - DNA, 1302 bp, Zea Mays
ttcttttttgggaggaaggacaatggtagcaggtttagtatgccttcttatctgataatagaaatatagttaataaataaatttgtgataaatgtgcttaaaaggaaggctcagaaggcggcgaacccagcgagcggtgtggcaaggctcacaagcgcgagagcaggctacactgcagtggttgcaatcctattcttttcctgaccaagtaaaacatagcagcaattcatttttaccatgaaggaaattctttgcaggtaacattgtattttactaaaactttttctttgatgtttcccttcttgatagtgtaaattgttctgtatccgattacaaatagagaacaatgaataactacaaattagataggataaacaaccttacaaaaatcctaaataatacctatccgttccaataacataggagtcctaattattttacttttagcgtaagtcaaattgtctagaaagttatacaaatatctactgctcccgttttaaattataaatcgttctacttggtgctatgcttataatttaaaatagaaagtacacaacactagatgacagaattatgataatctatgccatggtggatttaataaaaactattttaattttataattattgacgtaatttctatagacttagtcaatgccctatagacttagttaatgttaataagagaaagatagaagacttacatttataaaataaatggagtattactacaaatatattgagttattacaataaatacagaacaattatacttaagacaacatgaacctctcaatttagagcaaactatattataatatgaagaatacagattattgttgcaatgggatgtattcttccattttgtttattacataccatttttttaaaaatacatgctatctcctcaaaatgctgccatcagctttgtttggtcatcccatcaatttgctaggaatagttgtttgtcttcagcaatattcagtttaggatacacgacatattacttacattcagtaatttcataattttttagtaatggcatcatctggagaccaatcacattctgcgttctctcctttgaaggagcagcagcaggagtttgtagatgtgtcaagctccgagagatttgatatacatgcatttgattctccacctgctcggcgctctttgaggaaaagagcagccccatctccaccacagccttacacagatgaaaatcgaaggccagccaagcgccggcaggtatctaagaagggcaaggagaaggtggaggatgatgaggtgtgtatctaagtattt

SEQ ID NO: 111291 - DNA, 477 bp, Zea Mays
cagataatgggtcttatccagtcgaggttcaactactatcttgtctatgacgtggagtcatacgaagtgcataccttagttgtgccacattgtttcgcatatctcactacaacagtagatatatattgtcataatgacatgtattggagcctacaccatagggtatggtgtagttggtaaactgtgtagctacttgtactttctatgcttgtagttatgtcaacacatttagatgtggctgctaggatggtgttatgcactgcatattggtcttagcctcttgggtataactgatgtcctttgtcgtggctatattgctctttcttgaccacaatgtcattaattgcctttaatatgatgaatgaaagttttatcaagacccccttatgccacatgactgtcttgagtgaatgcgcctgtggcaccgaggttgtaccgcccgagaccgttcttccctagaggtattcttatctgtta

SEQ ID NO: 111292 - DNA, 953 bp, Zea Mays
ttatgcggtttagggcatcgcgaggagcagagggaggcaaagataggggtggaattataccggagtagtaggccgcgaaggcacccgcccacggcaggatgcggtccagagctgtacgccgagctcccaggttcacggtgaacggaggtgatccggtgtaaaattcgttggcgccgaacgcacccaacccgacgtcgatgccgcggaagctatcaccgaaccgaagcgaagctccccgaccgacgacgaccctcaaacggtggcgcggaggggagaggattctgtgaactaacaggaggcggcggcgtctggttttatacagggagagacgaagctgggtgcagaatttacgcaaagcccgcggaatctggtagctacaattccgcgcgcggcaatcggaggttccaacagatctcacggactcaacatttccagccataggtgggagaaggttctgacgaggcgggcccacctgtaggtgactgggacggagtccacgcgggtagacagtggctgacctggtagggtcctcctgtcggcgcatggagttaggtgggcgagggattgggccgaggagtgcagattcggcccaagaagctaacaggtttcatcttttccttttcctgttttctattttgtttgctaattcaaaacaaattcaaatataatttgaattctcaattcaattagaatgcatagtcaataaattccatcatggcttgaggttattcattctatttatattatttattcatttgtttaggcaaatgcaacatacatatatttcctctcaagcatatattttaaaggtgcggctagttttagaggtttatataaataacctaattattttaggagaaagtaaagtataatattcatcaagggctaccttaattcaaatatttctaaagaatgttttagaaatatatagttcatgaaggcgataatctttt

SEQ ID NO: 111293 - DNA, 390 bp, Zea Mays
tctaccggtttatcgacggtaaaccgttaccggtggtagcggtttttgtaggctaaaccgtggtaggcataggaacgagaggcgataacgagagagaaatgaagagcatcagaacatgtgatgcatgggtacatgcatgctttcgtgggatggggatggggaatgtggtcggtacgtgcgttccttgcttccgtggaacatgcatgggtacttgccggcgtcgagctcggtgagatgtatttgccagccacacgcacgttgagatttttaggaaacggaggggtaatgaagaacactagaacataaggcgcccttgcgggcgccctacacttttatgaaatactcctgcactattacttggctaatatgtaccacaaagttaaggcttag

SEQ ID NO: 111294 - DNA, 624 bp, Zea Mays
gatcccagttcacatctcggttctggcagaagttacatgagagcctgacacaaagttgaatttcagctcggcgtatcatccccaaactgatggccagactgagagaactaaccaagtacttgaagatatgttaagagcttgtgctcttaaacatggtggtagttgggacaagagtctaccctatgcggagttctcttacaataatagttatcaagccagtccgaagatgtccccgtttgaagttttatatggcagaaagtgcagaacccctctgtattgggatcagactggtgagagacagttctttgggcctaaaattattcaagaggcagaagaaaaagttcggatgatccgggaaaacttgaggatagcatagactcggcagaagagctatgctgataaccgaagaagaccactagaatttgaagaggatgatcatgtatacctaaaggtgtcaccaattcgaggtatgagaagattcaaagttaaaggcaagttatcccctcgctttattagacccttcaaaatccttaaaccagttggggagatggcctaccagcgtgagctaccagatcatatatctgatgtacaagatgtgttccacgtatctcaactcaagaagtg

SEQ ID NO: 111295 - DNA, 507 bp, Zea Mays
ttcaccgattttccctgaaggagtagagcttaaagcctttactgtttctaacacatctagtacatttgccatccttctcctcttaggagttgcagcataacttttttgtgccttcgacactgttacttccgatgaagggcttacaatttctagcgtttttgtttcttcaatatttggcttttcagctttatcttcctcagtcttcgactcaacatgttcaactgaagcttccttcggcattgtagctagctcttcagccttctgcgtaggaggaatgggctcttttggttcagcagctgaagaagtctccccgccaaactcaggcaccacgaccagttcaatatagcgtggccggtgggtaaggaccttcaactttttgcccttcggtgcaggctcgactggagtggctgaagcagcagttttcctcttctttccctgacctcgcagtggataacggtagtcggggtagacaaagccaatagcgtcaaaaactctgttcaatctctt

SEQ ID NO: 111296 - DNA, 305 bp, Zea Mays
aagcatttgattcccgaagctggaagatggtctttcgaaggacaaacttgctgacagcctagcttacaatagcataaaggtataaaagctaattttgtatttgaaaacgaaatattttatttgctatacttaattctgtcctcctcttgcagggcttaattcttagcaatgcacttagggctcaaaaaaacattgaagatgaaggatatatgatggctttgaacaaactttgttcagaggtaatcgaattaagaaacgaaggtcttgaaaaagacaaaatcttgatttcattggtaaacaaagtg

SEQ ID NO: 111297 - DNA, 563 bp, Zea Mays
cagtaggtatgaagtacatactaaatcaaaatctgtttatatgctggtagttttacgcgacctctctaattgatataaaaaattccccaggaccataatagattatggtgaatattcagcgacatgttctgatatatatgaatcttttgccgatgggaagtgtctcgacaatgtattcatgcagtgtttcatccaatgtgtttttgatgatgcaaaaaatcagcagacttccatgagttcgaacagtttgattcttgatgttaatgttggggtaaattatcgtaacatacatacaccatattcatatacaaattggataaacccaagtatactcactctatttatatcatttattgcagtcactactcaactttgaggaacaggaacgacacagtcgcaaccctcaaccttttgatgaatctgtactccacacactcctagacaattcattgcccgagacagatgaattggaccaatgcaaagcggtaacaatcgtatttcataatccaaacataatttctttttaatggaacatatcacattgttatgcttttgtaatttac

SEQ ID NO: 111298 - DNA, 295 bp, Zea Mays
gtgaattaatgctgacagcacaccaagatctttactagacgttgtgttgctccctgtgtcttagtaacgcatgagtaatcaccgggagtcatgatgactgcagtccatgctgcattgataggcagtaacccttttcttggaaacgcacgagtaatggtgagtcattgccctcgctatggtaacgtgtgagtaactacacggcccatgcaatgtggactgggcacgccgtctatcactggaatggacagacacacgtcttatccgtaatgaatgcaaagatgcacgtagtccagag

SEQ ID NO: 111299 - DNA, 335 bp, Zea Mays
cgtgaggctccgtccaatccctttcaaaaaacgaacagtgccagcagtggatttactcttctttttcttatacggggacactacttttggtatagaaactttagatggttgtggagatggctgtggagaaggtggatccctgaagggcgatgtatgtggcgaagacggtgggccaccatgaggatgaggagaaggagggtcagaaagaggatgaggagcagcatgtgaagtttgaggaggtgatgatggatgtacaataggaacagcaatttgagaaggtggagacggttgggcctgcgacgaattcgaccaatcaagcaattcgacatcccttc

SEQ ID NO: 111300 - DNA, 281 bp, Zea Mays
tgtgccatatacaactcagctagcttggctctcgtgagccactttagttagtatgtccacgatcaaccaaatagagtcatacccagccagagtgcggcgtagaccaacgatgaagtccatatcaattttttcccacttccactcgggtatctttagcgggtgaagtaatccagctggtctatgatgttcagcttttaccttgtggcaaacatcacacactgccacatgtgaagctacatccctttttagaccataccaccaatacttctgcttcaggtcct

SEQ ID NO: 111301 - DNA, 537 bp, Zea Mays
ttcaagggttgaatgttcttgaagacaaagtcagcgaccacggcctcagcagtcagacccctatccttcaacaagcagatttcaacaagtagcactttggcctcggttatctctgaaaaagtgggagactctacccagctaggcgtacgaacgtctggttgcctccctgactgaggggggagggatttgccatgattttgcatgatgaaccaataaagacaccatcctttaatgctatccttaagggggatatcaggatattccactttcctcccctggcgaagctctaaacttgcaccaccaacaagctgatgctgccctctagccatcccgggctgacagtgatagagatacctccagagtccgaaatgggggagaattccaagaaaagcctcgcacagatgtacaaaaatggcaacttgaagaatagaattagggtttaagtgtgtcagatttaagtcgtaaaaatcaaggagaccgcagaaaaaaggagagatgggaagagcaagtccacggataagaaacgacacatagaca

SEQ ID NO: 111302 - DNA, 429 bp, Zea Mays
gcaggaggcctcttatttttcttcgcttgacgacactttgaatgcgccaccaaggtttccttccccgcgttccgacaaaacgtcatgaagaaggaactcaccacggtgctcacgacatccttaaaaagggggagggcgagtccccatctataaaggatccagacgatagcgtcgtgacaaccttgaccctagcctcgatctcgatcgacgcaagcagtgcaggggaatggcaattagggttgtcgatgctggaatactgatgtatcgacctctaacaggccatcagaggcttaacccggcgatgcataaaggtgtgcaccagccgtgcgatggtgagaccttgttgcttcaatgtggaccaccataagaagattccccacctcgctcatagggttcgcttccgccccgtggtgacactcctctatcgac

SEQ ID NO: 111303 - DNA, 583 bp, Zea Mays
caagaggaagagcttcgggaaaatcaaaaaagtcaacaacaaaaatttcaagaaagtcataatcaaatggccagagttcgctccactgccagggagatgagaccgaagatactgagactgttccgatttccgaagcgatgaagcggtctgggctggtaacatcggaggatgtccctgccgctgaagcagagcaggctgatgttgaagagactgaatctgaagatgattatagcagtgcggtgccaagtaaacctagccatctggatttcggaaagtccaccatctccgaaggtgacttgcctaagatgttgaatttgggctatttaagtgaagcaaagaaagagctggttcgttttggtggagaagaaactactccgaagccaggaaaagatgaagtagtgatctttaagagtttctttaaagctggtttaagattccctttgaacaagatgattgctgatgtgctgaagaagtttgggatctaccttcatcagctaactcctaacgctatcgttaggcttagcttttacatttgggctctccgaagccaagggatggaaccatttgccgaaggtttctgccg

SEQ ID NO: 111304 - DNA, 568 bp, Zea Mays
attaatttttggatgattattttgaagacacttcttagcatcatccttggttcataatacagaaaatgcatcttatatatttttttcttgctcccttcccttgtcttctttcagggaatataccatgtttaaagattttccacctatatttttcatacacttgtgtaattctctcatgtttcgtatatcatgtacaggtcaagattataaattgtcttgtggaaaacattattgttgacatcttatttaatcaagtcgttggattatgcacactatgttttcttgaggaggtgtattcttactttccaaaaccatcttaatttgtatatgcaataatacagagcacatgctcaaaacttttaccatttatgattcaagtgtttaaatatgattgattttctgcctatatttgtttaatgattgcattttaatagattgacaacttgatcagccaagaccatttattctagaggagtatcatattgataaaggcagggtgtttctatgagagtcgtattcttggagctcaccatggtcttatatctacttacgattggagatgcttgtt

SEQ ID NO: 111305 - DNA, 392 bp, Zea Mays
taaattaaccggtcgatgtggtagtggtcgtgcgtgatttatggctagcgagtagttgaattacgagttatgcgagaatcatgttagaaactaacgtgcggcgtgtaactgtgctcgggtggtaaaccataggtcagtagatattatttgtgtcattagcaaatggggatgattcttgttgtgcgataaaatttgaaaggcaaagaacatgggtagtgtgtcgatcaagttaaccgataggtttcgtaaacacgcttgtaatgcttgtatgaacatgataaaatcgatgccttgtcgtcgtagtcttaggaaattttctgaaatgcgctagtgctccactgatgggttgaataaacttgagatgtattacaatagctgtgtcgtgccggtca

SEQ ID NO: 111306 - DNA, 499 bp, Zea Mays
cgccgtccgccaacagtaggaagagctcgacaccctcatgcaaaagatcgactacgcctatgaggacgtcgagcggaggagtctcgaggctgagaggccctggacgaggaacatacacaacctactcgctgaaagcaacgatgtcgtgcaatacttcctcagtcctaggcagaacatggccgcaacagccatgatgctccgatctatcacaaaactagatgagccagaggcaaaggcaatgtactagaacctccgcaatttagtagagaaggccatcgtgcagcaagccgagatcaatcgatagccccctctcatgatggaaagttgaggcccacgaacggcctcatctcggagcaaaagagcacaaccttcccaatgcacaaggatgcgcgtcccatgaaggaccgcctcggaggcatccacgatgtctggtacatcatcgacaactagcgctgggagcaggaagaagtagagcagtcgcgtgagaaaaggagcgagc

SEQ ID NO: 111307 - DNA, 386 bp, Zea Mays
aaaatcttaatctattttctacaacagaaaatcattcgtctaacagaacctataaatttgtacacgaaggggaaaaaaggacaaatcttactatgaatagcttggaccatgaaaaaaaggaccgggatagtaagcagaacccaaattttgtccggaggacctgtcaattgaggttaaggaaacatcggtattcttttaaaaaatatatatccagataattaaattaattcttttcttttggtgcccacaggctcacgaggacaaatcctaactgccggatacggtaccttcctcatcctaggccggtggataattgcttggcaaagatcaccagggtttgagatgaacaatatggtggcctcaatcaaactgtttctccaacccag

SEQ ID NO: 111308 - DNA, 385 bp, Zea Mays
aagtgccaatggactggagcttgatgctctgattcctggttgatccatcttttgtgcagtctgaccctctcacttgttgccttccctaacaatgagcttcatgctatcctgttggatgtggtacatagggtgcttttgttttggtggatccttttgtgcagcctcgacctgaatccaccaacgcagcagcatattttgtacagctggtctcctagccatagctgacttgatctggtagtttattggcttcatatgccatagtagagctgcctacttctacttactagtctagcctgatatggatcaaccattcattaccacttgttattggcaatttgagcttgtgtgttgccattcatgaacacttggtatgctatatttttat

SEQ ID NO: 111309 - DNA, 799 bp, Zea Mays
tgcaagtgcagtgcaggtgcgtgcgtcacatcgggaagcttttttttgcgctagttgtcactgccacgacacacggccaattagctagcgtgccaattggcagtggcacagcccatgtcactcacggtcacgggtggtccattgcgttggacgcacctgcgcccagccacagccatacccacacacgtctccccttttccaaggcggcagaaagagagagagagagagagagagagagagggaactaacccatcatgtgctttggccgcgtaggcaccggtccgtcgctgattcacgtacgacggagacgatggaaaggcacacacgtcgtcactttgttcttggtttccgcgccttgcaacgcattgttccagttctgtggctgccaggaaacgacccagcgcgcaagtgggccggctctggattcgtgtcttttgtgatgtgtgaagcagatcgagttagaatacaaaatactggctgcatccatgcatgctccaaaggcaaataattaaaaggagggagaagagttcgatccgtgttcttggagaccacacatgtcacaggagatagaccacatatgtgaagtttttattagtaacaagtaagaacatcacctgtcatggaagcttgccatggttcaaagcccagtggtgcccggtggtggacaaaatctcattgaaaaattgcaagcagctcaactggaagcaggatattcattgcttatagtgtgtttagagcatgagactagccatctaaccttaaccgaatctccaaattaactctctcactagctaaaatt

SEQ ID NO: 111310 - DNA, 1088 bp, Zea Mays
tgacgccgtcaggggagacacctagccgcgaccggaacagcggaccacactgacgtcagacttcgcaccagcgacgacgtttgacgagagggagagacctagcatcgccacctaggatgagttttaggaggaaggagatgaaactccaaggacggcgcgacacgctacacaggggatggctggtgggcggcggcgtttgacggggcccgggggatggacagaaggaagattgaaggctggaaggcttcgcctatttttatttccacggaaatcggcctcgcgaggcttctagcagctaccccacgtgtcctgtcactgtgacggtcgatgctctattcgacgacgcaaaataaaaggaatgacatggatgttctaaatgagcagctttacgtccgcatttgtttatgaagcaacgggcaattgacattttacaggaggagttgaaacccagatgggacccacacgttggccagcagcaggtatgaagaaacgaagacgcttctagcagcctccggccgcgtggtaaaaacaggtgggaccttacgttggacagcgacaggcaaagacgaaggaagctagcaggtggtacgccgaccattgatttgccatcggacgacacacgggaaattggacgacgtggacatcctggctgctctgttttgctcccacggttaatatagagaattttcatgaggttgattcctagttgccatccacacacgaataccctcgtttaaaagaatatttttagtataaaagtctcaaatttagaatcttccacgaatttcctgggaaacgaagtcataggcacataggctcagagccagaccaactacgccaatagcactcatccataacccgtcaatgcctaattctgtggcttgacccctcagtattacatggaattagaccgtacagttctaaactccaattcagtccatacaaacaataaaattataatttcatcatatttaataccatgcatgatttagcattcaactcctctccaatatggacatccaaacgcagcgcgatttccaaactcttgttaacgggccaattctatagcggatgtcggagggcacgcg

SEQ ID NO: 111311 - DNA, 670 bp, Zea Mays
tccccactgccgtgctcactgtccagcggcgactctctccggcgatctgccctatctccggcgaccctccggtgacctggccttcgtcctctccctctcggtgagcaggctcccctcttccccctcagttctcctctccctctcggttctgtgagcagaggctcattttccctccccatttgcatcaattccgatttcctcgaatccttgtgaaatcttgtgaatccagttggtggaatgcattcaattatccctattgtgtatccctgcaggcttttagctccttcgggagggttttcccacctcaaatagccatttcaccgaaaacctaattccccgcacgccacgtgctcggtgaaatgcccaaaccagccaaaaatgctccaattgaacccaaatttttcaggcaccttcacaacacttccagtaacctacttgccaaatttcacgccaatccgagattccaggcttaaatttcaccaaatttcccgtttagagcgatcgtttccgagccgagtgcccaaattcctttttcttcgcctaaattcaaaccaagcacacacttcactcatattcacctatataaacctattcgtgaagtatcggctctttcccatatcgtttcgtgcctcaattcgaattccatacctcctatggcactaattatcct

SEQ ID NO: 111312 - DNA, 422 bp, Zea Mays
tagtggtcaccctgagttagataagcgtgagcatgtcgcaccgccttaagtcattgccgacttaagccgattgctctgttagtagggcatagtggtcaccctgagttagataagcgtgagcatgtcgcaccaccttaaatcattgctgacttaagctgattgctccgttagtagggcatagtggtcaccccgagttagataagcgtgagcatgtcgcaccgccttaagtcattgccgacttaaaccgattgctccgttagtagggcatagtggtcaccctgagttagataagcgtgagcatgtcgcaccgccttaagtcattgccgacttaagccgattgctccgttaatatggcatagtggtcaccccgagttagataagcgtgagcatgtcgcaccgccttaagtcattgccgacttaag

SEQ ID NO: 111313 - DNA, 368 bp, Zea Mays
aggggacaatttgcccttaactttgagtctcctcattccacgaagtggtgaaaccttaaggtacacatgatttctttccttaaactccagtggtcttcttctattatcagcgtagctcttttgtctggtctgagataccctcaaattctctcgaattatacgaacttgtttttccgcctcttgtataagttcaggtccaaagaactatctttctctagtctgatccaatatagaggagtcttgcacttcctgccatataaagcttcgaatggtgacatcttcagactggcctgagaactcagcataaggtagactcttatcccaactactaccatgctgaagggcacaagctcttaacatatcttcta

SEQ ID NO: 111314 - DNA, 545 bp, Zea Mays
tttatataggccataaaggctactactactattaataaggatgttgtagaaacatccgcaaaactagttaggtctgagaagatgactagaatgagcatgcatcatgattgtcgcatcattgtctcttgtgcaccaacatgctcttctcacctttattccaataataagaacttgttaataatgtaatgtactgctatgttagaaatgtcttacctcgtgtcagattgctaagtcttgttgggtcgtgttatgtgtttcttttgccttgctatctaggtggtatggtaattgtcctaccctttttgcaaaaaatgttgtttgtcctgctcatgagaagacccccctcctccaaacaaccttgagtttagcaagtgaaacctcaaaaaaaacatgcttgagttggtattttctagccctcgtgtgtttacccttgaatttacacctgcatagcttatagacccccacagcttgaccgctagaccaacccaagtctccttgtgcacttgtttatgtcaaaaaaaagtttattgtctgttcacgcaaac

SEQ ID NO: 111315 - DNA, 592 bp, Zea Mays
gaagaacagagagggcggtccacgtcggggtggtggaccacggaatattctagcgtcgaagggttgtttcagtgagataaaggcagtaacgttaaattaaatggatcgaggagtacccctagcatcggaggaagctcgaacgaatagaatttaaggaatgcttgctcaatttgacctggccatggaggggtctttcacggcgaagccgagaacagcgaggggggagccaacgactttattaggtttcttcacgaaattgagcgggttgcgtaagcactcaggtgtgtaaggtagtaaagaagtagcgctcgggctcaatttataggcaggttgccagaatcggacggaattcaaaagatctccatgtgcgctagtgagcttgcgcgcgggtaaggccacgacgagcgcccaggtgaaatgcttcggtcgaacgacgccacctcatggttacatgcgccacgtcgcggaagatttttaccaaataacgcaagtttgagcattgaacacggcagcggtggcgttcttatccccggtgaggtacactgaacccagatcgctatcttgcctgctagcccaaattcggatgagcact

SEQ ID NO: 111316 - DNA, 413 bp, Zea Mays
ccccctactcaggttagctgcatacccatcagggaacatcaacatcttgatccactgaagtacttccttcctctaggccctgcttaggacgaaatcggccttaggccttctccacgtctttccgccacttggcggcttcatctctaggtttgatctatcacataacgctgccagatccactcttgccttcatgttatcctttgacttatcaggaatgtccataattgttgcccacagtgcctcggcaacattctttttagtgtgcatcacgtcaatgttgtgtggaaggagcaggtcgtcataataggggagccgagtcaagccagacttatgtgtccacatatgctgctcaccatatcccacaaaaccaccttctgtattggccacgagcccatctatctgttaacgaattt

SEQ ID NO: 111317 - DNA, 675 bp, Zea Mays
gaggagttgaatatgatgttgtttaattttcgtgaggcaggccttattccgaaggctgagccgatgtaacatgtttgctgccctcgctctcgtgttgcggtagtaagtgaaaacgctggcctcccccagcttgcaatagagagggagggcaacaagatgcgatttttattatttgtgcaatgtggccgatgacccttcgttgtgtgtatgtaaactatgatgacattgcttgttgtgaagttgtcccgatttgtaattgtggtggtgtggcacgtgaaatgggatggggacctctctttccacggcgatgttggacgcttatgacgcgtacctggttgcgtccttaggtggtttttgttcgaccgtgccggatagtacagtcttcgctagtacggacttcgcacctttgaggggatcgtagtagactttgtgccattagggtgatgtcgcatatttttgcatgtccggctgcacccttagacgacttttgctcggatgtcttatagtaaagacttcgcaccaataaggtgatgttgcgcacttactgtgcatatctggttgcacccttaggcggcttttgctcagatttgtctctagaaaagacttcgagtcgcgcacttgttgtgctcatccggctgcaccctttaggcggcttttgctcggatttgtcttcag

SEQ ID NO: 111318 - DNA, 311 bp, Zea Mays
tttgtggatgattgatcatgtttgtggactttgaagtttgaactatgttccttgtcattatattatgtctctcaagttgttgatgttcttggtgaaatgaacatgaccacatactcgtatggtattttctggcgggtaacaggttgcctgatatcggcggatatcctgcggatacgggtacgagtcgaaaactttactcgcaagctctcgcaggcacggataaacactagaggcgcggatatgttggtgggcggttaaatggcttacccgcactttacccgatccgctgcctaccctacactgcactagcc

SEQ ID NO: 111319 - DNA, 370 bp, Zea Mays
cgccctctttccccgatgctatttatcttggtaatggacatcttggccctgctctttactagggccgaggaagcaggtttattgcagcgcctgtcgggcagggttaatctccaccggatctctatgtatgctgatgatgttgtcatattttttaggccctcggctgcagacatttccactacattaaatatcttggatttgtttgggaaggcgtttgggctccgcaacaatgagcagaaatctaatgtttttcccatccagtgccctacggatgaccttgtgttggtacagaatttattgccttttgagaggtctgaattcccttgcaaatatcttggatttccactctcccttcataagctgaccagag

SEQ ID NO: 111320 - DNA, 774 bp, Zea Mays
ttcaagaaagctcaaggaggatacactcatgtactggttgctatcgacaaattcactaagtggatagagttcaagcccattgcttctttaactttagctaatgcagtggaattcatacaggacatcatattcaggttcggaataccgaacaacatcataaccgacctaggatccaatttcaccagttcagaattttttgatttctgtgaacaaaagagcatccagatcctatatgcgttagtagcacacccgagagccaacgggcaagtagaaagagccaacggaatgatattagaagcactcaaaagaaagtcttcgacaagaatgaaaaattcgcaggaaaatggatcagagaattgtcgtatgtggtctggagcttaagaactcaacccagccgagccttgcatggaaacactcccttcttcatggtttatggttcggaggcagtgctacctgctgatctcaagtttggggcaccaagattgatcttcgaaaacatagctgaagctgaagctaccagactggaggatgttgatatactagaagaagaacgattgaatacagtaattcagtcagccaggtaccaacagactctgaggcgctatcatgataaggccatacgacatcgatccttcgcagtgggagatcttttccttcgccgaattctaactggggagggacgacacaaattgtcaccactatgggaaggaccattcgtagtaactgaagtcacccggcccggatcatatcgccttactcaaatggatggaacgg

SEQ ID NO: 111321 - DNA, 888 bp, Zea Mays
gaattcaagtcctaacgagggtttcccctcaaccaatttttactaatggcgctctaacacacactgtccacggtgacagcgggcactacaggcaatcaagcgcgttcccgttgatctatggggtcctagtccaattggccgggccagggaacattaggaggacccacggatgttgaaacaagacagcagggaggatgaacagacctgggattcgctgaccacggtgagggttctaccacggcgacggaaacggaattgggggaaatgagcaattcgcggtctctcgtgaacgattggaggcaattgctggtgctttggatgcataattatcctacggagctcacgacgtgttcaatttatagcaggcatgagcggtggccagtgaatttggattgggcacggtagcgatcggagaaggaatgagtcactggtgtggtgattcgtggccttcaccgtggcggcctcaccggcgacgaaccagtggcttacagtgactcactacgacgtggtgaaacattgaggcatgtagccaggctggataacggcgaacgccggtgatgccaacgcgactaaccatggcgggacacaacggcggtgagaacagtggccggagtttatctctagcgcgatatttcttaccgaggagcgcttatccgagttcggtcgggcgtgaatcgcaacgccggcacagatctaagcgtgagatcatcggcggcgatgtctctgagctggcggcccaatccggtcactgtaccatcgtgaagttcatccagtcggcctgacagaccaagttggggacgaattttctcctgatttcacatggcaactagaccaacattctgcagcaaagttgtagcctaatgatccagctacaaaacttacaatagc

SEQ ID NO: 111322 - DNA, 580 bp, Zea Mays
aagtaggtactactaatcataagttaccaagcatagttaaaaaatgaagtactatattattttgaggagctcacggaacacagttaagacaatgtcgaacatcttctttcctgcatgttgcggtgctcgtgctccacctaagggcagagcgctagaaagaagatctgtcgtcgccagagatgacatgagatttccatggcctaggttgttagctgctcatcgcccatgagaacatggtaccgctggagagtaagattctcggctatttcagcttcctcacgcccctgattcctatgatcctctgtgactgatgctgagaatgtggtttgatatatgattacgatatcgaagtatgaaaaatgtttgacaaaaatattgttatgacggtggctagtgtcgtgctgagagccttgcccatgtcccagccagaagaaaatggcttgcttcttagttcttgttggcctttatctcgttacacgacctctatatatatagtctacatttgatttcttttccaaacaaactaaaggtggattccttattaatttacactctccttttctaatctctactactctat

SEQ ID NO: 111323 - DNA, 503 bp, Zea Mays
atgttaaggagcttattatgtgtcccatatggtcccgcttcggccttcgaaaaccgaaggttgaaatcgatgaagccgccgaagcatgccagaaggcctttggtactgtatgcttctttattggtacaagagacttgattcaagaacatatagcattcagagtgtggtcgcttgtagagaactaggaagtgccgaaggagactgtcaccgagtctagcgaaggtgacctggttcgactgaaatatacattcagatatggagataaatttgatgaaccaaatgacgactggctaaaatgtatcaaagttacaagtgatgaactgcttgggccatattccaaagcagaagataatgcattatccacatccttcgggggccgaggaaaaaagagattgaacagagtttttgatgccattggttttgtttaccccgactattgctacccgctgcgaggacggggacagaagaggaaaactgctgcttcggccaaaactgctgcttcg

SEQ ID NO: 111324 - DNA, 459 bp, Zea Mays
cggctgcagaggagggagggaatgcgaggtgccgcgcatgccgacgcacgagaagaggagaaggaaacttgaagcggaagggtacgtctgacccacacgatccagcagaagccgcacgagcggcaaaccgaccactagcctacgtgctctgaggtttgaccctagaaccctcccctccacaaacccctaccagcagggacctctcctttcattaaccctaagattcttgcactgttgggtgctcggaggacagggtttggaaaacatggcccatgggattttgggttgcatgttacagtatctttcttcccttatatatttttttttatatatttctggcttggctgcaagggaggaatgagaaggcagcacttggatccacgcaggtttctcgcatcaatgtccgtggaggctctgttgacgacaccgacgcagcagtgctgtgcagcaccggatgca

SEQ ID NO: 111325 - DNA, 374 bp, Zea Mays
ggacggtccgtgatggggctgaattgttcggggttgtaccctgatggtccggccatgtacggtgcgacctgagcgttttgtgtgcgggcctgcatcgggtcggacggtccggtgaaatacgccggatggtctgcgatataaccggactgtctgagatgatgctcgaatggtccggccgcgtctagtacctgccgcgtgcctagtggttgcggctgtgatggtgacacgaaagcgtgcatcggcataccatatgatggctgggtcaagggcgacccgtttatagccgatgtgtttgacacgggtggctcagtattagactctcgcgatggaaagctaggagcaactgatttctcgtatgcacgtagatgcatttt

SEQ ID NO: 111326 - DNA, 362 bp, Zea Mays
ggtttaaatctcaaacaagtcaaatttcttaatttttttccaatcagataaaggccttgtcttttttccttctaatgatcacgcatgaaaaaagctagagctagcggcgatcgaccttgaagctcgtgacctcggtcatggcgggcgtagtgtcaacaacctacttgtattgctcagaagtaacagagttaatagagtattggagaggagaacgagaacacgagaactagaggaagagaaggcttggggaagaagatgctaacacaattatctgatgttcgatcccccgatcacccggtgcttacagcttttaacctctccacatgccacggccacacacagcccacacgacggcccacata

SEQ ID NO: 111327 - DNA, 396 bp, Zea Mays
acaacaccttctcacgatcgttgcactgggcagtgtgcaactcacgctccatggtacgcagctaatcttccgcatccatggggtcagtagagtgggcaaagactaggggatggcccctcatgaactatgcccgcttgtctctaggcacttgaggcatctggacttgcactggaggctgaggcggtggtggctgccgctgagcttgctgtgtcgctgctaatgtctgaccaattgcctgaactgcctgggtctgcatcaagaacaactgctcaatggtcatcgggggtggcggtggcaaatgctgctgcggggctgcttcctcttgggatgcctgctgttcaggctaagcacgcctcgcacctctgcgccggttcttagacatctgtagaagtcaca

SEQ ID NO: 111328 - DNA, 776 bp, Zea Mays
ctaaaccatgtatctaataattctaacaaaggtaaacagagttcactaagcaaagtaccagcataattcagtgctcgctcagtaccaatatgactgccatcctccggtattgtcatatatgctagatactatgctggaatagattgagcaccattgctcaaatactaaaactcgacccaacacattgcttgaaagtggagaaaaggcacccgaaaacaggttcttacctgcacagggacacctttactgaaagaatgaccaaagtgagtcgaactaatggctgtatatagtacggaaatttgctaacctggcttatataatacagccctagctcataaagaaaacaaaatagcatcttagtgcctccttggtgaataaccacaagacctcacaaacattattgggattttttacagaagttttgcaggcaacaaacatttgcttcacattggtttcaaattccactattccaatgcaacaagtttgccacttgaagctagaacattatatcgaatattgcaacaacccagaaaagaaagataaatacatcataaagttacagatgccaaattaccacagttcgcatgtaagtctgtaagacttatttgatctagtgaaacctagttctttctcagatgaagcaacttactgactagttataaaggtgcatcatggaaaccaacgattaattgagatcaggggcgtcttatgaagagtatagtgcacattactacggcactaactaaagttacttcttgaacaggaagatatagcgc

SEQ ID NO: 111329 - DNA, 784 bp, Zea Mays
ccggagccaacagggaacaccagaataggcaggcaagggcgcaaggcaacaggccaatagccatcgcttgctgattggggttgcggtccttggggagacgaaacggaaggtgacggcgaagaatccgggattggcattggcaattttggaaagaggaagacgaggagtcggggagacgaatgggtgttgactgctgaccactgaagtgctgagtctaggaccctgggtatgacctgtgtcgtgcggtgcgcttcgtgggttcgagagttcgggtacagtaggtcagtacccgaattatcttgattaactttggtaggggtgtaatctgaataaatattatcggacattcgaaccgtccaaaatggtcgaatagagattcgaatgcattttttcggatatccggacttattttcgaataacaaatacaaataaggatatttatatcgaaatcaaatataatataataaacatccgacggataccaaatatccaatacatttttcgaatacatctgaacagtatccgataaatatccaatcaaaatttatttatattttatttaaatacgacatgaaggtcgcacatacatacagtcttgctccgatgtctcgtgttccctttatagagccaagtcaccccaacgaaattggataggcaaggtgggattaaaagtggctgcagatttgcaaagagtaggtcgcgctaaagcgcgtgggccatcagggccaaccggttagaagctagtttggccattcgactcaaacacaagccacaacacacatag

SEQ ID NO: 111330 - DNA, 278 bp, Zea Mays
ggattgtgatccatgaccattgtgccgcccactatttgatgcattcctccagctgccccttcaacatgctagcgatcctaaaattttcagcaagatgagtgtacaattcaggcgcactagcaaaggacaccccatgttatcgatgatcctgtaaattcccttatttgaatcagtgacatgagtgaagcatatagtctcagacttttggggtacaagtgacgtcttgaatcatggcataatcgttcttttcattcttcattttcttctagtcatcatca

SEQ ID NO: 111331 - DNA, 601 bp, Zea Mays
ggcggggcaatggagaagatgccctgctggtgggtgtctacgtcgatgacttgttgatcaccagcgccaaggatgcagaggtgacaacgttcaaggaagagatgaaggccaccttgcagatgagtgacctagggcatctctccttctacctggggattgaggtgcaccggggtgaatgtgttcttcacagtcaagctacagaaatgtctgaccattgccctttgctgctgggtcttaaagatggagtgaagagtaggagacggttccattttggaagtttctggacaagactcccagggttcatggatactatcgccaattcctggtcacaaccagtaaggtgtgtgtgcccacttgagcacaacaagacacatcaagacacaactagctctagctagtagctagagaagtctgtgagacaactgacccatgatgaagcatggttgagaaatgagctgaaaaaactgtctcagacttgcatcttttgaaagaaccattgcaagattaagggccagaatcaggttcttaaaagatggggatgggaacacctctttctttcataagcaagctgctttccgtaaaagaataaatacaatcacaa

SEQ ID NO: 111332 - DNA, 351 bp, Zea Mays
agtccccgctgccgccaccagaggagcggtcttcttcgacgacgtcaaccaccattccaccctaaacaccacctagacatggacggatccctcgacccaccctatatcttcgcacagatctgacgatggatctcactttgtggctcttttcctgctccgttatctacgcctagcctcggagtaagtcacagtagaatggctggagcaatgtggtcctagtcttgctgacctcttgtgtggagaggctctatattttcgcaatatgcttgttgtcaggctgacatgtacctttttggtgagttcatgtgctcagctgcttgtctctgtcaagacaaaaacattgtgtgtgat

SEQ ID NO: 111333 - DNA, 668 bp, Zea Mays
accaactcaccagcgttagcagatttcagatcatcaatttgcttttgaagaaaaagagggttccaccgtgacaaggaagaaatttgctcaggaacgggagcgtcgcatgtgtctagctgagtagccaccaatttcaggacactctgcgggtacagaagtcatcaaagggaacacccattggtaaaaacaaggtagcatgtgatgtagatacttgtaatttggataggaacaaggtaaaccccaaagccagaagtgtcgacgtgctcctagaagaaaggacattaacagaagccgcattatgagcagggtcatgcatcgaaggaacccgataatccaggctaagtgcaacacccattgggatctcaactctagttacacccattgggtcttcagcacttagaacatccattgggtcttcagtgccatggccactaacctctaaggtggccgggccggctggaccaatgagtatatcagaacttataaccatgacatcatcagtccagggcattggtgaccccacatgaacatccattgaagtagtggaggggaaccgaccaaaggacccttgagtgctggagcaccctcgggggatgaagagccatggcagacaggtaggcttaccactggcccgacctgtaagccagcagagggaacgtcgtctagac

SEQ ID NO: 111334 - DNA, 559 bp, Zea Mays
atttcagaaatcccttcacgaaataagcaagcaatcacttctctgcaaaacaaactgtttggtggattcagcctggaaactgctctaggactctgatgcagatttctacagccattggtggcaacagtttactaacactaaggagcagcaaaaagctaaaatgatttccctggataagcttcttagttatgtttaggaaatagaatctaaaacatatagattcatcaattatgttcccatagccacactattacatgccaaaatggaaaaatgggataaaatggaaagcagagcacatactacttgttatatccttcagaggagtcccctgtcagggaggtcaggaaccgtgttaggggtgggcatcgacggtttgggatgcgaggatggcaactgtcgtaaaggcagattcgcagcgggggcgccacatgctacagagggttgagggatggccgctgtcaaaggtgagcgcctcctgatgcttggatttgatgggtgggaggcactcgaccccaggcagacggttgcccgttgatggaggtggacttgagtgtatccg

SEQ ID NO: 111335 - DNA, 278 bp, Zea Mays
tcgacgattcattcctgacttctccagaattgctaagccaatggctgagttgttgaagaaggtagtgaagtttgattggggtcagaaatgtgaagatgtctttcacaccttgaggcggcatctgacaacagcacccgtgctagcacagcctgacaacaccaaatcatttgatgtgtattgtgatgcttcgggcactggactaggttgtgttttgatgcaagacaaccgagttattgcctacgcatcaagagcactcagacctcatgagcaaaattatc

SEQ ID NO: 111336 - DNA, 298 bp, Zea Mays
ttaaacggttatctgatagcacctatcggtgtcgtcataatttctgttgtatggcggatcgatgctttgctttgtcaatcattgcatttcatgcccattggataaataaatatcttattgattgattagaggtcttatataaacgtgatcgcagcccaataattattggaggcgagtagcattcataagtcgatccttgttaaaattgaggaacaatctgacaagatatgcacataagtgctttaggtccctcagtagcaaatgtagtcttatagagttttacgccatgtgtaaatgt

SEQ ID NO: 111337 - DNA, 736 bp, Zea Mays
gacaagtccttagttttaagagtggaaggtgatacaacctacatcatgtagttgcttttacttgttcccaacccatcaagtttaaaataaatcgagacactatgatgtatccaatggtattaaggattgctcataactatgagcatagcaattcaaattgattcttgaatccttgcaagggggtactactttatccacatgacaaaggggccatatatacgactcatccactttaccactatgaatgagaggtacttatgtcgaccttttccaaagagtctagaacataagaatgcacacctagctcatgcaaaggcctacctagctaggtccaccgggcacaaccctaggcatcctctaccacgtcacacgagaccacatgtctaggaccgtgtccataagaatgaagcaactaaggtaatcaactcatcctccctataagaggatatgtggtagcacaaaaaagtttctcaacccaacgtcaacaacgaatggtccttagttgactctagcagtctatgtccatgatactccattctcgcaaccatataccacccgttcaagtctcgcatgaaactaaacaacattttaactactacttgacataaaagagactcctttggaagttgatcaataactttaaatgagctcatatgtcataactatgagatactagcttactctaatcaatctaagtcataaagatagtagagtagtcagtccaactaaaaaagga

SEQ ID NO: 111338 - DNA, 966 bp, Zea Mays
cctcatcctaggtgtatcatttgattttggtgcacttttaccttcacgtgaacaatttatccacttactgaatgtcttctctctatatttcttcaatggaaatccaacttcatatgcataccttttatagaatttatatgcatcatcaacatccttgaaagtcatccctactgttggcactatatttggatcaatgtttttttctacaattcattgacattgttgtttgtaccacggaatatgatcataacaatctaatcaatcaagaatcaaatacaacaattggacttacatgtgaatgcagtatttgaggcgtatccgtctccctggagctaatattggacatcggaggtcgaaccctttgttcgccttcctcccctatgctcatctcgtcgattacatgccctagtagagcaggaggtggtgtaaccagtaagttaccatcaactactccctttgtctctggatcaagacgaacgccatctcctaccatcgccggtgattgtccagagccggccatctccaccgccaactagttatgcagtcttggggtattttttcgaatgaaaggaaatcacggatgctatactaaacaagtaaccgcatccacgtttccagggtattttcattatttccgaaaccgtaccgatattatagcaatgtacatgtaatacaaatatccctaacacactacttacgcacaatgactcaatgttttacgccaaacggtatatactatatatgcaacatttatagtgtatctgttttatgccatatctttcaacatcttattcgatattatctttaactcccaccattataccccatgcaagatccataaattccgtgcccacgtaacaaagtaagcacgtttgcatgtggaatctaatccctataattccgcccactaccatatgtttaccgcctagccattaaccaaccgcgtcacggcgccgtctgtcctgc

SEQ ID NO: 111339 - DNA, 508 bp, Zea Mays
ggatctttatcaagcttcattttgttagcttctccaaatgtcaatcgtccatcagtcagggccgattgtatctgacggtgaaaataattacactcgttggtagaatgaaaaaatgaattatgccatttacaataatctttcttagccaattgctcagggggtggaataacatgcccctcccttaatctaatgatgttattctgcaataagatgtcaaacaatttatcacacttggacacatcaaatgtatatttcatctcttcccttttccctggacttggctttaaaaaagcacacgtcataggcctaccctttggcgcatctatccattcagccacacatacatctgtctcttcatcactgtcattattgggctctaacatgttaaccccctgtttctctttctccctgccattcgtatctctaaaccggctatactgtttattgtccctagcacgactttcatgggtgatagcacgctgcatgacttggtttatgtcagtaaaat

SEQ ID NO: 111340 - DNA, 948 bp, Zea Mays
catatgtactcaaactaaccttttgagtctttgctgtgttgtccttatcttcttttggctgttcatttttcttgcacttctctttctgcttcacagtcaacttatcccgcccattcttagatacattgacctccgccttgttcaaggactgctctccatgatttagatatctgatatctctattttcaggaacaatattcaggtgcttcatgttcatgccatcttgccttgtagtttcttgtggtaatgtttcagattgaacatttatcatcatttgaggtgctatagatccaactttgttaaccacagaaggctggaacaaaatttgtgctgtcttatcagtgcaaacttctgcatatgcactagcacgaagtggattttttttctgaacacaacttggggcattctgatgatgcccatcatttaggcaattgtattgtagagcatctgcttggttgagaatcatatcaaatgcttcaatactagtagccgttttcatattatgatctatcggactgccaggacttttgcaaacaggatttagatattcatcagccccatttttgcattctccaactaaaacatcatgactggccatgggaagggcacactctttttgtagatcatcactatcctctactctattgttaagtaaggaaactgtttcagattcactaatcttgttgcttctaccatcaacttccatattgatgtttctcaatttctcagcatccagtggaggaagattgacagaacaagggcaatctgaaaaacctgttggcaccagtgctaaagacatgttcccaatagccaagtcatcgtcacctctaagaggctggtcaagtttgtgctgaagatcaccgagaaatgtgccgagactgggaagcctatcctgcaacttttgcataacctccaaatgtacctgagtcggatatgacaaaacatgtt

SEQ ID NO: 111341 - DNA, 505 bp, Zea Mays
gtgcaatcaagacctaattgtgggttttggtgataatgatcatacaattagaggactaatatgttttccaagcattgtgacaggaaaagcacaaaaagggaaaaactcatggcaaaggaggggcaccaaatgattataaaatctgttgtgtgttttatttatttcataagtgtagagttgtcgtactattaagttttactaggtttgtttgttgttcttggttctccaatgctaaaactccacagaacacctctacctaaacgtagatagccagtgccaaaatatcaaatcaatatgacatgtctggcttgcgtgacactcccagacattaaatgatcattggactttagaaattcttcatttgtttatttccttggtctctaacagttacatgttgtgtatcctgacatagggaaacaacatacatattataaatacgttccttgtcccatttgaatctttctctccctcacttgttccaccttagatcaaatttcagttgctc

SEQ ID NO: 111342 - DNA, 1075 bp, Zea Mays
ctatatattgtaaggcctgctctcctctatcaatacagaagactaccccattctcctttccaatatggtatcagagattctacgttcctagcccctgtcttccgcctctctggcctctgcctctccagcagtggctgttccttttttttctcccccctcccctcaccctctatggcgacgtccgacgatgaagccgcttttcttcagcaaatcgccgccatgatcaagactgctcaggatgctgagcagcaggctgctgcagcacgcgcccgggtccaggctgccgcggctgttcttgagaaggaacgagccactgccgctgctctggaggagcaagcagtcaccgctgccaagcagatgacgccgcctccgtacactggcgctttttcttctccgacgctcgagccctctggtagctatgaggcgaccgtcgtcgccaatctgcacctacaggctgctggcgttcagaacatccgttctttggttccagtgaccctcgagccgtcctccaccaactttgcaacatggcacggccatcttcttaccctcaaacggtatgccttgacggatcatgtacttgctgactcctactttcccaacgacccggcatgggatcgcatggacagcatcgttctgtcttggatctttggcaccgtctccatcgagctgcaggagcgccatggtacggcacgtcaggcttggctcgcccttgaaaaccatttcattggaaatcgcaagacacgtgctcttcacctcgacgccaccttccgcaactttgtccagggcgatctcactgttggtgagtattgtcggaagatgaaaggcttcgctgatgctctctccgacctcgacgcccccgtctccgaccgcattctggtgctcaatgtccttcggggcctgaaccccaagtatgccaatctccggaccatcatcacccgttctgttcccttcccgacttttcacaaagtccgagatgatttggtcttggaagagattgtcgcaggggctgtgcctcctgactctgcggccagcgccctgtacacctccactgcagctccatcggcttcatcaccag

SEQ ID NO: 111343 - DNA, 974 bp, Zea Mays
atcatccctggcaacaccctcgggggctgggtgagcgccaacaccatccttgagggccgagttctctgtagcagccacctctaaggctgaaggtccctcagtcacttccatgggagcaggacaatccaagtcagcttcctgaccctcaagaccgcgctccaaggtcgatgaggtgcaggacgctgcccgggatgaccccaacccggtgtcgagcacatcagcacaaacatccatcgcgtcaccatccgctagttctgataacagatcctctggaaccatatcttcaatagtttgatcaaagtttgccagagataattcttgtagaccaatgagggcagacaaagcaggagaaggaactccactactttccccactagctatgtagcgccgactgttcttctgaatcagagggatttcatcttcttcttcctcctcattttcatcagcaacacggacagcacacccattggggtcagcgtcagatgggtcacacccattgggattagtttcagtaaattcaggcacgggcacttccttagcagcaggagccgaaggaccagcatcccgatccaagctagacactcggcgaagacgtctcttcttctttttctgcccatcagcaggagaagcgggctgattggctcggcaagcgcgtttcgggcgaacactgataggcctctgaatatccaaggctttactagcttctgggagaggcgccaccaccaatgttccagcaggagcggcatcagaagaatcctcggctaacatatcaagcatagcacttatctctgcatcactgggatccaaaggcacctcaaagtgaacatgccattcatcatcaggaatttcttcaagcaaagcaaccaaagcactaacttcttcggtagagggtcgcactctaaggcccaaaccgccatcaccagcaggaggatttgacacgaaatgggtaaaggccttggaaggaggcaagttcc

SEQ ID NO: 111344 - DNA, 883 bp, Zea Mays
gcaaatggtgtggatttgattggacgccacgtgatagcgcgtgcgctttcatcaaaggcttcaaagcagcttgcagcttggcttattaggtgtctgtgtgctttcttttgcagagctcgcttaagatgtcgccgtgtttgaacctcagttggacctggtcaggacaaatgtgactggttgggctatatacggattgacgtacctgttgcgagttgctgctgctggactgtgattgttttgtcacgtattgaggctcatggagtcacggatggatcagtacgaaatcatggagcagattggccgtggggctttcggtgccgccatactagtcaatcacaaatctgaaaagaagaagtaagatatagcgctcttccatcagtatgtaggctatatatggctttgtcccttccctaccatttgggtaactgtatgattgtcttgcaggtatgtgctgaagaaaatccgtcttgcgaggcagactgagcgctgtcggaagtctgcccatcaagaggttggtgaaatgtgatgctttatttctgattcatcggttgtgccttgaagagtcagtaagggaaaagctgaattgcagatggctctaattgctcggctgcagcacccttacattgttgaattcaaggaggcttgggttgagaaggttttgtagttcaggaacttgttcttaccttgtttcttctgtttgaacttatttagttgacaaggtgagttatgcagggttgttatgtctgcattgtcacgggctattgtgaaggtggagacatgtgagtgtgctttggcggtcatccttttagttgcaacataaccacatttagttatgagaacctttgtcttgtttttcagggatgagctgatgaagaaatcaaat

SEQ ID NO: 111345 - DNA, 452 bp, Zea Mays
ttacatctttagaagataaacacctgtatacttgatgggatacaattcgtcacctaataatctgttcatacagaggctgacttataggaaaagatttgctatctaaatacagaaatagaaagtatgaaaatggaaatggttcaacttctcaaagatttcacttctagcttcagcacctctagccctaatatatatgctttgaattagacaccatgttgtttactgtgcgggcttcgaaaggctcctttttgtcctgttgatacaagtattttgtactgagtattgagggtgaccttaaggcactttatcataagttagaggccctaggatataaggttgagccccccatgactggattgtgggttggtcaaagaaatggacactgaaggctgaggctttggcttctgatgctagacatgctaagggtgtgggagataggtatcccctaggcc

SEQ ID NO: 111346 - DNA, 278 bp, Zea Mays
gtcgttttcaagagcttcttcagagcaggactttggttccccttaaatgacatgataggggaagttttaaagaactttgagatataccttcatcaattgacacccaatgctattgttaggctcagtgtttttatatgggctctctgaagccagggtatggacgccaatgtagaagctttttgccgggtacatgaactgcattatcagacgaaggccagggcagatggtcttcataagaactttggctgctacaactttgcatataggaaagatataaa

SEQ ID NO: 111347 - DNA, 482 bp, Zea Mays
cgacgaaccaacctccaaaagaccttatcaacggagaccgtgtcctcgctttggaagcactggacaaataccaagcacagactaaggcatggcgtgacaacaccgtcatcccaagagagttcaaagaaggagacttagtactcaccagaaccatcagaccagagtctcggggcaagcttgaacccaagtgggaggggccctacatcgtcaagaccaaaacatcactgaatgcttacaggctcacctcaccatccggcgaagacttagagcattcgtggaacatagacaacctgcacaaattctttgtctagtcccaaggcctgaacgcctttgtaactctcaaacaatgtcaatcagacccacactcttttcctcctagaggtgaggtttttaactaggcggagtcgtgtaatatactaccacaaaagccccccaaagaaaagcaaagtcaaactagcaccacgagtacgggtgtcgaaaaa

SEQ ID NO: 111348 - DNA, 531 bp, Zea Mays
accattagttagaaaatatgcaatcaccatatatgaaaaaacaacaaagagatagcttattactctcttgtacggccatgcgatcgacatccgatcagcatcacccatctcctccaaataaccatatgggcgaggtagaagggcatcccttttcagcacaacattctcaaataaatcccttctgtgttcagaacagaacagaatttggcgacagcgtttggagctggtttcctgaaacaggtcagttcctattagatgaccatgatcatgcctgccactggcttaattctgttgtgtcctaagaaagaagatccgaaattggaaggttaaattcctagggccagacaaagagtccaatctcattcatcatatcagcaggtgcaaaacatgacacccttgctacatgtggttcgttggtcaacaagtagttactcagatcttgatcaatcgaggtcaaaaaaaggaaagtaggaatcggtccaaagtttgacagaaaaaaatagattactcagcctgtggttctgctgcata

SEQ ID NO: 111349 - DNA, 449 bp, Zea Mays
gtgaggttgggcggacgtctggggaggtcgccagtgcggatttctcgcctcaatcctacctccttgcgcctttaaataccggctggggtgctctgcgattcaacaatcccgtaatgtatcgaggctgggagatcgcagcgttgagcggagcatcaaaaccagtggaagaggtcggagagagatagagaacggccggtgcggatcttcatcaagcgcggtgtcgagcaaaggaaatggagaggggagagaaaagatgaagccgccgtcgatccataccctcggcttgctgcgtcctgggtgggtgtcctaggagatccaccataataccgtgattgctcgccggtgtaaggatctaaccgctgggccgcgggtcacgtgcgcagggcacctcgcagcttgtaccaaggtatgatgactcccccattatgctcacttccgccccctcttgc

SEQ ID NO: 111350 - DNA, 364 bp, Zea Mays
acccttaagatatggcgtcattatctgctgggaaatacttgccatttatatacggatcacaaaagtctgaaatgtatctttacccagtcagaactgaatatgaggcagagaagatggcttgagctaattaaagattatgacttggaaatccactatcacccaagaaaagctaatgtggtggcagatgcattgagtcgcaaagtttcctgtcattgtcttaccgtaagggcctataacaccacactatgtcaagaaatggaaaagaaaaacctaggtatgatacaacatggaactttgacacaattaatgcttgagccagttcttctacagagaattattgatgcccaaagaaccgacaagggta

SEQ ID NO: 111351 - DNA, 805 bp, Zea Mays
cggctgtacagtacttgcccatataatcattcgagcaataccattctttatttatctgacttatgaccaccagtgaatctccgtataccatccaccttttaatgcctagtgatatgcctagttactttgttggatgctgaaaataacaactgaagagcatatttgagttgttcacctccaggagcaatgaagaggatccctgcgcctgctccctacagtttcagcgaaccatcaaagtacatccgccagacttctgcagcctccgtgttatctggtacttgttgcttggtccactctgatatgaagtcaactagcgcttgagtctttatcgcagtgcgaggccgaaactcaatgtcgtgagctcccaactcgcaggcccacttggctattcttccaatggcttctttgttgtggagaatatcccctattggaaatccggtgactactatgactttgtggtcatcaaagtagtgacggagcttgcgagcagttagaagtactgcatacaatagtttttgaacttgaggatacttctttttagagggtcccagaacttcactgatgaaatagacgggatgttgtactggatatgcgtgtccttcctctgcctgttcgactattaatgcggtgctcaccacgtgagttgtgcaggagatgtacaacagtagattttctgccggctggtcgggcatggctcggtgtggcggctttagcactggcggtgtggtcaagaacttcttcagtgcatcaagagcttcttgagcctctgaggtacactggaacttgtccaccttcttgagcaatt

SEQ ID NO: 111352 - DNA, 470 bp, Zea Mays
tcttttttcatcgaatacttccctacaattttcaccacttccacctccacctcccaaccctgtagctcaatggtgaaggaaagactcaacaccattcaatccttcaagaaaggcatcgggcgtagcttcacttcacccacatcccagccatgcgcaagcggccacactccataagtaataaactcctccaccaagtcacatccgctactcaccttggaggcacggcgaagggcatcttcattcacatctcctttctttagtttaaagtatgggaaggcgacacagcaatgtgagcacattatggatggaggcagccccgaaacaccttcgacatccttcaatgacacaaagaacaaaaaatcccaccaattcccccacttgttttttgcacgtggaacgattttcacaacttcaccctgtagtcttcctagtctttggagtgaacgtgcacaaaccaaactgcataatct

SEQ ID NO: 111353 - DNA, 588 bp, Zea Mays
ccggtatgactcacgagtgttggcttcttcaccttctgccatctcgagactgtcttgaagagccaccttttcttccttcaactccttgatttgctgctctaggctttccacccgggagtttaggtgggtgcagtgggaaaaaaggtcatcatagtggttgtcaagggtgtggagatatccagccatgtagactatggtagggtcatcttcattaggatctctccttgacaaggcctggagtcttttcctccaagcaggagtattttttttgctaggtggaaagtagtgaaggggtgtctcagagacctccctgttgtagttttggcatagctagcggaggactttttgggcagcattctggcaggtacctcggaagcaatggccagtagcagtgatctgaaagggagggtgatttgggtagtttcagctttctcccaagtagactgccatagagcatttctcaatcccattctcgcggtattctttccagacatactccggcttcttgaggatccccatgcgaagcgcgcagctccgaagaaggtgagggaatccttccacctctgagcaataggatgtcctaaggac

SEQ ID NO: 111354 - DNA, 273 bp, Zea Mays
attgcctatctattacttagattgattaattgtccattatttactatttatttgttactgatattttattgttgttcttgttgtactcttgacctttgtaaatgctattgctcattccttttttaaagcagtctgcttcttactaggcactaaatatgctgtaatttttagcaatggcatgctgcatcatttttgtagaaatattcaaatcgtgtccttttggttttgctctggaagacaaatggatctgggttctgggttgtgtttaagcaa

SEQ ID NO: 111355 - DNA, 524 bp, Zea Mays
gaaggctcctgcaagctctcgtgagcaaactacagctggtccctctcgtccttctcctggtcatggctctcccacaccacgtggttgtggtcatggtcgaggtcatggtcgcggcatgggagcaaggttggctcatggtatagcagcctttttctccatgtgcaggaatatttctactgatgttcacgagctagccaggcggcagcgggagacaaatgacaatctccatcgccagtctatctccatgggaatcccttttgctccccgctcgcctgacgtgcctctccatgcacctcctccagaaataaatgaatggcatcaacaaacttatggagttcaattcatgtcggctaaagatgaagatgttgaagaagaagagttctttgatgacagggatcagtttgtcccgcctccccaccagggcgatctgggtccctcttcatcttatcctccccccaggatccttcaggcagcactcctccccctgctaaccctggggaggaaaactttgcagtcaatctggc

SEQ ID NO: 111356 - DNA, 773 bp, Zea Mays
gcagattctgggttttgacaggcctagaggtacaccaaggtaagtgaaaggcatagaacctgtctggcagtttaaagttctggttagaatctccgaccttgctgggcagacattgattgggtacatacttgatttaaggtaattgactttaagacccatcgaggtagcaaaggagtttagaactgctctgagaaaaaataattgtctggggcaagcttccaaaatcaagagagtgtcgtcggcatattgaacaatcgggaaatcttgaccacagttctcagtgagtggcagttggagaagaccctgctgtctcgccttattgattatactttgaagcagatctgtcgctagaacgaataaaagaggcgaaagagggtctccttgtcttaccccacgcttgcaatgaaaagatttgcctggcacaccattaaggagaaccgaggacgtgccagagtggaggatatccctaatccagcgcagccatttgggcccaaatcctctgaaggacagcacctgaaggatcagatcgtgctcaactgtgtcaaaggccttctcaaagttcagcttgagtacgatgatttcttttttggaaacatggcataaatggatgtattcataagcccaagctaggcaatcctggatggatctacctttgatgaagccatattgatttttgtgaacaagggatgtcatcactgtctgaagacggttggccagcaacttagtgatgattttcatactattatttagaagcgagattggcctaaaatctc

SEQ ID NO: 111357 - DNA, 481 bp, Zea Mays
gctgaatttgagaaagccgtcaaacagaatcagagaaagaaaatgaaggtaatggcggcatatattggacgaccaatgtataatcatgtacaacatggcaaggacttaataatagctccgcaccactttaagtaagttatcgacatggttttgaactataaattatggcaatcatgatcttaacatgtgttttcgtctatgtctatatagtgaccactacatttgtatcatgatctttccaaaggatggtaaagtcgtggtctttcgactcacagtgtacggaaaaggctacgtataatgacttcttgaagattttagagaagtatgattattattgcacacttgtacttattacaacttaacaaatgtattcttaatctcacaatgctattcttatatgcagtgcataccatttttattggaaagatcttggcggcgaacatccagaggacaagcctaatttgtcaatatcattatttcc

SEQ ID NO: 111358 - DNA, 727 bp, Zea Mays
tagttggtcggcccatttgcccttcttgtcgtcgagaagtcttttcttgatggcagtgaaaatcttgccgttggcgcgctcgacgacgccgttggattacgggtggtataccgaggcgaagacaggcttggtgtcgatggagagacagaaatccctgaagtcctggctatcaaactgtttgccgttgtcgactgtgagttcggacgggactctgaatcaacagacaatgttttgccagaagaacttttgggtggtcttcgacgttattgtggatactgctctagcctcgatccacttggtgaagtactcgacggcaacgaaggtgaatttgaggttcccttgagccgtaggcagtggttccacaatatccagcccccagcgttgaagtggccatgtgtgggcgatcagcttggtgaactgcgaagggttgctcgagcgaggggaaaacttctggcatgcttcgcaagacctcgtgactcgattcgcagtacagattatcgtgggccagtaaaatccttgacggatcaccttggtagcgagggccctgggtcctgagtgggagctgcaagttctgttgtggacttcgcgaaggatttgaatgccttcggtttcggtcacgcactttagcatgggctgactgatcccctttttgtacagctggcccccgactagtgcgaagtcccggctttggtgcttgaggcgtttggcctcattgacgtcacttggg

SEQ ID NO: 111359 - DNA, 279 bp, Zea Mays
aaaagtagcaactcacacacagtaggagaggagaggaaagaacccagcgatagatcagagtcggagagaaaattttgcctcctcccatcggaatctagctaattattttccagtccttctcccccatgtaagtctccctctcccatccccgtcgcctgcacctaccggaagcgaagccttctacagttcaggtccatatccgggtcgccgccgtcggctagctctaggcggacatggtggccgcttgccggagcacggcctccacctacgcgtttctgc

SEQ ID NO: 111360 - DNA, 522 bp, Zea Mays
cgcagcccatcaaagagagtacgatcatagacacctggatgatcgaggcatatacagacaaacgagccttaccaggagagaacgctcatctttaccatggcacaatagctcctcctcaaggaagctattggtagtcgacccccaccttgacctataaaatgagtaggtcggtgacaaaatgaaaggggtacactcaacagaagacgaacacacacactcgacgagaccagaagacccggaggtcggagccaaggcgtctgtccaaatcttagcttagaactctagtcccatagtctttaggtccacccacgcatagagacttgggagattattcctctctcgtccgcttgtaacacatactacgagcattgagcaacaaaggtgccagtagcgtgagccaccgaagactggatgttgggactttctggccaaaccagtataaatcttacgcccaccgagcacaccatacgaaccgtggaacacgcacatacaaatttacttgttggagcgtaggttcgaaac

SEQ ID NO: 111361 - DNA, 551 bp, Zea Mays
gaagatcattgagtatttgagtgtatttagtggttgttgccatattttatcatcaattgcaagtgtctcttgtggccatcctcgcaaagaacaactcattagtgtggttcttacgacactcttgttggctaggtttgcaatgtctattagtgcatgaatcacctagtttggactcaatacaacaagcatgtaggttgctagcaagcaatcgaatatcaggtataaataagatcaaagactccttcatgcacgtacacatggtctcaacacacttttggtcgatccatcatcatagcccagagcatgccagagacacaacctctattttgatcaggtagatgattgacttgccactcaaatggtttgagaaatcatgcagcaagacaccacctttagagaccaataacctatacatacaactacaggtaacccgacatatgttagcggatggtccgtgcaatatgaagcagagtgcttccatatattgaccaagtcttagagcctaagtattgggcatatggtttcatgccacctgagaaaggttgaatccc

SEQ ID NO: 111362 - DNA, 295 bp, Zea Mays
aggactcaaagctcaaccttgtgatgaggatgagttcaccttggttaaggtgatgtttccctgagttcttttttatcttaaggggagaatgcattaggtgttgataatgcttatcatgttcttatttttgattatatggtgtaatgcattaatagtgctgattttgttgctaatcgatgcttaatctttcaattgatatcatcttggtgcagtatcgtctttagctgttattaatttgtagatcaattggtatctacggtgaatagtgataggttgatatactggtgttatatct

SEQ ID NO: 111363 - DNA, 502 bp, Zea Mays
tttggttggctgctgtctgggggggttagttctggcctatttcattgtttcctgtttggacgaattattggcatagtctatgtacatacgcggtcatgggcattgggtatataccttttattatgatagtcaatagtcagttctcagtatcctatgtatgtcctccactcagaagcgcaaagctgaaggctgaagtcgtgtgtttacttgaccttgccgtcaagtgcttctcatctaaagccagccatcgctaaacgaatggctccatatgaactgaggtaacctacggtggactggacaaactgattagacgcctttttgtttccctgtgttcaaagaatcagctgcatccatcattgtaaaccctactccagctatgggtggggacatcagacatgcagatgcagagtaacggatggcccaccaaaacacctgatcgtgtcgtagcccagcactcatggcgcgatttcgcaacaaagtgtgcttattagacatggcctat

SEQ ID NO: 111364 - DNA, 412 bp, Zea Mays
ttttgaggggcacaattatttaatgtgatgggacgtcctatcggtcagccgaccgtttgcagcgagcatgtgcgtggaattcaaaacgaccgccatctggccatgacgattcgcacatcagtgacttcgcccatccctataaattagtcggatcgttaccttgcctctttagccttcctgctttacacgttgtcctcgccttctgccaaaaaagatatcttcctcttctccccgtcttctttcgccgtcctgatggctgagaagatcagcgtccttccccatcgcgacccatggcccatctccttcgtcaccgatgaggatttggaggcattggtcgacgccgatctgctccgcccctgctcccacggcccgcagccttagtggttcgcgtcgggcgatgagcagatgtcgg

SEQ ID NO: 111365 - DNA, 678 bp, Zea Mays
ctttgggatggcaaccaagaatctactggtacgtgtctgaaccgacgtacccaggtagcagtggctcgctgaagatcaagcagatgtggatcagcagcaagcggtggcacctcggtcttgtcacactccctgaagcgaggtggaggaataggcggagcgggagcgggagcagaggaagctagagtggtggaggtggtggacacagcgggtgtggtgaatggctcatgagcgacaggagctggcgaagtgtgatttggagtggatactgtggcggaaagagtggggtgagcagtggaggagcgaggccgagacgcgaggcaacgacaggaggaggcagtctgatcagaagaaatttgtaactggcttccttgctcagcctgatctgctgctgctaccgctgcaagtgctgcacgagcggctctatctaggcgcctcttcttcctgccctcttgctgctcaagatatacagtcttgcccttgacctgtctgaaggggcgaggagggtccttgtcatctcctccccgtgacggtgtgacgttcttcgtcctcaccgtcctgaactgactgctgcaagatagtgtgaaaagataagcgagagtagagagcagtagataaggcctcaaatagagtgatagctacctgggaacttctcgagagagaaaagatccaggcaggaca

SEQ ID NO: 111366 - DNA, 550 bp, Zea Mays
aagttaaatcactaacttaatcatacatgcacaacaattcatgaaattattaccagtcaccaaacatcacaccaagagtctactgtaaaaatttcaatctatttggagcaacagagctacagatcaaaaaataacaagcaaatcaatcttcttttcactatttaacatgttttaattaacacaccaataaaacagtgaacaccatatgtgttttatatttttattagctagagtatgacaacatctaactatcaaaacaagtttcatcatttttggatttttaaaattaaaactgtggagagaagcaagttcatttgttttctaaacctcttttcaaaaatgaatttctacagccaaaagtttctactaaaacattccaacttatgtatccacgacatagagaatttcacaaggattccaaaaagttctcatttaacattttacgatttttctacggttttctatgaattttcaaagctgcagcacaaaatctggaatagaaacggaaaaagggaaaaatcacctttgcgcttcagtccctggaacaggc

SEQ ID NO: 111367 - DNA, 314 bp, Zea Mays
ataaatgatgcatgagatttggtataatctcataattgatgttgtgataggttcaactcatgcgctgtgagttgaacacactcatgtgatttgagtgtaaaaactcatatgaatttgagttgaacaaactcatcgattagaattgaaccaactcatcaagggagttgaagactcatttatttgagttgtgcaaacttgtatagggattcttccaattgagaaagaaacatgcaatgtggagaattgagccacaaactctataagtggggaacaaaatattctcatattcctttggaaagaggaaagaatatttt

SEQ ID NO: 111368 - DNA, 638 bp, Zea Mays
attaaagaaaatggcctatggcatcgttttctttctttatcagatttctaatttctcagatatagggatatcctgatatatgctacgaaaaggggtgggggttggctgctccgagtcttcgaccttcaattatttgctgtaataaaatcaacacgtgtgtttgatgtaaagtttccatatgaaaaggaagagatgaccagcaagtattgttccatagagcaagttccagatgagtgggtttttggtaatgcttttactaaggtgcaagacacactggttatctattgccactataaagtactccctccgtcccaaattaaaatctgttttacctttttagtgtcataggtaaaatccatataaaatctatctgttttatatggcggcttctcctcgttggcctcattttccaggtaaatatactgtggctgtgagattactccctctcccactcccatggggtgattctggttgaaaaggcttgacttggattcattcattcttaatgctttttcagagagattttcttttgtgtactaatactaaattgatagatgatcagctcggcatttgcagttttcctacttacagttccgcgtaataattattctgtatttattttcttaatgatataaaat

SEQ ID NO: 111369 - DNA, 606 bp, Zea Mays
cgaggttcagtcaataactgaactgaagcctatggcttcgcagcttcatgcacagaagagcactttggactggaaattgtggcttagtgaaaaatagaatgctcaagttgggcttgagaggaaagaatgtatcttggtccgaatttaagttcattcgtgtgcttcagacttttggtttattggcaacacaattcctctcagctcagccaagacctgtgggctgtggcgaactgtccttgtcaccatcatttggcgcctttgggatgcgcaaaatggcgcattttctgtgacgtggtgttatagaatcagcatgtgatgactttgtcatctggagcaaacaattatctcctgcgtctcttagttttgatttgtgtcgttggcgtatttaccttcagagttcagacttgtaactctatgatccccccatgtgcctgggtaaacctgtgtacccttttcttctgcaatcaacttctaggtggggatccccataccccacccaaaaaaatctccaagaaactttgttgttacagagtgcttgagaaagatttgggatgatttgcattatttgacggtaacaaaaaggtgtcaagagacactagaaaattt

SEQ ID NO: 111370 - DNA, 480 bp, Zea Mays
gggagacgacttcgtcttgaagataaatggtccttcccacttcggttccagcttaccccgtgactctgtccgggttgtgcggacaagtacgaggtccccttcgttgaattctcttgggacgactgcgtggtcgcgccaggccttcgtttgggcttgatatttatcgagggcctgcagggcgaagacacggtctccgtcaatgaggtctttggaagttggctcgtcgacgtcaggtactgttgaagcgcttgtccgcggggacccatgtttgatctcctgcggggtcaaggcctccgatccgtacaacaggcgaaagggagtgaatccggtcactcagcactcggtcgtgttcagtgcccagactgcttcaggtagcaggtcggcccatttgcccttcttgtcgtcgaggagcattttcttgatcgctgtgaaaatcttgccgttggcgcgctccacgacgccgttggattgtgggtggta

SEQ ID NO: 111371 - DNA, 462 bp, Zea Mays
tatgtagcagaactacaatggattccactcttcgaaatgcttactgtaatctatctctagtctaccagaagtaagaagagtagaaaaatagtcataaaattccacatcaccacagagcttgaagctgaattagacattaatatgtccttggtcctcggagccagaagagccatatgttttgaccactagactactagtgatgataatttgtgatataaaatatgaagatcttgtagagacctgttgtatcctctctactcctgatgatttcttcgtatgagagcagtaatatctgttgttgaagatggatcctaggcaaataccagtattgtttcgttcttgccaagcagttgtcatcatttgcttcatcaaaagctagttatatggtgatttctcccagataaaatgaattcttggccttgtctgttctattctaaagcttctctttttgccgaacaatga

SEQ ID NO: 111372 - DNA, 302 bp, Zea Mays
cgataaggttgggctataactagagatgcaccgagtactagggggatagcgtgatcacagtcatgcaccagaggcaactcaatgggtacaacaagtaattttgcaaagacgaacatgatatattgcgcttcagggtgaagggctgagcaactgtctgaatcaagcggaacaatatccactgagaaaatctgaaccactatgccatctggaatggatcatgatgctccttgtaacataacaaaattcccttggtatggtagcaccatccactgctattgccaatgaacatgcataggactgaa

SEQ ID NO: 111373 - DNA, 918 bp, Zea Mays
tgtgatgtgcgtggttccgggattgtccacgtatttggacagccggagaatgggtgtggccgcatgtgattcgtgcacgtgttcgatggtctgaatgagatttcggcaacataacccagttgttctccatcgcaccatgataggcgtgcattcggagaacagcggggttatgctgccgaaattttgttcggaccatcgggcacgtcacgagtcgcatgcggccgcctccattctcgggtgggtttatggcctttcctatagtagggttatcacctaagccacgtgcatcgctcttatatgctgaatttttggttggtggtttacacaacagcaaaactgagccatcctggtccacaaacatggaagatgaccgtgagtggatgtatgctggttggaagaagggcggatgtcacacaaaggaatggtttcagaagacagaaaagtttttagagaacgctcgtggagagtcaacccacgctgtgattaggtgcccatgcaccaaatgtgggaacatccagtcacatgacaagagaactgtggcactacacctttgcagtcatgggtatgttcaaggttataaggtttgggataagcacggcgagtcacggagtatagtatcagcacagatggaggtggatgacggtgaaaacgttgatcggttggatcatatgttagaagatacgcaggcagagtttgtcaacaatcctgaagatccgcctacaaaagaggttgaagagttgttcaaactcctccaagacttagaaatgcctctgcacggacacacaacggttaccatcctgcagttcatgacccgtctaatgggcataaagtcaaagtttggttgctcagccaaatgttataaggtgattttggaattgtttagtgatgtccttcctgccgatcataaggtgcctaaag

SEQ ID NO: 111374 - DNA, 412 bp, Zea Mays
tggaaggcagttgagattaacgatttggtctctcgaacgaatccacccttttctatgcacatgttatgtattagtaatatataatgatagagagccgacaatctgtttttcccacacactagattttaggattttcctatgaggctgtgaaaaaactctttatgtgaggaaaaaatatttcatgagtaagcatgccatgtcagctaaatcgagtggatattgtgaattgtgaactttgagtctgtgaacttgtgatcttaatgaacttgttatattgtgaacttgttatattgtgaacttgtgatatttgtaaactttttatattataaatttgtgatccttatgaacttgttatattgtgaacttgttatatcatgaattgtgaacttgtggtctttgtgatcttttgtca

SEQ ID NO: 111375 - DNA, 1260 bp, Zea Mays
ccacagcctagactcaaacaacatccttcccttatgaagttagctacttaactctctactagagccctacatgacacctggaatgggagctgtaataagggcaagatgtttggctggctcccgcaaaattccaaataataatttcttcttcagctcttccaatagcaccctccaggctaggtgtaactctatcaaaaacgcatccatttctatggttcagagagtccaaagaccaagggcaatcaaggaattgagcccttttttagcaatcccctgcaactgctcactgattctgctccaccattccatcgttttagtttctctcaccataggagcaaagacagacaagttgacctgtcccagcagctgaaaccaaaaactcttagaaaaacacatcccaccaaaatgtgatctatggtttcttgctcttggtcacacaggacacatttgtcaggatggcatctcccacactaacaatatgcaacctatgaaccaatagaaattcgcagccagaaatgtacggtcatgatgttactgtactaaataacccaaaagcattagcctcatctctagtctttctgttattttatgaaatgaaccgggaaagagagcagccaaatatttaaaagtagatgaacaaaaagcaatgagacctcagagcgtcaagtaatgataaccatcaaaacaaatcaaagctaacaacaaaaaactactagaacatcacctctagtattgtatctgctccagattctttcctccactggagcatctcagcccacatatggatcgctttctctgtgtcaaattttctagccttcaaaaacctgcagggattcaacaagaatatgaaattccaattgtcagattcttatgctgcaaattgataggagctatatatgtgcttttatagctctcgatgtgtacagtattcctagtgcacaaacctcagcaacgagtgataatcgttgtgtttgtcaggcagcaagttcatgtccagaagtttttgctggaaggtgaagacggctcgctcctcttgctcatccctaacatcttcgattgtgaaggacgatgcccgatgctccacctttctttttcccctcttcttgagtgaatgtgtgagcttgtttgatgcattcaatgcctttttcttcagtgaccctatggatagccgccttcgctcgtcctctgagttgtccacatctgatctccgttctttccagtcatcaagcgtgagcagcccttccatgctggttgaccgac

SEQ ID NO: 111376 - DNA, 612 bp, Zea Mays
ggccgactggctggacaaatgaatggttttatgtgaaagctgatgaaaagagaagggagaagcttatgactatggcgatgagtcccctgaagttgaacttcggcatgacaaggctattatgcaacattcaactcggatcccctgccaattagctgaagtaaagttcagggttatggcagagcacattagtactcaagatttggtgcaagaatatctagctaacaaaacctttccaacatcgggtgggtggggaatgccgaagaagaaggatgaaaggaaaattttgagcttgtttggttgccttatcggttcaagtttcagaacactttcagcggcccctgtgccaaatgattggaaatgatagagataatgtgcaatgagatcctcaaaaactatacgaagaaagaggatcaattgatgacagttgccttcggtactcggaagaaacgaaggctgaattgggtaatggacgcccttggcttcaagtacccggactatgaaagccttgccgaagaagctgggggaacgaagaaaaggagaattgtaagcattttgaaaaggcaagcaatctgatccattgaaaaggacaagcagagggctgcttccaagaaa

SEQ ID NO: 111377 - DNA, 364 bp, Zea Mays
gtcattgttcaccgtgaagggcggaaatccatcactattttcataatcttctgacatgccagtcctgtcctcaattcccacgatatttcttttccctggaagaactatgtggcgctttcgctcattgtctgagacgttgtcggttttccctttattcttcggtttggtggacatgtctttcacatagaacacttgattcacatccttggctaagatgaatggatcgtctctgtacctaagattattgaggttaactgttgtcattccgtattgatggtcaaccgttaccccgcctcctatcttcttcacccattggcaccaaaacaaagggaccttaaaacggggtccatggtctaattctcat

SEQ ID NO: 111378 - DNA, 630 bp, Zea Mays
cattacaacttatctgcatgctactttccctttgctatgtgtgctgttgtcaacttcttctctgatacttggcccctctgggatgtggtctcgacttgtcgaggctggatgccagtatacgtaaggaatagtcggtgacctggcccccaagaggttatttcgactgggacctggacctgcacacagccttaactagggagtttcagtagtgcactcatcggacccattcactggtatccttcaccctttgacttacgcaacaggaactgtaggatttaggctggggagccgacccgtgtgtctggaccccctgggccacggcttctaattactatggtactcgttgcatggtggtggagtgcgtaggcttacggtatgggaccaggctaagcagccacgcagctccggacctccccatgagacatgtgtcctttctttagagctggacctcggacttccggacctacagggctatagtttcgggtactaggacaccctccacagagcgacatatcgtgtgggcttagggtactggaccaagctaagcggtcgcacggctctggacgattatccgttctcttcgactggcccctaggctacacagcctggcttattcaatccggatgtcaa

SEQ ID NO: 111379 - DNA, 661 bp, Zea Mays
atctttaattcaatagacccattatgcggaggagacgatggggaataaggaggtcgtgatctcactggtattcgacacatggagtttcctggccacgacgtgaggcggcacacggcggaagaattccccgttgagcaattcctgcgactccgacgacccccccgggtttggcagagcccttgctgaagtctcgtaggtcctggtaatccaatatgcgtcacccaatacgcaccataatcggaacagaggttggtgggatctggaggggataaatccgacagcttgggcccacgagtcagtgaaacttggcgtggagggccaaggcggtgtgggacagacatcccgggcccgcttggcggtgaccgttagtggtagtcatatagcgagggagtgaggatgggccgcggagtgagtttggcccacagcgcgccgaggacagttgggccaggacgcaataaatgtgcccaaacgcagatccacccacttttctttttttctctctttttttatttttcagctcttttctatataaattcctattttgaattcaagtctaagttgaggttcatatctttaatatgcacaaacaaagatccaacatgatgcaagtttattatctctaagtagaaaagaaaataatccttttaaatatgaaatgcac

SEQ ID NO: 111380 - DNA, 636 bp, Zea Mays
gtcgtagaggaagtagccgatgtcgaggacgatgttgtcaaaccgtcgtggacgaggcgtgctccaggtttgccactcctggaaacgcgtcgtatacgaatgcacgtgtcggtgttgtcggtaccgcacgtactaggtagaaggccccaaccatgtgtcagcgtctgaagggaccagtagagaagacctcaacgacggttgtggtgcggtatggcaggagtgtcgtcgcagctcacggttgtcagagcggagtaacgtagtcgaggatgagacgacgacaatggcaacaagattgtgctagaagaaggcgaagaggtaggcgttacgcatcgaggatcctggagtcgcgacggcgagagccacgacacacacaggaagaagagactcgacgacgctagtggagcgcgatggcggtacttatcggcgaagaactcgatgacgaatgtggtgcagaccagcgacagatggtgtcgacgcagcatgcaggtgcagcgcaaatcgacgggtgtgccgacgcagctcacaggtgtcgaacagctcgcaaaccgtgcgcaggagacgcgcaccgacggagtcgacgacgatgtagatgcaacagtgggggtcaacgacgaacgatgatgctgctgcccaaag

SEQ ID NO: 111381 - DNA, 377 bp, Zea Mays
tatgttaattctgtggggaagataagagacatacaacaaggacgtgtcaagtcacgatccagaagcaaaaagaaatagttgaagccaaagcacggcataatcaaccgaatcaggtcttgcacactgcttcgtgctattcaccatacattcccgagtatgtgggcaaccagcagcccacaacatcagttgctttggcaagtcactctcaagctgcatgggctccgctacctccacaccacctgtggcaccaacttggactcacaatcagcagccagaagggcaccgccaagcacagcaacagtgtgacagacatgaagagtctgaagctcgcacagtaaacaacattgtgcctgagtcaagacatatttactaaagca

SEQ ID NO: 111382 - DNA, 651 bp, Zea Mays
gcgagatgtttacagatgtcgttggaagcccatattatgttgcacctgaggttctgctaaaatactatggccgtgaggttgatgtctggagcgctggtgtcataatatatatcctgttgagtggagtccctcctttctgggatggtgaggttatatgtagtcgtttcagtgaaatattgcatagcaattttatatgacattgacaaatggcactaaatcgatttatctattgatttttgaggcagaaagtgaacaaggaatatttgaacaagttttgagaggtgacctggacttttcgtcggagccctggcctagcatctcagagagtgcaaaggatttggtcaggaaaatgcttattcgtgacccaaagaagagattaactgcccatgaagccttatgtgagtagaatggatgcatgtaccagcttaagtaacaattctttcctaatttatgtaagcacatttcaaccaaattggttacagtgattgacctgggttttcctaggtcacccttgggtttgtgttgatggtgttgctcctgacaagcctcttgattctgctgttctaagccggttgaaacaattttctgcaatgaataaactgaagaaaatggccctgagggtaagtattgataccaatggtctatctctgc

SEQ ID NO: 111383 - DNA, 739 bp, Zea Mays
gggagctaactccgaccaaaacactgttatgaggagcggggaacacgacgaaaccttggaagggactcatacctcgctggtggatggtggtggctagagcttttcccctagcggtctcgtctctctctctctccgtctttgaccgcacgcaaaggtggcacaagtgatatgatggttgaggaggggggcagtcgggccctgtatttatgcttgtggatggccgaggggtggctccgggttctatacgcgggtttgttaggcttaccaacaagttcctagatccatggagagttgttgcataacctgcacgcgggatcttcattcgtacacgaggatggtgacgatcctgaccattgggccccacctagcagcggttcccgtgcggacatgtgaggggaaagaagctggggaatgggccccacacgtcattcacataaggaaaagaataacgagtaggcagggtgggccggctggcgcgtgagaagcatatgggccgacggagaggttgtgagtgggtcggccaggaggaaaacggcctagccgagttttctctctttttcttttctatattcttttctcattctaattcctcactttacatttaattcaaattcaactcatgttttgaactccccagtttccaaatatcgaacatatccctatacaaagatataacatctactatttccaatattattatttattattttccttgtcatttatttatgggaggaataaa

SEQ ID NO: 111384 - DNA, 523 bp, Zea Mays
ggagatttcaagtaccaaaaagaatgccaggaaattataatgaatgcagtaagcattcaggctcaggatcacgtactaaaactgaacctttgggatcgaatgatttgcaagaagttgcaaattgactgccatgtgcatttactatgaggtgtcattcaaattaatcctatgtggaaatgccagaaagagtggttaaatggaacaccactcaactccctattacaatgatgttgtaaataagagggggagaagtatggtcacaaattgggattaagatgcttgcaagcagctgaaggctagaccttctgagatagtaaatgcagaccatctattcgttggtaaccaacttagcattggtggacacctaaaggatattgattatcctgtgaatggaagacattcacaacctagctcaatgcgcactgatgaggctaggttatcggaagcccttgattctcgttttgggatttctcgaggaatcataagggtacataaaaatgacattatgtcgactagagaattg

SEQ ID NO: 111385 - DNA, 738 bp, Zea Mays
aaactccatatacacaggagtacacactgaacgacaggttcagtttggcttttgtgcgtttaatagaatattgaggtattacattatatgggcattcctccccctaatgccgagatgttctaaaagcatacagataatatccccaaccacaatcatccagttgtggccaatgtatgatattgtggtgatttatttgggaaatattgcgcacattacagataggggttttatgcagtgagctttggacatagattaatgtagtggcatgaatactacatatttgtccttcaatatgaagggttagtctcaacatccagcgatacacgcaataacaagttgcttcgtgttacaattctgcaaacttattgttatcattaccaaatgcacagtcaatcattaagatttagactaacatgcacaacgctatttaatccataagggttcctcaggggctcatgaataccattcgtcgtttggagccatttgttgacttcagatcaacaagtaaaatgaccatcagggtctaacgctcacaaggacgttcactggttgcattgtgcttttaagcacataggaaaatatgtgtgtagataatggtagtaaagtgcacgacatcaggccaatgctgccaagcaaatatttttatatgcatagatgtatagtccagctcgtttttatcattgcccatggtttacccaattactcatactgttctgaaattgggtatcaatttgtgca

SEQ ID NO: 111386 - DNA, 1188 bp, Zea Mays
acattgtgtttgtagaaaaagcacatggataagtaaccattcaggaattcgttcaaaaaagactaattgggaaaagcatatggattactaaccgttcaggaattctttaaagaaaagaatggttgtgtatcattacgtgcatatggtgaatgattaccaacatattttggtttgttatggtggatgacgatcagatgttcacactaaactaatacgaaacacattgcggattttccctattttagaaagctgaactttctatctactttattacacatacgtggacggatgaggtaatatactataatatattgtcggaagcacaaagaaaaataaacagacactaatattatatcagagaaggtagtgtacgttcctgataatccaatacagcggccaaaaaagttgagaattgaaaaagaagacgtttatttggtggattccagcagcaacatgaaaaggaaaacaaagaaaaaaatgttaaggaagggaaaaggtagaagcagaggggaaaaggagggcacatatccgtttcgcagccactggatattaccgatacatcacaacatcaaatgatggggaattgttggaaccctaactttaactgagcaacaagaattagaatacatggaaaggaagaaatcaaatttaaatttccctaagagagagacacttgtcagtgggtgaatcagtaatcggagaaccgatcgagagtagatctagaggggaactaactagaagatgtaaagagggactaacctgagaacttcacgaagctgatgaggaggacaacactagggagatgtgagagtcgcgcgagatcgtttgcgggcgcgatgtcgtcaccaaggttcgagagagaggatgacgacgagcacgtgagcacgacgatagagatgagagccacagctgcggctgcgagtgaacccagagacgagaaagaggcgagtgaaccctagcatatttttaccgggcgagcatagtccaggccggcaagcgaagcgagttatctccgtttcgatcggccaggacacagagtcagctatggcccgtcccagccagtctctcaagttgagccagacaaccaaatatgatgtgcctatttcaaaaggatctggtcgtgagttgggccaaacaaccaaacacatcatttatgtttaatatctagccactaaaggataaatgtta

SEQ ID NO: 111387 - DNA, 750 bp, Zea Mays
tagcagccatttgttactgatactattcatcaaggcgcgtagaaaattgcttgtgcaatttgatttcgtatttgacagcacaattctatcttatataagaattaaattatttaaaaaatggttttagattttgatcagcgaagtgtagatacgctattagtcatgtatgtctcttaactgtggatcttgtctcaacacggtgaggttctctctggactgttcgttacagtcctggacggaaggtggttcgattccaccaagatcctgtagtccttatttaaataaatacacaagataatataccatcagaggtttgaggaattcagacacatgatgtgcttggaagaattcttagacgtgggttcttggatgttgaagtagattaaagaagaaaacttggagagctagaagcatgttgctcgtccaacaagacaaacaagataagtgcatcatttaaagacaacaatcaagaagacgattgaggtctcttcaagtgaagatgaatcaagcttcaaagttgaggacgagttagacttgttcatgacgaaattcaagaagcacttgaagaaggaagatcttcaattatcaagaagccattttctagacctgttgtatcagaatagtttgtgtgcatctattttggatgtgaacaatgttttttttctattgcaaaaaggtcctaagtattgttttctatttaagaaaaagaataagcttaaaagtaggggtagaaatagtctaaatattttc

SEQ ID NO: 111388 - DNA, 325 bp, Zea Mays
ggcatggcaagatacttggttatctagtgtcccatataggcatagaagtgaacccaggtaagacacatgccataatggacatggccccccgcagtcaacctgagatgtccaaagactaataggaagacttgcagcattgaatagattcgtctcacagtctgtcgaacggagtctccccttcctgaaaacgctacgtggagccaaggacttcgcctggggccctaagtaggctgcagcctttgaatcactaaagtagtacttatctgagctcgcaactttgaataagctagaccccgcgtcaccccttctactatacatcgcagct

SEQ ID NO: 111389 - DNA, 498 bp, Zea Mays
tcaaaagtttagtctggaataactggtctctgccggttaaaagcaaaaaaaagtattgatatatggaaagaaaaaacgaagaggctgaaaaaaacgttgaaaggttggaatatcaatgtggaagggagatattcaaaactcaaaaaagatttcatttataaaattgatattttagataaaaagtgaaagtatgggcatttcggatttcgaaagacttgataaacttgaaatggaattgaatctgaaaaatatgatggcggaagaaggttgtaagagaaaacaaacggcgagagacagatttattaatgagggtgatgagaatactaggtatttccatcttattgctaaagggaggaaaataagagttaagatcctttccttaattcatgaggatgtcacagtggttgatgataatgacattaataaagttgcgactgcgttttataaagagctttttggtccttctgcctcttctaatatcaacatgacaaatcttca

SEQ ID NO: 111390 - DNA, 432 bp, Zea Mays
ctgccggcttacccaatcgaaccgagtccaggaatccagcatgcgcggtgaagtgaagcagaccatccaaggctgtccgttgagcttggtcttctccgccacctcgtcgaccctgctcccttgtaaatacccacatccacttccctgctccgtcgttcccaactccaccgcctcggccggcacgcctcctccaaagaaaagccgatcctttcgatgttctcttctcccttctccgtacgtccacgattggtggttaccgttcagagagccgccgtaagcttcgcgagtcggttaaccgcttcagccttgccgccggaagtgaggaagaagcaatggcagtgccagcaaagtgaggaggaagcaacgtcacttgccagctccgacactcaggaaaattaagagagagagagagagaagagaaatgaaacccac

SEQ ID NO: 111391 - DNA, 356 bp, Zea Mays
gtcggggagcatcactaacatgtaatggtgctaaaacaagaacgagaagggaatgagcagacctggggaaggctggccgcggtgaggtgagttcacggtggcggagagtggatttggggcgaatccaaaattcgcgagttctagcgaaggactgccagcgattagcggtggctgggtggatgatgatgttatgcagctaggggagggctcaatttataggcagcttcgacggtggccgggaattttaacggcgatgtgtggcggtcggtgataagtaaaaaatcgtggtgcggtggttgcgtgtctcgtgtcgtggcaattgctccggtgatcaacggggagctaggagaggtcac

SEQ ID NO: 111392 - DNA, 1452 bp, Zea Mays
gtttaggcacatttttataatcagtcttagttgggatctttatctttgcggccattgccttagccttatctgcagactcctcgtgctcggccaaatcaacagtacgtgacgtgaggtcccgtccaatccctttcaaaaatcgagatgtgccagcagtagtagctttactcttctttttctcgaatgtggacaccaattttggtagagggaatttagatttctttgattgtcgtgaatcccttgatggctgtggagaaggtggtggtgccctaaatgttgatgcttgtggcagagacggtggattagaaagagaatgaggagcagcatgggaagattgtggaggtgatgatggatgtaaaggtactaaagtttgaggaggcggagatggttggggatgagatgacgatggcgttggtggatcaaccaatttgacatcccttcgaggccaaaggatgaaatttttgatggcttatccaagtgtctcgattccttcgggcccagggatgtctagcatgtcgtccttagatccttggacgaccatcgtcacttctaccctgcaataatcatctggtgtgtcgcttccatgaaacttacaacatgggatcgccatgcctgttcctactttcttcgtgcgattattgttaataccatatcttataaccagtgtgcacgtcactggccttgtgatgtcatcaactggataacgaaccttatttcctgttgacgcgacagagcttgggacggttgtacaatcagtggaagccaacgattgagctgctggaattatttgaagctgtggagtggtcatctgttgaacagacatcgcacttgccaactgctgcatcttctagtggaggatttgatagcatttgagacataaagtctttgaactctttatttgcctcctgattaaaataatctgacaactcttctttgtatcgatcatgtttcttgtacaaacctacccactgtggtctaaatccttccttccatccttccttagactagattcatcatacacggcctggatgctcagggttaccgagaccagccattaggatgtctctctccctttgtggcttaaatgatccttggctctgcttagctgccattgcatatatgtttttcgcaacttcttcgacatttggatcatcaaaagatacaccagcctcagtttccctaggttttctagcatggatccaatttgtcgtcctttcaccaagtttctcgaaaggcgtcggcaaccctgcgaccttcttctcggcgtcttcttgtctccatttagaaacttgacgcttgtaaccacctgtgcctaagtggtggtggtacttgttcttcttagatagttctgaatttgcctcgcttagagatatgaattcagggctgctcctctgctctagaaatactgcccacttaccttctgagattttatattttttttgtcgggtctag

SEQ ID NO: 111393 - DNA, 519 bp, Zea Mays
atcgcctatgctacatatgccgaaagaagggacatcaatgcaaggattgtcccattggtaacaatcccactcctagcttgtcaattaattctcatgtaactaggcaacccaaaattgcaacttgtgctagaaaggtaaggagcttacctagtgctagcacaaaggacgtttgggtccctagatctttgttgactaaccttgatggacccatcaagagatgggtgccaaaatgtgcttgacaagctttgcaagagtaggagatggtatgaagctttggggtgcttgagggagtcaattcgatttttattaactgaagctatcaatcttcaatgatctatatccatgattgacccaaggttatttttcaaaattactatatctcaaactcatatcatctcgagggaagatatcgatgttgtaggaaataaagaattatcctgagtcgaagagtcaagacctacaacatggaggaaagccaaaggatggtgacatttatgcttttaagtgcaagtatcttaa

SEQ ID NO: 111394 - DNA, 378 bp, Zea Mays
ccggtttctactcttttacaccgaccaacccacgacgatgaacagacctcgccgcactccggcgagcttatttcggccggacgacgctacggctggagctcccgtgcgacaggggcgcaattaaacctttgtcgaacacttcccctccatcaatttcaccaagggggcactgaatcgatcagttcacggtgaccgggcggatgggcaaggggatgaacgtgttccgaccaaacgatggcgaggacgactaaattgaggctggggaaaggttcacgggttcaccagggtctacggacacactttggtttgggcagaacaagaaccgaagagcgggtcgacggtgagggggtagtcatagcggtgttttatagagcaagg

SEQ ID NO: 111395 - DNA, 559 bp, Zea Mays
taatgaaagcagtcttctcctcatcttcttttgctaagctgatctgatagtatctggaatagcagtctaggaaggagagcatagaacagccagcagtcgagtcaactacttgatctattctagggagcccgaagggatccttcggacaatgcttgttgagatcagaataatcgacgcacatgcgccaatccaccttattctttttgagtacaagaacatgattcgctagccacttgtggtgcagtacttcgctaatgaaccccgcagacactaacgggataactcatcgcgaatagcttctcttttatgaggagtgaaatgatgcaacttctgtcgaatcggccttgcttgaagatagaccttcaatttatgctcggccagttctctcgggactcctagcatatccgcaggttgccatgtgaacacatcctggttatcttgtaggaccggatgagcgcgctttcctactgtcatcaaggctggaactgatgatggcggtcttgctctcatcagcgaatcctagattgatcgtcttagtctcttcagtcggccatataga

SEQ ID NO: 111396 - DNA, 1040 bp, Zea Mays
tgtagggcgaagacacggtctccgtcgaggaggtctttggaggttggttcgtcgacgtcggggacggctgaagcgcctgtccgaggtgacccatgttttatttcctgcggggtcatggcctctgatccgtatagcaagcgaaagggagtgaatccagtcgcccggcactcggacgtgttcagcgcccagactgcttcaggtagcaggtcggcccatttacccttgtcatcgagaagcattttcttgatggcagtgaaaatcttgctgttggcgtgctctatgacaccgttagattgtgggtgatatactgaggcgaaggcaagcttggtgccaatggagaagcagaagtccctgaagtcctggctgtcaaactgtttgccattgtcgactgtgagctcggacgggactccgaattggcaaacaatgttttgccagaagaatttctgggcagtcttcgacgttattgtggacactgcccttgcctcgatccccttggtaaaatactcgatggcgacgaaggtgaacttgaggttcccctgggccgtgggtagtggcccaacaatgtctagcccccagcgctgaagtggccatgtgtgggcgatcagctttgtgaattgcgaagggttgcccgaatggggggaaaacttctggcaggcttcacacgacctcgtgacttgattcgcggtgcagattatggcgggctagtagaaaccttgacgaatcaccttggcagcaagttccgcagtggacttcgcgtaggatctagaggcctttggtttctgtgacacatttgagcatgggttgactgattcctttcttgtatagatggccctcaatgagtgtgaaatcccggcttcggtgtttgaggcgcttggcctcgttgacatcacctggatggtaatatccttgcaagaacagggttattggggcccgccagtcttcggtcatgatgaggttgatgatgcgatggccctcgacgtcagtggttatttgcagaccctctggattgcggacggctggtgtgccaatgatgtggtaga

SEQ ID NO: 111397 - DNA, 495 bp, Zea Mays
ggcgcttccagcgggatcctgctgacgatgagtagctaggcctacatggagaaaaacgagggttccgctagggagcaggttgcaatatgtctttgattttgtaagataccctttaggtactacttgtcggtgacattacaacttatctgcatgccattttttctctgttgtgtgcattgtttccagcttcttccctggtacttggcccccctgggatatggcctcgacatgtcggggccgtatgccaggattcttaaggtggcactagtgtcatgacccccaaggggcaatccctattgggacccaacctgcacacgacctaggcgaggtatttttagcagcacacccatatggtccgctagttggtaaaaacagctatgtggtatttttaccagctagggagggagactgcctgagtggtgagatagtaataatggttgtaaattcggaaataaaaccaacataaaaatagctctgtgggtcgagccccttcct

SEQ ID NO: 111398 - DNA, 708 bp, Zea Mays
acgaggtcttgagaagcatgccaaaagttttcccctcgctcgagcaacccttcgcaattcaccaagctaatcgcccacacatggccacttcaacgctggggactggatattgttagaccactgcctacggctcaagggaacctcaaattcaccttcgttgccgtcgagtacttcaccaagtggatcgaggcctaagcagtatccacaataacatcgaagaccgcccaaaagttcttttggcaaaatattgtctgtcgattcggactcccatccgaactcacagtcgacaacggcaaacagtttgatagccaagacttcagggatttctatttctccatcggcaccaagcctgtcttcgcctcggtataccaccggcaatccaacgatgttgtcgagcgcgccaatggcaagattttcactgccatcaagaaaagacttctcgacgataagaagggcaaatgggtcgaccaactacctgaagtggtctgggccctaaacacgacagaatgttgggcaaccgaattcacacgattccgtctattgtatggatccgaggctatgacaccgcaagagataaagcatgggtcgccccgaacaagcacatcagcagtccccgatgtcgatgaaccgacgtccaaagatctcatcgacggagaccgcgtcctcgccctacaggccctcaacaaatatcaggctcaaaccaaggcc

SEQ ID NO: 111399 - DNA, 298 bp, Zea Mays
gttgagacttagtaattggaaagccaaattcctgtcttcagggggcggcttgttttgattaaatttgttttaagtagcctacccattttcaggatgtctttcttcgaaatcccggctggtgtgctacagaagctagatgctattcggtctagattcttttggcaaggaggacatcataaaaagaaatatagactagccaaatgggaaatcatttgtcaacctaaagagctaggtgggcagggagtcgccaatcttgacataaagaacatttgtttactcagcaaatggctttttaaat

SEQ ID NO: 111400 - DNA, 424 bp, Zea Mays
gtaagttagaaaagatctttccacttggcttcttcaatctgatgcaacatttgattctgcatctcctgtatgaggcatgaatgggggcgtggagggacgttagtgctatccgtttgagagatgtctaaagactattcgaaagaaatgtagaaataaatgcaagatcaaggcttccgttgcagaagcatacatactagaggaggtgtcaaactccacaacaacttacgacggtgataaactcttgagtgtgcataattcacccctcgttgcaatgatagcgaaaatgaatcgaacctcagcatttttcgagggcaacatggaagggcaagtggtttgaccactaagaccttgagacatgaagagtggtgccatatatgttgaccaaccttgacgaggtaacgtcatacatgtaagaatttcttga

SEQ ID NO: 111401 - DNA, 758 bp, Zea Mays
gggatcactactacagcagaattctggttcttccgcttgggcgccatcgcaatctcgtcggcggattgaacagaagcgaaatcagagagaaacagaagtatggcttgaggcggaaaggtgaagttagggctcagaacgcagaggcatgcgacgacgtgataaagatggggttttcccgggttgggcaccgtttctaaaaagtgttaagtcatcactcaggaaaaacaagatttcctagcataactcggtagttacctctaaagcgccgacgtggcccagtataactcggctgttacctctaaaacgccgacgtggccaagcataactcggctgttacctctaaaacgccgacgtacccagagtaactcggttgttgcctctaagacgctgacgtcgccaagcaccacttggttgttacctctaaaacgccaacgtggcccagcgtaactcgactgttacctctaaaacgtcggcatggtccagagcagctcggcggttacttctaaaaaacgtcagcaatacctgccataactcagccgttttctccatgtaaatgctggcagaaccaaatacgacccagcaattaccagtcgttactcgggtgttatctctaagaacaacagcaacgctggacatgaatacaagctatcgattgactataaaagaccgatggaaaagcagaggagatactcagaacaagctgaaattttcttcaatatattaagaagggaagttcttccacaaactcaaagaccaac

SEQ ID NO: 111402 - DNA, 737 bp, Zea Mays
tgaagaacgacttgatagcgagggaggacatcaaggaggttattatgcgccccatatggtcccgcttcgccctctgaaggccgaaagttgaaattgatgaagccgccgaagcatgtcagaaggcatttggtactatctgcttctttattggtacgagagatttaattcaagagcacatagcatttagagtatggccgcttgtagagagctgggaaatgccgaaggagaccatcaccaagtctagcgaaggtgaactggtctggctgaagtatacattcagatatggggataaattcgatgaaccaaacgatgattggctaaaatgtatcgaagttacaagtgatgaactgctcggatcatattccaaggcagaagataatgcattatccacagccttcggaagtcgagaaaagaagagattgaacagagtttttgacgttattggcttcgtctaccccgactaccgctacccggtgcgggggcaagggaagaagaggaaagctgctgctctagccgcctcggctgaacctgtgccgaaggctgcggtcaaaaagatgaaggtacttacccatcggccacgttacattgaaccggccatggtgcctgagtttggtggggaggcctcttcagctgctgaatcaagagaaaccgcttctccaatgcagggggctgaagaaccgactataatgccgaaggcaccttcggttgagctagttgaaatgaaggttgacaaagat

SEQ ID NO: 111403 - DNA, 532 bp, Zea Mays
ttaaggttgtcaagtcgtagattataagttgggttggagtctacataagatctcaatcatacgatcttgatcttaaacatacgaatcataaaatgtgatactattgttgactggaattatagaatcaggcccttgatcaagatagtaaatgtgaaaatgcgtaagacagaaacataggtattgacatgcattactgtgggtgcatatgtaaatgaagggaaatgatagtgatactatgtctcccatggttgattagctctctaaacattcaataaaaccacatgactaggaagagaactgaagtattgagtgatcaggaacaagtaggaatgttcagacccaaggatatgttcatttctcatacaactgtgctttttaatagtcttcatttactaattttatcataactatctgtaaatcttagtaggtgctatgagcaaattaaaaaaataaagtagattataactcatctgactcaattttgtttaccgtattctatctagcaactatggtgtctaaaggggtaaatagc

SEQ ID NO: 111404 - DNA, 359 bp, Zea Mays
taagtgacaaaaaagagttgagggaaggttgcatacctcctcagcaagtaggggattatccttggtcgtgcagacacaggagcatccagccctggtcgcgctgccgtggtggccccaggacttggtgccgtcattgtgggtgccctagacttggtcgagctgtcgtggaggagatagatccatgggattcaagtcccagcaatggaggtcgtggcctttgttaggggtcactgtggagtggattgctttgccttcgggtgagctccatgtccatggcgcacgggtgggggagatggggaatgcagacgacgactaagaaatgcgagccagctgctagtttgtactgactggaaccgagc

SEQ ID NO: 111405 - DNA, 600 bp, Zea Mays
gcggtataaaagttaaagcaaaaccctgaggtaggaacgagtgagtacctgtgatcggacctgtggagttagagtggtgaccacttcaaaaccagaacttcggtgaaacttggaagcgtccagatcactaatcccatagctgttcgttgccccgcatttgcgctgagtgaggaatgcggcactaatgttttgagggttgcgatcgaaaatcttgagggcatcccgaaaaggcaccaattcttccactttgtcggccaactgtgccacctcaacgagcagatggtccactgccacattcacttggggcttccatgctaccaatttccgcgcgaccgcgatattttcttcaagagtttgtttgatcaatttgttctgactctgcgtattttgtaacaaagtggtgagatctgcgatattacgctccatagcctccgattgtttttgaccgcgagtcttgaattgagggcgacgacggtagtcaggaaggtctgtcgggattggcctgaataatctgcttttgtatctttgggctagtcaaagtgcaattacctggagcgttgttaagaacatacttgttgacctcttcactatttacagcaa

SEQ ID NO: 111406 - DNA, 504 bp, Zea Mays
aagaggctgaaaaaagggcaatgattcatggtgacaagaaagaagaggatccactaatcacaaaaagtgagatgagaaatgagatgaggagtatgattcagtaactcatggggctaggtatgattggccccaagactttgactatctcatccgaattaaagttggaactcgttccaaatgctgtgaagctagaagggagcaagaattacttgagttggtctaggagagtgcgagtgctcctaggaggttaaggaatggagcactatttggaagagggttgtgttgaacctgttgataggctcagctctgaatggagggtttggtataccaccaactcgattattgtggcgtggttgttagcatccatgtattcgtctgtaagtaagatggttgaagccatgcgcactgctgcacaaatttggaagaccttgagcaatatgtattcaagaaaggggaatgtaatgatgatgatggaaatccaaagtaaggcagatgtagtgaaac

SEQ ID NO: 111407 - DNA, 305 bp, Zea Mays
caaggagcgacatgatcttcctctaccaccgtcatgatctctttgttatctttttcatcctcttacctatcatggaaagacacatgccagacaacagactcaaaggaaaataatgacgacaacaacatggaccacccataaaatagatttagcagagaccaatacatgggaaaatggatttaaaaaatgtacccttgattccgagcatcgtattactgtgaattgtgtcttaaagtgatatgtactgaattttcttcatcgaccacgatcagactatcaaaatgtaactgtctgtattggttggg

SEQ ID NO: 111408 - DNA, 479 bp, Zea Mays
tttaagtgctcgattgaatgcccaaagcgcgtcccttgctccccactcctcctgacgccatgggtgtcttccagaaagacgacgcacaatcgacacgggtagagagaagaagcgtcatggtctccgtcggcgagagcgacgttgcagtgcgtgttctcaacgcattcgatggcctgcggtgtgtatgctcttctcccaatgcggccattcctcatcgcgcttcgattgacgcaggtacgaaaagatcttcgatattcgactcctcggtgttgtggttttcgtctagcctacggtttcgtgcactcccactccacacctgctcatcaccgagcaaggacggcgagaacacttttcgaatcgcgcatcctctgtgctacggtttgtttttagacacctgctatgtgcactctgactccattctttctcatcgtcgagcaagaacgaccacaggacacgcgtgttcccatcatcccctcccc

SEQ ID NO: 111409 - DNA, 404 bp, Zea Mays
tgaaattgtaccttgcccataatttacatttttgataaaattgtgtttggttaactgtataggctcttatatagtttttttttcacagtgctcaaagcagatctaatgacgtactgtattagttagtaacttagtatgctagatttgatcgtattagacagacagacagtaaggatgtgcacatagccgatagcgtaaaaaagagacatgctctcatccaaaatcctcgtagctagaatatggataacataaacaacgaaacatatatcaaatgtaacttgcctgtgcagtataatcaaatactaagacactgcacacgtttacgctaagcaattaatcagaccatatcgacaaaagggttgtcggggctgcgaaaactgtcccgctcggtcgcctcccactgg

SEQ ID NO: 111410 - DNA, 380 bp, Zea Mays
aacagcacttatattgtcacaataaataatggcatctcgacgaagagggcagcgaagctcaccaagcagctgacgcagccaacaagcctctgcaacaccgttggccacggcacgatactcagcctcagcactcgaacgggatattgttgtctgacgcttggaagaccatgaaacaagattgtctccaaggaacacagcatacccggaggtggaacgacgagtgtctggacatcctgcctaatcagcatcagattacattgtaaggtcaagcggtgcactccaagagaagtgaaggccgagatcatgattgccctgcaaatattgtaggatctgcttcatagcagctaagtgaggctctctggggtcatgcatgaacaaac

SEQ ID NO: 111411 - DNA, 287 bp, Zea Mays
cgcaccgtgtggattcatggtttggtgcaaattgtggttgggtttctactttctggatgggtttaattgtggcgtgtttctgggaggggcttaccattgtgttttcttagagttaatctttgcttctctacttgccattttattgtctcagaattaatcccaagcagtgcagactctcaagcttcagggttgccttttcttcttgtgcccacaagtatggagcatctgtcttttacaacctcatgttgcttccagtttactgtctttccatgaattatgtctagctt

SEQ ID NO: 111412 - DNA, 780 bp, Zea Mays
tggaggagggctccttgggggcggatgctgaggtattcttggggccattcatcgagttggagtaggcaggtcctgatggcttcagccgggggcagttgttcttgaagtgtctgggatctccgcagtgccaacatgcattcgtcgggggttggttgcttgcaactgagggggcatgaaaggagctctgactctgctgactgaatcgtgacagggtgggtccagttggtctactgaagcttggtcccttgggtggaaatccaaaggatcgagttctctggtgccaatcttgctgctgagcccggaggacttggaatttcctcttgagatggcctttttcttcctcctttgccctttccacttgcatggctttattggagaggtgagagaaactaaggaagtcttggctggccaggatggtcttaagttctggcctgagtcccttcaggaagcgggccatcttcttgacttcggtactgatgtcatctggcgcgtagagagccaactccgtgaacttgtgcacatattcactgacacatcttctgtcttgagtcagttcccgtaattcgtcttccttgagctgaacgatcccttggggcacatggtgctcccggaaagttgtttcaaactccgcccaggtagcatttctaatggtaacattgaaggtatcccaccaagctaaggccatcccggaaagttgatgagcagccagttgaacacgctgattttctgggcatccgatggcttccagctttcttttaatcgtgcgcagccaatcgtcag

SEQ ID NO: 111413 - DNA, 613 bp, Zea Mays
gaggaggtcgggtcgctgacggcaggctgcatctgcagccgcggcgaggcaacaactgctttttttacttgcaattagttctggggggtcctcatcagccttatacttacacctgcaatgatctctgtgctgtgggcctactggttaacatggcatggctgcatgtgagcccattgcattacacacgctgctatcgatgcgtagtagatgcggtcatgcggatgtccaggggtgtacagtatcagtatagtaggaggccaatacacaatcctccaacgaaccaaaggcctgtgtgtgtgccgtgcccgtcgtcatgtacagatgcctctgttctgctcattcgtataaagccgtgtgcaactcctctgctgcgcttgccagctctgctcttgctcgcaacaccaacacaggctcacagctgctgtgtgctccacagctttacacgagctacgagagcttgctgctgccgccttggagagtcggagaccgatgaaataaaggaactggttacttttttttttcttgacgtgccgaaaggatccaaaaagccagccgcacgctccactcgatccaatcatacggcggtagcagcgcgcgacgggcagttttccac

SEQ ID NO: 111414 - DNA, 494 bp, Zea Mays
caatttccagagagatcaggggttgcagggtaaaattcctaagacacataccgccctgcgcagaggactgcaggttgattttgtggatctgcgagggttcttttatataatgcacgcgactgagggggaacacccgatccagaccacccgattagaaatggacggacacgattagctttaggtatctaacgaaatggtacgcaacctcgaccgcatgattaccaatcaacggcccgggttgatccccaccaatcggtacactgatcctaatcctagccgcacacccaacgatcaacggctcgcgcatcccctacctcctcagctatcggcgcagcgcacgtggtcggggtggcgcccatgccggagttcggcaattccggccatctaccagcacactcctaatcgtgagtgcagtaatacgatgcgaagcacaaggcgggattagttggggggtaatttaccgaggatgaagacccagcagaccggtactcgac

SEQ ID NO: 111415 - DNA, 358 bp, Zea Mays
ggttcatggtgatatgcatcattcctctcaggcgatgctcaataactccctcccataacttcacaatgtggctcatgagcttaatccatcgatagttggtacaacttttaatatctaccttgttcttaaagattcaactaatgtactccactcatcgggcatcttgtttgatcgaaaaatatggttgaacaacttggttagccaaacggtagccatatccccaaggcagttccacacctctattgggataccatccggcccatcgtcttgctccctttcatcctctttaaagcttctttgacctctgattcttggatcctgcgtacaaagcatccaattgggtgtccataatctcatt

SEQ ID NO: 111416 - DNA, 366 bp, Zea Mays
tggaaggaagtaactaacgcctgtaacgcctgggcgatctccgagcgccataatgttcgtagtgcatacaacattgatatgtcgcggctgcatcctcggtaacacgcgagtcatgatgagtgtggtacacacggcagcatgggcgtactgcctgccaatggaatggacaggcacgccgcctgcgggatggcctggtcaccgcccgtcagcggagtggacaaggcacattaaatgctgaggcggcacatcgcctgctagtggaatgaacagggctcattaaatgccgaggcggcacatcacctgccagtggaatggacaggcggcgcgccttatccgcaataaatgcagaggccgcgcggcccagag

SEQ ID NO: 111417 - DNA, 574 bp, Zea Mays
gcaaagcatatataatagttgtatgtgtatgctttcaccatctttctggttgcaattttaagggttgtagattggctgacaatcccatacacctcataatttatccataaatttttggctagcatggactagctgctaatggggtttattttgagttgctcttgcaaatggaataccctcgagtaccatttagcagtagacaaccttgatattgtcgacccatttagcaaggttgacaacaaacaagtagcatcagatccactgatttgggtctttctttccattgtacatgtcaatgttaatgagattgaagttttctggatacctgatttagtttagtcttctagaaaagtaggaaaatccatccattggtatcccttcaatattgcacccaaccatgttggaaaattccatgtgattgtggccctcgcatatggagtttagttgctcatgaagatattgagcatacaacaattcttgtagatcaccctggtgttggttgggctcatggtggccaaggcctctcctattttgatgttgactatctcaaggataaactatgccttccctatta

SEQ ID NO: 111418 - DNA, 330 bp, Zea Mays
gccctgctaaacggagcaatcggcttaagtcggcaacgacttaagacggtgcaacatgctcgcgtttacttaactcggggtgaccactatgccctgctaaacggagcaatcggattaagttggcaacgacttaagacggtgcaacatgctcgcgcttacttaactcggggtgaccactataccctgctaacggaacaatcggcttaagtcggcaacgacttaagacggtgcaacatgctcacgcttacttaactcagggcgaccactatgccctgctaaacggagcaatcggcttaagtcggcaatgacttaagacggtgcaacatgctc

SEQ ID NO: 111419 - DNA, 740 bp, Zea Mays
aattttaatacaagtaagataataaagttatctacaacttttctacagaaaacataatttaattcaacaaacaaacgacacaatgaaaacagtgcgtgcagtccaaaacaacaatcaataaatttcagcttctatataattcaagaattgccgcgttctagatacttgaattattctaacacttcgacaattgttagagctaaaataaccaagtgagaactaacaagtggacttactaatttttatacaagttatttcgcgctctagaaccaccatacacaattaatcaacgcattcaccacaatcatcaaatccggcatatatgtatatcaaaacgcttttcacccactagttcgcattttaacttagacaccacaagagcactactaatttttacctgtgtcatttagtgcactaaaattaccacatacattcaacaaacacattcaccatgtaaatagcatcatcacacatgacctcgacttaaccgcagaggaagcgatgactacttcgacatgtcaccacctctctacagtccaatcaatattaactacatcgatcgaacctcatattgcgcaactcttataatttactatctcaaatacaaccatagcacgacatgcaattgagactcttgttcaagttaacgcaatcactactacaacgcactccggcacacatgtttgataacacatctttctaaattaatctatctcatcttccaaacaccaattgtatgt

SEQ ID NO: 111420 - DNA, 384 bp, Zea Mays
cttatcctcaccactttgcttatctcacaatggtataacaaacatgatctattccaaaataaatttagtatatccctatcgagtctaatctggttacaccaatttaattctgatctcatctaatttgattagatctactctaatggacaaacatgttagataatactgataaaatagattagaccctactagccagatgttaacctaacttaacacattagaccaacttaaccatgagcagaagacccatcccaaccatagagtcatgatggattgcataatctgcctatctccatctagcgtcaaacaaacttttgatctacatcatgtactctacctcacccataactatcttaaccatatttcccaactccgatgatatac

SEQ ID NO: 111421 - DNA, 314 bp, Zea Mays
agctactcactatagttgatggtcgaagcaaggattactaggttggctcctgccttcttcccttcctctggttgctctttatatagccaatgaaaagatcatggggggctggatttttaaactggcagcagggataactatgagcaggaagtgtagtcgtggttcacacaggaagatccacgcaggttcacagagcatggtcatgcacggtgaagtttatccagggcaaaagagagggggggtaaggataggagctcactgtagtagatatttctactgatgataattcagagatgtgcataaatctgaatatc

SEQ ID NO: 111422 - DNA, 821 bp, Zea Mays
ggagctacaagtttgttacagatggattggcaagttctcacacaaaactcctagatctaggcatttcaattctgtctatcagacgctctgaatcaagatttcgatggtacagtgttcgaatcagatcgtcaggttcagttcatctcaacgtcggcaaccacaccctcggattcgcgccagactctacgattcgtgctttagggagtactgatagttgctcggggtagtaaatatcaccgtatggatgaacttgagccactgtttcactccggtcgccgtgtctacctgactcacggccgattcggatgaactcgctggaattagccacctatcgaccatgcgccatgtgccttggtgtcttaccacgtcgcagtagctcgtattacacatgttcggtgatcgccagtgagctcgccacggtgaaagccaccaatctcttgcgacagttctctcttctctctccgaccgccacctcgtcatctcaaattcacgggccaccactcggggatcctataaattgagcatgtcgttggttcctcaaggtagtcaagtaaccaatacaccaactcatgcctcaaatcatccactagagctcgccaatttgaaatgtcccccaaatcggtccagagcaccgcgcgaagtgacctcgccatggccaacgtgctacaggtacgttcatgtcctctagttcctcatttcagtatccttaggtgctcttgatactccctgacccatcgaattaagctaggacccataagatcgccgggaacacttcttgttatccgttgatcgcactgtcaccgtgggcagagcgattgagg

SEQ ID NO: 111423 - DNA, 1155 bp, Zea Mays
gcgggttcttccacgctcgttttcacgaatttacgattattaatttcagttcttgtcgcggtgtggggggtgtccgctatttaatccttcgctggcagcaagttgatccttcccagctccggctcagtgttccggagaggtgcaaggtggaaggttggtatggccttctagtttattgtcttcgtactgagcccacccttcgtttgcccatggagaacttgagagatcgttcagttcttagctcaacccgtgcccttgcggttgatgaggtgcgcacgcgaaactggatatacttgttagtggagcggcgtcgcgtctctatttttttaaatctggagaatcgttctgagtcagatctttgatggtgtctgaggctctgggtctaggtgagaggagtggagcctgaattgtgctgcagcttctgtctcattttggggttcatgtctgcattgaggagattttcaacccgttgtcttagtgaaatcactcataattcctcttaccttgtgacagagtctgcctctgaacactgtgaattcccatccattgtttatttgtggagaaggtgtagaagcgcttcacaaagttgcgcttcatgaaaacaacgatcttaaacttattgactagagagttacgtttatgaacaatatagtatcttcagaagaagaatgtatggttggtttcatcttggctccctaattggatcacatgtagtttaggtatacagtaatgttcctacgtctcctacaatcgaaagacagtggcaggatcacctctacacgcgcatggttcgttctctctggtccatcccttctgttcgtttgaccccaaaactaagggaactgtatggaggattaaatcccctgcaaggcaaaacccctctcaaacctctccaattcccttgattttgtaatcaaatgaacacggcaggctgctttccctttgcaagttcaatggagtaaaaagctctgctcatttgactgttcctttccagtgaatcttctgacctcctctctcgtagtttaaattatgttcaatatctttctttgtagttgcttttgctcacgaaaggcatacgagagtaccattacgcatcatttgaaattttcttaatggttttatctggtgaattgaaaccaagttccattttgcttg

SEQ ID NO: 111424 - DNA, 380 bp, Zea Mays
ggcatggccgacttgggtagaggcttcgcccaggaactgtgatcgctcttgcgataatcaccccgcccaccagaggtcgacacctcctcctgcaaaagtgccagcgaacaagcagtatccaaatccataggcctttgaagcataataacagcgcgaatatcgtcgcggagaccatctacgaaacgtgtaacaaagtataatggatcgaccccagactcatacaccgagagctgatctactagagatgaaaactgttcaatatagtcagcaacacttcccaactgtttgatgtgaaataagtgccgtaacagcaactgatactgatccttgccgaaacgctcattaagcaattgacagaggagaggccaagacaaacgggg

SEQ ID NO: 111425 - DNA, 586 bp, Zea Mays
gacgagcacgatggtggtggcgacgtcgtaggcagccgtgatggtggcaaggcgccaccagccttaggtagcgtagtatggtagtagtagtattgtaagggtaatggagatcctctactggagatcagttcatcctttgtgtaaagatgatatatatatataagtaatgaactttatctcatcgccttctgtgttatgtgtgagtatgatagggtttagagatcactcctttatgttttgagaacatgtaacaccattttaggttgaacctcgactcaaaccgtttgttctgtcagttgggcttagtgttcacccttttctgtgtatgcgtgagcatgtagcaccaacttaagtcggaccctgactcaagccgattgttctgtcggtagggcttcatggtaacccttttctacatatgtgcgagcatgtagcaccaacttaagttagaccctgactcaagttgattgctcaattggtagagtttagtagtcacccttttctgtgtatgcgtgagcatgtaacaccaacttaagtcagactctgacttaagtcgattgctccattggtagggcttagtggtcactct

SEQ ID NO: 111426 - DNA, 379 bp, Zea Mays
gttagggctcgaattcaagcatgatccagcaagaatttggctaggggtgctataacaaagatgaagatggtttaatggtttacaactttgatgcagggccttggatgtgttgccatagaaaatttagagataatctaccctaaacatcatctgtcaggcactcttaagatgactctcatggtacagtagccgatcggatcaggttcagtgaacctcaccgccgatgaccgtcgcactgtgattcacgtcgattgtcgggattcgtgcgctatggattgtggataactgtgggcaggtaaagatcttggcgcctggatcagcttgagttcggtcgcgactaagcccgccgtacccccttgctcatcggtggatcgggatg

SEQ ID NO: 111427 - DNA, 501 bp, Zea Mays
ataagcgcatccagaatgagacgaagatgtcactcatgctcttcctccgtctttgagtaaatcagaatatcatccaaaaacacaaccacaaagtcatccaagaactcatgcaacatcttattcattgcttccataaaagcagcaggggcatttgttaagccaaaggacatggcgataaactcgaagtgcccatacctagtgctaaaagctatcttctcaatatcctcttcgcgaatcctcaactgatgataaccagagttcaaatcaatcttagagaatacctgggcacctctcagctgttcaaagagaacgtcaatacgaggtagcggatatttattcttgattgtcacttgatttaaagcatgataatccacacataacctctttcttttatccttcttctcaacaaataataccgggaaagcccatggtcacctgctaggcctaatgaaacccttagcaagtagatcatccaattaccgcttcaattcaacctgctcc

SEQ ID NO: 111428 - DNA, 1154 bp, Zea Mays
attcattccgaatctccaacttgaactgaatccaatctacgaacccgacagaatctcgaaatgattggtaccagtgagcagcacgacccttaagatggagagaggcagcgcttactctgaactcctctggaatctggtatagcaggaagtaggcttcacaattatctatccataccctagcttcttccccttcaaataccgggaaatcccacttgggtagccaagtccttcggtgatgttgatccgactctattcctcttctgttaacttcttcttgtccaaatcttgcctcctcacctgacgaatggttccctgaacctcctgtcggatgagacacatgaggggcggtctgggatgtctggaaactgggtggtattgcctgtggatgagctcccatcaacccgtcaccagttcctcccctctgcgcgacgctccctcctcggtttgcattcgccaccacatttgatagtcgcgcttgatcttgggatacctgtgccagagacttcatggagagatccatttttgcctgcacgtactgtgtgatcttctcatgctccatctgtcgcttctccatctcggacatcttggtcgacagcgtgtccaacccatccatcttcttcgacagctccatgagagtggcagtcgacgcctcccatgcttgctggaacttctcagtcagccttttctccacctcttccatggctgcaaccacgtgacgcgcctgaacagatggccgacttggcgccgtgatgtcttccctgagatgtcgctcgacgacgatcgaagtgtcgccggaaaatgcctctgataccagtttgtgatatccggtggattatcgccagagatcaccggagagaagagagaagaaagggaaagaacacaggcaagagaagcagacagaggtatgaatatttggtttctgttcttccatcccttcttcagcgcagatatttgcctcttatacgtgtggctgacccgcccacgaatacacggccacaatacggcccaataccagagattaacaaagtctaacaattgagattacaaggccaaatccggcccaacaggatccactaaaaccaaaccttgtccgcatacctctcctaccgccaactcagtcatccgcgacggtgtttgcctgatcctgatgcagc

SEQ ID NO: 111429 - DNA, 352 bp, Zea Mays
gtctgtccatcagtctaaggtaggccgaactaaaattcaacttcgcattcgtattctcatgtaaacttttccaaaatctggaggtagactgtgatcctctatccaaaatgatcttctacgatacactgtgtagagacataatccaagacatgtataacttagccaattgtgatcccttataaatagtcttgaccggaataaaatgagccacttgggtcagtctatccacaataacccatatagaatcgtatcctttcaagttgcgaggcaatccagtaatgaagtccataccaatctcttcccactttcactcgggtatctttagtgggtgcaatagtccaactagtctttg

SEQ ID NO: 111430 - DNA, 397 bp, Zea Mays
tagacgcctcacactcgtcaggctgcccccactggcaccccagcgaggcctacaggatagaagataggccctacatgcttcaagtgtagtcagattgggcactatgctaatgcttgtccggtggggaattctggtacaccagatcagaacaagcaacagactcctagcaagggatactctattgccagggttaatcaagtcagcgctgatgctactcctgaaggtgctgacatcgcacttggtatattttatattaatgcaattcctgcaaccatattatttgattatggtgctacacattcatttatgtctgctcgatatgccaacacaaatgagataccactgcaaaatatgaaaacatcaatgatagtaattacacctaaagggcctgttgagg

SEQ ID NO: 111431 - DNA, 740 bp, Zea Mays
atcttgaggagcgttccacggcgagaaatttggagtagaaagctatggttgggcagcaatttctcgccagacagggagtccgccgccgtgtatccgcctaatcccgtgggcggcagtgtccgcgctacagcacaggtaacaacctaagctactaagctcgcctcgtcctcctcgtcgcgtagcaccaatcaattttagagttggggtcgcttgggtgatgtatcgtgcgcgccggtgagcttctgccatggctctgggttctgtcgtccgctccgccgccgttgtccgtgaaggtgcatactagtggctgttgtctgttcatcgggtcgtggacggctaggattagagctaggtatcgattcagtcgaagcaatcggtgaccgttgatgcggtatccggtggtggagattcgatctagaattcattaaactgtgaccgttggatggagatcggacggtcctgaacccacgatacctcttcgcggatctgttttgcacaagagtccctccgttattttagaataaacccgccgtcctcagcgactgtttcctgtgtcttagtatttttagcaccggggcccctgaactttctaggaaatgaggcccagtccagagaacatataaaataggtaaataaatacagaaattgatttttgatataaaaagaattcctaaaacttgtttattgcatagaaaattcattctagctccaaattgagtcattccaattcctaaaatttt

SEQ ID NO: 111432 - DNA, 489 bp, Zea Mays
gtcgatccttcgattcccggcaatgcatcttgaggtacctctctcctagcccccgagcgggacatggcagtttggtcagcatgttccgctttcttgagcgtgaaaacgagggtattgagttcgcttactcatgggtaaaatcttcttaggttctcgatgttccactcgttagtcaataggttgtcattgctatccttgagtcgataggctcccgggtgcatgatctgggcgatgatatagggtccctcccaaggcggcgagagtttatgtttgtccttggtggtcattacccttttgtagcaccaggtctgatgttaaacgaccttccacgtacctaacagttatggtagcatcacaagtcttgttgttacttggcaaagcgaaccacggtcatgtcatgtgcttcgttgagtaggtcaacggcaagctatgtgtcatagttgctcatacatcttcataggccttagtccttggggagctatattctag

SEQ ID NO: 111433 - DNA, 478 bp, Zea Mays
aaattttacaattgccttttcttgggttcctgacgaggtggcatgtatcttcgtctcttctatcgtgagttcttggcaataaactgacagcaggactgtcttcatttcttttttgcgattttgctattccatcatcttagaaaaatggatcgagtagaagggatttttcaacttgtaattcaacgaaaattctctaatcattgacaccgatatattggggcaaattttcaaactaaaacacagcgaaaatttcttggccaagactgcatacatccctactacataagctcctcgtaatctagatgcattaaataccaacaaatttaccattcctagacataaaccaccagataagtgtggcactacactgctgaagatcagaacaaattaataaaacatgtccccatccacggtttagcatatgaatattgaatataactattggtatgacaatgcatattaggctagggaattatca

SEQ ID NO: 111434 - DNA, 1328 bp, Zea Mays
gactcatggcaccagcaccaccatcaccataggcagaggcacaaagtagggcatcagccagcagagacaacatcactcactgtcgtagaggtgcccagcagccagcgtcgtagaggcacccaacagtccagggacaggcggcgacacaacacgaataataatagaacaacatgtcaaatatggaagcttatgtgtcaatgggacctatacttataagtgttgagtgaccaaataatatagtacttatttcttgatcgacagacacctttctcaaatgcatgtcaacaacccctcctgcatagaattagattagattaatacgaagtgtagtgttgtactgactcctgtcaccactatctcttgacgtttcagacagagaaaatggtctagaattagttgtcttgctttccaaaaattaagtactaatagtgactgaagggagtaccatacgttgagcaactgagcaagttgggcaattaaaagttcgagttggaatgctattaaaacatttttaatcaaaatacagtgttgattattattgaacactatgaatgaaaggtcagaaatatggattagataagccacaagtagttacattctctagttcttctggtcttctagtctgagattagagcatatattagagcaaaaaagtgtactctgttcatctatctagtttgagattataaatgattaatagactcactcactcgattagtctctctaagctagggtggatgtgcttgccaattcatgtgtttcttactcacttctattgcattctaataaattattttgctgttgactttctttttggaccatttattaaaagaagtgttcggacctttgattcattgtaacctcatgattatgatttcgaatgcagaagtccagacagtgaagtctctatggatctccacatgttcagaatcaaattggttctgctcaatggtcccaaactacaaagcaaatctgaatggtctccacttcccagtctagtccagctacaacttcaaaattttgaaattactaagacatatggagtattgacaaatcatctcaagttgacactgaacctacatgtgttatttcctctaactgaatcctacatgtgttgttctctcctactgaaagcatccatgtcaaaaaagggagccaaagattgaatcgaagaaaggtacaagctctaactcgcgtacctaggtgctcaatgccggcaaaagagaacaactcttaacacctggcttagggcgacggcgggagcccacaagttgtctgagtgtggccggcgcccaaaagagaacagctgctggctccgcttgggcgtc

SEQ ID NO: 111435 - DNA, 559 bp, Zea Mays
cgagagcgagagagacgagcggaagaactagggttctgagagggtgagagagcggcggggtgggggagagaatgaggataaggtaggcgtgtggggtggagcaggggtatagtgcatccaggtccactcccaatgcaaaattacatagttttggcacccaaaccctccaaattccaaatctttacaaggccacttttttgcaaaattacacaaggatgtttagattcattttgcaaaatttagccccaaatcaccaaattattttgcaaaatcctgaaactaaacgtccccctactaatccagatactctggatacataattagaatcgagagatattcttctcaaagatagttgtactaattaatgcagctttaacacaaatctaaaaacaacgacggttgatacaaactggtgcaagggtattttctatcttgcctccaagaatctactagcctactactaacagtagccatatcttttttttgtgggaacctaacagtatccaaatctggcaatcaattgcacaaagaggcagtagtgctgtagggttctgaagtg

SEQ ID NO: 111436 - DNA, 330 bp, Zea Mays
ccttggccgccatgatgtttgcgtagtgtcgaggaagaaggaggcgaagaagagggagaaggagatgatttgtcacctacacatgaagaacagccgagcaggcacgcaaggaagaggaagacgatgcgagaaagacgatggggctgctcatccgacgacgcgaggaagacgacgaggcggccccttagaccacggagttataatgcatagagaggaaaacgcgtgggctgctcctgtgtgagaaggaagagggaaggggttcatggtaggggcgtacgattgtatagaaaggagagggtatgtatagaaaggagagggcgcgagaggtgg

SEQ ID NO: 111437 - DNA, 385 bp, Zea Mays
ttctcctccaatggatctcgagaagtccgttccaagagtggacctgttcggaggtgttgatgttaccttgagggaaggcaagttggaggtgcgctgtttgtttcacagatttttccttataatttttttgctctgacaaggtttaattatctatccgttctatatttagctcagattgcgaattaatgtgaatttgaagggagacagtggtttctgacttccgttctcaactcataccaaatcctttgttttcatactgcttcaaatctctggtgttggttttctgtgctaggctgcaagtagtgttctctgaccctgaccaatactaaagaatgaactagcttatttctgagcatctgttgtgctcatgacagattggtgtttg

SEQ ID NO: 111438 - DNA, 695 bp, Zea Mays
ctagcttgcttccttctttggggtcgggggtgagggcttcagctggccaatgaggtcatgagcctgctcgtcaacggtaatatagatgttcgcctcccgaaagagttgttctgaattagctagagccttttggaggatagctcgaatgaaggctgagtcgttggatccgcgatagaagtcttctatcacagctgccttggctacgtcggggatgtggtttcttatagtttggaaacgctttaggaatgaccggagagtcttgtcgtttcggtgtttgagggatttgaggtcctaaggctgcactggtttgtcagaaagggcctgaaagtttgcgacaatctagtggaagaagtcagtccaatcgtcgatgcaatggtgaggaagatgtcgaagccattggagtgcgtcctgtatgagtatgatcagtaggtacaccgtcatgacatcctccattgcacctgcggcttgggcaatcgtggggtagacggccaaccaaccgccatggttttgcttgggctcgtacttgtcgacgtttgagactttaagttggacaaccattgcatcgcccaatgccgaggggagatggctgatactccgtagaaccctcagtcccatggcggtcttcctaggtgtcgtggtgcccatggtcccgccaaagcgaaggtggttgtggatccagtagcctttaccgggct

SEQ ID NO: 111439 - DNA, 474 bp, Zea Mays
gttgatgaagaagaggaagactataacactctgatcccatcaaaacccaaccacttggattttgaaaaatctactgtgtctgaggctgatgtacccatgatgatgaagctgggttacttcggagaagctgataagaaacttattcgttttgctagagaagaaaccactctagaaccgaaaaatgatgaagtaatagttttcaaaagcttttccagagcaggattacggtttctgcttcacgagatgattggagaagttttggataattatgaaatctatcttcatcagctaacccctaacgctatcgttaggctcagcgtcttcatctgtgcccttcgaagccaaggaatggacccaaatgccaaagctttctgtcgagtgcatgaattgcattaccagacgaaggccagagaagacgggttacatgaaaatttcggttgttataacttcgcgtatcgcaaggatacgaaggct

SEQ ID NO: 111440 - DNA, 751 bp, Zea Mays
ttgtttcaactaagtccctaagacactattcatatgagtcgctgactattcacttaaccccctagactttccaggcttctaactcacgctccctctcctttcaacagtggccgacgacgagttcaaggtggtgtgagttatcggcggtggtagagctccggcgaagtggtcagtgaggtatgggaggtcacaagggtcatgtggagggttgatttgttgccggttatggtcggagtagcttgggctatgcgcttagacggcagggcttgtcgacggtgaggggcctagccaatagagaggagtagagcttaaattgatgtgtcagggagtttcaccgaagcacggaggaactgctggtgcaaggaattggacggcggtgcgctgatttgctctagccacgttcactggcggagccatgaacttcggtgggtgagattacctcgtttcagtgaggtagagctttagctcaagctttggggagcttcatggggtctcagggaaggtgacagtggactcgggctaggttgggggctattggaaatggatggccatggtagccgacttttagaggcgacggtttgtcgcggggagttcactggagtcgagcactggcttagggaaggtgggcaaggtgtggagagcggaacgaagagggtgtctgagggctcgagtgggctttatagcgtggggcatgggcagggcatggtggtgccgaccagccacacggtggcgtgcgcacgcggttggtcat

SEQ ID NO: 111441 - DNA, 414 bp, Zea Mays
gttagaaataaacctccgcaaataatttaccttgcccagaaacttctgcatttcgaccttataggtcggaggtcccacgttccgaatagatttgattcggccagggtctatctctataccatgttcatgtatgatgaatcctaaaaacttaccagccaacactccaaaagcacatttacgtgggttcattttcaaaccataccgacgcattttatcaaaggctttgcgcaaatcagctacatgagaactaaactcagccgatttgactacaatatcatcaatgtagacttccacagtgtttcccaacagctcatgaaaaaacaaattcatagccctctgataagtagcaccagcatttttcagaccaaatgtcatgacaacccattcaaataaaccaatgaagcctggacatat

SEQ ID NO: 111442 - DNA, 356 bp, Zea Mays
cgggagtattcttgtagtcgacatcatttgcaggagcaatagaagaggatggacggcttgcggcatcaggcatggccatgacatcagcgataatgtcatcatgcaccacgacgccgggtctcctcatcaggatccgcccagcgcgaacagccttatccatggccttgtcgcacattgccttcatgacgacacgatcatcctccaaggccttgatagtgagatgggcggcctccagctcctgcgtgacaagcttcttggaagcacacaacttcttgatggcggaatatttggtagataacagcttgccgagtcaggagacttcatcctgagatgctcgcagctcctcacgatggtgg

SEQ ID NO: 111443 - DNA, 612 bp, Zea Mays
caatggtagaatgagatgatattagactggtgttaggttgttattgaaattttagaacacgatccttgacccatagaatcaacgcgagatcatcggcccattagactcaacatatcaaattcataatattcccgtcccatagatgtatacttccctttttaaagtgtcgaccaacaacccatgaccccgctcctcaatccaatagattcaggaacattttgactatggcccagtcccattcttatcgacaccgtctgatgcagtccgcttcgatgtctcgttccttatgtcgcgacactacacaaccccaccccttcccggtgcccccgcctcgctcgtcatcctcatgacgctagctagctcgacatgtccgatctcgtttgtcgcgatgatgtgaaccgtccttggaggttagcgagcttgtcgaaccaatgagctctatctctcaactagagacgtcccttgacccacccctttctcgacacacctgcccatcaaagagatcaatataaaacttgaattcaatgcaacgctgatttttacgatcttttgcttgatttgtcatgtggtttttggccgcccatgaattctcgtcctgcgtccgccactaag

SEQ ID NO: 111444 - DNA, 373 bp, Zea Mays
ccgatttgggcaccaagcactagaagatgaatcgcctggtgatgctatctgtggaggcgtggacgatccgcgacacagggtcggatgctctgtgacctgggcatagaagcggcttctttgtgtacgtccggatggtccgtgcctggggctcgaatggtccacgatggcggagagggtcgtcttcttcgtagcagacctagctcttgtttcccagaagggaccccccatcagggaggagagatcctagagtgtgcattgggatcggtaggtcacccaagacgcctctagtcaacatagagccaaagagagataaatatttggcgtagaagaaggctaaactagggttacacctaatgtataaggtaaaaatgat

SEQ ID NO: 111445 - DNA, 606 bp, Zea Mays
aaaatagtgagaatttaccctaggtcaccacatcaaatttgtaaacctatcaaaggagaacaattttgcttaagagtgtaagcaaggttgttatgaagaatttgaagataattaaacctaaagtcaggctgtcaggctgttaaagtctgaatttcagactgacagtgcaactgcagtgactttgggcatgaattcaagcaggattgagcaagaatttgcttaggattgctataaaaatattgtagctagatcttagagctaaaactttgctaaagggtgatgatcatgttactgcacaaaatcgggagtaaacaaccctgcaaatcgctctgccaggtgactgaatgggctttcccatggtacagtaacctaaaacggatcaggacgccaactcaactcgctgccgacgatccccaccgcaattcgtgtcgccgccgtcctgattcgtgcccggtgaggatcggataacgccggggatggataactcgtacgtggcgccatctctcgagtccagccggagttcttcaccggcggccaccgtgactcgataactttcgccgcggtgtcactcatgccgcgatctgcctcactgtgcctcctaccgac

SEQ ID NO: 111446 - DNA, 541 bp, Zea Mays
cataatatgctcaagagagctatcgaggaggcaatgagaacgatgtcgtcaatgtataataggaggtaggttgtggttggcccctccttgtagacaaagcgagaggtgtcagatgtggtggagatgaagccaacacatcgaatgtaggcgacgagctgctggtacctcgcatgaggtgcctatttcagaccatagagagacatatacaagacaaacatggttaggagcgaaggggtcgacaaaggtaggaggctacaagtggtaaacgacctcatccaagtgaccatgaagaaaggagtttttcacatccagctcgactaggcacgcaagaccgtgatgctgagaacaacacggatcgtggctgacttgaccaccagcctaaacatctcatcatagtcaatgttatgctgctacgagaagccatgaatcatccaacccactttgtgatatgcaagggagtcattggcgtggaacttatgcttgaagatccacttgcacgtcacaatgttggtgtttggtagacgaggaacgtggcgtcaag

SEQ ID NO: 111447 - DNA, 537 bp, Zea Mays
tggttgagcttcggactccttccttgcatcgtgctgctactgaacttggcgctatccttcaagttgttgattgtgggacgaagttggagccagtgcaggtggttgtggtaagcgcacgcagctggagagtgacttgccgaagccactgaaattgtaggttgtgaaaatggctgttggttgactacatactctggaatgtatgggaaataacatgaagcagtatgcaggacttgctttggtggattctgtcgtgcttcggcctcagctatttccttctgcttctgtattgtaacttggcatgtgtgccccttatcctctccatagaacaagcaaaatagtcttcttggctgagagttgaatcttcctccgaagctttgtccccctttgtctcttggggctggtggtccaaaggagttatgttgtgcccctgatgactgagaactgtgatgttgccattggttatggttgcccctatcctcagtttgactgggattgtgtattgttctgacatgcctttggtggagccttcctccaaag

SEQ ID NO: 111448 - DNA, 308 bp, Zea Mays
tctagaaacaatggcgcattactggaaggaataagcacgacattggcatcaagctctgcagtatgctttgtcttctcgtaatgcacatactctgcaccacatgctagctgttgtcataagccatcatgcgccacttgagttgaaatctcatcccacactacacctgtaggatatatttcctccagtgtagctgcatcatcccgaaaagacaattcatcaaacagctaagtggaagcaactggcgccatccttaaatccttgaacatcaccatattaggacaggccacatcatcatcccaacggggcat

SEQ ID NO: 111449 - DNA, 557 bp, Zea Mays
gtggatcgtgttttgtgaatagggagacaaggagaacctgataccacccagcccaggtggggttgaccgaggcccaacaaattagggttgctcggagcccaacaattcattatgcacaccaaactcagggaaagggccaattgccccaaaagactagtccaatgggggaagggtgactctcccttaaagtgggttcctcctcccaagttaagcgaggtgggataattctgaggctcacacggtcaccgtccgactacaattgggccaactgggccaattgcgtctttgccaacgggtaatagtggaggatgtcctcatcattcccaccttcttaaaatgggccctagctctgatactagatgatacacccagcccaggtggggttggctgaggcccaacaaattagggttgcctggagcccaacagttcattatccacacccaactcagggaaaggcccaatcgccccaaaagactagtccaatgggggaagggtggctctcctttttaaagtggcttccccctcccaagttaagcgaggtgggataattctgaggc

SEQ ID NO: 111450 - DNA, 582 bp, Zea Mays
caggattatattctagcttggaaaggtatgaccctctgtgcctaggcagacttggctcactcctctaacattaaggaccggtgggaagcagcgtcatccccactcccaaaaacccaaaagcgtgagttcaacgacattgtggtatacactctatggaacctatggaaggagagaaaccagaggatcttcaaaaatagctctctaaaccctatccgggtagccttgaggatcaaagaggatgttttaagttttaggggggctatatctaccttataattgggttgttgcagccccttagcaactacctgctctatgtgggtctgctggaaatgttcctcccaccgtgtgtgttaggcgatgttgtatccagtcctcggaccttgtttcttgttttctaaactctttccccattaatggatatgcagagttcctgcatttcattcaaaacaatatcgaaacatgagacatgagtgtattttaaacattgaactttattatctttgatcaataattggcccaattgtataaaaagtttatagtacaaaacttgtaacattatatttgtgtacataaatacattct

SEQ ID NO: 111451 - DNA, 321 bp, Zea Mays
cttggatcgtgcttccgcttgtcgccggcatgacgaggtgagcctcgacctctcttgcctttgcccatggtcggatagagaagaggataaaggaagaagaaagtaacagatgatcgaaggatgagtaaagagaacaacggtgcaatcaggctatttacagaggccgggaatgaccgtccacttcctaccacgctcgccgaacagtcgcaagtattcaataagcaattcaagccgcctgaaaatgagtcaggcaacagacgccgcttcgcgtaacacgacaccatttggactaaggtcaactgctcgcgcgatatgattaca

SEQ ID NO: 111452 - DNA, 692 bp, Zea Mays
agccgtagctttcctcttcttcggagcagctactttcggcacagggctcgattttctcctcttcggaatttcttcatcttctttcaccattctagcagcctatctgctcagaacgctgacaatcctttttcttttttgcccttcggcacccttgttcaatcactcataatctggatattcgaagttcagggcatccatcacccgattcaaccttcgcttcggtcttgtgccgaaggctgcaatcatcagctgatcttcttttttagtgtaatttcccaaaatttcgttgcacatggtttctatcatttctaaccattcttgacatggccctttgaattgtttctcgaatttgaacttataaggtagtcgcacaagttctttcttctcctttgtcccctttagcttcggcatgttccattcactcagcgtcgggaacaccctataggccagatattcttggactagatctctggtcccgatctgctcggctaccacccggaattctgcaacagcttgttggcatggtgaccctggctccatacgacacagcggcctagtcagcccgaagcttaagctcagagggctcagtactagcgtcttgagcttctccctcttcttctcatcggccttcacataaaaccactcatttttccaaccagttggccacttggtctgatagctaaccaccagag

SEQ ID NO: 111453 - DNA, 495 bp, Zea Mays
tgtgtgcaggcttcggttgttggttgtggcatgttttgtttggtgcttgactgcgtgcagcactgctataatctgctggatagaataggggtcattgtggatttggctttaggctgtttggtctgggtgtctgtaatttaaactaatgcttgtaaaatgataaatgtgaaatgacctgcattgaacatttcaggtctgtacgcattaccattttttattgcatacctatgctttattgtctgtattttattcgccacgtttgatgttctgtaaacgcctatcatggtttggatcaagttgttcttgagattgtggagatattcaaatcgaataggattggatattgaggtctgacaattcctaatgctcccttaatttgaatcggaggcttggtatagtggtttagactggacctttaaaactactgtagatgtagatactatgggctgtaaatttgctgtatataaattgttggttgagctagttatcctccac

SEQ ID NO: 111454 - DNA, 597 bp, Zea Mays
gttcagctccccatcaggtccttcatttgttgttctcgatggtccggctcccattgcagcaacatctagaggcacatccgggtgcagtcgagcatacgatacatgcacttcttcatgtaaagtattacattacacttgcaggctttcgagggacgcactaagctctgccacacgagctagagctttcgcttcgcagtcccaagcgaacgaacgcgagttgacggcccaatcaatggtcgtatcccgttccgagatttcgtactgcaagcggctgacttcggctgacaattctgctatacggtgactgtcctgctcacgtgccctattcctgtggcgtagttatgaccggagttgttccaccctggcttccaggtctccaattgggtcattactgctactactacttccttcgttcctggaagctagctgatgtcgtggcacaccaaaaggtccagtagatttgcgtgctgttttcctagtacgcgccatatctccataagaggggaagatttattagtatattctttaaacatgatgcatgcataacctaataattatggaatcaacttttgttgatccccaacattgtatatattg

SEQ ID NO: 111455 - DNA, 287 bp, Zea Mays
ttacttgaagtatggagtcatctcttccatgttttcatacatgtagagtaatgcatccaacttttcttcacgtccaatgtgatattcagttgatgctccaactgtccttccctcgaatgacaaaattttgagtttactgcatggaccagcttgatcaacattataccttaatgtaggtgcatttacattgtgttcttctgcaaagtatacactcgtgaaggctgatatctctttatatttaaattcttcagcaatacacccttcaactcttcccttgttgccaacca

SEQ ID NO: 111456 - DNA, 415 bp, Zea Mays
ctgcattgtttaccatatttcccttgccttggctagaactccccgggttctgctgattattggagttattccgcttcggatatgggcagtctttgatgaagtgtccagacttcccacaattaaagcaaccagaagatgaacttgggagtgcagggaaacgagtaccaggggcactcggctgatttgttgaggtggaggtagtggtaggacggataaagataggttgtttaaaggggtaggagggtggacgtggtgaagaatagttttgattaaaaggtcggatcaccatcctttgttgcttctcaggcccttggttggacctatcacctccatagccctttgacttccctgggcctgcatacttggcttcaactgccagcgccgtgctgatagccctactgtaggagaggtcgag

SEQ ID NO: 111457 - DNA, 987 bp, Zea Mays
tgctaagtgtatgggtataggttcactagaattcaatttgaatattctaagtccaaatgagctcaaaagaggcaatgaaatgcaacttcgtgtaaaagggtaaaacaatgaggtttgaacccttagatatgttgcatttggctactacaatgtttctagcacttgtgtttgcactctaactcattttgtagagaaaattgcttttcttagtttgagcaaaattgaaatccttatgaaaagttgagaaagaggtgagtttcctagactaatttcaattgcttatgtactaacaatgtttatctaagttgtaggaaagctcacaagaaaggccaagccaaattgaagaaacttagttgaaaaagccaaagtcttagctttgggactcactggaccgcgtacgtagagagcctagacttaggcttcgggggcctgatgcatcggaccagtccggtggtgcacaagatcccaatatgtacaaacttgccagcctcgggaattttattaaaattcaccgaaccgtctacagtggaggtccggtggtgcattggacctcttctccaatggctacttggcgtgcaatggctacttcaatgatcaggtgacacgtggcagtccggtggtggaccggtcaggtctagtgtcagcccgatttggaaggcttcagtcaacatccgagaggagccaccataggacttagtctgatggtgcattggactggtctggtgtgctcacctagagttggatttcagcagctttttggaggaagctccaactgccatatggacctttggggctataaaaggaccctcatttcgatctccaaagcacaccaagcataccaagatcacatacttcagtcctaagcatttatgtgacacccaaagtgattcgagcatctgttttagtgagatagtgttgtgctgctgctatacgctcttgttgttggctttgtggtgttgttcttgtgatcttgtgtgtgttctactc

SEQ ID NO: 111458 - DNA, 470 bp, Zea Mays
gtgccctgtggttccaagcatcattatgtcgctgagcagtgaaggtggcatcgaggtattgctgcggaccaagcaagacaagattgtctctttcaagcacactgctaaactgaaccagaacctgacccaggtgcgaccgctggatatcccgcaccccaagccgccggtgctccaccaaatattctctgaccacatccctcaccgccgggaaagtgacctcatgatcaggtaaaggttgaatattgataatagcccaatcctcatgcattggcgggagacgcctagtcactgacctggccataacctcccggtgcaggaccaccgaagcgctgaagcccggcggaagaaagggctcgggatcaacacgcctatacgccatcggagaaggaagcgaggatcgccaaccagcagatgaaggagcagtttggggttttgatgaagtgacacccaaagaaagagtcagggactgg

SEQ ID NO: 111459 - DNA, 759 bp, Zea Mays
ttagggagttgccacacaaaaatttatgaaaaacatctctgaagttgctctatcaggcgctcttatgaggattctgatggtatagtgaactgaataagatctcaggtgcagtgcacctcgccgccggcaaccccacgctcggattcgcgccggcactgcgattcgtgccaagtagcacatggataacttcacggggtgaaaatatctcgtcgtaaaccctaaaccctaagcattgttgcgctatgtcgctcatccacttgagccggcgacgtggctgagcggccgtcaccgggatgtacgccattcaccgtgtttgcgccacgccttaggacatcttaccacgtcgttgtgagtcatagtgactgcccaccgtagctcattacctagtgaccgccacggtagatcgccacgatgactcacccctctctctcggccaccagcgcgatttcttcaaattggacgccaccgccgtagaactctataaatcgttgcccccgtgagttccactaggtatttactcatccaacgcaccagcccttgtctcggatcatccaccagagcccctcaatttctcatttcccccaaatcggtcagaacgccgccgtgagagagctcaccgtggccagacgtctacaggtccattcataccctccttgccctcgtttcagcacccttgtgtgctatggatgcttatcggtctagccaattgaactagaccacgttagatcgccgggaacacctcgggttgtcctcagtttg

SEQ ID NO: 111460 - DNA, 366 bp, Zea Mays
aaacattacaacaaatttaaatggtctagagtccagacttcaactcttgtctcttcaagtcatacattacataacttccaattaatgatagtttgagatcacacacatcacagatcacatatttgagcttaaactttgatagcctcatattctccattcaccattcatcattcatcaaatttgcatgctcaagaattggtaagggtggttgttgtctccttagaaacagtgaggccacaaaactctgtagtaatagtaaggagtaaacaaattagtaaaatctgaaatcaataagaacatagtagaaacaattatgaaataaaaactgcaaactaatttaccttcctcaagcttggacagttcttc

SEQ ID NO: 111461 - DNA, 290 bp, Zea Mays
ctcaacctagtcgagccctgcatggaaataccccgttcttcatggtctatggttcagaagcggtgctacccgccgacctcaagttcggggcgccaaggctggtcttcgaaagcatagctgaagcagaagctaccaggctagaggatattgatgtgctggagaaaaagcgattgaacacagtaatttagtcagccagataccagcagaccttgaggcgctatcatgataaagctatacgacatcaatcctttgtagtgggagatttggtccttcgccgaattctaacgggg

SEQ ID NO: 111462 - DNA, 406 bp, Zea Mays
aactgaacgtccacccctttgtccacaaaggtaatcaccttagcatcccaatcacaattcatcggactgtgtcgacgcaaccaatcatagcccaaaatagcatcataggcacctagccccaacaccctcatatcactctgatatgtatgcccattagcccaccattccaatgatcgtaccatcgtatcactatacataatctccccattagccacccgcaccttagctgatgaacaaggatacactggcagccccatgcgatcaaccaactgcttgctaatgaaacttgtagagctccccgaatcaaccaacaccaacatcacctgattttgcaataaggctcgcacagccatacattcctcatttgtggtcccagtcaaagcattaagtgacaacataaaattct

SEQ ID NO: 111463 - DNA, 398 bp, Zea Mays
gcaggcggcatgtctgactattcccattggctaacagtacacctttgtcgagacgtgcgccacacccatcatgactcgcgcgttaccaagggcgctgcagcaagatatcaatattgtacacactacagatattatggcgcacggagattacacgggcatggcaagcagtagttccatccttccatttgtccctaggcccacgtgtcggggctcagaacccttgtacatgcccccctttgactataaaaggggaggcatgcgacgtgaggggactcggacgcaagtcattcaggcttacacacaactcaagctctcgagcaatacaacactcagtggagtagggtattacgctttggtggcctgaaccactctaaacccttgcatgttcttgtgttcat

SEQ ID NO: 111464 - DNA, 508 bp, Zea Mays
tagtaccatcatagacctccatacaattcaaggatccttctgtgggccacgaggaaaagcaaccagcagctgatggaggttgcaaaggcattaatcgaaacatcaattttgggtcacattttgcattcaaggattcttttgcaagacatgttgaggaacatggactatcaagataggatcatcgtattttagtcatggtaagatatgttgctaaacgtagtaataacaaatccatggagagtgcataggtaacataattgtcttgtatcagtggtggtaatgcactagctacaccagaagatacactgatgtccaagtttgttccaagcccaacaccccgctcctccttgctcctgtcgagattagctcctcctttcgtgaagatctttccaatgtgggcaaatatcgaggcaatggaagttttccatagagcgtcaccatagcgaccaaacttgcacaagtgtcagcagcacgttctagaactccatgaaggggtggccttgggtct

SEQ ID NO: 111465 - DNA, 756 bp, Zea Mays
cgtggatgaaataaatatgatgtacgtttctgagccaatcaatccatgctgtgacttaaatagggacagatggaaactatgaaggaaaagaatgatgctgtagataaaacccatacctgtcagtcataaaacaatgaatttgagcacaaatagcggtgaatgccgactgttttggatgttgctgatattatgatgtttcacacatttttatatttatagtcgtttgtgcatgtctccataaagtttttaatttgacaccaattttctgtgaatatgctttaatgctatcctgatatgccactttgcaatatggaggcactccagttcttttaaagttttctccttcagccttcagaatgtatagaagggtcgccgaacttatgcaggaattagctatttcccttttttctttgaatcatgttcatctttgcattagcactttctattttatcagccattatatggagcaattagctatttcctctttttcttcattgaaccatgttcatctttgcattttataactgcagtgtcctggtcagatcctctgattatcactttacacatttggatgtgaaatgggggaaagatgattatgaattcattaagttttcgtttctaacccaaagctgcgatattttagtcatgggtcctggcacactcgtagagtcatggaatgggtaaatatttgcagtacattttttaagaaggtgcacattaggctgtgtccagcagattgtgcatatggtcgtgcaa

SEQ ID NO: 111466 - DNA, 825 bp, Zea Mays
tgatttgtctaaatttatattcatttttatattaatttcaccttctaaaacagtctgcatggcttattcagaaatcctagggactggtttgtaatgtaaaaacttaacccaagggtcctattgtagaaaacaggacgacgggtttattctgcaataatttagggactcttttgaatgtttgctcggctgaaagggtattggtcaactagagtcgttcgatcagatgtgggcggcgcggatcgacacccaaatcccgtgaaccggtatgcaacatggctcaccggatctgagatcaagggccaaggtttaataagcacgagatctgatcccaactctacatccatgatccaacgactgatatgcgcgcaccccgaatccggtaagacaaacaaatctcaaccgctcatctccagaccgacgatcaggatctaaaatatccgagatagaattgtacatgttcgatccccatccagcgattcagatccactctaccccaaccggtacgttctcttataatcctaaccgttcttgcggaatcaacggctcgaaagccatcatccccacccgaccccaagccacggcgatgagggcatcaccgcggcgacgacattgccggtgtctgctagatccccacatcagggctcaagctttgagacaaaagtgctatacatcggccagataaatgacaaatcacaagggtagattctcaccggccctggaggcacagacacccctgtccacggagagttgcggccttgaaacggtgttgttcgtccgacgaggaattcctatggcttcagctagtttccctccaattaatccctc

SEQ ID NO: 111467 - DNA, 318 bp, Zea Mays
gtctacatgatgtagatcataagtttgtgtgatgttaggtgggaatagacaaactatgcaattcttcatgactctgttggttggatcagatctcatgcatgtggctgagttggtttaaggcatttagtttagttttaagtgcatgaagggtatggccttatcttttgtaccatcattaagtaactcacactagtttagatcatattggattagatagaatccagattaggttggtatgactagattaaactagttaagattagctagatctaccagggtaggataaatattattaggatatgttagaatcttttaaga

SEQ ID NO: 111468 - DNA, 542 bp, Zea Mays
ggagggtgggctttggtaaagttcaattggccggctccgagaacaatagaaggccaaagacaagctagaacaggaatcaatttggtaggtactaacccgaggagtgctggccatggaggggtccttcacggcggtgctaagaacagggaggaggggatttgtggaatttgtgagttctccagtgagattgagtcgattgcacaagtgctcgtgtgtgtgatgtggtgaagaagcagtgctcgggctcaatttataggcagatggccggagatggatgaggttcacggagctgtaaacgcgctggcgagctcacccgcgcgagaagagccacgatgagggtccgatgaccgccgattaaccgggcagcgccacctcaagaatttagcgccacgtcgcagaagatttttaccgaggccgcagacccatcctcagtcgtggtggcggtcttatccccggcgagatttttctgaactccggtgaacagtacgccaatcagcccgatttcaaacggcaatttcttcaaattttatgtgacaacctca

SEQ ID NO: 111469 - DNA, 448 bp, Zea Mays
ttgttatacccaacatctcacgcaaggggaccgaccacttggaagcttctccgatttgaccccatgtggatttgtggactcctatgcttcatttttttagtactggggaccttcgttcactaaaataattactcccacaagcctgccactgttgcacgataagggaaaaaatagcttatactgattgctacaaaacctgactatagaaaagcatatgttgtcaagtgttatgttgtctgtgttaagtgcttaataccatgcaagtgtgatccgcattgttgtcatgctcatgaacacgagcaggcaaatgtatgataatattggctagtggataagctgtcttgttcactatatcccaatgctgcaatttgcatttatttgttatgtctcggtatatactaatgcatggttttgctttagtgtgtctcattgtggctgctagcattag

SEQ ID NO: 111470 - DNA, 512 bp, Zea Mays
ggcgggtcctggcggcttcagctggggacagttgttcttgaaatgactgggatctccgcagtgccaacatgcattcgccgggggttggttgcttgcaattgagggggtatggaaaaagctctgactctgctgactaaaccatgacggggtgggtccagctggtctactgaagcttggtcccttgggtggaaattcaaaggatcgagtcttctggtgccggtcttactgctgagctcggaggacttggaatttccttttaagatgccctttttcttcctcctttgccctttcaacttgcatggccttgttggagaggtgagagaaactgaggaagtcttggctagccagaattgtcttgagttctggcctgagtcccttcaggaaacgggccatcttcttgccctcggtactgacgtcttctggcccgtagcgggctaactccgtgaacttgtgcacatattcactgacagatcttccgtcttgagtcagctcccggaattcatcttccttaa

SEQ ID NO: 111471 - DNA, 377 bp, Zea Mays
gaggagtgagtcactgcggcgatcaaccatggcgatcgcagggcaaggagctatgacggtcactgggctgtaactacggctcacgatgacacgataaatgtcctaaggcgtggcgcccccatggtgaatggcgaacacgccggtgatggccgctcggccacatcgccggtgcgaacaaatgattaatcgagcacacagtacttccaaactcatccgtggcaagatcttttacccggggattgttatccatgtttatccaagcgtgaatcgcggagttggcatgaatccgcgcgcaagctcgccggtggcgaggtgcactacacccttgattatatccagtgcactctaccatcagtttttcattcagtcatcctaac

SEQ ID NO: 111472 - DNA, 799 bp, Zea Mays
atatgcacattctgttacaatgatggtgttacttcccatcgccttactctattgcgccatttcccacttgattctgcttctatccagctcaattgtgccatctgcctgatttcgctgctgttcgcttgattttttttccatccttgcttgtcaatcgctcgatctggaaggggacggtggtcgtggttggtctgagggcacacagcagtgagggacttagggaagtgaaaggaagcggagaggtgagcgatggcggcgcatctagaggacagagggaagcgggaatcgtggcggcagcatggggcaggtgcggaggctgaaagacggttctggagaacgaaagaggcgtgagagggcggtggctatgtaatgttctggattgtgatatataggcaggggagggacacatcacacatgggctgcctggtgggctaggccgctaggccagcccactactactttttcttttcttttttcctattcttcccccttcacactgatgtcttgcatttccttaccttggtatgaacatttgtcgccgccttgcttgagacggtattgaccgccatgcctcgctttactgccttgatatccatgtaagcaagcatatcaatatatttacttgcttgcttctctgttgatttgaaaattatttggataggtgtttgcaggggtgatgccacatttattttctctgatgccaacacactatagtgaatattttttctattattaaattgagatttcaccatgtaatctttttatgttctttgatgtgctatagagcagtgcaccaagg

SEQ ID NO: 111473 - DNA, 300 bp, Zea Mays
gttgcttttgtggcgtggatgaatccattgatcatttattctttcattgtcccattgcgagatatatgtggagagtaattcaagtggccttgaatctgaggatgatttcgagtagtattagcaacctttatgacaactggttatgtagaccaaaagacaagattgctaatctggttttgtttggctgtgaagctatgttctgggcaatttagcgcactagaaatgattggtgctttgggaataaaactatgcttgatccctctaacatcatttttctttgctgcttctggctggattcct

SEQ ID NO: 111474 - DNA, 685 bp, Zea Mays
caccgcacacaccgtctggagcccgaaacgcacacacaaatttacttgtcggagtgaggtttaaaacaccgatactactctaacaaagtttaggggacgaaggatgtaaaataacaataaacaattaaacacaacaattgtcaattgagtgactgacgctatgatgcacacacacagcaggctcactgccattcctagctatgacgcacagttgcaaattgctcactgctaactagctaacttctaacacatgacatgctcactccacacttccacaatccacagaccacacattgacatagttgcatgctctcactcaacacacacagcagacagggaagacaacatgctcacggctcactcggtcattcggtcattccacacacacaacatgctcaggctcagtcgctcattgctcaagtcactccacagtccacacacaaagtcacatacaagaaattgactgctcacaaaaactataaaaaaatccatattctaagttctaattatcctctaaaatagagaagcccggcccttcaacaagttgactggtgagtggtgactgctcagtcgctagtcgggtgggctggtgtcgggcgggcgacgagccggcgatttccctgctaggctcagctgtcatcctacttgtccagttgtcctgcgtggctgcatcgttgcctcggtg

SEQ ID NO: 111475 - DNA, 332 bp, Zea Mays
ttggggacgagctgcaatacacttttgaacaaggcaaatggattctccctctgcatttcttattgtacccaaataacccattcaataagatttacttttggaattgtgcataattttgatgggtttttcctaattaggagtacctagaaataccaaccttattccttgattaacctgagattaatactatgcttagtagttatgctattgcttaactttatcattatgatgtcactctttgaaagatattattcaccggagatgaaatttatactattgatgttaatcggatgattaaacaagaacatttttgtaacacctcaaaatcttat

SEQ ID NO: 111476 - DNA, 413 bp, Zea Mays
gcagaatatgcaacaggagcaccaatatttgatactttgcccctcaagatcatctccagtcggctcaccaaatccacaacaggaatcctcttgttggtaacccgggttgagtcgatgacaccactatacaaataagctgggtatgctctgtccttcagtggctgaatattcttaaaaacaaagtctgcaaccacagcttcagcggtcagacctctctccttcaacaaacaaatttcagcaagcagagccttggcttctgttatctccaagtctgtaggagactcaacccaacttggagtacgaacatccggctgtctccctgaccgaggggggagggacttgccatggttttccacaatgaaccactctaaacgccatcctttaatgctatccttaagtgggatgtcaagtta

SEQ ID NO: 111477 - DNA, 581 bp, Zea Mays
cctgcttttaagagttgtgtctatgaggatagatcagaatattacttcaataaaaagtggcatgatttgttgcgggagtgcgaccttgaggacaatgactggatggcgaacctttataacttgagggcaaaatgggctattatctaccgtgactcttttacagccgacatgacctctattcaaaggagcgaaggcatgaataatgtcttcaagaaaaggtttcgtaggaaaataggtctttcggaactccttgtagaatgtgagaaggtgtgcgccaatcttcatgaaaacgaggtgaatgcagaatgtacttggagtttaagacaggattcaaagatcaatttgtattaaccggtctatttttatgatatagtttgatgaataatgtctcccataaatgtcaagtatattatgcaagcatgccctcaaagtcttcaacataaaggatatttttgatttgccatcgaaatatatactcaacggatggactaaatatgcgaaaagagaatttttttgttgagaaacatggcatcgagaaggagaatttgacaactcaagttgcatgtatctcacgaaaggcg

SEQ ID NO: 111478 - DNA, 552 bp, Zea Mays
ttggcgatgtcggcgcttttagaagtgatagccgagtggtaccgggccacgtcggtgttttagaaataacgaccgagcggttactagtgatgtcggcattttagaagtaacaatcgaatcctttggagccacgtcactactttaggaataacagccgagtgactgctggcgacgtcggcgttttagaagtaacaaccgagtgataacgggccacgtcggccgctttggaaacaatggccgagtgaagtctggtaacgtcagcgtttttagaaataacagctgagttaaattgggctgcgtcggccgttttggaaataacggccgagtgatgacatggcacgccagcattttagaaataacagctggtgatgacttggagctttttagaaatggcgtctggcccgggaaaaccccatatgtactgcacaatcgcatgcctctgcattctgtgccctagttttgcttttatgcgtccaggccttctctgctcccttgcaatattgtttctgctccgctcgccagcaagattgagatggcgcccaagcggaagac

SEQ ID NO: 111479 - DNA, 782 bp, Zea Mays
atcctaaagggtgcctttttacctcatttctttaagatctagactcgtgtatatatatactagtcaactgcccgtgcgttgcaacgacaaacaaatattcaacaaaatattagtgtacaacgattacataaaaaataccatatattatcgatctctatcttataaattatctggtaacatccaatacagaatttcatggggaggcgcggggaggcggcgtggggagttggttggggacgaagatggtgtgggctcgaagggaggcgggacagagaagtgcgtaggatagcaggttgattcgtagaatttcatggtgtatttgtaaaagtaatccatattattcacaactttggttatatcaacaactatccaaattactacttttgtttatatgaacattttagttatctaaaatgatgaatacattcgtagcaaatacatgttagcaacatgaaatattttgtggttcacataggagcaggagataaccttaaccaaaatgtcatgtgtttctattttctaactagcaggagttgtgtacatcacaaaaaatgcataaatgaatttctatcaagatgataaggagtatcactaaatctctgcaacaaatagcatcatgtgttaaattcaccacttactgtaacttttctgcagaataagtaattgagaatggcatcaagccatagacaattgtactaaaaaattgatgccccttccaaaaattgaagcaagaaaaaacaaaagggaaaaacaaaaaaaatatctggatagcaataaaaaat

SEQ ID NO: 111480 - DNA, 299 bp, Zea Mays
cttcgggagggtttctccaccccaaatagccttttcaccgaaaccctaaaactccgcacaccacatgctcggtgaaatgcacaaaccagccaaaaatgctccgattgaacccaaatttttcaggcaccttcacatattcgccaaatttcacgcccatcagatataccaggcttcattttcaccaaattccccgtttcgagcgatcgtttccgagccgagtgcccaaattccattttcttcgcctaaattcaaaccaagcacacacttcactcatattcacctatataaacctatttgtg

SEQ ID NO: 111481 - DNA, 645 bp, Zea Mays
cctgctttcattaaggaggcagaagagaaagttgccctaatccgcaaaagactactcaaagctcagagtcggcagaagagttacgcagacaacagaaggagagaactcagttttgaggaaggagacttcgtctacctcaaggtctccccaatgcgcggggtcaaaagatttcaagtgaaggggaagctagctccacgattcgtcggccctatcctatcattggcagaatagggcccacagcctaccgccttgaattaccagaatccatgtcagatatccacaatgtgtttcatgtatcccagctccgcaaatgcctaaaagtgccagaaaggcacatcaaagaagagacaattcaggttcagaaggatctgcagtaccgataaaagccagtgaagattcttgattcagccatccgaaagacccgaaacttagaagtgaaactctataaagttcagtggagcagagaaggagaagaggaggctacctgggagagtgaagactctttgaggagggaatacccttaccttttctaaagcccaatctgaatcttgagggcgagattcttttaagtggggtaggtttgtaacatcccaattttgatcccaaggttagaaaccctaaaactcctaaacccccctaattatc

SEQ ID NO: 111482 - DNA, 442 bp, Zea Mays
gtaatgtagtaatgtagtaacataatgtagtgaaaaagggagaaaaggccgactcataatgagttggtttttaagtttgtgaaaaacttccctcctctatgtatccaagaaaatttcagcttgttccgggcaacctttcgcttttctgtcgttcttcctttatagtcgattggtagtttgccttcgcgcctaacgctgctgacgttgttagaaataattaccaagtgataactggtaactgctgagtcgtgtttggtgagcttcgacattttttagagaaaacggccaagttatgacagacattgttggcgttttagaggtaacagccgagttatgcttgaccccgtcggcggtttggagataacagccgagttatggtagacaccgtcggtgttttagaggtaacgaccgagtggtgttcgaccccgtcgacgttttagag

SEQ ID NO: 111483 - DNA, 695 bp, Zea Mays
atggatagaatacaaacccattgcttctctaacttcagccaaggcagtggaattcatacgagatataatattcaggtttgggataccgaataacatcataaccgacctgggatccaatttcactagctctgaattctttgatttctacgaacaacagagcattcagatcaaatatctgtcagtagcacacccaagagccaacggtcaggtggaaaggactaatggaatgatactggaagcactcaggaagaaagtctttgataagaatgaaaagttcgcagggaagtggatcagagaattaccttatgtggtttggagcctaagaactcaacccagtcgaggtctgcatggaaacacccccttcttcatggtctatggttcgaaggcaatgctacctgccgacctcaggtttggggcaccaaggctggtcttcgaaaacatagctgatgcagaggctaccagactagaggatattgacgtattggaagaagagcgattgaatacagtaattcagtcagctagaaaccagcaaaccctgaggcactatcatgataaggctatacgacatcgatcctttgtagtgggagacttggtcctttgccaaattctaacgggggaaggacgacacaaattgtcaccactatgggaagggccatttgtagtagcggaggtcactcgaccaggatcatatcggc

SEQ ID NO: 111484 - DNA, 333 bp, Zea Mays
gtggtgcttttaatacgggagccgaagacaagtatttttttaatgagatcaaatgctccctgctgctctgccccccaagtgaattcggcatcattcttaagtcgaaggataggggtgaaggcaacaatcttcccggctaggttagaaataaacctccgcaaataattcaccttgccgagaaacttctgcacttcgaccttacaggtcgggggtcccacattccgaatagacttaattcggtcagggtctatctctatgccatgttcatggatgataaatcctaaaaacttaccagccgacaccccaaaagcacatttacgtgggttccttttc

SEQ ID NO: 111485 - DNA, 473 bp, Zea Mays
atagtgtaaagtgcccttttacccttacttttgttatttttgcacaaggagtatcttaattaattccaacctcaaattttttagaataaaccaaagaggtcaatgtctacccactgtaatttttgtaacatttttggaaaattttagattgccatgattgttcaaaagaactcaataagaagcataatagaaagtaaaatgagaattatgggggaaattagtggtgtgcaaaattaaatcctccaagagcccaaaacaaacatccatgggatgactgaaattttaagttcattcaagaccataaaatgagtgtatgaaacccttaaggccgacaaagaaaccctagtgtgcccactattttaatactgtttcaccatacgtagcatttacaaattgccatatcattaatatgcatatatcttattcattgcatttgatagattgtaatcttgctgacggagagtacatcctcg

SEQ ID NO: 111486 - DNA, 610 bp, Zea Mays
gcacgacgtagtgttcgacgaagggcgaggatgggcctgggacaaggcggtggatgacggcacgactccgacgtacgacgacttcaccatcgagtacgtccacattgtgggagctgggggagtaagcaactcttcttcgagcaggtctaccccagcccccaagtctccaccgactctaccgccacgctctccagctccagctacaacaagctcttcgccaccacgcaatccagccacgactccggctacagcgagctcttcgtcaccacatactccagcactgacggtaacctctccaggaacgtcctctctgacgccaactcatgtcgagcacgacccgatggagcttgtgtcctcgctttcccacgacaaggagcgtgtcaacatgtgcttcgatggcgagccgttgcggtatcatacggtggagggacttctcatcgacccgtcggtggcgagcctggcgtctcgcattttggcgggagagttgcatcttgcatgcaatgatggtgagcctcggtctttcgtggaggccaagaaacacgtggtttggtgtgccacgatgcagtcggagatggacgcggttgagacgaaccgcacctgggagctcgct

SEQ ID NO: 111487 - DNA, 1552 bp, Zea Mays
acatctagtatcggagccgctatcgctgtcagggccatgctagcaatcatgtagcgtgcagatgaactacctcaccaacgaatcaccgttaggagacgaggtgtggctctagaaatgtcgaccacagtctcgtgatccaccaggtcatgagggagtggcgacaataggcaatgcccattgttgaccaagaccaactactattcatggacggtgctcatgaagttgaagttgtagatgaaaggcctgtggacgacagtaaacgtcaacaccacatgggctacaacctcaatgagaaccgattgttcgtctaactcagggagaagggtggtggcaggagcatacactagatcgacactggcacaaagaaccacgtgataggggagtgcatggccttctttgggctcgacactagcgcctgcagaactattcggttcgacaatgactccatggtcaacatcgaaggccacaagccacaacatagtcctcttcagttgcaattgtgaaaagcaccaaatgttggttggcatctacttcatcgctcgactgatagcgaacatcgtcggcttaagtcagctcgataaggacgaccacaaggtcttgatcgagaacgacgttctcaagatctaggaccagtgtcaatgattgttggtcaaagtgcggcgttcgaagagccgcctctacgtcctcgacatcgctcagctcatgtgcctcaccgcctgtagcttggaggtttcctagcaatggcaagctaggttcagacttctcaagttccaggggcttagggaactgacagagtgtgacctggtgcgcggactgccgctaatagaccacatcaatgaggtctacgagagatatttggtccagagacaacgacaaagttcgttcaagtattgtgtgcctcatctgctcaacctggtgttcacggacttgtgtggtatgatactcggatcaccccgaagatgcctagagggaagaatgttcctcctcgtcatcgacgacaagagtcacttcatgtggcccgtgttgttgccttgttggtgtcaaaggaccaggctacgacggccatcatccaactccaggcatgcgtcgaggaaaagcgaaggatgggcacgctccgcaacgaccacggtggcgagttcacgacgcgcacattcaacgactactgcgccaagcacaacatccaacgtcatggtcaaataaattgagacaggcttagggggagattgttgcataatccagcttggtttcttgtttccttcatagcggaatggttagtttcctttcttagctaattgattagtttcctttctcaactatattgatattggtgccatgatttgtggttgtgagcctttataattgtgtatttaatcgaatcaatagaatacagaaaggtagtggtgtattttgagcaccaaaactcagtgtgttcttctagtgttcgggttgaaattttgtgagcggttagatgacccaacgatcatcttcttctccggcaaggcatgccgaagagtagaaggctacaaaattgtagttttatattgcatccccc

SEQ ID NO: 111488 - DNA, 458 bp, Zea Mays
tccttccttcagtggtttcgggtgccctgggtagcctactctggtggcaccgactctacaccatcaatagcctgttcagccctacccggtgcagtcttggacaccacgacctggggcatgcgatcagcggtctcttactaactcgtttagcaatatgactctgacccatccaacggtcactgactaggttgccgacttcagagcctcctaccacaccactcctaacgttggtatactcctctactcatcacatccatccctctcatccttctatcattgtttacaatggttttcttcataacacatgggtgttatagggctcctaacggtcagcgaatgaggagaagcgcgatgtcctttccgctcccgccccttccgcttccgtcccttccgctcccgtcccctgccctcccacctccggccgacgccccagcccctccaacccacagcctcacgcc

SEQ ID NO: 111489 - DNA, 1133 bp, Zea Mays
ctactattgttttcccattgttagaattccatagtatctacatttgtagaggtaaatgtagtgtgatggttttgaaatttcgacgtggggcatagaagttgccctaagatgggtaattgcaaacgtgccaagcgcgccgtgccaatttaagtcagtgccaacttaaaccgaccgctccgttagtagggcatagtggccaccccgagttaaataagcgtgagcatgtcgcaccgctttaagtcaatgccgacttaagccgattgctccgttagtagggcatagtggtcaccccgagttaagtaagcgtgagcatgtcgcaccgccttaagtcattgccgacttaagccgattgctccgttagtagggcatagtggccaccccgagttaaataagcgtgagcatgtcgcaccgccttaagtcattgccgacttaagccgattgctccgttagtagggcatagtggtcacctcgagttaagtaagtgtgagcatgtcgcaccgccttaagtcattgctgacttaagccgattgctccgttattagggcatagtggtcaccccgagttaagtaagcgtgagcatgtcgcaccgccttaagtcattgtcgacttaagccgattgctcctttagtagggcatagtggtcaccctaagttaagtaagcgtgagcatgtcgcaccaccttaagtcattgccgacttaagccgattgctccgttagtagggcatagtggtcaccccgagttaagtaagtataccaattgacagcgaacaatctgagtgcctttgaaacctttttattgatgatatatttctcgatttacagaatacatcgttgtttcgagagcttctgggatgtagctatgggtaaaacttcctgaggtgttctatgttccatgagttcccaatttccgtgccgtccatctgagtgaggcgatatgatcccggccgagtgacttctgctactatgaatggtccttcccatagaggtgacaatttatgccgtccctcccccgttagaattcggcggaggacgagatctcccactgcaaaggatcgatgccgtatggccttatcatgatagcgcctcagagtttgctgataccgcgctgattgaatcaccatattcaatcgcac

SEQ ID NO: 111490 - DNA, 609 bp, Zea Mays
agtaaatgtgcctcgaatctggaacattgctattaactgtccgagcttcggactcttctcttgcatcgcgttgttgctgaatttggcgttgcccttcaggttgttggtgtgggatgaagttggagccatgaccggtggttgtggtaaagcccatgcagctggagagtggcttgccgaagctactgaaactgtaggttatgaaaatggctgttgattgcccacatactcaggaatatggggaataacacgaagcaatatgtaggacttgctttggctgattctgtcgtgcttcagcctcagctatcttcttttgcttctatattgtaactaggcagatcctagttgtgtgccccttatcctctccacaggacaagccaaacaaccttcttggttgtgagttgaatcttcttccgaagctttgtacccctctacctcttggggctggtggtctaaaggagctttgttgcgtcccagttgactgggaagtgtgttggtgcccttggttgtgattgcctctatcttcactttggttgggattgtgtatcatcctaacatgccttgggtggagccttcctccgaagctcctggtcatctcagaatatctgtaag

SEQ ID NO: 111491 - DNA, 500 bp, Zea Mays
gctcagtgtgaggacctagaaatgtttttaagagcattttcaacaatatgccctataaaataccataaaattaaaaatgaatatatttcaaagtaggcgttggaaagtagatgaaccgtggaagcgtaagggctacaagatggttctacttataatcaattacaaaagaccaagtgtcgtggagccttttcccaataagccgatatagcaagtcaaagtgacacaaattttcagaatttggagtgtcaatatggaggaatggtcgagtcctaaacaataaaatgtcaagtctaaagactttgggggctgcatgacataattagcgactcaaaccaaagtggaacaactcgaaacatcaaagacaggtcttacttaccaagatttaagacaagagtataatctacctgagctaataatttagccaaataagacttgtgggctattgttaaagatatgtaccatgatattgaagaccatttcaaccaacaagaatatgatag

SEQ ID NO: 111492 - DNA, 1179 bp, Zea Mays
ctcaccatgtgcgaatttgcccaccacgagcgtgttcggcaatctcatgtcccggtggtcgatgtcggtggccacgggacgtcaaagtggtatcaaagtcgtcgatcctctaaggtatccactatggcgtcgttgacgaagccacggtgcagatccagttgcttttggaagctatgtcaggagcggagctgaaggtcaaggagcgttgggagaagatgatgcgaatggtggagagggtggatcggtgactggaggcgctggattcgagacaataatcggttgctgaggcgacaaagaaggaggaggaggaacatgccatactagcacgtcaggtggacgagaccgagaagacggtgtagcgccttcggctggagtgaatggtgaaggataagaaggtatggggagaatcatgattgaagggaatttggtagaaatgatcaggggagaggtgagagggaaggattcagaagaggtggtcgagaacgagaggagagggagcaacatcactttggagagagtagatatttttgttccactgacttaccaaagatgtccttcctaaagttttagggggtagaaccggggatatggatcaacaagtgtcttgagtatttcatgatctactaagttctagagttcatatgggcatcttctgcttctctacacatgaaggggagggctgctagatggatgtaggtgtacaaaatgagacaagggttgggtgactgggctcatttcatttaggatgtacagaagaagtttggtttagaagatcattcttaggccatgagggggttggttcatatgtcatagaaggctagtttggatgaatatattcaagagtttgaggatagcttttatgagacaactatgcataatccaaatttagatgagactttctttgtgtcctagtttattaaggggttgaggggagaaactaagggacatgtgatgtcttagttgcctcgaatagtagacagagcaataattttggcccagatacaccaagaggttttggagaagggtggaaacaaatttcagaaaggaatccaatcaagcaagggtctaggaggtgctgtcaagatagattccaaggcaggagggggatcttcagatctgactaaggagagatagctgagggatttcagaagattgattcgtttgtgttttgggtgtgga

SEQ ID NO: 111493 - DNA, 454 bp, Zea Mays
aaatctgcagtggtttatccaatagcaaacttgttctctactttgtcactgtactaactgaaactgacgaacatccccacttgtattacaattttatctcgatctgcagggtaagacagctttcgcgtgtatacacacaagtcgagaaaacccctcattcgtatgcattaacttgagagctagaaatctagaatgaagttacgccaagttggggcgagatgcacggtaccatctggagtactgactggttaaccgacatgcacgaaaattgagatcatcgatataaataggggggcgaagctatattcagtttaggatgtgtagatgtaccctaagaaatatgcacctcctccattacatgacgtctatacatccccaccctaacgtcccaccctcattagggctgatttagtttggacagaaaaatagagaagatccataggagaggaatccc

SEQ ID NO: 111494 - DNA, 549 bp, Zea Mays
gttgcgatgccattcgttttgacgtggagctgatatcaaaaataggtaaactgcttgagctcgaccccaacccctgcctcctccatgccctcaccaccaagtgcgcgctacgccaagctaggtcaatgttgtgctaggttagtgctgctatgcctcaccagtcacccatccgctcctacctctctgcatcactttattcgtcttcctcctgagagattaattaaattttgttctattcatgtgagcccttctcctccgtgtgcttcttcttgcctcacttgattgttgcttccaacttaatagcattgactagattgagataaccttatactaaacaaaaaggctgacaggaaggtatctgttgtccagcagtttttgcttctgaggctccatgccaataatcaattttgctcctaatgcttcatgcaaataattagttctactttaccacatggatgcatagttctagacttatttcatacaattttgcatgtgtagctaccccaacgtttaatatcatgaacacaagaatttatagaattgtttctt

SEQ ID NO: 111495 - DNA, 875 bp, Zea Mays
atgaactaccatgcaactttggtgatcacaaagctggttcagtctggaatctcattcctggagtcaaggaaactatgttcccacaccagcaggatgcatttgagttcatgtggacgaagctagcaggaggtactacaattgaacagctaaagcacaccataaaatctgatgctggaggtggttgtgtgatttctcatgcacctgggacgggaaagacgcgactggcaatcacatttgttcaatcctaccttgaggttttcccgcactgtagcccggttatcattgctcccagggggatgctagcgacatgggagaaggagttcaggaaatggaaggtaaagctccctttccatgtactgaattccactgagatcaactggagtgaggacaagaccctccaagaacaggctgcgaagaatggaacttttcaccgtaggctactgacagataaaatggatcaaaattataggcgactggtgaagctagggtcctggatgaacggtaccagcataatcggtctgagctactcgctttttaggaagctagctaatcacgaaggcatggacggggataaggtgaggaagctgctgctggagaaacccaacttgcttgtccttgacgaagggcacacgccgaggaacaagaagagtctcatctggaaggttcttaaaagggtccacaccgaaaagcggataattctatcggggactctattccagaacaattttgaggaactctacaacaccttgcgccttgtcaggccaaaggatgcagatgcattgcatctagagacggacgagagcaaagatttctggtcttcgttgagactgaatgacatcacaaaggcaaacattaatgaagtgaggaaaaaactg

SEQ ID NO: 111496 - DNA, 523 bp, Zea Mays
tttcaagcgaagcttatatgatgttcaacaaaaaatccttggtatagttgaagaagttcataatgttgagtttgatgaatctactggatctcaaaatgaagatgataatttagataatatgagaggcatccaactcaataatacaataaataacatgtcaattgatgatatgaggccaagggaagtgatagaagatgaagagatcatatatttgctccttcaaatgtgctaaataatgatcaatatctagtgctcaagatcaagtaatccaaacgttcacaattgcaagattatcctttggatcaaaagttggagatttaagaagtgttcaaacaagatcaagactagcatcttttgtaagcactactcatttgtgttgtccattgagccaaccaagattcaagatgcattattggattgtgattgggttaatgacattcacgaagaactcaataatttcactagaaatgaagtttaggaattattttaaaggcccaagaaacataacgtgattgacaccaag

SEQ ID NO: 111497 - DNA, 525 bp, Zea Mays
cttgagtacccaaccacctctgttcaacaaaacagaagaacccttggacgctgatgcttggatacgcatcattgagtccaaatttactttacttacggcagattgcccggaggaaagcaaggctagatttgctgcgcaacaattaagaggaactgctcgtctatggtgggacaattaccatgccatgctcccagcagatcacctagttttatgggaagaattcaagatagctttcagggcacaccacattccagaaggtctaatggagcgaaaactgacagagtttcttgcgttgacccaaggcaaccgcacagtactccaatatgcccaagtgttcaacaatctgagccagtatgcagggtatcatgcagatacagatgccaaaaagagagatcgtttccgtcggggtctcaataccaagcttaaagaacgcttgaacccagtaaaaatggacaactacaacgaattggtgaatgtagctatatcgcaggaagattgtatcatggctcatcgagcagagaagaa

SEQ ID NO: 111498 - DNA, 371 bp, Zea Mays
gggtaacttcttcagatgcggctctgacagaattcaagatccccttcagccgagcaatacattgagtagcgaaaccgaagcatttgttgggaagatttgtgattgtttcgctcagtttaacattattttcattttctgcctcgattctcgcattcaacgccttgaactcacggttgaagcgatccgagttcttttctaaagttgcccgagcttcttctagctctttgctcaatttctcattttgagaatgcgattcagcaagtgagcctttggctgagcgcagcaggctatcattttccttcaaagaatcttcaagttttttaatcttatcttcaaagccttcgataacgatttcattttttctgtcctcg

SEQ ID NO: 111499 - DNA, 577 bp, Zea Mays
caggtgttcattacaaaaattaaaagagcccctgagggctaccaagccaagctaccaagctgtcaatccttctccccctttttggcaactagcaccaaaaatggagagaaccaacaaccacaaatcaccactgaggaggagtcagatcaaagaattgatacgccaagttagatgcaaagttttcttccctaggttgagctgggggaggatagctgcccgatggatcctggggtggaggatatgaagaagattgacccggatccccctggtggggaggtggggcatactgctcatgatcatcaaaatattcttcctcttcttcttcatcttcagctgtcatgaagggcaccccataggcctgctggtgccattcattgatttctggcggaggaggatgaagaggcacatcaggcgagcggggagcaaatggcatacccatcgaagaggcttgacgacgaaggttgtcgttagtctcccgctgacgcctcgccagctcatgcacatcagaagatatgttcctgcacatggaaaagaaggctgtaataccatgggccagtcgagctcccatcccgcgacc

SEQ ID NO: 111500 - DNA, 381 bp, Zea Mays
agcggtcagtgttgggagagacagagagagacgcccttcgtcgatgtcgggtccttgcgctgtctgatactccggtaagaccttccctagagttctcctttgtcctctcaacatgtagcatccgtaggttcgagtttgagcatctgagtgcgagataggggtccggccatgtgcgccgccgtgtgggcgctgtgccgtcgtgcctggtgaggaagatggtgccgtgccattgatttggtaataaccggcttggatcaattaaggagtaccagttcagtttggttgcacgatgagcgtagatcaggggatgatgggctctaggagcgtttttggctcggaacggttggagacatcaatcgagtaaatcgagtaaggagcgac

SEQ ID NO: 111501 - DNA, 581 bp, Zea Mays
ggttcgtcgccaagcgacagctctcgccgccctatccttaggccgtgcgacgaaaaggggaagtcaggtgtcttagcggtagaagaggatggctggtctgttgtgaagcctaagttctggtggcggaaaagttcaaattttcttggggatttcaagcagcaagatgtgatccgaggaaccgattttttcaagcaacagctcagaggtaaatgtttcaattgcctggcgtcagatcactttgcttacctctgttcggcacctgttcgctgctggcaatgcctacaagcaggtcataaggctaggtcatgtcctggcaatatctaccgtgggagatcccattcaattcgtgatctacctgggtcactcaagcattcaatccagaagggcagtaatttctcctcgagctaccagctgctgaagcctctacccggccctcttcaaatgggacatgaacggcagcctacacttcacacttcttctgtccagccaaacaagtcgtatctccaagctgtccagggaggccaagtcatggaagcgcgctaccccggtgaccctcgggcgcggcctgcaagagcagtctg

SEQ ID NO: 111502 - DNA, 389 bp, Zea Mays
tgtcaagtctggtttaaggacaacatctgtcacttcaatggtttgatcgggaacccaaagacacttcttcaattgtgacacgtggaacacattatgtacaacagacaaggtttcgggtaactgaagtcggtatgccactagcccatatctttcaagaataataaaaggaccaatatatcgtggtgcaagctttcctttaaccccgaaacgcgatacgcccttcattggcaaaacctttaggtagacatagtctccctcaaggaaatataaaggcattcgccgtttgtctgcataactcttctgacgagcttgagctttcttcaaattatgaattatcctttgaactctttcttcggtctctttcaccatatcaggcctgaagaagtacc

SEQ ID NO: 111503 - DNA, 612 bp, Zea Mays
cagaaattccagacatgggattggaggtatcatgagcattgtctcgtgtatcgtcgactttggaaggcagtcttcaacgccaagacgttggtccaagtttcctgactcccatggaggtggtaggggagccttcagccttagaggcggctgctgtagaaaatctcaccccctagggtggtgctggcagtgatccgtctctggtgggtatcgcaagctagcccagccctcgaaggtgctgccggtagtgatccggctctggtgagttgcgcaagctgcaacccagcccccgagggtgctgccagtagtgatccagctctggtgggtggcgcaagctgcaacccagcccccgagggtgtccaagtgagctctccttcctacacctccatggatgtccatgttgggtcgtctccacctcgatccaatgaggcagcgatgatgcatgcttctatgacttcgaacaaacaggtcgccttggaggtcggcgagctagatgcaagaaatctggtatctgctggtggggctgagctcacccctaacaacgttcttcaaattgttccggttgatcttcctccgtcaagccatgacataactccccctgacttgggtttaccg

SEQ ID NO: 111504 - DNA, 517 bp, Zea Mays
gaactattgctaccgtagaaaaaattccaaaggatgcaatagaagttatcagacttgaggcaattgatcatataagaaaatattaagctgaaacaacaaagtggcatggtagaaaagtaaagttgaaaacataaagccaagtcacttcatgcttcgaagaatagctaactctgatacaatgggaaaacttcaaacaaaatacgaaggccctttcctagttctatccttaaacagactaggtccctataggttcaaggacatggaaggaaacaaagttctaagatcctggaatgctgacgagctttgtagatactatgtataacgctcatgtacttttttacttttcttttttcacctccagtgctgacacccttttttactttcaaaagggaaaggttttttaatggggccacccttataacagaaatgtaacttcacccatcttgtataagggtgtgttcccccataatgtaaaatgtaatctaagactacaccatcgagtgtagtgggaaaaaag

SEQ ID NO: 111505 - DNA, 292 bp, Zea Mays
gaaagctcaggggctattgcgcgaaaagtccaagactcagagcacccagcgctggactacgggttaattcccctaaaacccgaggggcacttatgctaatttgtcgcagtgaaggggtatgcacaaatcatggccacccgattatggcggaacagctaggattaaatcagatcccacccgaactagtactcaataggaaccctaggataggatatgcacggcctggattttatgttgaccaaccagatgtggttcgcccgatcagaattcaaccgctaggattagattctac

SEQ ID NO: 111506 - DNA, 665 bp, Zea Mays
acgcctagcattgagtgcagtagagggccagtccgcctcccactcatgatctacggagtccctcggtctacagcgcactcatgacatacgagcccctcgggctgcgacacactcatggcctatcgaagctaggcctgaacgtgcaggtcatttacatggcgcacaacgcgatgagccacgctaaggcctaggctacggaggccagggattggcatggcgcagaggtagtaatgatggtgtcagggcctcgcaccgcccatgttgttcgccataacgagcacgagcagagacgacgaggagaccaagacgcatgaaacaacacagcctcaacagggtaaaacactcgattttaccatgatatagtggttccttctcgagggagtcactgatggtcgaccctcaccttggcctataaaagtaggccagtcacgaggaaggggtttcaactcttagaaccggagacactcaacggaaggcaatgacacacgagacctaaaaacctagaggttggagccaaggtttagtgtaggactccaatcccgtagtcatttaggcccacccacacataagagacttgtgatctctccttccctttttcacccacttgtaacccacttataacccctactacgagcattgagttacaaaggtgttggtagtgcgag

SEQ ID NO: 111507 - DNA, 390 bp, Zea Mays
attcgcccagttttcttcatattcttgcccactgcattatttgccgtgtttcccttgccttggctggaacttcccgggttctattgattattggagttgttccgcctcagatatggacagtctttgatgaaatgtctagacttcccacaattgaaacaaccagttgatgagctcgggagtgcggggaaacgagtatcaggggcactcggctgagttgttgacatgggggtagtggcagggcggatgaatacaggctgtttaaaggggtaggagggtggacgaggtgaagaatggttttgattgaaaggttggatcaccaacctttgtcgcttttcaggcccttggttggacctgtcacctccatagccctttgacttgcctgggcctgca

SEQ ID NO: 111508 - DNA, 535 bp, Zea Mays
attgatttgttgatgggcttgcttttctcctaaccgcaagtttctctcgactcttgctgcagttgccctgttcctcagcgttcaagtcaggaattctggtcaatgagtgccaactgtctgcaaaaatgtgcactccttggcatgactcttcatcctccttgtaatggaaacaagcaatgtctctttgttagggtaccttagaacatcatgttgtacactgtgcagtgtaaaagggaagtaatgcctgcttttggagtccgcgattatgtagactaccacatgattaagtgtgaaaacctttggaggtcaatcatcattggtttataataaaggagtagcaaaaacatgattaaggtatgtttattgcataattcatgggtcacgttaaatcatttgccttcatttctttccttttcttcccatgttaatcagttgctcatatgtaggtactatggttaattgttaggtagccttgattgcatctttagtttaagctttggtttcaaaaataaattcgacccgcctttcagaaaat

SEQ ID NO: 111509 - DNA, 517 bp, Zea Mays
cgacagattggtgacaatggtgttcaagtcattaaggaaatgctcgaacaaaaggtggataagtacaaatgctttcatcaggacagcaagggagttctatggtttgaagaccgattggttattcctaaaaatccagaactcaggaagaaaatattggacgaagctcatctttccaaattttccatgcaccccgggagtaacaagatgtatcatgacctcagatccttatattggtggaccaggatgaagagggaaatagctaagtatgtatctgagtgcgacacttgccaaagaatcaaagctagtcatttgaaggtagcaggagccttacagcctctccctatcccttcttggaaatgggaggccatttgcatggatttcgtggtgggattgccaaacacctcccggcaccatgattctatttgggtcattgtggataggttaaccaagacggctcatttcttgccagtacataccatccacaaggcggaaaaatatgctgagatctatattgacc

SEQ ID NO: 111510 - DNA, 428 bp, Zea Mays
gaggtctaataggtcattttggataaaagaagacttatgaactgctcagtgatcatttctattggcccaagatgagaagagacatcatcagatttgtggagcgttgtgtcacctgtcacaaagctaagtcaaaactgaaccctcatggtttatatactcctttacccgctcctaaaattccttgggaagacataagcatggattttattttagggctgccgaggactcagaaaaagagagattctatttttgttgtggttgatagattttcaaaaatggctcattttattccatgcaacaagagtgacgatgcttcacatgttgccaatttgtttttcagagaaatcttaaggctacatggagtgcccaagaccatcgtatctgaccgtgatgtgaagtttatgagctatttttggaaaacattgtgg

SEQ ID NO: 111511 - DNA, 581 bp, Zea Mays
tctctcctcttcttcctttttgtattattagacaaaaccatgcatgacaccagaggcagatgcaaagggtgagcaaggggggctattaccccacctcaatttttattaccttttattatacctaggtttaaatataattcataaaaaaactttatgtattaggtgtggacaaatttaatgaaaatctagttttgatttaactttttctcagtactccactactcaacccactccccacacgagtcgtttggttccctcccctagcggctagcccactcatggctcgctagctccttcggtcattgactgattggttagtgggtgacctaacccgctcactgtcagtcccaccttcactcctcgtcagcttgtcgcgtcgtcgggatcccatcgccgttactttgcctcctagtctgcactgacgtgtaggcataccgtcagtaggatcatgcctaggcaccatggtgccacctacacctcactatctcactacggtcctaccacgccatcacgatgcaacaatggttgttgcttgctgccgcctgccctcgctacccctgtaagttgtcgccccatcatcg

SEQ ID NO: 111512 - DNA, 491 bp, Zea Mays
atagccacttcacgactattaacacccaaacctccttagaggaaatctaagttgggaagagggtggcgtacaagggtaaaggcaaccccctaggggcctcgttgatgttgaagcggccccactctatataggtgtcccttgggactaggtcaatgataatgtcccatgctccaggggcctcgataaagtgcctactagacttggtgatgagccctactagtgcaggggtggtgaactttagaggctgacaggtaacatggatacctcacccccatattagggtctcttctcttgcatcaagaatgagtggtggctaggagacatcaccctcgggttacctggtcaacacaaatcttgaggcagaagtagtatctttgttccctcctaacaatggtgcttctatcggccccgtggcccatgtatccaccatgcctagagcctacatctccattgcacttagatcccctacctccaccatgctttacgttcac

SEQ ID NO: 111513 - DNA, 634 bp, Zea Mays
cagcacgggacgacatcttgaggaccaagtacccgtaatgggcaatggccatgaatcggtacagggccagcctgccaatgatggcattgaaagggaggttaacctccgcaacgtcgaactggacgttctcagtgtggaagttttcctcagtcccgaatgtaaccgggagtgcgatgctcccaaggggatacaccggttgagggcctactccggagaatgggcgagagggtcccagtcgagatcctgggatctgcagctgcttgaacgcagcatgactgatgacgttgagcccagctccaccatcaatcaggacatgatgtagcctcatgttggcgatgacaggggcggtgatgagtggtagtatgccagctcctgccatgttttcggggcagtcagatgccccgaaggagatagtggtgctccgccaccgctgatgtggggctgcctttgggacccctgggatcgccgaaagcacctcgcggcgcagggacttcacgttcctacgggaggtgagctcctagcttccgccatacattacgtacaacttcttgcggcggtcgttgtcatcatcggagtcggagtctctagtgaggatgtccttgaggacttgggagactgatacccgaggtctcgt

SEQ ID NO: 111514 - DNA, 554 bp, Zea Mays
catcgtgtggattccctgccttgtcttgccatcgtcttgtctcgtcagcgtgcgagcaaaggcaacggtgtaggctgcagcataggctagctcatcgtcttgcatagtggagcaggcggatggtgttgtcctatctcttttgcacatctcttcacctggtgttgtagtgggaacaacaagggtcatgatggaagttacccacgagcgttgcagtcggtcaacggtatttacctctataacacgcgggttactaatgagtcccaggccttgcagactgcacacgccgccttcttttaattcgaggcgtacgtcgcatgtcactggtgtgaacaggtgggcgtgctgcccatatttaatgcaggcggccccctatgtcagaggctcacaccaagcgacgcaggtagcttctgcaatacaccttgggccacgtggtagcaccacacctccgccaatgcgaagagcaatggttgggaacgcatgttgacgtggtggctctagacccctggttgggagtccgggagagacttagggaaactcgagtccctccagaatgg

SEQ ID NO: 111515 - DNA, 392 bp, Zea Mays
cattttcaatgcatgaaccacgacttctaactccaagtcatgagtgggataatttttctcatgaggcctaagtgctcttgatgtgtaagcaatgactcagttgtcttgcatcaaaacacaacccagtctagtgccagaggcatcacggtacacatcaaatggcttgccgctatcgggttgcgctaacaccggtgctgtggtcagatgttgcctcattgcgtggaaggcatcttcgcacttctgaccccaacaaacttggctcccttcttcaacagttcagtcatgggcttcgcaattcgagagaaatctggaatgaatcttcgataataaccagccaatcccagaaaacttcgaatctgacggacagttgttggcggcttccagttcgtcac

SEQ ID NO: 111516 - DNA, 297 bp, Zea Mays
gtcggtttgtgaccttgagctatagatagataggctcacactcactcacccacagacagaaggctgttagtacagcaaggactgatgacgcatcggcacccggcccagcatcagctgtaggattggagcatgcatgtacgtaacatacgtaccccggcccgtcacttcttccgtacgtgagaccgtacgtaaccctactagagtgggcaggttctcgatgggggcatgaaaatgagacctcttttggtgctgtttgttcgtgtactagcatgcaagggatgcaatgcaagctgaaac

SEQ ID NO: 111517 - DNA, 638 bp, Zea Mays
ctggtggaaggttgtatggaacagcaaagatgggccaacatgagtaggacgttgcagttagattgaaaggcgagaaaccatatattgccaaaccgaagcggacattccgcacttcatcagcaaagctggaatcaaaagcatctagtgccttccatgcatttgtatcaactgggtgcgccatgacatttggattctcacgtaccccttctttgtgccacctcatgtgtctggttgtattcttgggaatgaacaaacgtttcaaccgaggtataagaggcatgtaacgaagctgcttacgtgcaatctttgtcgtcacggtcaaaccatcatcgttttcaacctcaacaaatctacgctcaccacatatagtacacttcttctcactcgcagtctctttccagaaaagcatacagttattgtcacagacatcgattttttcgtagtccataccgagcctagagagcaactttttggactgatacatgtcctttggcatcttgtgattctctagaagtacatcgctgatcaagttcaaaagctccttgtagcagttgtttgagaatgcaaacttagacttaatagccataagtcgagtcacaaatacaaggacggtcactttcgtgtgctcatgcaacggc

SEQ ID NO: 111518 - DNA, 353 bp, Zea Mays
gttgggctgcctctacctccacttggcaccgacgtcttgcccaccccgcctccaacgtcctttctagactctcatagtctcgttcaccttgtccattcgttgcccaacttgggcacaataaaaagactctgataggtccccttgtaagaaagcattgttgacgtcgagctgatgtattgatcaggagcacgagagagcaagggatatgactgtccgaactgtagtaggcttaaccaaacttgctgcgtgtacgcatgtcatactgattttccaccagagtaacaacaacaccaggtgggagtgtgctgggaggactaggctcatccactggaatcaaggtgccggtaaaccag

SEQ ID NO: 111519 - DNA, 735 bp, Zea Mays
cttcgccgctagtgctccaattctcgcccgctgccaacgcctaccaaaatcgacctctattctagattcgccatgtgcacgactgtggaggagctcgtcatcagccatggccccaccgcctcgcccccatctacctccccaattttagcatgaacacgatctcagacgcaaacctcgcccccacacctcgccatccatccacctccccggatggtgtgccttcctggaattaaaagaccgaagggaggccacacacgagtttaccaagcagacgcacgtgagtacatccgacgtccaccatcagccaacgcccaccatcagtcaggtaattcactaccttttcatcatgcgcaattctttcctgtgttgaatatgctgttctttctggaacctattcgggtttcgttgtgggggcgtgcgtgaggttttagcctgttcctatttgttgatacgtgtgtactcgatgtggggtggcagcttcgaatgcgatgggttgggttgcctggcctcggtgattgtggattgggtggctcattagtgtttagcgttgttgatcactgggggttaggttacaggtttatttctgatacataggttacatgtttaccgatcctctcaatacaactggtctgttatgtttcattcgattttcagttaagtcatagtactaaactgcacagtctcattcaattttcagttaaatcaacctgttaatttggtaccataattttaaat

SEQ ID NO: 111520 - DNA, 402 bp, Zea Mays
ctcaactagtgcttaggccatcggtttagcccatagcaggagcggtcataccttccttggttttgcttcaatatagcatctatccttaagatagctcttgtctggttgatccgagatatgattgcattagttatgtgagtatatattaggtgctgttacatattttcatccctaaatctcctcaactagcttctcagaggaaagattatggaggaaactaaatattcacaaagaattcctttaggtagttgatattgtttgctggtcagtgttatcaactcatccaactaatcacaattaatctgggaactaatcgttccttgacctcaatgaggctctgctacttgatttggttgaatggttgaccgaaaatcttgtcgtccaattagtcattgtctaatc

SEQ ID NO: 111521 - DNA, 281 bp, Zea Mays
gtcagaacttaatctttttgcccttcggctcagctacagtggccgaagcggcggtcttcctctttttctcttgcccttttatcggataatggtaatcagggtatacgaagccaatagcatcaaataccctgtttaatcttttcttgccccgacttccaaaggctgcggacagatcattatcttcggccttggagtatgctccaagtagctcgtcactagtagcttcgatgcacttcagccagtcatcgtttggctcatcaaacttttccctgaatctgaag

SEQ ID NO: 111522 - DNA, 281 bp, Zea Mays
ccggtgcatcaaaacttttaccttctttgacctcggcgcactagaagttgccgaagtaacagtctttcttttctatccttgctttcgcgaaggataacagtaatctggatatacaaatccaatgacatcaaacaccctgtttagcctcttcttgcctcgagccccgaaggccgttgtcatggcatcatctttagccttcgagtaggctccaagcaattcatcactggttgcttctatggcatctagccagtcagcatttggctcatcaaactgactcctgt

SEQ ID NO: 111523 - DNA, 398 bp, Zea Mays
agcggcggcggaagtgagaggtacggccggcggcgagaaaatgtccagcaccagagctggcgatgacatgccacctgtatcatctgtgcatacgccagcaggtacgtctatttcaatggacatgcatcctgtagcgtctgcgatcgccccatacacagagggtgtctccgttactcccccggcagcattgagggcacctggacatatcgatgagcacacaaaaacggcagatgtggtcggcgcagagaagcacatccccatgagacatattggcccgcatgaataggacacacctcatattcttcagagccatgtaagttctcccaaatatgatactcttattttcttacatacttctttgtaatgttgtacatataccatgtaaaatttagacgcta

SEQ ID NO: 111524 - DNA, 347 bp, Zea Mays
ctaaactttgtccagttagctgaactggggtcactttggacagagagggaggggccgttgtgatccagctgtacaccggctgatgttgcttgcttgtttcaatttgcttgcttgcttgtgtcgtccttatcatttgtgtcgagatgtgcctggaccatgcatggtgttgtgctatgtggccgcgtgttcacgttcaagctgtgtttaagcagcaaacaccttgcaccttatcctatgtgctcaattcctaaaatatttttgtggactagtcttgtacgtcttctcttcttcacattggctctgaagcctatacgtgtcttcctcaaacaggtgcttaggtcattttc

SEQ ID NO: 111525 - DNA, 318 bp, Zea Mays
ctttgttgtctgggaggcagtataagaaatcatcttcgtctgttccattgaacactaaggcaccctttggatactttagttctcgggcatagtgtttagcttcaaaccttcttcagttaatctttttcccaaagcgtgtcatacgatataatcaagaacttcagaggatgcttcgggagtaggagtggcagttttttcaggcagaatttgttctgtagcatctttttctgttttctcctccccggttcccaataatttttcctttgcgggctctgaaggcccaacttcggttttgatctagctctttgcagctttggc

SEQ ID NO: 111526 - DNA, 724 bp, Zea Mays
cagcaacatggaggtagaggacaacctcaaggaccacgagacaccacatatttagagttctctgaaacccgtccaccgctctttcttaagcctgaagaacctctggaagtagatgaatgggtacaggttatggagcaaaagttcgggctgatccgatgaaccgaaacacagaaacccctattcgccgcccaacagttgagaggtcctgccagcacttggtgggcaaaattttcagccattcagcctgcaggacatctggtcacgtgggcggagttcaaagaggcatttaggggacattatgttccggaaggggtgctacagatgaaagctggaggagttcatacgtctgaagcaagggggagactccgtaatgcagtatctcaacaagtttaatcacctctcccaatatgatatcgagcaagtggacacaaatttaaaaaagaaaaattgcttcatgagagggttgaatgaccgactccagcgcaagatggccacatgtttggatcttacatatagcagggccgtaagtacaacactgtcagtggaagctaagaattcaggccaaggaaaagtcaagagatatgcgggtgaaggatcatctcatggttctgaaaagcggacaaggttggtaattcgtcccttcaaccaaaatcgttcttctcctcgtccacccacatatccctttaggaaacccgtgttcatccgtcccactcctgcccccgcc

SEQ ID NO: 111527 - DNA, 1053 bp, Zea Mays
tactgggccaacttcaagatttggtggaactcgatttagtgggtatttggctaagacacttgtagcaggattaaacttggattatagaagggtaactttggtacagtcatcttcttcggttgttgtacaaaaatcgaagaaacagcagcccaaagttgttgtgtcagaactgtgttgagaaactgaaactaaattctagaacaggaatggtcacagtgaaatggggtcgaattggatgcgccatatctttgaattcattcggttttgacccaaggaccctatagtaagtttgaagattgttgtttagtgaacaaactttattaatggagattaccctgttcttaacaagaatcaagagaatgggagggtgaaaggtggtcggttcagtaaaacactgaagatcaaaacactgtaaatatctaaagaacgctgataaagatctgaggcactgtagaactggatgtgttcgagtgatctgctgaagggaatcgatcgtggggagataacttcagacgtggcaccatcccacgaacctagccgagagtggccggagatattccaccggcggtcgccatggctcggtcacttccgccgtggtgtcactcatgcctcgcttcccccttactgtgcctcttctttacatggtaaccatgcgtgaacaatgcaatccacggccgtggatcgttagccggaccgccgtgcctataaatagcgccaagaaccacggcgaggcactcacaacttcatcagtgagcacgattgaagccaaaattcgcactgtctcctcctcctttccccaaattaagtgtacacggtgaatcagtagcactttgcgaccgtgtagccccaatctcacctcctaatttcaccagagcccgtcgcggcaccaaatttcccccttctcagacgccggtgagcagaatcctccgcgctccgtggccagtcgctcccaggtctgctcctactcttcctgatcgtgtcttagcacccgtgcatactcgtgatactcatcggctcaaccctttatgcttgaccacactcaatcaaccagaa

SEQ ID NO: 111528 - DNA, 745 bp, Zea Mays
gaatattatcattagcaccatttacttcatttccattggggttcatcatctagtcagagagtaaaagagttagtgagacagactgcataagaggcttgcatgacattaagataaagagcttaacacaacattttgatttccaatataagattggttaaggatgatttctaattccgtctagcttcatcatactagaagagtgtacaagtgttataattcttaacagagatcttttgaaccttatagatttcagagcatgatatccaaataatctttctgatccaagagtatttctttgaacacaatttgagagagacttgagcgggactttagggcaactagagtggagcatcacattgtttgcgtatagcagatgacaccatactttattctctttataaagatgcaaaacacaataggtgcgagagattctccaaatttattcatttatcacttagcacaattacaatttctcaaaggggcgacatcttgacatttttttcttcgtgagacatactccttctttttagctaaaatgatatattaatcttcctcgtcagatgtaccaatcttcagagctagaggtcggtcgtcttcaactactattcttcctccagatggagtttccaaacacatggttctctcagtatgttggattattgccttagttctttgtaaccaattctttccaagaatcacatcctttcccattgtttctatcactataagatcagctggaaaatct

SEQ ID NO: 111529 - DNA, 611 bp, Zea Mays
gaaaaagaaaaggagaaagggtgaatagtgttgggctgattctagcccagtcggcccagacccaaacagaaacgtgcccgcgcgcgcccgcgctggccgttttgcacagaggaccccgggtttttggttaactggaaataagttcttttactattcctaagtgtcgctgacggtttacagaaagccccttcgacttctatttcttcgcacgaccaagtccacgacggcgctccgcacgggaagcttaactccggcgagctagaccggccggaggggaccaagaccggcgctagtcttcggtttaccccaaagtctaccccagagaggcatttcccctcattcaatttcagaattggagctctacaaccctctgcccacagtgacagcggaaaaacttaaaggagtcgagtgttccaagcgattcatggcggtataagccaattaaaggggtcggggagcatcacgggtacctgaggatactcaactgagggatcagaggtcgtgagttggcttgaaatgcactggccgcggtaaggctagttgacggtggcggaaacccggattggggagaaatcaaaattcgagctctcgaaggcatggttgctaacgat

SEQ ID NO: 111530 - DNA, 532 bp, Zea Mays
gaagaagattgcaggttcagagtatctcactgccgatgaccccacgccgcgatcctcgccggcgctatgattcgtgcccagtggtgcgcggataacgacctagggtaaaagatcttggtgctgggatgagctcggacccggtcactggattattcaccgtacccacttgctgtacgactaaccgaggtgtcctcgctagagttcgtcgccttcgtagtcgtgccacgtgcttaggaacgttaccacgtcacaagtgaacggtaagaggaagtctgtccattgctggaagctttgcctcaatgaaagccacgttagcgctcgccggtgattttcccctctctccggctgcccgcgtgtattctccaaattggacgccaccgctattgatctctataaattgagcgctcagtgtgctccattaggttgttacgcgcccaatgcactagctctcgcctctgatcatccactgtagcgtcctaattttgcttttcccccaattccattttccacgtcgccgtgaacttctcaccgt

SEQ ID NO: 111531 - DNA, 344 bp, Zea Mays
atcggcgcagcttctgaagctatggcttcggcaagaacattagtcgtgcttttattagttacttcttttgcatctccaaatgtttcaccagatgctttggcagaagcagaaaccgatgcctttatggattctaaaacaacatctaaaacactagccattcttcttttccttggagtcgctgttatagtacttgatggctttggaagacttgttacagctgctgggctcagcacctatggctgttttgctgccttctctgattccggctctttgaccgggtctgcactagcttcgatctgccctttcaattagcttcggcacatcgaccgtcccaatgggctttg

SEQ ID NO: 111532 - DNA, 595 bp, Zea Mays
gaattactcctctgaagggtgaatcgacaaactcttcttgcttaggcagtggggagagtggttggtggtgttggttcgcatgctatggtggagggggtggcagggctaatctctcctagtgttgaaggcgtcattgctgtgggaaagctagattgtggttttgttggtgctgggggtaatttgggtgttcgttttagcagtggtggtggtatggatgcggttggtacgtatgagcgatggctcattggttgtctgctggagcggctctggccattcggtccttggttgctttagtcttcgggcaatatctagttgggtgctctaagtctttgccattaaagacatagcaaaatcttcttggctactgagggcctcggcctctggtctcgtttccgttgcggccttgttgcggagggtagttttgacatcgggggtggacctctcctggttactgctggtttgcaatgtttgggacttgtagttgaccacgctcttgatgggttgggtcttgctgtggaggcctggtccatgtcatgctggtctctagagtttcttttggcttccgctgtgactcgacttttctatggtggagttc

SEQ ID NO: 111533 - DNA, 757 bp, Zea Mays
gtgcaattggttggaccgatgagcttcaagggcacacaggaatgctagaacaagagcgaggagaacatgatcggacatatggatcactgactgcgacgagctcacacacacggtgttcttgaccgatttgggggaaatcccaaattggtgagctctggtggacgatttgaggcacgagttggtgtattgggtgcgtgactacctagcggagccaatggcacactctatttatagggcccgaggcggtggcccgtgaatttgagatggcgcggtggcgaccggagagggaagaggttactggcgcaaacaattcgtggacattaccgtggcaagatcttgggagaccaatgggctatgtattgtgattaactgcgacatggtgagatggccgacggtgtgtcatgaccgcgaggaacggcggtatgacgacgagggtcatgcggccacgtcgccggtaaccggataagcgacagagcgttcactgtgcttcaagttcatccacggcgagacctttttacccggggattgttatctgcatttaacggagcgtgaatcgcggtgctggcgcgaatccaaacgcaagatcaccggcggcgaggtgctctgcaccagagatatttctggcactgtaccatcagggagccattcagagcatctgacagcacaatttgcagtaccctaatctcagatttttgtgtgagaatgtgttaacctctctgtaacaaaattgtagccctataatccagctacaatctcg

SEQ ID NO: 111534 - DNA, 710 bp, Zea Mays
caggcacacggcttggcttcccaggccaaaccctgcaggtcctgttgcatgaatcaaaggatggctgataccaggcaatgggtcctaacaggtgtgctactaacacttcctagccgaagctatgtgcaggtccaggtcccagtcgaggctacctcctgggggccaggacaccaactctttcttaggtatgctggtatccagcctcgacgcgtcgagcctacatcccagggggccaagtacctagagaggagctagtaaaaccacacacagcaaggacaaatactgcacagataagagctgttttattgatagttcccaaaaatatcttacaaaaacaaaagttattacatccgctttcaagcggagccctagcctcatttctacaggtgtgaactactcgacatcagtagggtcacgctggaagcgcgcggccgccgtctccacagcgtcttatacgacctcccgggcagcgtcttcagtatcgaccaccgatccagcagtcaccgttggaggcgatgtcgaggccattaaagccaaagagatggagccgtagctcagcttgcttcccacctcatggagttggagctataccagttcatggaggcgtaccatgggatgctggtgaagctcacgcgagagatggagccgtagctcagctcgctttccacctccggaaggtcactgcacaacaccctttcgtccgagcgccg

SEQ ID NO: 111535 - DNA, 418 bp, Zea Mays
gcacaaatggtttaagaaccgcatgagaggtaattcaacagtactcgtccatcactttggaaagatggtgcaattatgaagctagcaacaatccttacatcagtctctctctctcttttttttgcctaaatatgcatgcatggctcacacaactattgaggacataatagagatacaagttgactccctagcactagttaattagtagatacactacgtactcatatctgtcaacatggatgtaaataaagctttatgacttggacccataagaaattaggagaactagctacatatacttaggtcattggacatgttatctaatatggatctatatgtaaataaagttcactagtagaaaaaggctcaaagcctgcggtgcggtatatttttataggcagattcggttatcaatcgc

SEQ ID NO: 111536 - DNA, 653 bp, Zea Mays
ggtggttcactccttggcttcagcctcggtagtcctccgggtcttctggtgtggtcatctatgtgtctcatgtgcgtgttagttgcatacttctgcctcttttatcttttggctgacctcccctttttataggccaaggtgggggttagctaccggtagcttctcaaggaaggagctacggtgccatggtaaacggggtgttctgccctagttaagtcgtgcttgtccacatgtgcctcggtcgtctgggcttccctggtcgcgctctttatggctgggggcatgggagacaaagagctccagtatcatcattactgtctttgtgccacgccgaccactgggtctcgacgtggctcagcgtgttgcgcaccctgtagatggtaagtgcacttagacctagggttgataggtcatgagtgggccgcaggcctagggctcataggtcattagtggaaggaggaccgactctcacattgcggcttggttctaggcgtagttagtgcagtctgtcacttatggtaggtcagtcctgggtcaagcgtgaaatacacttgagcggcttcctctcaattcgcctaacccccttctagcctgccttgcccgaccctagatttaatgcctcggtactatccaggggtgggtcctttcaggga

SEQ ID NO: 111537 - DNA, 820 bp, Zea Mays
accaaacaatagaattaactacgtaataatattctacgttgcgtaacgagatcgtgggttcaataatcactgaaatctaagttagagttgaagagagatgattttcagaagatctatgcaattatccagttagatctaggtctttatgctggttttatgaatcatgtgataaagatatttaaaggaataactttaatctatatcacaccagggtagaaataatattttagttaaattatgatcagaggtagactaacttcacatagaatgattaatccactaacataggctaaataaataacctaataaaattgtatgtggaatgataaccataattcttttaatgtgtaaacaattttattacgaagttaacgcaatttaaacggggtaaaactgagttaagatgcaaaagttatgtgttacataagttttatggcatttttaatatttgttctgcacttaacatagattccagggctataatgtaaattccagggatcttgatgtaattactttgcccatccacgcacgccgagttattttcctttaaggacaggggcccccttgcaaaaccgatcttggattcctacacaaggacacgtggcgtcctgcgactggctgagatcgtgccacaccccggtgcacatggtgaggcgcacgggatccgatccgcacaggatccccaccaccacacacacgtgcagacaaaagagatcatcccagaccaccggatcgacgatcaacggcccggattcaaagtgccgaagggttatttgctcttctaatcttgattgtcgcttgctaatccaacggcccgagg

SEQ ID NO: 111538 - DNA, 561 bp, Zea Mays
gccgggaggaaatcagtaccaacgtcagaacaaccaggcagctcgttttcctgccccagcaaccaaccagaatggccaagcagccctagcacaaataggaggtcgtgcatgcttctactgtggagaacaaaatcactgggcgaagaactgtcccaagaaagcagctcagcagccgccagcagtcaatgccccagcaagacaaggagcaccacagcaagcaccaggagtccgtggttaggcctacaatcgtggaaaggtgaaccacctagaggccgaagcaatccaagatgctcaggacgtggcattaggtatgtttctagtcgaatcctacccagcaaaagtactatttgatactggtgccacacattcttttgtttctacatattgggtagaatcacataacattcccatagaaccaatgatcccacctttaagagttaattcagttgggggaaaagttcagtccgataggatttgttcgaatctaaggattgaaataagggggatagacttccccgctagcctagtattcatgggaactcaagggttagatgtcatcct

SEQ ID NO: 111539 - DNA, 421 bp, Zea Mays
gagaacgacaacggtggagtgagtgtggggcacgagctgggaaatggcggagtcacttctgggtgtgcgttcactctgcgaccgaacgtagctccggtggcctcaccgcgagcaggcgatgctccagggactaaacgtaactccgacgaccaaacaccatgaacttccaacactttgttgatgtcgcaacaaggacagttcgccatcggaactagctccatcgatgttgcccaccatagtttaggtgtgctccacatgctagatgaaatgctcataggactactgttgtatacactaggcgctccaattgttgtctctgctccatcaaaatattgtgctgatgtttacaaccgacttttgtaggtgttgtttctgatggagtggcatagtttgggaaaggaaccggatgtggaaagcatgc

SEQ ID NO: 111540 - DNA, 498 bp, Zea Mays
aaaatacgcaacaaacggctagaagatgtgtgaagacaccaacatggcaagcaatctatttatataggccggaagcaaccgctcatctcctaccacggtcaccaaacagtcgcaagtattcaataagcaattcaaatcgtctggaagcaagtcaggcagcagacgccgtttcgcgtaacacgacaccatttggactgaggtcaactgtttggactatatgattacaccccgcagtcacatcaagttactactcaaggacagtttgctaaatgctcggcgtaccaagccgtccttcggttacacccattggggagggggcgtccaagaattttcaatagattttcccaagcagtcacatccatacagtatacgcaatgaatgtatcaagacagaagaaagatatcgatggagatcagaggaaagccaaatatagctactcaagtacaagtctaatcaacagaagcattgaagcacaatgcgaaatgaagaccagccaag

SEQ ID NO: 111541 - DNA, 405 bp, Zea Mays
gatgtcgtgagtaaacgattcctccaattcaacagaagtttggtttggtttaccaaataggcctttatagtagctagtaatgtgttttttaagttcctcctcgtccactatacttgacccgttatcatcttctaggctatagattctctgtttacggtgtttaccattatccactaactggaaatatttcgtattatcgtcaccttccagcagatgtttgactttggctctttggaagagtcgaatttcctcctctcttagaattccagccaaccgttcattaataaatgccttcatagctagttcattaggcgagagacgagtaacctccgtctttttatctaggtcatcgattaatttagtaagttggactttttctttcttcattgttccagccgtattttt

SEQ ID NO: 111542 - DNA, 772 bp, Zea Mays
gggtgattggatggaagaaaccgtcgatgacaatcaaagaatgagacctttttaccatgctccaatcgatatgcttatgtgtcccccatgcatatgggacaacacagtcgaccgtggatacaccagctagaccaaataccatatgcagacaaatcatgaattgaccacaaatatacagcacgtaaggtaaattcacgttttagatgaccatcataagcctttacccctacccatagctctttgaactcttcaatcaatggttgcatgaatacattgatcttctttccaggatgtttaggccctggaataataagggcaagaaatatgaacccttctttcatgcatttgttgggaggggggttgtagggcatgatgaaaaccggccaacaagagtatgaagtcgaactgttgtcgtaaggagtgaaaccatcagtggacaagcctagacgaacactcctagcgtctcttgcaaattctgggtcaaaatgatctagagccttccaagcatcgccatctgatggatgcatcataatgtctggatcttggctctcacggtctccttccttatgccacaacattagtttcgcagtttctggggttaaaaacagacgtttaagccttgggatgatgggcatatatcgaagctgtttaactgccacttttgtagcaaaagtagctccatcctcttttagtaccttcgcatatcttgatttaccgcatatctgacaatgggtggctgcttcatattccttccagaacaacatgcaattat

SEQ ID NO: 111543 - DNA, 384 bp, Zea Mays
gatttccagaagcagccgcttggggacaagcggcgattcaaggggaggacaatatcaggacctcaaccatgaagatgcaagacaaggacagtgaggggctgagtcaagaagaagacgtcgttcagaggctgggccagcgtgatagaaggccgaatcagcgtgtgtctggagctgaatgggtccagtaaggaatagccgtgggctgtggccatgggccgtgtaatggaaatataaatactagagtcattgatagagaaggggagaagaatttaccagactcattattccccatttcatgttcctctgttcttcttttccgctgccttcttcccatgtccgacggaagtcaccggacgcccagttcactgacacctgggttcccag

SEQ ID NO: 111544 - DNA, 617 bp, Zea Mays
aacaacactcagtacctatataaaaatgaacagaatgtaacaaatatgcaattgaaaaaattggaaggcattatcggatactacatataatgaggtgattcaattaatttcgaatcaattgaagggatgtagaaggggcggggcgaacctgatggacattagcgactgaactatgtaaaagaatggggggaacttgaaagaatgagaggggaaacgaaccagggaaggagaacgacggcggtgaatcgatgaaccgcggagattacggcggtggaagaggtgggggcggtcgtcgatggcgatcgcaggagcgaatgacggcgacggggaggaactgattattttagggtttgggtggacccgagctgaattaattgaaaggggtctgttgtgtgtgattcgttgaccatattagctcggtcggcccgcgggggagcggcgagggactgtgggtccactagtcagcgcacagtcagtgtgaaggtttgtttactgcgtgatcataatacgcataaatagctgtgcaaagtatcgtaaacagtttacaaaaaataattaatcaagaccaacgccaaagtacgtaatataataaatcctaaatgatatgtagttgttaa

SEQ ID NO: 111545 - DNA, 334 bp, Zea Mays
agagatgttgctacgtatgttgcactttgtgacgtatgtcaacgagttaaagccgaacatcgaagaccagcaggattgttacaacctctcaaagtaccggaatggaaatgagaagaaatcagcatggatttcataattggattaccccatactcgtgatggctatgattccatatgggttatagtggacatgttgactaaagtggcacactttatacccgtaaagacaacgtacttgggagcccagttagcagagttatacatgtcaaggattgtttgtccgcatggagtaccgaagaagatcgtatcagatcgaggaacctgttggaacttgc

SEQ ID NO: 111546 - DNA, 674 bp, Zea Mays
ggtcttttggattgctgagtcaataatctttattggcttttcccggtactggagatctttttgaatctgaattgtctctgcctcgatgtggttctctggtacttgcaggcacttacggagctgggacacatgaaacacattgtgaatatctgacatggattctggtaattcaaggcggtatgttgtgggtcccactctgccaatgacggaataggggccgacgaaacgcggtgctagctttcctttcatttggaaccttttgatcccacacatcggggagaccttgaggtatacaaagtctccttcctcaaatctgagttctctccgtctgttgtctgcataacttttctgtcgactctgagcctcaagtaatctcttgcggatcagggcaactttctcttcggcctctttaacaaaggcaggtccttccagtgtcctttcccctacattggaccacattaggggggtctggcactttcgtccatacaatgcttcgaacggtgacatcttgatactggcctgagggctgttgttatatgagaattcggcatacggcaaactggactcccagtttctgtcgaacgtcaacacacaggctcttaataaatcttcgaggaccttgttgaccctttccatttgaccatatgactaaaggtgataggcgatgctgaaat

SEQ ID NO: 111547 - DNA, 311 bp, Zea Mays
tgccattgatcctcgatccagtggccagtttgacatacctgttcacgtggcattcgagatctaatctgatcccttgatttcagatcgagtggtactggtcggcggataccccttcgaccgggacattttgcgtgagaaaccctaaccgaaatgaacccacagtccaaatcctttataaagtaattacgctgaggcccaaaaacatatagaactccccctgaactttctgtaattcgtgcgcgcagtacagagaactgagaaaatcagagaattaatttagaaattgattttcttgtgttaaaataattcca

SEQ ID NO: 111548 - DNA, 490 bp, Zea Mays
gccagagagggcatggaccgatgatgcccctccaaactcagtgctgaagatggacacgcctcgtcacagcgagacagtgtgttcgctactgtattgaggcggcctgggcaatactccatgttgtagtcgaagccggacagcttgctgagtcactaatgttgtggcacggtggacaagcattgatctagtagtaatttgagattgtagtggtctgtgcgtacctaaaaataccatccccaaatatatggtccctagggtcgtactacttgaaccaacctgatcaactcgcgctcatacgcgacgagtttcatgtggcgtggtgcaaagggtcggctgaagaaggcgagaggccctgtgccctagtgaagtacgacgctgaaccccacacccgacacatcacagtcgactgtgaagcatttgtcgaaatccggtattttgagcataggtctggaggtgagggaattcttgagtgcttggactgtcgtcattg

SEQ ID NO: 111549 - DNA, 892 bp, Zea Mays
gcatattataattcatgccatttgccagatatattacatagtggaactgtgtttattcaacacatatgtgggatgggtctctcactagaccacttgaaccatcgcattcaccacacattatttcaatagtgcccataaatgtccgaacttcaagctcgcgacttttattttgcgattcttggttcaacctcgattgcttttatcaatgacccgataagatagcttaaagcactcatgcctaggactttgttttggatccttttgcaatctagagaggcaagataggtgtcgacatatttgtctcccatatttaataatgatctccatcatttcccaaaacgaaagattcattgttctgtattcccagcacaatgatattgcgcgcattgctaggaacttcatcatcaagatgaacctcttcgtgaggcaaatcaccagcagggcgagttcatcgaaggagagttatttacagaccacgtgaatatgcaattagaacatatgctctgactaagaccaacggatcatattcgcaggcgtccccgagaatagatcaaatgccaataagtcaaatgtggaatattatattaatcccgggtatatccacatctacatcaggtagaagcattcagaccaatatggttactcctcgacgatttctggcaaactccatatacacaggagtacacaccgaacgacaagttcagtttggcttttgtgcgtttaatagaatattaaggcattacattatatgggcattcctccctctaatgccgagatgttctaaaagcatacagataaaatccccaaccacaatcattcagatgtgggcaatgtatgctattgtggtgatttatttgggaaatcttacgcacattacagatagaggttttat

SEQ ID NO: 111550 - DNA, 664 bp, Zea Mays
atttatggaaattcagcgcttcaggtgattatacatctagttctgcttataatgctctcttccttggttcagttcagttcgaaccagcagagcgggtgtggaaatcttgggctcctgggaagtgcaagttctttatatggcttgtggaacataataggtgctggactgctgacaggctcagaaaaagagggctagaccgaccagagcagtgccccttgtgtgaccaagaggctgaaaccataaatcatttgctggtcaagtgtgtttttgctaagcagttctggtttgatttccttaattcagtggggctgcgggatctgtatccagctcatgaggaatcctttgagtcgtggtggaaatctagcagctcccgggcatcggatcttgtgagaaaaggtttcaattctgtagtgatcctaggtgcttggaccatttggaagtataggaataggtgtgtttttgatggttgtaatcccagcttggtcacggcccttaggatggctagggaagaggcggtgctctggtccatgactggtgccaaggccttgcccttcctccaagtcgatgagttgctggcttaaaacagcggtgtgggtcgtgtttcctccatgttttagtcggtgatccgtagttagtctctagtggtgtgtgtgctgtattgggg

SEQ ID NO: 111551 - DNA, 723 bp, Zea Mays
gtatttttctatcacatagagaaaagacaatgcagtctagatatgctgcttgtaattatcttttctaaagcttgtctaagttaaacgctatatatatctactagtctctttgttatcttcaaacaaacatcatcgtttgatactattacgacaataaatgatctccaatcctttatattggaggaataataatatgtaacattggttgggtgtagagattacattatatacgtctctaaccctaataggctacatgtgctaggctaggtccatgacacacaaccatgaagaggacccagatccttcatcacgaactttggttgaagtgtgtgtgtttgtgcatatataaaatcttaggcaccataataacatgacgtatacataatggttctcttcaacttgcatctacattattgacataacataggtatcgtctagctacttggtgaataaaacttcagagaatcatattttgttgttttcatatggtaaattcatatgttctttctcttcaacttgcatctacattattggcataacataggtatcgtctagctacttggtgactaaaacttcagaaagtcatatttcgttattttcatatggtaaaatcatatgttctatcattacttgtcaggccaagttactgccataaccaaagctataaaggtttctaattcttgtattgaggtctaaaagtcagatctccaccatatatatttt

SEQ ID NO: 111552 - DNA, 642 bp, Zea Mays
attttctcggggtttggactgcgcacacaaaatccagaaagtacaggggcgaccttgcaaaattcccgagacacagccaacagtgcacgggacggcaggttctattttgtaataacctagggtctcttacgcaattttacagggccgaaggggtatggttctttctgagccgctggatttcaatccgatggtacatattagattaggcgcttaatgaaccggtacgcgcctgatttaatctctaccgctcgttttcaatccaaaggcccgagttctattactatgtgatctaatctccaccgcatagactctatccaacggttaaaatgcatcccgccaaggatctaatcacagccctccatggagatctaacggtccagtgatcgtcatctacattgccatcacccgaccgaatgccccgccgcggcgttcaccagacacggcaaggccattaccggcagcacccaaagctcaagtcccaccggtaaacttcactccgacaaccgcgaaacgaagagtagtggattgcgagactggtacaggagttctcaccacggttggtagcgcggacagccctggccacgggaacctacggtcagcggccggacgattcccgacggtgtgaaattaccgcaactccga

SEQ ID NO: 111553 - DNA, 516 bp, Zea Mays
gcacatacaagggtggtgagccccgacatgtgggcccaggggcaaaatggagggaatacactatcgtcagccacaccagggtgatctccgagcgccataatatctgtagtgcatacagtattgatatcccacgctgcttcctcggtaacgagcgagtcatgatgagtgtagcgcatgcggtagcatgggcgtactgcctgccaacggaatggacaggcacgccgcctgcaagatggcctggtcgccgcccgtcagcggagtggacagggcacattaaatgctgaggcggcacatcgcctgccagtggaatggacaggcggctcgccttatccgcaataaatgcagaggccgcgcgacccagaggccttacgccaggcttcgcccgctggcttacatcacgggcagtaggccacgcggcagcatcgggtctccgcctgagcggggagcagaggcgtatgtggtatggtccggacatgtgtcagctccggacctccacctggccttgattaaggcttg

SEQ ID NO: 111554 - DNA, 292 bp, Zea Mays
taacaagtcggctaactagaggaacgacatagcccgctatataacatacacatcggcttgcctattattatcgccatctgatacacaacatacactacaacgtttttataaacatacatgttcgcacgtatattcgcacatcgaccaaatcatacgaatcgtaaaccactaatctccaactcaaaaccatcatgcgcttacctcccaaatcatgaacacatacatgtttatcatatgaacagagcctttcaataattattccaaaacaactgactccattacacaacttgta

SEQ ID NO: 111555 - DNA, 902 bp, Zea Mays
aattaatggagtcatcatgcattgcacatatacaaaataattttatagcatgctgaatttctaggacttcataacttgcacggacagtatatcaaatatgcacaaattctgacattatcttactgaacttacatggctttggagaatgtggtgtgtcctgctcatgatcaccaattgtcctcatgggtatccggtgagttgctcccaccaaacttggatgaactgtgttgctgtcatcaaggaatcatggcgccggtaacgcagccagtggagttacagcatgacgaccatcagacccacaaggtaacgtcgtcgctgtagcctctccacactgcaccgatccactagtcgtcgccatcgtgtataccctacctctcctaggtcatcaaacaaagcggcgacggtgcgtagcccagtttttttggagttatcctactatattcgccaaaaccgtccttgtcgatattcatggcatgttccaaatatcccgcacgattcgcatgttgcgagatttccgtgagtcgacacggttacgattacctgccaattgtgttacaacaccataaacacggctcaaccccacgcgcgaccccaccacgatcccagtgaacaagcatggcacccccactacccgacctcaccacacacgacgtgtcagatggatatgcagctgttatcgacaaaaaatacaagcataaacgccgaaccacaccccgaccgcgtcccgaccacaccactatgccaatttacgcagctgttgccgtcaaaatacgcatgcataaacgcgtgaccccaccatgatcccggtgcactcgcgcggcacccccactatgcccatttacgcagccgtttccgtcaaaatccatatgcataaatgcggaaaaaccccacgcgcgaccccg

SEQ ID NO: 111556 - DNA, 602 bp, Zea Mays
atcgcctaaggccttgccacggtaacatccacgatcaccgcgctagtgactcagtccttctctccggccaccgcacgtcttctcaaaattagccaccaccgccgatggcacatataaattgtcgccccagtgagctccactaagtaatcacacacccaacgcacctacccgtgcctcagattgtccaccagagcgctccaattttgaagttcccccaaatcagttagaactccgccgtgagtgagctcgtcgtggccagctctctgtaggtctgttcacgccttccttgctcttgtttcaatacccctgtatgctatagatgctcattggcccagccagttgaactagacctgggtagatcaccgggaacacctcggattatcctcggtatgtgccatcaacgtggacagagagttctcgaactggaattgtgcaattagttgagggattcttgtcgccgggattagaattaggggtcaagcaaataagaagcctagctgttgcgttttccggtcagggtaagctcgccggagccactgctccgtcgtccaaggtcagggacctcaacttgcgaaggaatagaaatcgaggggcctcggcgc

SEQ ID NO: 111557 - DNA, 1130 bp, Zea Mays
ggtttccctctctcctcgttcccttccttcgaaagtatctgccctttggaagggtcaccccgtcccttggacttcgggtcctggttccgctcatcctactggtctctgacgggtgggactccaccttcttttgcctccttcggtgaattcgccaaagcggtttcattattaaaaaaacccaaacaggcgccagagacgtccttggagctcgcgttgggtgtcacttcaacaaaaccccaacctgcttctccaccctttgctctccggcgatcgtctgggaatctgtcaatggcgtaccggcgtgtggacccggggccgttcctccctccaggattcagcgccgcggtggtccaacatcgtgggattatggtcaggtcagtttcgcagcgtttgccgccatttcatgaggactgggcgattataaatatccatcctttaccggagcacgaggtcttgttccctgcggttagggatgtggtcagggaatatcttgtgaagcatcagagggttggtgtccgtgccattcagcgctcacatttgggacaagtgttggtgcaattccgtagtgtgctggagcgggataacttggttcttcttggtccccagcagtatttggacgctacattcaccgcggtccgtcacaatgatgcctggaaccaccgtgcccttctcttcaaccatgaatgttggcttatgcttctgggctttcccttggattatcgttcctcggagtatctacaggccgccattggggcatttgggaggctgattctgtgggaggaggaccgaagcaatatctctagaaccctgctccgtgttcgggtcacttcgcttgaggaggttcctcaatttattgttttttcgaaggctgagggttttgctggggattcctggacggttcaatgcgaaattattcagcagcttatgcttggcggtcaggctcaggatgaggaccccatccctccgccacctgaggatggacatcagctccccctggccttcttcgggctaggccaacctttgcccccggccgggctcgaccttaactttcctccggagcctgagggtggagcgttgtcggctcagcaggacgacttggggcagggagagtgggatcagtggattgtgaa

SEQ ID NO: 111558 - DNA, 421 bp, Zea Mays
acgagcttttaggctggtgattacacgtggagtggcaatagcagtacaattgaacatatagaaatgtatggtggattactgaattgcgtggacttggaaacggtctcgaaccaagctgcttgtatatgcgtggagaggaactcgcgaggctgttcggtggagctttaccaagctaacggggatcagtgcaccgactcccgttaccatgtgtacgtgtgtttgcgtgctgctacgacgactactttcacgcacgatcacgcagaaaacgcgatgctaccactccatatgactctaagatgtttttgacatgattgttcggctgcttgccaataaagagtcacgtgggccgaaaggagaaatcataaataatagaaagcattatatggacatgcgtttctgggtaagtttgtttccaatcatt

SEQ ID NO: 111559 - DNA, 459 bp, Zea Mays
tttggttccagaataatttcctccccagcaaaccggacaagcttgctttcagcctccccgaaataaccaagtttcctcatcataaccatgtcatccttcgttatagtagacttcccaaactcaatgtgactaggctttgttgggttcaggatgttgtcatcttcttcactttcgcctccagctacaatctgttcagcttcggtattggaggcaccttcggcagcaacttcttttgatacaacaagacccgattgcctcatcacttctgatattggtgccgtttcggccacttcagcctcgtgcccctcacgagacactctagcagtggatcatactttggccatttctgtgtttacgcttttttaagacaaagctgatctcaattgacgaagcgtttgctcgaaaaagcaatacagaaagctttggctatggttaaaatttttaacagcacaacagtgc

SEQ ID NO: 111560 - DNA, 280 bp, Zea Mays
caagagtgtagatcatctaatcatattagataagcaatagataccacaacacacaaggcaaagggtactgtttcacattaagagcctaaaactgtttaaatcttgtagtctcctgcctacctgcccaccatgcactagtgtaatagaacaagagtgtacaagttgactcgctttcataatcactcactccactcacaagttcgagctatttggttatttcaggtaccaatgggtggtacccaaattacctgaaataagttcaggttttacaagtggatac

SEQ ID NO: 111561 - DNA, 367 bp, Zea Mays
gaaggatcgatgtcgcatggtcttatcgtgatagcgcctcagagtttgttggtaccgtgctgattgaattaccgtgttcagccgttcttcttcgagtacatcaacatcctccagcctagtagcctcggcttctgctatgttttcaaagatcaaccttggcgcgccaaacttgagatcagcgggtactactgcctctgaatcgtagaccatgaagaaaggagtatttccatgcagagcttgactaggttgagttcttaggctccaaacgacgtagggcaactcccttatccattttcatgcgaacttttcatttttatcgaagacttttttcctgagggccgccaatatcatcccgttagctctttca

SEQ ID NO: 111562 - DNA, 378 bp, Zea Mays
atctgctctggccttcgtctgatagtgcagtttgtgcaccgggtggaaagcttcggcattagcgtccataccctggcttcggagagcccatataaaaacactgagcctaacaatagcattgggtgtcaattgatgaaggtatatctcaaagttctttaaaacttcccctatcatgtcatttaaggggaactgaagtcctgtctgaagaagctcttgaaaacgacaacttcgtcctcttttggttccggaataatttcctccctagcaaactggacaagctttctctcagcctccccgaaacagccaagtttcctcatcataaccatgtcatcctctgttacagtagatttcccaaactcaatgtggctaagctttgtt

SEQ ID NO: 111563 - DNA, 425 bp, Zea Mays
cccttggaggtgaccaactcaagtacgcgcttcagctcctgtttccagcatccaacaatgtcgtggagtacgaggacatagttcacgggctaagcatcgccatttcactaggcatcaaaaggttaatggtatacgacaactcactggtagtcatcagccaggcaaacaaggactgggactgctcaaccgactcaatgaacagatactgcactgtggtgcggaagctagaagacaaatttgagggtttagaatttcaccacgtggaaagggatcacaatgcagcagcagatgcattgtcaaaagtattgtccagtcgggcctaggtcccacctgggatttttgtccaagaggtacaacaaccgagcgtcaccacagagtaggctcaagagtgcaacgctttagaccaagcagaagcagatcccaat

SEQ ID NO: 111564 - DNA, 317 bp, Zea Mays
ggttagctacatacccatcagggaacatcaacatcttgatccactgaagtacttccttcctctgggccctgcttaggacgaaatcggcattaggccttctccacgtattttcgccacttggcggcttcatctctaggtttggtctatcacataacactgccagatccactcttgcctttacgttatcctttgacttatcaggaatgtccataattgttgcccacagtgcctcatcaacattcttttcattgtgcatcacgtcaatgttgtgtggaaggagcaggtcatcataataggggagccgagttaagccagac

SEQ ID NO: 111565 - DNA, 784 bp, Zea Mays
tttctggatctccacatcctcgccaaactcttgtcccatcgtgatgcccatcggctcggtacaggtagagtcagacgattccctggccagcaagctaagcatgacgtccatctcagcatcatcagtgctagctggcatctcaaaatgagtttgcctctcagcctcaggaagactctgaagtggggcaatcgaggcttcaatatcctcgggggagggtcgcactctatggcccgggctaccatcacgagcaggagggttggagacaaattcatagaatagcatatttggaggaaggttccacgtagagtaagctaagggagcaccagcattcgagaccctgcccctcggaatcatatcgaatcggctcagcaagtcctcattgggaatctgtctgtttgtgacccgggtggaatcattgatgccgatatacaaataagcgggataaattatgtccttcaagggttgaatgttcttgaagacaaagtcagcgaccacggcctcagtagtcagacccctatccttcaacaagcagattttagcaagtagcactttggcctcggttatcactgaaaaagtgggagactctaccaaggtgggcgtacgaacgtctggttgcctccctggccgagggggagggatttgccgtgattctccacgatgaaccactcaagacgccatcccttaatgttgtccttgagggggatatcaagatattccaccttcctcccccagcgaagctctaaacttgcaccgccgacaagctgatgctgccctccagccatac

SEQ ID NO: 111566 - DNA, 519 bp, Zea Mays
cgaggatcgtgcatgtggagacagacttgttgaacgacatatgcaatatccggacgggtggaagtgaggtactgtaatgctcctgcaagactgcgaaattccgtggatctgagacaggatcaccatcagctgagagtttggggttgatatcaacaggggttgtacagggtttgcagtcactcataccagcttgctcaagtatcccaatcatatactggcgctgagagagcgatgccagaagtagaatgttgaacatgcatacctaggaaatgatgaagaggaccaagatctttcagtgaaaactcttgttggagagcagtaatagtgcgtcgtagaagaggcatggacgaggtagttatcacaatgtcatccacgtaaagaagaaagtaaatcatatctgcacccttgtgatggacaaacaatgaagtgtcagacttggcctcaacaaatccaagttgaatcaggtgggaagcgaatctgctgtaccaggcacgaggggcctatttgagcccataaagt

SEQ ID NO: 111567 - DNA, 732 bp, Zea Mays
cggaagatcagggaagtacatacctgaaaattggaaagaaacaaaggaaatcccaaggccggaggtatcagcgcagtcccagaaggaagaacgttaacagaaacaacataatggataggaccaggagccaaaggagcagggtaatccaagatgagtgcaacactcattgggatgtcaactccaaaagcatccattgggtcttcagtgccatggccactgacttctaaggtggccaagctagccagactagcaagaaggtcagaacttgccaccgcagcgtcattatattggggcattggtgaccccacgtgaacatccatgaaagcagcagagagggagaccgcaacattctcgaagggatgaaacaacaccgggggctagaaaaccctagagggctagggtaccctcaggggctagggtacccttgagggttggagagttgcggcaatccggcagagtcatcctacccagtcagcaggctagtagagggcacgtcatccgggcactctacacggatgtcaacgaccctgatcataggaagttcgagtaaaagatcctcgggtatagcttcttccagtgcgctttcaatagaagacatgctcaagccctggattgtcactagccctaagggtgcaaggctcagaatatcgccactagctttgttgtgccattccccacgaaccagagagaccacatcttcatcatcatcttccaccaccacatatctacccg

SEQ ID NO: 111568 - DNA, 422 bp, Zea Mays
tcatttagcaagctaagaatcaaatcccaagcatgagtacaagcatcatccttcgacaccataaagaacacccaagaatagcgagaaaagtcgtcgacaaccacaagcacataccacttcccctcaaaagaacaaacccaaggtaggccattagtgtccatatgaagaaactcatcgggctgcaaggtcatcaccttggtgactgaggaatgggaagtaacaaccattttccatcatgacaagggtgatagacaagacatttcttaaatttcaattgggcaatcctttgataaggtcaagtgagctcaagtgacacaaaaggtcgaagctcaaatgacctagcctcctatgccacttccaaatcaaagacaaagatcctgcaaaaggacaccgagaggggtcaggcgaatgagaaaaatcag

SEQ ID NO: 111569 - DNA, 504 bp, Zea Mays
aaagatcttcatcttatgctttataaatcagcattctgtcatcacctcatgttccagcgaattcaaataatattgtctgcccactccttattaggtctgcaatttatttgattggtgacagattggacgtttggtagatggctcttggctggtcttcactccgctctgcgcttcaatgcctctgctgactagacttgcagttcagtagctatatttggatttcctttgatctctatcgatctcttccttctgtctcagtacattcattgcgtatactgtatggatatgacttcttcagaaaatccaatgaaaattcctggccgtccccctccaatgggtgtgaccaaggggcatcttggtatgcagagcgtttagcacactgtcctagagtagtaacttggtgtgactgtggggtgtaatcataccgcccgagcagttgaccttggtccaaatggtgtcatgttacgcgaagcggcgtctgttgcctgactcattttccggtgg

SEQ ID NO: 111570 - DNA, 302 bp, Zea Mays
agaagtcttaataccaaggattgccctcaatactacagatgtgaagtggcccttcacacttcagcgacgccaatttccagtacgtctgtgttatgcaatgacgataaataaaagtcaggggcaaacgctttcaagagttggcctttacctcaagagacctgtctttacacatggctagctttatgtggttgtctcccgttcaacgtctagaaatggacttataatcctgattgaaaatgaagatgccacattcagctcacagactcgaaatgttgtttacaaggaagtccttgctgccgcta

SEQ ID NO: 111571 - DNA, 503 bp, Zea Mays
tccaattcttcgattggcgctccgggggtaggagattaatattcttcagcagcaccctctttttccaacattaatggtgcttcgacagcccccgaaggtcttgttttggtaccttcttcagcagcctccgaagatcttgcttcggtaggggctggtggtccagcttcagtagtggtttgtgccatggtagcttcgctagatttccttagggcttcaccctctgcagcgggtgctgagacaggagtcgacgcctttacaggttctataacagtgtccaatacgctggccatccttctcctcttcggagttactatagcaatctttggtaccttcgttagttctgtctcctgcaatggactcaaagctttcagtttctccactgctatcttcgaatttggctcttcggccgattctatcttagcctcggcaggagtggggcgatggggctcagatgcgcaagaagacccctcattcagcttcggcactacgaccgtttcaatgtg

SEQ ID NO: 111572 - DNA, 1328 bp, Zea Mays
agcctccggagatgtgaaagtgtagaagcataggtcaggcgattgagcacctttgtaagaaagataatggaacatagatcagcaaaaaaaatcattgaatgaagtcggatgtagtgccctaaagatgaggataaaaccaaaaaaaaataggcacctgagaaacccctgctctggttccagcttggttagcctgtccccagtttccagtagcaagggagtacttcaaaccactggtaatagtttttgcttttatagcaaattgcaaattaacttcctttccattatctacacactaggatcaaggaaaaggaagagttaataaccacaaggatcgaatgggtggggaaaatagaaaatttcacagtttagacagcagaaaaccttttgcacataagatctcacgtcccttgttaacttcctgaaaagctatagttgcagaagaagaaaaatcaggcaattaatccagtaaaaaaagggttgacaacatttaatattcttgtatatttaggcaaaccattctaaacagccctccaagcagtggaccagcaagatctagtcgtttgtttccataatgatctcggtcatcctcagctcttcgactaagagcgcacatcagtaggcggtgaataatatacctgcaaaataaagggtagatcaaccttgctactttcaacagaactttaatttttgcagatgccagctacaagtccacaaggcttgacaaggagaacatacccaaaatagtatgccttcttagtttcacagaattccccaacaccaacatgaggcaacatttccttctgaagtatttcctttgcgtatctgaaatacagaaagatgtaagcatgagtggaacaactcaaacctaaatacctaatatgtaatatcaactatttgcttgacatacttaattctcttttctcgagtgacaccaactgttgcgccacgctttccaatgtagtccagagcaacctatgagcagtcaaactagagcttttaaaagaagaaacataagccagagcacatctcaaaatgtgccacaagtaacaactgaatagaacagcatgctcaaagcaagcaatggttgaaataaaaaacaagttccaccaaacaagcaggtgaacaagtacctgttgattttgaatgacaaaagcttcctccagggatggacgtagcaattccatcatttgtgtatcagaaaagtcataacatatatgctccagtatatccttgtcggcaacaaatcctaatgctcgaaatacaataataatgggaatgtccgctcgaatataaggcagagtagcacggatatattgaccagatgatcc

SEQ ID NO: 111573 - DNA, 332 bp, Zea Mays
agcatgtcggacttgcacgaggttttatacaggttcatgccgctagaatgtgtaacaccctacttcctgttgaggatgtgtactggtatttctctggagtatgaggattacaaatgagctgtgatggtgctcaggtgttgttgatggtggtcggtgtgtgatgggatgagatgagatgattttgtagggtcccccttggccttatatacacgaccagagagttatcctttacaagttgtgatcattatctattctacctatctccttctttatcgtggcctatactcctgcttatctagagttcaatcatctcctcagccaagttagcgtcg

SEQ ID NO: 111574 - DNA, 299 bp, Zea Mays
caaggattgccacaaatacccccaacaaagtcaagtaattcagttgccctagtgcatcctaatggttgtatcaagtgtggagaggttgtgtattatgccaatgcctgtcccaagagaaattttcagacatcgcaggccaacaacaatcagcggtcatctcagagcacacctgcacccaactcttagggcaagagtcagcagagctagaacaagggcagaataaatcatgtgactatagaatcagtctcggagggcgcaaacatggtgcttggtatgtttcttatctactccatatctgc

SEQ ID NO: 111575 - DNA, 427 bp, Zea Mays
gcagggctggcaagcgggaattgttgtcctcgccggttggggcgagtgtaggtgagggggagttgcgaagtctttttgagggtgaggagcttaggataatgctatttaactatagggagatgggaatcatttcgaaggttgaaccaatgtaaggtgtgatgcccttgctgtacatatgtaactatagtttgtatgatgaggctgtgcgccttcgcgcatccggctatgtccataggggcgttgtgcacttggtctagcacgtttattatgtcggtccggctgtgcctgtagtcggtttttgcgcggacaattttttggtgtagacttttgcacggatagtcttttgaggaagacttcggttttgcgcatttgttgtgctagtccggctgcacccttaggcgacttttgcgcggatagtcttttgagg

SEQ ID NO: 111576 - DNA, 599 bp, Zea Mays
gtttttacaatacatggttcttgtttatgcttagccacaaaatagacatgttaagtttttttatgattagggttgccagcacccctttgcaaaattgttaatgcatttttatgcaatgcacagttaatgattcaaacctatcaattccctatccttttcgtttgacatagtacaactatgaagtttagtcttagctattactttttatgcacattgtattacactttaaaaggcatgtatttatgctcgcttatacgagcacactagttaaaatcactgatgtataggtgacactcaaatttcaaactttttattagtagggcttagtgttttatggtctcatggatattatatatgcagttgttacaaaacatttagaaaatatgaagttccatcctagttatacttttctacataattttttacacaacaaaatggcatttagttattctcactagtacacagttacatgatacacgtatttgttttttatagttttttgttctatattcatggttcaatcgaatcttttattgttttgcaatgttcttcacaatatattcagtgctccagggaaaaggtgtctcactatcataaaa

SEQ ID NO: 111577 - DNA, 301 bp, Zea Mays
tgctggtaccgtgctgattggattactgcattcagtcgctcttcctcaagtatatcaacgtcctccagcctggtggcctcagcttctgctatgctttcgaagatcaatcttggcgccccaaacttgaggtcagcaggtagtactgcctccgatccgtagaccatgaagaaaggagtgtttccatgcagggctcggctaggttgggttcttaagctccaaacgacataaggcagttctcttatccattttcctgctaatttttcattcttatcgaagactcttttccggagtgcctccaata

SEQ ID NO: 111578 - DNA, 461 bp, Zea Mays
gggccatcccaaatagttgatgagcatccaattgaacccgctgatttttggggcatccgatggcttccagtttcctcttgatcgtgcgtagccagtcgtctgcatcgaggggattgctagatccagcgaacgtgggaggcttgagtctcagaaattctcccatcctgtcctgtggtctcccaccacctgggcgctgattttccagacttctagtgaggacttcaatgagtcgaatctgattggctagaacttgggccaaatctagtggtagttccggaggtgcggggaggtgggtctcactcccttctctgccagcttctccttctgctcctaggggaaatcctgctccaatcccggaggcggtaggcttggttttatccgaagccatctgccaggggaaaagagttactaccatgcacatgccacatttttttcaacaagttactttattcattacacca

SEQ ID NO: 111579 - DNA, 399 bp, Zea Mays
accagatccgcctcaatagagttgatacccatcgtctttggttggcttttcaacgcccaacgaaacagatgaagctttattccgagcatctactacagtcacaagcggcaaggggcgacaaacaagcttttggcatgaatcttggttagcacgtaaaaatccaatggatctctaccctttggcctggtggaaaaataaaaagccactgaatagttggttagtctaaactggacgggaggactttggagaacggaatatacgcaacaattgacagtaattatttctttgtggaaccaccttgaggatatccaattaatggtcgagaagataagattgtatacgatgaaaatggacaaacacaacagaaatccattttatctccgttggccatgtatcgac

SEQ ID NO: 111580 - DNA, 679 bp, Zea Mays
cttaagatagaaaggctgaattatgggatggtcactttattaccaaaggtggataatgcggctgacatgaagaattttagacctatctgtcttttgaatgtgtgttacaaaattatttccaaagtttcgaataacaggcttgcgagttgtatcacaaaagtgataagtgattctcaatacggtttcatttaaaacagatatattatggatggggtcatctccctcaatgaaattcttcatgaggttaagaggaaaaatcaaagtggagtggttttaaaaattgattttgaaaaagcctatgacaaagtaaattggcatttcctctatactatgatggagaaaaaaggttttgggagcacttggtgtgattgggtaatgaggattgtgcgtggtggcaaagtagccatcaaaactaatgataatctgggtccttatttcactactcacaaaggggttaggcaaggggatcctttttctccccttctgttcaatttggttgctgatggtttagcttgcatgattcagaaagctcaagttgagggtttgattgagggtctaattccccatatcattcacaatgggtgttgttgcttacaatatgctgatgataccatttttcttattcaagattgcttagaaggggccagaaatcttaaattcattttgtgtttgtttgaaa

SEQ ID NO: 111581 - DNA, 372 bp, Zea Mays
tttgctagaatgaagatggtttccccaagttgctgagagcatgcacagttctcctcggaatcaggagccagccagagtatgatggtcgtgaattcgtccagcatggcacagagaagtgtgtcatgactgtatacattggatctagtccgcaccatgtggaatggagtgtcactgctgctgggcacagattcaaagacacctgccaagtcgttgctcgcaaggcattgagggccctgtgtcagatctatgaagaagtggccgacaccccgctcagattctttccgccctttcagagagaccgtcctgtttggatggctaggatgcgtgcattggaagagcagcagttgcttgaggacgaccccacagttgtgt

SEQ ID NO: 111582 - DNA, 565 bp, Zea Mays
gttgcatgtggcacaagggtcttgtcatcccgaagcttaatttcattggactcatggtcatagtattcaatttctcccttgtcttctcatccgcttttatgcagaaccattcactcgtccaaccggtaggtcacttagtgcgatagccaattatcggggcattcgtatcttttcgatatgcgaagttgtagcagccaaagttcttatgaagcccatccgctctggccttcgtctgatagtgcagctcatgcacccggcagaaagcttcggcattagcactcataccctagcttcggagagcccatatgtaaacactaagtctaacgattgcattgggtgtcaactgatgaagatatatctcaaaaaaatttaaaacttctcctatcatgtcatgtagagggaaccgaagccctgccctgaagaaactcttaaaaacaacaacttcgtcctctcttggctgtggaactacctcctccccagcaaagcggacaagcttgctcttgtcttctccaaaatagcccaactttttcatcataaccatgtcatctgctgtcacagtagattt

SEQ ID NO: 111583 - DNA, 497 bp, Zea Mays
cgaagacatcacctccccgggacccacacacatccccattaactcctcaacaaaaatcctagaggcccttggccccgtcttatcatcccccgtaccttgcaaatctattttcctttttcggggagctgcaaccacaaccttcccctttgaggtgccctcttcaggccgggtcttcacctattttcctcgatcattgtcggcgtcagtagagtccccctctaggtagggatcgtatggcaagctattcaactcaaaaacatggttcaacctgacgttggaaccgcggatatcccaacttgttagcatcccagtcttcgatacatacttccaacaatcttaatggcctccgattccacctctcacacgaaggcggtcgcatcccacccacgcaagtcaacattgaaggctgggctctgcaccatcttatcccctagtgtcgcatccggtgaggtctaattccacccaaaccccactcgtgcgccagcggccacactccg

SEQ ID NO: 111584 - DNA, 827 bp, Zea Mays
cttttgctcggacgtgtctttccatgaagacttcgcaccctgtgggtgatgtcgcgcatatattgtgcttttgtctggctgcacccttaggcgacttttgctcggatgtgtcgcacgcgagggtagtcgaggctaccaattgtgggtgactgttttgtgcgtcgaatgtcgaaggctgttgtcgcggtctttttcaacacccgtggctgtggtgccagtttgactgcttttgtttggtggctttgcggtattatattacatggctccgccttgttaaaaaactcaccccctgggaggaaaagagtgcgggcctaattgacattgtttcaagaattacaatggcactcgggccttgggacttagacgaagaatttgcgcaggttatctatcttccacgaatgctctaggtcttcgccggatggtgaggtgagcctataagcattcggcgatgtcttggttttgatgatgtagggcccctcccacttgggttcaagcttgccccgagactctgttctgatggttcttgtgagtactaagtctccttctttgaactctatttggatgtctgtgttgtcgcgccatgccttagtatgtgcttgatatttgttcagtgtttccagagcgaggagacgatctccgtcgataaggtctttggaggttagctcatcgacgtcaggggtggctgttgggcttgttcgtggggatccttgctttagctcttgtggtgtcattgcttcggatccgtacatcaagcggaatggtgtgaatcccgttgctctggtttttgtcgtgttcaatgcccatatgactttgggtagttggtccgc

SEQ ID NO: 111585 - DNA, 545 bp, Zea Mays
gactttgcttggtggcatacacttgctgtcaggttcattcacttgctgtcaggttcttcttcttcttccttggtgtcatttttttgcaggctttgcattctttgttgttgtaagctttgttggcgacacatccaaatctttgttgctgccaaggttgaagtcagcctgctcacttgtgctctccccaagcaacatagcaagccccctgcaaaaatgattgaattagaatgcagttaccattagctgcaacactagaatgcagttcacaaatagtgcagaccttctagtcaatctaataggctatcttgtaatattgtttctctatttggtctgataggacttgatatgatagcatttgcctcttgcacattttggtctgcattagctgtctctactaggtgaacgcttcattacctctgctctccaattgaacaacaattgaaaactctgttcccagctgccatgcagttctcgtaatgccttctgtcttcctttccatacagtgtcatagtgaatctcacaacaaaagtcctcctgtaacttgt

SEQ ID NO: 111586 - DNA, 511 bp, Zea Mays
tggtgttttacttgagtgaacataaacattgtctaagtatgccttgaatagaggggattatggcaaacttggtatcacaaaaggtcattagttagcccaataacgttttcatccactagttgtactctaataatctctcgtgctaaaagaatgcctcgacatcaaagaaacaccatttgtggtataaaaggtgatttattgttttgaattctcttatgcaatttggctaaattttcgatggtcttattttattttgagaaacgatgtgccataatgatgtgtggtcttttctatgagtggacataaatattgtctaggtatgacttaaatagaggggattatggcaaacatggtatcacaaaaggtcattagctagaccaataaagttttcatctactacttgtactctaacaccctctcatgcgaatacaacacagttgatatcaaagaagcacaatttgtggtttaaaaggtgatctattgttttgaattctttatattccaacttttt

SEQ ID NO: 111587 - DNA, 542 bp, Zea Mays
gtttgcattcttaaacataacataatttggcccctgggttggtcctgtcttccgtcttttgatccagacccatgtgatagttagatgtactgatgtagtgtttgttcccaatgcacatgagtgaggctatgtgtagtacgttttataaacccccctcacagctatattagttttaatcaaattagcataacgtgcacacttgatatgcaaagtgtgttggcatataacatattttagatcatcaaagttcatggttcaattaatatgttagctgccgaccttttaatgcatataacatgtttttaaattgagtacgtaactttaacgtgactaggtatcataaaaacttcctgaacacttttaagaacatatctatggtagcatcaagttgtatacatgatgatcccacttaaaagtttttatgataccatatcatgattggtatgcaactttagccttataaaatgatacttctttcattcttttctataaggcacaatttaacataacacaatctttcaaaatacacttctattaatttt

SEQ ID NO: 111588 - DNA, 366 bp, Zea Mays
cacatacactcagcgaagggtcaccaagcccaccacaaataaatacaattgcgagggaaccacatactacatcggctcaaccttcgggatgatgcccgcctccctataattgaacaacattattttcaattcctcaccctcaaaaagattccgcagatcagtctcaccaatgctcgccccaatcagcaaagacagtagctctcattaaccaaaaccgctctactcgaagacggttccgctccatccctatccgcgcggcgcctaccacttcgcgaaaccttgccaacgctatgctttgacaccacccttcgacaccggcactcggtcctcgcactaggaagatgagacatctcggcaacctccacc

SEQ ID NO: 111589 - DNA, 409 bp, Zea Mays
cgaaactcaggcaccacggccagttcaatgtagcgcggccggtgggtaagaaccttcatctttttgcccttcggcacaggctcaactggggtggccgaagcagcagcctttctcttcttcccctgtccccacagcgggtagcggtaatcagggtagacaaagccgatggcgtcaaaaactctgttcattgtctttttccccgacctccaaaggctgcagacaatgcattatcttttgccttggaatatgctccaagtagttcatcacttgtagcttcgatacatttcatccagtcgttgtttggttcatcagacttatccccaaacctaaacgtatacttcagccggaccaaatcaccttcgctagagttagtgatggtctccttcggcatttcccagctttctacaag

SEQ ID NO: 111590 - DNA, 525 bp, Zea Mays
gcataggttatatttattttatctgtgcgtgtagaacagtatacaagaaagaactcatcagattagaatattaaacacatcctttttttcccatctatttctgcggcacatgccatggggtttacttcacgccgtgagcatgtggtggaggaagagaagacaagtgcatgcatacaagcagagttacatgcgcatcaccagaaaatatgcatgcattcttcaacagtaatttttttttacattccactgtaaagtttgacaatgatatgacgataattatttgatggaacacgcgtcggcatggaaccgctaaacgtatctaccaaagattggttacaaataaacctctctgacgccgaccgaccgtcttcacccaaattcggttgatgatgggctagtacgagcggagaaaaagtccagactcgagagggcccagggggagaaacaaaggcagatggcaattgtgtactaggctcttggtgccatactgtctcagttgacagccaaacacaacttaggtcagag

SEQ ID NO: 111591 - DNA, 709 bp, Zea Mays
cttggattcgaagcctttctccttttgccaaagctttcatctttggctcataacttccttatctatgtgcataggtgaagcttctttaaacgttgtttcaaccgaagagtagcttcgtccatcgattgaagtgtacctaaaacacgcttgttcatgtagaagtgaaggttaaatgaggaccttcagcaaaggtaggcccccaaatgtagcccttgcgagatgagttcgttccttcataacaagcttaaatcgcagtaaatattgggaggccttgtgtcaaaggtccgaaaaacaccttaccaaagctcgttatgaagaagatagatcaattcaataaaaacaattgatctggaagttaaacagacatgggagaagcttaaggtaatgcgcgggaatgttttgagagactcgcgccactttacgcttatttctcaatataaaagtagtcgagtgggttggtgtggatcacatttactaccctgaactacgtactgccaaaattttctatgcctccaaagcttcccatccaccgctacatcgaaactagcttcggctaagtcattttagacaatttccagtccactcagatggcttggattcggaccaccacaaaactaataaggcctacctctctggaggcacgacaagataccctgcctatctttgaatccatgagggcttcgtcattgtcatggcctactccagagtt

SEQ ID NO: 111592 - DNA, 579 bp, Zea Mays
atatctttgtgtcttgatcatgcccaatatttctttgttttcgaagcactctcgttagtattcagttaggttatggagctcttgtgtggccatattttctaagccttgagtttgttaggtttgactcaaaaagcacccctttgattagaatgaatgtcttcccaagtcaacttctgtaactctgaccacactcatagaagaatgcaccagcttcaaacatatcttcatatcgcatttatttggtactgtaaattttaatatataattcaatttcctataaatttggtcatagttcatagctaatgctattatattgtacaagtttgatgatttgtaactatgtttccggaaattactttttgcgcttttcctcttctgccagataaaaaattatatctgtattttaccttgttactcatatgctaaagttatacaggaaagaaggaaatctcacgagggttttctttctctctcaaaattggcgagttcttatttgggaaattggtccccaaataatgctttaccttttcagtaacgtttttagatgtaatcacttcttgccctttccctgctgttttc

SEQ ID NO: 111593 - DNA, 665 bp, Zea Mays
gagttgtcatgtagtgcacatattcaaaataatattacagcatgctgaatttctatgacttcataacttacagtataacaaatacatgggtattcgatgaacttacatggctttggagaatgtgtggtgtgtcctgctcatgatcaccaattgtcctcatgggtatccgttgaggagctccaaccaaacttggatgaactgtgttgctgtcttcaaggattcctggcgccggtaacgcagccgggggagttacatcatgccgaccatctgacctacagggtaatgtcgatgttgtactctctccacactgcaccgatccgctagccatcgccatggtgtatgccctaaccctcccaggtcaatgaactaaagctgcggctgtgtgtaaccctgttttattttttggagttatgctcctggccgaaaccatcgtggccgatattcatggtttgttcaaaatatcccgcgtgatttgcatgtggcgagatttctgtgtcccgacccaattacgattacctgcctattctgttacagcaacataaactcatcaccccacgcgcgaccccaccacaaatccacgatcccggtagacccactcgccacccacaccacgatatgcatgcgtcagatcgttatgcatttgttatcggcaatttaaacaagca

SEQ ID NO: 111594 - DNA, 881 bp, Zea Mays
ggattttgctagagtggagggaggagcagagggaggcggccttatgctccagctctagggacgaacaggaggtgcgtccagggcctaggcctaggtgagcagggcgctgagcgctgttggggaagggcaccggcatccatccatgtaagcattgagccgaggtgctggaggagtccctgcgccatagaagctcttgttcctgcgaatcccacccaaggggcggcactttagggctttggagaggagcaccttcgcgcgcccaccatgggagccgagaggaggcaggaaaagcttcatgaggaaggtaccgagtggctagaagaaaagagaaaggggtggcggctagaaaaagagaggggtcggagtgcaaattttccaagtgcaagggagttgtccttctatttatacaggagctagggttagggtttttcttgagctggcttaggggagaagcaaggattgctttaggctaaggaaaccgaaaatacccctagattttggcgacgagttatctatgcgagactgaaaccggtgcggcgaaccgagaaagacggccttcagacgaacgagaaactgaggaaataatttgaccgagaatttgattttggcgttgctcggaaattctttcgcgcactatttgagaaataaaacaacttgagatatcactgtcgttcggaattgtgatcatgatgaggtgagttggttaaattaacaagtgttgctaatgttgatctttcagtttggattggtcattgatatattaacaatttggataagataagatttttaatagataccaatacattagggactccgctcgagagcatggattcggataaaagatttgggacataaatcgaatatcgggaaatcgagtttgg

SEQ ID NO: 111595 - DNA, 425 bp, Zea Mays
gtaggcttatggtaaaggttgtacgttgaaaagttgtgatagataaatgatcaatagtgtgatggcggtatatataagcctgtagtattggatccggcctaagactaggtgtactcgaaagacgtcgctatttttggctcgatctcactttttaactgaatttctagatgaccccgttttgttttatgttatttgagacaacacgactctaaatttctcctacaacatgctaaactagtcctatttgtaaaggattcatttacgagaatgaccgttgtgcttccgttgtgtatgcagataaacatacaaataagagttataaacctttagataatgatctaactgtagatgtaaccatagtttttgttgggatttattttgataaagttatgtaagttaatggtgagaggacttaagtgttaaat

SEQ ID NO: 111596 - DNA, 460 bp, Zea Mays
cgagcgttgagtcttgaccaaggggctagagaagttgggtgactagccatggtggctgacacctggggacactaatgggcacaaggacatggaggagcagatcatgttaccaacgtggttggagaccggcgggacacgtgtcttttgccactagatggttctcgatatttttggcacgatcttcttcttagatttagaagtggcataggaggttgagtcatttgagatttgttttttggctcgattaagctcacttgacctcatcaagggattgcccaaattgaagtatgagaaagatcttgtttattagccttgtcgtcatgagaaaatggttgttgtttttcactccccggtcaccaaaatgatgtctaagcaacccggcgagttgcttcacatggacactgttggtccaactcatgtttgctcttttgaaggaagtggtatgtttaggtgattgttg

SEQ ID NO: 111597 - DNA, 434 bp, Zea Mays
cgttgtgaggacttattgattattacttcacctcatccttgattcttcttcaaaatattacttacctcgactaattctatgttgtgctcctatatgcccccttgccaaaagtattttattctagtatgatctatacttccctcaatctattagatctgatctcactcttgtgcttgcgacacctttgtagatgcccctgaccataaccttcttgtcttttaggattcttttctcttccattattaaattgctatcatgtgaccatatctattccattggtattgacatgctcgtatccttgcattttaatacccttatcccttgattcaaagtacttacccttgtacctctactacctatttaaacagtttagtttatgtgtccataacattcctgtcttttgagatcccttcctattccattgttaagtcgtt

SEQ ID NO: 111598 - DNA, 306 bp, Zea Mays
ctgtcacctcccagtgcaagatcgctctccaccctggatccgtattctgcttcgggaccatctcgtccgtagcagatgagaagggaattctgcaccgcatagcggatccatcggagaagaagccttcctcggaaatctccgagaaagtcggaacgagacagcggatagcgcagactgcctcttgcaagtcgagagccgagaattcacttacctgaagaaccccgttgcccacttcgccccacaaaggagtggacacggattataaggaaaaaagaagcaagcgggatagaggcccgtcaagttatc

SEQ ID NO: 111599 - DNA, 483 bp, Zea Mays
cgccactcttgaactgagatgggagattggacattttagatgacgggcatagggtaattaccaagttaggatcgagagatgagaaaggtaaaggcaataacaaacaaaagcacaacaaaggacggagatacaaactcgcgggccaaagaagaggatacgaccaagggaaagatacataaagtacaactctcagaatgagacggaagagggacaattttaaagggtaggtatgagacaaacatcaatgtaggatatagaggtgtcaagggtacatatgataataatgaaaagcataacaaaggatagagttaaggcaagactcgcgaagtggcgaagtggagaaaacaatcaagggtaagatagataaggttccaatagtagggttgaagtaaagattccttaccgagggaagttataaggaagcaacgagatcaccaaagatgtgcgagataaaatgattgctcatggattgttaagaaacaa

SEQ ID NO: 111600 - DNA, 471 bp, Zea Mays
gccgactcttcgatacctggggaaagattggaggagtcttcttgtccctactttacttttcgcatttactttgagcattttactttgtgtatttgcttagttagtatttacaataatgacttagggttgttctctatttcatagcttttacttgttgctagtagtttgggtgaagttgggctcatgcttagggtttaatcttttgttagaattttagaaaagcccaattcaccccctcttgggcattgtgattatttcagaggctcaaccaccaaactgccatgggtagcgtacttcatacgcgtcccccacgtcctggacacttgtcccaccaatcctcgaccgcgccagtgacacgatccactctgccacgtcctcacgctgatgcatatcctaggtgtcagccaccatggctagtcacccgacttctacggtacctcaatcaagtcccagcgctcgtccttcgttgcc

SEQ ID NO: 111601 - DNA, 597 bp, Zea Mays
caatgattgacacttgcataatatcgatgattctagcattttatttattaattcatttacaactgttattattttgtagaaaataagtagtcggaactcggaaaaccgtcagaaacaaagaacaaagcatataatgggttctagaactttttcccaaataagctttgaccaggtaatgatatgaccactacattattttccatgattaatgacaaacttgtataatgcattcttcgcatcatagagagacctagaaactggtatagaaccaactgatctaaccctttggatgagtactcattgtaaaaatggtgaatggtcggaagaggcttcacgtggtatttatgtaagtgaatcacaaagtttagtacttaaacatacttcaaaatactatgtagaaattattatttgaattgagaaaacttgaactacattgttcatttcaggagaaggcatgtgagaaaattgttgaggaagtatatcaagatgatggatttgatctgacgagagaagaggaaaatgcaattttccaaacatcattcgaggaaacaataggatgcaaggcaaataggcttcatggtcatgggtacctatcaa

SEQ ID NO: 111602 - DNA, 351 bp, Zea Mays
cagcaactcatcatcccacacaacctggctcgaaagtggatcgaacactttgtgtgtatcactcttggacatcattggtgccttgaacactgccagcttgcactggtgcactagaccatatggatcaaaaccatgatacgattcctcatcccagatcaccttcgcaagaggactttcgtcgaacggttcatgtgcagtagttgtcgacaccattgaagcctcaaatttgacttgctaaacccatattgtatcatcatcccaacgaggcataccatcgaacacctcatgggcaaccaccttagaaatcaataaaggaatatggtcatgaagtgtcccaaacccctaggactc

SEQ ID NO: 111603 - DNA, 425 bp, Zea Mays
gtaagatggggcacatgactactgtttgctggcaccgcttcaacgaagctgaagagaagatcatcagcgatgtctacattagatacgacatccacacaagctaagatcacaatattcgggagttagaaaagttcaaaacagaaggtattgtatttagtttgtcatttaagttctcttaggtgcgaataatataacaatctagcgtgtttgaacttgcagggccaaagaaatttgtctatgagtgtcgagttaagacaagtatccaatgtctttgcctatagggtcagtacatttctgggtatgaagttaatggatactgttttcgtataacaagctatgaccaaagtagatccaatcaaaagaaactacatgttctgaagtttttacgtccggacatgacgaggtcgagtattatggaagactag

SEQ ID NO: 111604 - DNA, 665 bp, Zea Mays
ccgcagaaggccactccttcaactgttccctgcacaactgcaaaccctagagaaggctcgaccgtggcatcggggagactttcgcctcacccgagcgtggctttggccttgatagtatcgaaaaaaggacgcccgacgtcaccagaagctacaaagctgacgtcggttactctacgtattcacaagagcgttttgccatacttaccactgctccaactactacgactcggacagctcctccatcggtcaggcttgatacatgcctgagcctagaccttggccttggctctctgctcaatcaaagatgcaaatacaggaaccagacatccccttcccggctcaagtcagcagcaggtacggggcccatatcaatggccatgctggctacaagggctcggacgcgccttctccccccatatgcgacaagccccaacgctcccgataaccctccttggagctatagagtagcacagagctcagagaagagggacacttcacgatttttacctccacgtggatattgacacttgcctcaatcaatgccagggacttgggatctttttcttgtcccggccagcttgtattccctattggaagcacttaggtgcaagtaatataagtgtcatcatcctctgctggaagtagggctttcttttgcccaaacc

SEQ ID NO: 111605 - DNA, 883 bp, Zea Mays
tgaaacttgtttgcgggatatagaagtcatccctatatgagtaatcgtaagcgcgtcagatcgccttgagttgctaccgacttaagtcggttgcttttgttaatagggcttagtggtcaccctgagtcatataagcgcgagcatgttgcaccggcttaaggcgttgccgacttaagccgattgctctgtttagcagggcatagtggtcaccccgagttaagtaagcgtgagcatgttgtaccggtttaagtcgttgccgacttaagccgattgctccgttagcagggcatagtggtcaccccgagttaagtaagcgcgagcatgttgcaccggtttgagtcgttgccgacttaagccgattgctctgttcagcagggcatagtggtcaccccgagttaagtaagcgtgagcatgtcgcaccgccttaagtcgttgccgacttaagtcgattgctccgttagtagggcatagtggtcaccccgagttaagtaagcgcgagcatgttgcaccggtttaagtcgttgccgacttaagccaattgctccgttcagcagggcatagtggtcaccccgagttaagtaagcgcgagcatgttgcaccggtttaagtcgttgccgacttaagccgattgctctgttagcagggcatagtggtcaccccgagctaagtaagaatgcaaattaatcatgaacaaaatgagtatctttgaagcctttttttattgatgacatatttcaattttacagagtacatcgtcgtcccgatagcttttgaaatacagctagggataaaacttcctgaggtgttctatattccaggagttcccgacttctgtgccgtccatctgagtgagacgatatgatcctggtcgagtgacttctgc

SEQ ID NO: 111606 - DNA, 756 bp, Zea Mays
cagcgcaccagttgcaaggacatgtagggatgtggtagtttcattttcgcaccgcttaccctgaaaatgcttccattgcttgataccattcaccgcagctttcagagggaattatattccattaggcctaatggcaaagaaggtgtcagaattcatgagattaactcagggcacacaatcagtgacagagtatcttcatgctttcaacaacctgtctcgttacatgcctgattatgtggacaccgagatcaagataattgctagtttcaagaggggcttgagcctgaaaatgatgaagagtatggggatttcttcccacacttccttcaacgatttgattagcgactacttgacttaagagaacaacaacaatctctacgctatggcaaaggggtgtaaaaggactttggaatctggaatatcacagctctaaaccaccattgtgactcgacccagtttcaggctgatgttacctggagcaagattccaccctcaacctccaaagaagaaatagaagcaaggattcagggtttagaaagcattcaaggtggccttaccgcatgcaaatactagaccagaaagttcaacgggtgctacctttcaagtgaagggaccatgctataattgtggacagatgggacacttcgccaagttttgtcctcgcactaagaagaagaacgatgtctatcctgctcgagtacatctcaccatcgcgaatgagattattgatggagaccatgtgatggctagtacgtt

SEQ ID NO: 111607 - DNA, 390 bp, Zea Mays
aaaaatacctccaaaggtaatggaagcccctgcgccgctgacttagctaataagtctgcatgttcattttctcctcttgggttgcttttttacagagaaaccttcgaaagaggcttccatccttcggacagtgtctaaatacttctcgagcttcgggtatggatgaaaacggggtgaatacagccggatacagggtcatcccgtatcctaccctaatgtatttctctcggatacgggaccggatacaagtagttaagattcgggacggatacaggacatgacagggtaataattcgggcgggtaagaaatggataacagatactactcgtgtaggtaatggataattgtcgggtagttcgtcctgatgatattaattgtccaaccaccca

SEQ ID NO: 111608 - DNA, 707 bp, Zea Mays
acagagtttgaaattcgaaatgaggcatgaaatgacttggaattgagccgatacttcacggataggtatatatgagtgaatatgagtgaagtgggtgcttggtttgaagtttagcagagaaaaaaaatatttttggcacttggctcaaaaaggattgctataaatgtaaagaggcggcgtaacaggtctctaggatatcggatagccgtgaaattgtgtgagagttactggaagtagccggagggtgctggaaaaagtaggagtcgatttgagctattttgaatagtttggtcatttcaccgaacacgtggtgtgcgggtttttgaaacggcggtgaaatgactattttagtggatgaaaccctccctagggagctcaaaacctgaaggggagcacaatagaggactaggcatacacacatgcacttggattcacagatttcacaagattttgaggattttaaaaagggtgggactcatcactgcacagagcatcacaaagagagagagagataagggagaggcctcaccagagaaaggagagaggagcacgagctcctggcagaggtgcttgctggagatggaggacggcgatcaccagcggcgagcccctaggtggcggtgagggggacagcagagaggaacaatgaaagatagagaatgcgaggagggaaatgatcttgggcgctgatcgggcgaggaaaactt

SEQ ID NO: 111609 - DNA, 353 bp, Zea Mays
atccgaccgtggcgattgaaaatgatgtcgaagcttgtcaaaaggctttcaacaatgtctgtgctttcattggtacaagatacctgatccaagagcacatagcctacagggtatggccacttgcggataactgggagatgccgaaggagactgttgccggatccagtcaaggtggattaattcatttgaaatataccttcagatacagagaccggtttgacgaaccaaatgacgactgactgaaatgtattgaggctactagcgacgagttacttggggcatatactagagtcgaagatgatgctttgtcctcagcattcggggtcggggcaagaaaaggttgaacagggttt

SEQ ID NO: 111610 - DNA, 697 bp, Zea Mays
ctattatgtattgtattagctagactgtaaattatgcatatgcaatcaattgtattagcgtaagataactttcaatattattataatgctgagctaaaaatgggctggatatcaattgtatgatcggagtagatcaatattttaatgctggataaaaacttctcaatttttaatgtatatgctggataatggctggataaaaaatgtaaccttttttattgtatagtcctctagaggatcacttgggagttgtgagtgtagaaaagtaaaaaaaatagtcgagataggcaaaccggtgatcatatcgcttgggagttgtgagtgtacgcactatcagataaaaatgccatgccagtgagcgtacgcacaagatcgcttgggagtgatgtctgatgacctggttcctcaaaacaaacaaaaaatggattcactccatttccctaaccaaacacaaagaaagaaccatccgatcctatgaggaatgaatccattctggatcaactggttccggatagagtcaatcccctaaccaaacacgccaataattaatagtgaattcgacttagtttgatgatatacatgatataaaatgtaaaacttatctatgtaaataattccttctaatctcttttattaaatccggggaggattttttataccctctccacactctgcagcccgctcgcctccaccttat

SEQ ID NO: 111611 - DNA, 366 bp, Zea Mays
ggtgttatcaggttgagctagcactggggctgttgtcaaatgctgcctcaaggtatgaaaggcaccttcacacttttggctccactcaaatttgactcccttcttcaacaattcagtcattggtttggcaattctggagaaatctggaataaatcgtcggtaataccctgccaatcctagaaaactccgaatctgcttcactgtagtcgggggtttccaatccattacctcttgtaccttctcaggatcaactgatatcccatcctgagaaattgtgtgacccaagaatttgatctcttttagccaaaactcacacttactcagcttagcatacaactgatgatcacgcagtctctgaagtacagt

SEQ ID NO: 111612 - DNA, 608 bp, Zea Mays
cgtaggcccacttggctattcttccgatggcttctttgttgtgaagaatatcccctattggaaacccggtgactaatatgactttgtggtcgtcagagtagtgacggagcttgcgagcggttagaagtaccgcgtacaatagtttttgaacttggggatacttctttttatagggtccaaggacttcgctaatggaagtaaaccggatgttgtactggatatgtatgtccttcctccacccgctcaactactaacgttgtgctcaccacgtgagtcgtgcaggagatgtataacaacagatcttctagcggctgatttggcatgactcggcgtggtggcttgagtactgtaggcgtagtcaggaactttttgagtgcttctagagcttcatgtgcttctgtggtccactgaaacttgtccaccttcttgagcaatttgtagaatggcatgcctttctcgcccagccttgacatgaacctgctcaaggctaccatgcatccagtaagcctttgtactttcttttgtgatcgcggcgcttccattctcatgatggcctcgattttttctgggttggcttcgattcctcagtggctgacaatgaatccgag

SEQ ID NO: 111613 - DNA, 421 bp, Zea Mays
attacttcacctcatccttgattctgcttcaaaatattagtcataccgactaattctatgttgtgcttctatatgcccccttgccaaaagtattttattctagtatggtctatacttctctcaatccattagatctgatctcactcttgtgcttgtgacatatttgtagatgaccctgaccatagattttttgtcttttgggattctttcctcttccatcattaaggttctaccatctggcgaactctagtcctttggtattaacatactcatatctctgaattctttaatactcttgtttcaaatacttgcctctaaatttctactacctacttaaacatttcagtttatttgtccatgaccttcctgtcttttgagaccctttcctcttctattgttaagtcgctatcttccggcaatt

SEQ ID NO: 111614 - DNA, 417 bp, Zea Mays
tgccttttcactcccagccatcttctaaaacttttgcttattcttcttaggaatctcagcgtatatcctagccatcgccatcgccctgtccttcatttgtggcatctgagacatcactgccgctggatttcacccttcaaccctttcacaaactgagtgacataaaaggtctcatccatctcaggattgtgaaccaaggtggcataacaagcatcctcaaaatcctgaatatactcctccacacttcccttcttaaaaatattcagaagacctatcatagcatatggaaactccccttctccaaatttactcatcaccgccctagtaaactgcccccatcctcctactccatgcctcatcttatagactcgccaccacctggccttgtttccctgcatatgcatggatgtagtagac

SEQ ID NO: 111615 - DNA, 652 bp, Zea Mays
ataagacctacaccatgttcggtgtaaagccgtcggcgacgcacctcgatcaccgtgccaaccagactaaaagtagattctgaaaactgacatctaattgattgacggtatcactatcaaggtatggaaacaactcagattgggcattagtaggccaggaagaaagtagactgaatattagtagtaccattccgagatctcctaccaccgccgtactgagaagcatatacctgagtaccaacatcatcttcaccatatatgtcatcctaggcagatttgttcttatcttcagttgtggatgatggttgatgtacccgtaagcgtacatcaccaagcttttgattcataaacctgaaaaagtttagtcaaccctttccttgcatactgagaaactctagaataatttgtaccatcaaaacttgataggcgcaataaacctttatgaaaacctctcatcttacctctaggatgcagtatgaaagcaaaagcatattgtcgagtacaataattaggggcacccagattacccctaaaacgcgcttaaaaactcaaggatgtcgtcgaggtacgttccccaaggtcgaaaggatcaaactccgcctcgcccgaggtcccccttcaggtgcattccagaacctccgcctcgccctgg

SEQ ID NO: 111616 - DNA, 389 bp, Zea Mays
ctgttacctaccataagttaaagcagctatttgcttggcctggtatgaaaaaatttgctaaacagtttgttgcttcctacactgtgtaccaacaacctaaactagagagagtctcgtatcctgggctcctataaccattacctgttctagctggtgcctggcagacagtgactatggattttatcaaaggtcttccattatctgggtctaagaactgtgttatggtggtaagttgaaaagttcttgaagtttagccacttcatcgcactaaaacacccttcactgcactaatggtcgccaaagcattcatgcaaaatgtatacatgttacatggaatgcctctagttattgtctcatatagtgatagagtgtttactagcctgttgtgg

SEQ ID NO: 111617 - DNA, 764 bp, Zea Mays
gaatttaatatgaattatataagtctcgtgatttatttttgaattaaaaatctatttctaatattaatttcctatttttccctattttctggactgggcaccaaaaatagagaagcacgggggtcacggtgtaaaattcctaagactcagtgaacagccgcataggacggcgggttgaatagctaaaagcatagggtctctactgcaaaatgcgcaggccgaaagggtatcggggaatcctatccgcccgatcatccatctatggccccgattagatcatcaagccccaggctggtccgcgacgtggcccgctagatcgggaatcaacggccagatttttaaatacacccgatccgttcacttagcgatcgacggctaggatcgaaccccgtcgagtgtgtacaccagttttaatctcggccgatcacatccgaaccaacggccaggagatcaccaccaacctcccagcagtcaagctcggacgcgcacacccctcccgcggtggcgcgcgtacgggcgcggtggcgccatgcccggattcccccccagacagcgacggcggcggtacctccccacggcggagcaccatagccgcgattcggcccgatccacgcagtaatcaagcttcaagtaggaactgctacacgatatagagataagggagagactagctgcggggtcctcaccaagattcgccagcacaggaggactgccaacgacacaaggtggtccatagcggtgcccagtaactccggcgaggaaat

SEQ ID NO: 111618 - DNA, 617 bp, Zea Mays
aatcagggtgttacaaggagctagagtcactcacgtccatcgtgatgagcctcatgtcctatgcatctcttgtcacttgtgaggggcggcgaatgccttgtcccacgaaggatgtaggcacttcgaagtcttcgaccgggcgagcgaggacttcgaccgcagaatttgctaggttgaagatgatgtgttaaagtggtctgttggggcgctttatgataggatgtggggtcctcatggtcctggcactgtccgggagagggccgatcgagcactggcgcaggtttttttcctgattgtgaattgttttgttgctttcgcagatgatgaatgaagaagacattgacgacctcaccatcttgagagctcgatgactcggatgggtagcgcggaggaggcaggagctgaagggcaatcagcacctcaagatggctccggagaagaccctgcgacagcgtctgctccagcacaggttgaagagatgcgctaaggattttaggttttaggtgctttactttttgtgatactttgggtcggttgctgcgctggttccgatgtccgggcctgcgcaagcaaaccctgatgatgttgataataatgttttgacggctgcaaatgtg

SEQ ID NO: 111619 - DNA, 986 bp, Zea Mays
atggcccgagacgcgcgtgcactggcctgcgtccaggcaccgaagaaattgaatgttgatcccgccgccgcttgccgtggttctgctcgcgatcgtcgccggaaaatggtggctgcggcggaggcgagggcctcctgtccaagatcgcatctgaacggcacacccgcacggtgattgggaacaccagagtgtgaggaaaactgccgaagtcactggcacccaactgcggctcctccgccagaagatctaattccgccggcaccagctctggctcgtcgcaccatgcactcaacttgaagactgaaagatcgccgccttccgcggagtcaggatgcacatctcgaatgaggcaatattcatcgagaagttgtgttgctgtttccaacccccagaggtgagcagggattcctctcaactcgatgtcaactggcactggtagctccctcccgccgacggccatggcatgtctggaccagcgtttgatgtgaagacgaacggtgggagagacaaaaggaatgccgccattgaagacccggcacgccacctcttcattggggagaaacgcgatgaatgaattcggcgcagcacgacggaggtcgagcgtctgcgcatcgaggttaaacctcacagcgagcgcgtcagacacgtccgcggcgcagccagaattcgattgatcaatgacagtgatgatcagggcccgccggaggttatcttctgcctgaagaatcatcctggagtgtttgatgatcctcctgggcctccccaatgcacgatcgtggcactgatcggccggacgttgggaaggcaccgcaacaattgcatcttgatcggcgctatccctcaggtttccagatcttctcctcctcagtccacggcgggtgcgcctcttcagtacgccaccgccatcttcacctccatccacgactcttccagcgagactgtcatttgagccggccatcccagaggacagggagacaggccgccac

SEQ ID NO: 111620 - DNA, 357 bp, Zea Mays
ccaagttcatgtgcttgttccttttaaaccacaatcctctcccaggaattcccttcaagtatctcaagatgcgataaacaacatccatatgtcctgtcctaggatcatgcatatacctgctgaccacacttacaacatagcatatatcaggtcttgtgtggcacaagtagatcaatcacccaaccaatctttgatatgcctctctatcgacaggatctcctaaataagcatggatctggtgatttttatcaactcaagaacaacatggacgacaccctagcattccagtttctatcaacaagtcaaggacatacttcctttgggaaagaacaattcccttcgatgaccgagcaattt

SEQ ID NO: 111621 - DNA, 795 bp, Zea Mays
ctttatcgaaggtactcaaacaataaaacctgctatcttaggcaagttgctactattttaggaaggttttatagattctttatgtaaggtctatggcattgacgtaatttcatatgaatgtgtataatgttgttgtcggtgtttagtaccaactgcgcactatggggtaacccacacagtgcttttgggaggatggcgacatcgattgcaacttgatggtacgtgcaggagctcgttgcaacataagagaatcatacatgtttatgccacctgaatgtgtaataccctgcgtcctgtgtggtgttgagtattgagcttacttggaattcacagattatagatggttcgtgggtggcggtggatgagatctcctattaatctactggtggacgtgatggcaaaagagagggattattgtggtaggtgtacctccacagccttatatagcaggctagggagatatccctttataggtgaaaacttatctaaacctatctacttttgctattcttgcgcgtagactcttccggtggttgcttccctctgagttttgttttgaacgatccgccatcctatcacatgcggggtatgaattcggaattctgttggcccctctgtgatatatgcacatggatagcgtacttgtgccatactcttcgaaatccttcccactgagtgtgttatccctacgatagtatctgtttctcctgaaggtcgccctaatggtacacccaggtggatgacttattggggttcgtttaggcgacccatggaacgtatccatgtaacgatgac

SEQ ID NO: 111622 - DNA, 692 bp, Zea Mays
cctagcttcggcttcggcctgaacttttgtagctttcacaattttcttaggggtagggctcaaggccttcgtagtctctatcacaacgtctagtacgctggccatcctcctcttcttgggagttgcggcaggaattttttgcacctttgccaaatttgcctctgccagtgggcttatgatttctggcacttttattgctttttccacctgtggctcctcggccttatcatctttagcttcggctggcccgactgtaggcaccttcggcactatagtcggctcttcagcgctctacacaatcggagcagcttgctttacttcggcagctgaggaggtccccgcgccaaatttaggcaccacggtcggttcaatgtaacatggccggtgggtcagaaccttcatctttttacccttcggctcagctgcaatggccgaagcggcaggctttctctttttctcttgccctcgtaatgggtaatggtaatcagggtatacgaagccaatagcatcaaataccctgttcaatcttttcttgccccgacccccgaaagctgcggacaaagcattatcttcggccttggagtatgctccaagtagctcatcactggtagcttcgatacacttcagctagtcgtcgtctggctcatcaaacttctccctaaatctgaaggtatacttcagtcggaccagac

SEQ ID NO: 111623 - DNA, 702 bp, Zea Mays
tccagggttacttttgcaaagttttgggactctatgtaatgaacttactacggtcccggactgcgggtgaattcgctaaaactgtaggggcccgactataaaacatcacggttgaaacagtatggaatggtatccaccgcccgatttggttccgatgcgccagattaggttaacggtgcaacgaagtggtaagcgcctgcagccgttggatccacgatctaaggtcccgatctaacgaacccgtgatctaacctataccgcatatcgcaagatctacggctcgacttcaacgaaatccatctaacgcgcccgccctaatcccgatcgaccatttatgatcctacgattgcacgagccactaaacgaaggggtatggtcttctaatcgcggccttcaagcacagatcaaacggtcacaaaacccttcgccccctcctcgacgcagcgacacagcggtgacacaccaccgacgacggtgccatggccagcgatcgcctcgacccgattgccaaatctaaactctaattcaaaagcagtagcgcaaagcggtaatgatacggtattgcggaggatgatactctccaagactcaaagaggtaaccaatgcttcccacggcgcacggcggaaaccgatgtccgatgatgaattccagacgccaccgcggtcgatccttccctagacggccacaactcttcaccagcc

SEQ ID NO: 111624 - DNA, 281 bp, Zea Mays
gtgttcagctgggagatttgaagagaaaggcaatatctcaaggacaaggaagcagcagtgttcgtcctcgctacagttcaccacagggtacaccgactcgaccaggaggaccgcacccagttcagcaatcaccactgaggactccacctcctcgacaggctacccctactggcaccccgacgaagttttcaggacagagtccaggcaccacatgtttcaagtgtgggaagactggtcattatgcaaatgtctgcccacagaggatggctactactccagtt

SEQ ID NO: 111625 - DNA, 461 bp, Zea Mays
aaacacgtactgcggcagttttaagactgtggagtgtgctgtttttatctctcgtatttacatggggtaacctctggaggtgttaattagttgtcatgcttgttggatgctcatccgtggagaatctctacagatcgacggagactgacaaaaaaacaatgcttgtaataatactaaaatcgtacggacatcagtaaccaatcgaccactacgtacttaaccctagctagcctataattagttttactttttttccctgatgagatgtcattgcttttctctgggacagactgtcagtttggcaatacttgttggcagcgtattgctgcgtcgcgcttttcacgctcccggtcgtcgtggtcaaactaacttcttctgttgggggcaaaaagatgcgcgctatatggatcagaagtcagatcgaaaatgcgttttttctccataacaagttaacaacgata

SEQ ID NO: 111626 - DNA, 607 bp, Zea Mays
ccgccaccacaacttctcaaaattagccgccaccgctctcagacactataaattgaaggtgccgctagctccgttatgttgtcacgaagctagagcacccgcccctgtctccgattagccaccatagcgccataatttctttcttcccccaattcggttctccgcgccgccgtgagccgtcgcgtcgtggaccgccatttccaggtctgttcataccctctttgctctcgtttcagcaccttggtgggctatggaagcttatcggcctagccaattgaactagaccatgctagattgtcgggaacacctcgagtcgtcctcagttattgtcgtcgtcatggacagagtgattccgacctagattcgtgaaattagttgagggattaaggccgctaagggtagtatttggtgtcaaccaagtaagaagcttagcctctgcgtattccggccggtataggctcgccggagagcgcgctcgtcgccgtccaccgtcgtggacctgacgctgcgaagaaatagaaatgcaggggcctaactgcgaaggtcagagacacagaggaatagtgctaaggacttttaacgggttatttgaatgactaaggtcctc

SEQ ID NO: 111627 - DNA, 363 bp, Zea Mays
cttagcacctcgtcgaggtgtcgtcctgcggcgtttgtcaacagagtagttggcgtgcttcaatctggggaagaaggggagggaaggtgtttgcaaaagaaaatttgcagtgcaaggacagctgtgggagggttaaagtgtaaaaaaatttgacgaccatcggatcgacgttgaagggctaggattgctcatgtgcacatacctgtccatgtttatacgatacggtcccccatttaagcgctattcgtgaagttttatcgagcccgtccagtaataccggctgcgaataataaatagtaagctttgaccagaaaacatgctggcggataccgatggtagcttcttggaagctgcattcccaac

SEQ ID NO: 111628 - DNA, 862 bp, Zea Mays
accagcacagcaactgcagaccataccggtgacttggccctttgcatgctgggggctagatatgattggacctttcaagaaagctcaaggaggatacactcatgtactggtagcaatcgacaaattcactaaatggatagagttcaaacccattgcttctttaacctcagctaaagccgtggaattcatacaagacataatattcaggttcggaataccgaacagtatcataactgacctggtatccaacttcacaagttcagagttctttgatttctgcgagcaaaaaagcattcaggtcaagtatgcttcggtagcacacccgagagccaacgggcaggttgaacgagctaacgggatgatattggaggcactcagaaaaagggtcttcgataaaaatgagaagttcgcaggaaagtggataagagaattaccctacgtcgtttggagcctaagaacccaacctagccgagccctgcatggaaacactcctttcttcatggtctatgggtcagaggtagtactgcctgccgatctcaagtttgaggcaccaaggctgatctttgaaagcacagcagaggccgaagcaactaggctggaagatgttgatgtactcgaagaagagcggctgaacgtagtaattcaatcggcacggtaccagcagactctgagacgctatcacgacaaggccgtgcgacaacgatccttttcagcaggagatcttgtcctccgccaaattctaacgggggagggacggcacaagttatcacccctatgggaaggaccattcatagtagcagaagtcacccgaccgggatcatatcgtctcactcaaacggacggcacagaaattgggaattcc

SEQ ID NO: 111629 - DNA, 411 bp, Zea Mays
tatggagcactccttctggaatgtagtgctcccgaaatgccaatttaaatttgtcccaagtgacttgatgtctggcaggcttaatggccacataatttgcccaccaggtgctggcagggcctcttaactgctgagccgcaaataatggcttctgggtctccatgcatcggataagtccaaacttctgctcaatgacccgaatccattcgtcagcttcgaggggatctttagccttgacgaatagtgggggacgggtttccgagaaatccaagtacgaagtttcacggggtccttatggataagccctctcgccttgctgctgcagttgttgtcccgccatttcgcgaagaaagcaggtgttgtcagcggtcgtggtaaccaaggcggcgatggccttggccagcgtgggtg

SEQ ID NO: 111630 - DNA, 594 bp, Zea Mays
aggcacttcaccatcaccttccagcctccaccctgagacatcttttttgggaggaaccttttttctctaggccgtgaagatgactctcccgaatcatgcaggatgggaacgatgccatgcgcacgggaagtaaaaggatgggcacaaggttgtgaggaggcaaagcgattgagagggctagctcacggcacaaaaatacagtaagagtaaccaaccccgagcaccctcccaatctacttatgcgtaagtgcagggggcaaggatggcacccaaaaagtgggggccacctcaaacaacacgaagggattcacccctttcgacgaagggtcaccttgggagtcgggcaagggaaactgtgtgccttgtaggatcccgtcacctaggacagagcgctagaaggacgtgccatagaagttgcaccagtaactggtggggtggttagccagacagaaacgccacctaggcacgatgtagcaagcagaccattttgagtcccatcaagccgtccacgccgagcagagtcatgatgaccaccctgctttaccgtgccaccgcagtaactacatcacaccaaccaggtaaaaccgagaccca

SEQ ID NO: 111631 - DNA, 272 bp, Zea Mays
gtagaagctagctaaagagagaggaacacagtcaatcaaccggctagtagtagtactcagcatgcatgcaaggctgtaataatgatagaatcacgtggccgggggattagttgcggccgcgggcagctttcaacaagctaggggccgggcgcgcgcgagattggggatatatgcatgatggccttatgattcgcgagcccccttcatcactgtttgcccatcttctctcactgtcctgtcttttgtctctcgcaactactgtaggaaggaat

SEQ ID NO: 111632 - DNA, 362 bp, Zea Mays
cctccggctttgggatttcctttgttcctttctaaccttcaggtgagctgacttttgccctgctttacttgttgacaaatagattcctttgctaattcttgtatttgcaaaatattctgagctctgtgtcggctcagttgaggtcttgtggtgtctctgttcccgatcaggttttgtccttgctgaagtggaatcctctcccgttttagaagcaaatagatgatctaaaagccttgaacatcgattagtgggttgatagctttcttcgctgcccattgcttcccttgttttaccccctgtgctatttcctttttgcctttccagctctgactcggcggtgctccgacgttgaggagaggttt

SEQ ID NO: 111633 - DNA, 823 bp, Zea Mays
tagccagattgtgttatttgaggactaaattttttattaatggttataaaagtttacaacactcacggattgggctcacttatcgtcatgtataagcctacttatttatttatttttcttctctgctgcccttatatatatcctttctccattctcttctttcctagatagttaaattaactttctttcacaaaaaataaatctacccgctaaccaagtacgtctctatctaccataataagcatatagaggtggaaaaagatgttgtgggcatgttgggcaatgtcttgttgatgcttagggggtgctcgcgactgccgctcctccaccaccacttcaccagcttcgccttctcaatttctcatgcatgttctagctagcctatggtgtctgaggttgcgatatgaaaggtcgatatagattcatcaccgtctgacacattattttttaatattagaatagatcgagataaaaagttgaaaatatgtactataatacatgtcatctaatgtgtgcatatgcaactggtaagcaaaaggttaccgactattccactacttacatgtatgttctagtaactccaaacatcaattgcattccgttatgtttgtagcatgcatattgcataactaatttgttcaaactgaggtgaaagttttttagcagccacattattagcaataactaagattatgtttggatcatctagagcaaatagagagcttttaagaaaagctatagctgatccaagcctgattgaatacccaaccatccaatgacccaacgaataaaaaagttattaccctggcttcctagttaatgc

SEQ ID NO: 111634 - DNA, 310 bp, Zea Mays
ttataatcacactaatcctctctgtcctcacctcttctctctgcaggtctatgaggtagtgtcgcacacatctccatcgcctcaagtcagctccccttacaaaaaaagtgaagtaagtgtgaatcatctaggcccctttggtgatgttttggtaattaatgataactgcttgtggactaacggttcttggagacataagaatgcagggttggaccacatagaacagcaaatgttggagaatcataagcattggttgtggatcagatggaagcaaaggtataatataagttttgtttttgccggtcttgag

SEQ ID NO: 111635 - DNA, 426 bp, Zea Mays
cacgaggcagttatctttgtgccttttctcatttggggattggccctgccagtttctcccttctttcgtggtcttctcgatttttattctctgaaccttactcatctgaatcccaaatatgtgcttcaaattgccatgtttgtacatctttgcgaagcttttcttggacttcttccacactttgcgctttggaaatacctttactattgtcggcccgagatggctggagggcagcatcagcttgttgtagtgctagcttggaacttcaccgaagcaggaaagctgagtatctcgatattccattgaaatacaacattaagggatggcgcttcgagtggtttactatggaaaatcataacaagtcacttcccgcttgatcagggagacaacccgatgtccgaacgcctagctggatagagattccca

SEQ ID NO: 111636 - DNA, 515 bp, Zea Mays
ctctttatcacattcatctccatttatcaagttactcatgaatgtttcaccaaatttggaattattcgatctcaagaacagccaaatttggagcctgttaaaacttttatttctcggagcaaatgcaaatttgaaagttaatctcgtctcacaactcccgtccagactcttttattcggactcttgacagttgtgatattatccgatctatgtctgaatccgctgtctcgacagtcggtttatgtccaaatacgtagtccgagtccgcattctctagcggaatctctaatgtgtcaacctctaaatatttcttatgcaaatcgacttgttatctcgatgctatcatccctctctagctatcaagtgtattctaaagaattctagaagtttaaagcaaatactcacatgaaaagataaatcctatacatgtccggaactgctcgtatgaacatatgcaaattttaaaattcaactaagccttgtgatcttgctcaaacaactctatatgaactcta

SEQ ID NO: 111637 - DNA, 428 bp, Zea Mays
gcgaattaaatactaagtagcgagacctcataagcaaccacacacactagcgttagctaactacatgtcatcgagtgcacaacattaacaccactaaaaagacgacaaacattttgtatatttacacaacacaattacgacctcataagtacgagcatttatttaatttgctactgcttttcactagtttttctatttatcacacaaaagcatcccaagcacaagttcaacagaggagggattcctatccacaaccaactactcaagcaagcacattactcatggaacgcatgttaacctaagtttagacattacaagtctatgtccgttaagtgctaactaagcatttttagccaataggtgaactaaacaatcaaatgcgcacttgcagatttttggacagcaatacagcagttacttgttttaat

SEQ ID NO: 111638 - DNA, 571 bp, Zea Mays
tagggtgaccactataccctacggacggagcaatcgacttaactcggcgacgacttaagacggtgcaacatgctcacgcttactcggcttagggtgatcactataccctactaacagagcaatcagcttaagtcggtgatgatttaagatggtgcaacatgctcgcgcttacttgacttagggtgaccactataccctactaacggagcaatcgacttaagtcggcgacgacttaagacgatgcaacatgctcacgcttactcggcttaaggtgaccactatacgctactgatggagcaatcagcttaagtaggtgatgacttaagacgatgcaacatgctcacgttgactcggcttaggggaaccactataccctactaacggagcaatcggtttaagtcgacgacgacttaagtcagcacgatacgatcacacctacttatcttaaggcgaccactatgccttaccagccaagcgattggcaaaagtcaggaaaagttccaaaaccagcacgccacatttactttcacaattgttcaggattactgttataccctgacaacaaaaaaat

SEQ ID NO: 111639 - DNA, 477 bp, Zea Mays
aaatgaccttaaaccatttcttattttttggtacttgatgaccatcacaaccattcggacagactagtttgcctagtctttgattcacaggttcataagattcaacagtttagtttctaagtcagaatcagctcagattcaaccaaataggggtaaaacatgagatagatgaactaccaatagttctactctttggataagttcaaaatacaccgaggaacgtattcaacacttctagaaaggttggaaagctcaaaatcacatatcgctattttggagctagtttgagcaaaagaagaaatatgattaaaagaatcaaaatgttcatgatccatgacttagactagatggaaaaccacttgagatatttttctatgtcataggatctctctcaagtttagccaaagtaacttggagaagattgttcaaagatcaacgggaagtcagaaactcaagctctgaaattgcctagcacag

SEQ ID NO: 111640 - DNA, 376 bp, Zea Mays
tggggtggccattttgattgttcgccggaggctcgccgccgtgaggcacacgactgtcatcgctggtgggggtcggagtggtggtgattagtgccgaccgtagattctcagacagatggttctgatgagatctaggaatacccccttcgcgtgattgaatcctatctatctgatccgatcggacgctgggcgatcatgctagcgtggggggtctcatgagccatccatctgtgattgtgtggccgatgtgggataccggttcacaatatctaggacctaatcgtggccgtctgttgatgatccaacgacctagctagccctgtaccctttcggccgagagaatatgttagaaagccccagtccattgacataatta

SEQ ID NO: 111641 - DNA, 457 bp, Zea Mays
taacagacgagtgatcgatggcgacgtcggcgttttagaggtaacagccgagtgataacgggccacgccggccgctttggaaacaatggtcgggtgaagtctggtaacgtcagcgtttttagaaataaccgctgagttaaaatgggccgcgtcgaccattttggaaataacggccgagtgatgatgtggcacgcctgcattttagaaataacggccgggtgatgacatggcatgccaacgttttggaagtggcgcctggcccgggaaaaccccatatgtactgcactgtcgcacgcctccgcgtttcgtgccctagtttctgcttttctgcatccaggctttctctgctctcctgcaatattgctttcgctccgcccgctagcaagtttgagatggcgcccaagcggaaagcttcgagttcgtccgtcgcaatcattccccccattgatcccaacag

SEQ ID NO: 111642 - DNA, 1065 bp, Zea Mays
actttcctgcaagcttttcatttttgtcgaacactttcttcctgagtgcttccagtatcattccattggctctttctacctggccattggctcttggatgcgctactgatgcatacttgatctggatactccattgttcgcagaaatcgaagaattcagagttgtagaagttggatctcaggtcagttatgatgctatttggtatcctaaacctgaatattatgtcttgtatgaactccactgccttggctgaggttaaataggcaataggcttgtactctatccatttggtgaacttgtcgatggcaaccaacacgtgagtatagcctccctgagctttcttgaagggttcgatcatgtccagccccgagcatgcaaatggtcatgttatagggatggtctgcaactgctatgcaagtaagtgttgttgctttgacaagaattggcaagattcacacctctggactaactcggcgacatcattcttcgctatgggccaatagaaaccagatctgaaaattttcccgaccagagttttggatactgcgtgtactctgcactgtccggcgtggatttcatccagtagctgcttcccagtagttgaggaaatgcacttcatgaggactccggtcgcaccccttctgtacagtgtgccccctatgatggtgtagtgggccgactgtcttgcgatgcgttctgccacaaccttattatttggttcttcttcattctttatgtacctgataataggctctctctctctagtcattggggtccgactttggttggctcaaggtgttgcattcttttgtctgatccaagagaatactcgggcgtgacacttcttggacgaagataccgggtgggacctgggcccgactggatcccagcttcgacaatgcgtctgctgctgcgttgcggtctctttccatgtggtggaattccaacccttcaaatttgtcttctaattttcggacggctgtacagtacttgcccagaggattagtcgagcaatcccagtctttatttatctggcttatgaccactagtgaatctccgtatacc

SEQ ID NO: 111643 - DNA, 288 bp, Zea Mays
acttgagattcagatctgatttgctgggccatcacttactccactttgaaggcaaagatagtggactagtggttgggcaatgagatatgtactacagtactagctgctgaattgggctgagacatagtgcaatcatcctgggttctgcttttatggcctagctgctcatatctgtttcagtgtcctgtttgaagtggttcagagataagccggttaggttcactcaaaagcaattatttctaaatgattcaggccctaccttcttttttgctaacacctatttgatta

SEQ ID NO: 111644 - DNA, 659 bp, Zea Mays
ataacatgacctaatcgtgatgattcttaagggagggtggatggtgggttgaattgtatacgtacaacgaccagagcaaacaaatcggtcataaagattcactcgactagttggaagaggctcgaaacatagcgttgttgcattccatcaggtatcagaagtcactgcggctctaccatgcacgacaaatccgatcacgaggcttccaagttggtgacatggtgcttcggctatgacaagacaatcgagggcttcacaagctcagccctccatgggaaggaccattcatcatcactgaggtgttgaagccaggaacttacaagttgtccaacagccaaggcgaaatctacctttaccgcccacgacgatgatcagggcacgaatacggggcactgttccccactccgaccaccgtttcaaccacccagagcgtggctagatgtaacgtctaatcccggcctcaacctcagaagaaatcttcgccttgctcgagtccggcctcggccaagcgccctagcaagggagcatgcacattaaataccagctactctcccacaaacctcgtagaagaccatgccaagcactgtttcaaccactccgactcaatgcacttggaaaatgtctcatccgcaccctgtataggctagggctcggacgtc

SEQ ID NO: 111645 - DNA, 676 bp, Zea Mays
aaaaaacctttcctgcccgagccaagcctaggcttccatttcatccacacgctctgtgctctctgctctctctaggtgcaccaggtgattaccacttccctcccatcaccatctgtgatcgccggcggctggctccggtgaggtgctcctgcccaagctcgacctccctcttcttccctcgatgagcagcctccctttgtcccctctctctatttctctattgtgcataatactcccaccttttgagctccaatccaaatcttgtgaatcaagtgcatgtgtgtgtgccgagtgctctagtgttgctcccctgcagattctgagctccctagggagggtttcgcatcccaaactaccgtttcaccgatgttctaaactctcgcgcaccacgtgttcggtgaaatgctcaaaccagtcaaaatagctcaaatcgactccaactttttccagcacactctagctactgtcaatacctctcacgccaaatttcacgcctacccgatattccagtcacatgtttcacaaccaattcacctttttagtgatccttttttagccaagtgccaaaaatatttttcctctgtcaaacttcaaaccaagcacccactacactcattttcacaaatatatatctatccatgaagtatcggctcaattccaagtcatgtcatgcccc

SEQ ID NO: 111646 - DNA, 534 bp, Zea Mays
gcggttggggctagtggtgggtaattcatggtggccggaagatcagaggctctaaataccaaaattggtagtgtttctagtcctaccagggatctgccgaatggaatatgggtgaggggaggtgcaggccgagctacagcctggaggtggtgctggtgggtgccccttgggcgtcgtagtcgtagggaacgacgcataggaatgtggattctagctcctgtgagaaagttggcagaagatatcttttattgcttgccttctcttgattacaaagtcctaattatataggcctaaggccaatcgattacttcacaatactaggagacttatccaactaaactactacataatattaggatataaactgcaccaaccgactagtccacaatactaggagacttatctaactaaactactccataatattaggagataaactgctatgacttatccaactaatctgattacttatctcctgatcttctgtgcctactctagtgggtctggtcgccttttggtagaccagcccggtca

SEQ ID NO: 111647 - DNA, 526 bp, Zea Mays
gatcaggtaatgggggattccggcgatggcgctccgccgtgggggccctggtcttccctcaagccgtggtctgggggtaggagacgttgtagccaccgttacctgttagatgtgcggctcagattggaaaccagttatcgattcggacacgttcgcctgagacattcgattagtgatccgagggtagggatcggatctgggcattgtaaaaccctagccgttgatctgtcaacatatgcccaggatcagaggggaaatacatcgtttcatttaattaaatcagcatcgttgattcccaatccaacgcatagcatcgcataccgatttgggtgtgggcttgatataatcagaaccctcggttgtcgatcggacggctctgaacgaaggataccccttcaaccctgtaaaactgcaaaagagaccctatgctattttagattcaacccgacgtccatttgtggggcgctctgtgtcttagagatttttaccttgagacccctgagttcctctagttttctgcgcctag

SEQ ID NO: 111648 - DNA, 411 bp, Zea Mays
agtttccttcggcatttcccattcattcgcaagaggccatactttaaaagcaatatgttcttgaactaaatccctggtactggtgtaagtacatacggggttgaaagccattagacacgcttgcccttcattcccaattgcgattgatggtcttctaatgccaaaacacgaccatatgggacattgaatgatgcccctcacatcctccctctgattcagatcattctttacgtaaaaccattgcttcatccaagagcccaaccacttcttctgaaatgttggcacgggatagtttgcctcagagcagggcacgaagctatagcagccgaagttgttagatattgttcttttccggttgcctttgtctgataggataactcgtgaatattgcagaagcacctaacatccggc

SEQ ID NO: 111649 - DNA, 488 bp, Zea Mays
tgaagcatcaggtaaattttcataccgtgttggtaagaaaacaacaactcttttctaagcacaaatgttaccttttagcctggtcctttactccttttactattttttatttgtagtctgctcattcctactttgtgttgtatcacctaggaacttctgtctcgttcatgctagtcttgtttcagatctaaatgtagacggtgagtaggtaaatttatcatgtataattgcaatttggcttgtaggaaaaaagttttaaaataaaagaactctgttaattactttcatgtagttaacagcatgttacatttgtgtagaaaactaagcctactgctacacaacatattgttcgaggacttgggttagtacctgatgttttagcatgttgcagcactgaggtacactatatagtcaccttcctcaagttccagtccttcgaagcctccattttgttgtttgtcggtgctgaaaactgaatctccgacgca

SEQ ID NO: 111650 - DNA, 437 bp, Zea Mays
ggctgctgctgggtctagccaaggttgcttaaattattttaagtatacgttcaaatacaggaaccaatttgatgagccaaacgatgactagctagattgtattgaggaaactagtgatgaattgcttggtgcttactcaagagctgatgatgatgctatgacagcagcctttgggggccgaggcaaaaagaggctgaatagagttttttatttcatcgggtttgtatacctagattactgttatccttcacgaaagcaaggaaagaagagagactgttacttcggcgatttccaacatgccgaagtcgaaaaaagttaaggttttaacacattgccccaagcgcgctgaaacggccgaaatgccgaagcctgttgaggagtcttcttccgcatctgagcccagtcgctccgctcctctcgaagctagagaagaacca

SEQ ID NO: 111651 - DNA, 325 bp, Zea Mays
tagcttggaccttttctttggtacttcttggactcacagttcagaattaaatctaaagaattatggtagaaattgtcatgccacagactacacagttacagaaattgtcaaaaggaaggcatcaggtgaaggtcgaggtcagggattttattaggaaggttatgtaaaagactcacacgtgcccttctatgggaccaaaaagtaatatgacaaagttactaaaaatgtaacaaaggcaaacaaaatgagcatctgccagtgtcttcttgaaaatttctggagaatgtattatataacttatacaaaatattttgttaatatcttt

SEQ ID NO: 111652 - DNA, 360 bp, Zea Mays
aattaacctatcataattaggtgcatgtgcattacaatggcttctgcataataaaaggatatacaccttgttaaatagagagtgagataggtagtctgctaggatagcgagtgagatagatagtctgctagagatagcctctctcaaatttcaaggaccaaagtacctatttcaatttttcaagtcagactggaacccaacctcatggttcattctcaaaacttgaccacagttcatttttaggaaaaagaacataacctcttgaattaacgtgacatcaatgcaagggtcatccaatctgtccaacgtttttgtccagttcattcgcatcatgagcagccttgagtacttaaactgaat

SEQ ID NO: 111653 - DNA, 299 bp, Zea Mays
tcgttacgttgccgggagacgtcaaaaaccgaccgctcgatgtcattcgatgacgatctaacgaccgttaaaaaagagttgatgtggacgcacatggtgccaactttgcgcacaactttaatatatagaaattggacccagattggactcaaagtgctccagcttttaggaccaggtcctggagggcccaaaccctagcgaaacaccatatatgcccttcagcaaccattgtaaacactacactttgaacataaggcctagctccttgaaaaacaaggacattccaatgcttccaaagc

SEQ ID NO: 111654 - DNA, 540 bp, Zea Mays
aaaccattgcttcatccaagagcccagccatttcttccgaaatgtaggcacagggtaatttgcctcatagcggggcatgaagctgtaatagccgaagttgttatggtattgttcttttccagttgccgtttggtaagataactcatgagtccggctccagtccctgactcctcatggcccatataaaaacccccactttgataagagctttgggggtaagttgatgaaggaatatctcgaatgtcttcaaaaccttaaccaacatcttgtggagcggaaagtgaagcccagctttcatgaatttcttgaagaccactacctcatcaacttcgggaaggggaacggtgctttctcccccagccctcactatggaaacatcaggaaaatatttgcctttcatcgcttcaatgtgcccctgtttgatagttgacttcccaaaaacaacatggctcggcctccacgaccgatctttgacatcttcattcccactctccatgtcaaaactgtcgctatcactggagtcaacagacaacccatcta

SEQ ID NO: 111655 - DNA, 441 bp, Zea Mays
tcttaattgaagaagtggtaccaacgagatgtcatttactatcaaaattttatctgatgcatatgttgtagtagagctctcaacaattgattcctctcatgttcttgtatcaaggtaggcaaagaaaacctaaacaataaattcctaacttctgagcctttccattattcttgctaaacgttggtctcacttcagaacaattggaaaagcatcattcgagataaggttgtattttgcagccccaaatatacatgttgtttctgatatataaaaacatgcgtttgattctcatggagatggcgacatcaactagcaaatcccaacctctgctcttgaatagagcatgtatgtggtcagtgacaaaagaaaaaataactttacttgtgaccttttgctatgttggttttgatcttttgccctagccttcattttaaactatac

SEQ ID NO: 111656 - DNA, 598 bp, Zea Mays
attctgcctcgagcagcatttgtcctgctgccttttgattggtcgtggtatatatgccctcgagattcggatcgtctttgatgcagcttggtctcactcggtatggggtcgggcacttttgctcctttataaattttggcaagcgcccgctcgcagtcaccgcagagtaaactgccttctggttcttttctcaaatggattcttccgctaggtcggttcatggatcatgggttgggaggatgacacgtcatgctagtgaagggccatggtaaagccttgtcttgcttgagttcctcattcccttcttcacaggcgagtttgacacttcccttcttctacatagggcgcccctagcccctttgacagagaggcatctccttccattgagtcattgtggtcgggccctctatccccctccctctcccttaggagtctcaggagagctacgatgttttccatgtggtgtaggaggctgttgaggctaaggccgagttgcttcgtgcttagctcatcgagtctgacggtcacgtaatcggagaggcatatctcccttgctcacttcctagatttctcaccccttctcttaccttggtcgttt

SEQ ID NO: 111657 - DNA, 412 bp, Zea Mays
ctctggttcactgtcactgtcattttaattgggactgatttctagggtagcgtgacaccggtacgggggatcgctcaactccggcgagagtgtcgtcgtggttggggcctcgttcacgttgggtcctaggcagggtggggaagataaccgcggatcgttggatgatctttggacggtcaagatcagatctcgacataccggtttgcagagtggcctggtgacgtccgatctcctgggaagggctcagattagaagtcgaatacccctttcgcccacattcgatctaaaccgtagatctacagatggatggacctagtcgcggtttgccatgcccttgattcaggccaggggatcacgatccaacggcaggaagcgcatacccattcataaccctcaccatgtaatcgtggct

SEQ ID NO: 111658 - DNA, 469 bp, Zea Mays
caaactggcctggtaactgttattgtaagagaactccgcatagggtaaactcttatcccaactgccaccatgtttaagagcacaagctcttaacatatcttctagtacttggttggttctctcggtttgcccatcagtttgaggatggttggtcgagctgaaattcagtttcctatccaagaactcatgcaacttctgccaaaaccgagaagtgactgggatcctcggtctaacacgatcttcttaggcactccatgtagacaaactattcgtgccatgtacaactctgctagtctggcacccgaatatgtggtcttcactgggataaattgggccaccttagttagtctgtacataatcacccaaatagagtcatacccagtagatgtgcggggtagacctacaatgaagtccataccagtttcttcccacttccattcatgaatcttaagtgggtgcagcaaactaa

SEQ ID NO: 111659 - DNA, 475 bp, Zea Mays
tgggaagcaaaataattttcttatcatgctgtatgagagaataccgatttgagataccatgatgcatacaatctgtatcaaattgccatggtctacctagcagaatattacaggcatccataggcacaacgtcatagtcaacaacatcacgatatgaaccaatagcaaaattaattcttaccagcttggttaccttgaccttaccactattgttatgccattgaatgtgatatggatgctggtctggtttggacgtaagtacaagcttcccaccatgtcgcgctagccaagttgttgcaactacctccatcaatgatcaaacgacatgaacgctccttaatggcacactttgcttgaaacaacgtatgttgctaattctgctccaccttctcaatttgtgcactaagcacacgatgcacaatgaggctctcataatgctctacatcatctccaccaatatgttctttgggtggtt

SEQ ID NO: 111660 - DNA, 297 bp, Zea Mays
cggggacatcttcaaactggcctggtagctattattgtaggagaactccgcatacggtaaactcttatcccaactaccaccatgtttaagagcacaagctcttaacatatcctctagtacttggttggtcctctcggtccgcccatcagtttgaggatggtaggccgaactaaaattcattcttgtatccaaggactcgtgcaacttcttccaataccgagaagtaaactgtgatccccggtctgacacaatcttctttggtacaccatgtaagcatacaatctgttccatgtacaa

SEQ ID NO: 111661 - DNA, 573 bp, Zea Mays
atctgaaccaaaaaagataaagcttagtaatatgtggcttagtaataacaagttcttagtgcataatatggtgtgtgcgacaaccatgtgggagttatgtaaactgagaaatgttatatgcttccagaatacagggtggagaaatctgaacctgctgctctggaaggttgcgataacagtggagaattggaagattctgtgtccagctggaaatcacatgaacctggaaaacatggtgaggagcttgaagaactctgcaaaggcaccttgcaggctgctgtggagctgatagtctgttcgtgaatcaatctgggggagtctgaagctccaagtagctaaaagttctctagttctttcttccggttcagatacgggtaatgagtgttcaatggaaggttgggctgggtgaaatgaatctgaatgtaataagtgagtggtggtaaacggttgtaactgatgtttttaacgatggatgggggtatcagacttttggtcttcatgcccaaggaattaatgcccttgaactaaaaaaagagaaagcttggatccaaaacagtagattatgcattcttg

SEQ ID NO: 111662 - DNA, 747 bp, Zea Mays
atggaataggatcaattccgattaaaaacaaaggagatatggattaaacaagtttctaggtattttattactaaatttatacctaaataatacttccaggggttcttttgctaattccagggaattaactgtgaaatactcatactgttgagggatggcgggttagttattaagtttcgcggggtttcttttgcaaataaggctcggtgaaggggtatccctaattcctaaccgttagatcccatcttgacgacccagattaaatcttggctttaactgaaccggtatgctcttatagccatcggattgaaggccaatgattatgatttaaattggacgcgattgatttcgagccaccagatcccgatccgagggccaagacatcaaaccggtttgatggagccccattctaatctcgcccatccatcaatgaatggacggcactcgactttcttcttcccctagctcacaagacggtggtgcctggttttcccccgtggcggacgccatggctggtgcacgtccacgggatccaatgccctaactcccctcccaaacgatgatacacagagcgcaggtgacctcgaactttagggaaggcacgttaccttcagcggtgaagcaggggattccgtcgacgagttcttgcggaccggagatagccactgcctccgacgaaccattgtcaacgccatggtcccccactgagcccaaatactctgtgcccaaacttcgctagatctagcg

SEQ ID NO: 111663 - DNA, 839 bp, Zea Mays
catttttagcaacagagttaaggtggatttccttaaaacccttgtcagtcttaaccccatttcctatcaagtcaacaaaacgacggagaacaaacccagacattacaacagtccacctaagagcaggcctagtcccctgaccagcaacctcagagaccatgtcagccatagctagaacaagtaaaagattaggggggaagatagtataagtagaagaaaatagcagaagtagcatagaagtaatatagatagtaatgacataggtaagttcatcattgctagtcgacaatggtatcaggatgtaagtaatgtcatcattgcaactgagcacatcacataaaggaacttagcacaaagaaagtgagttcaaaattgcaaatagttcatcattgctaatagacaatgttctcagccaacaacttagcacaatactaacgacaactatcccctatgtgaggccctattctgccacatttgttgagcccaattgtccctggtagcagaccaggcagcattgtccatgacaaggtcatggggagcttcttcatgaacttgatttgcagcccatgtttctttttgtggaatatgttcatcattcccatgacaaagaatccagttgtggaggatacacaggctagaactagctttacttgtgtcttgtatggatggaaaggtttgttgtataatattttgaatctgttcttcaaagcaccgaaggccctctctattgtcacccttagtgatgaatgtctatggttaaagagctcttttgggttctgtggattcctccccccatattcactcaagtggtaccgtgtggcacagtaagggggtaaaaa

SEQ ID NO: 111664 - DNA, 411 bp, Zea Mays
aaaacacaacctagtccagtgcccgaagcatcacaatacacatcaaatgatttggtgttgtcaggctgtgctagcatgggtgctgttgtcagatgccgcctcaaggtgtgaaaggaatcttcgcatttctgaccccaatcaaacttcactcctttcttcaacaattcagtcattggtttagcaatccgagagaaatccagaataaatcatcgatagtgtcctgccaatcccagaaaactccgaatctgccgaacggtggtaggaggcttccaatccatcacttcttgtactttctcagggtcaactgctatcccgtcctgccaaatggtgtgacccaagaacatgatctcccttagccagaaaccgcatttggagaatttcgcatataggtgatgatcccgcagtcgctga

SEQ ID NO: 111665 - DNA, 606 bp, Zea Mays
ttttgaccttccactggtcttgatgcagcaagccaagcactgcgtccaaatgggcagcatggtcatccaaggaagaactgtataccaggatgtcatcgaagaaaacaagagcaaacttccgtagcacaggtcgcagagtgttgttcattgcactttgaaaggtggccggtgcgcctgtcaagccaaaggccatcacacgaaattcatagtgtccactatgtgtttggaatgctgttttgaactcctcaccctccttaagtaatatttggtggaacccagcatggaggtccaagctagaaaaccaactagcaccttgaagctcatccaaaaattcatcaatgatgggaacgggatacttgcgcttactggtcatagcattaagatggcgaaaatctacacaaaagcaccaagagttgtccttcttccgcaccaataacactgggctggaaaaggggcatgtactatgttgaataatgcctgattggagcatattcgctacctgtgttttaatttcatctttaacagctggggcatatctgtatggccgaatgaatactagttgagctcctagaattaggggtattgtgtgatcgcaagaacggaagg

SEQ ID NO: 111666 - DNA, 409 bp, Zea Mays
aggtgacaggtccagtcaggggcctgaaaagcgacaaaggttggtaatccgacctttcaatcaaaaccgttcttcacctcgtccaccctcctaccccttcaaacagtctgtcttcatccgccctgctactgcccccacttcaacaagtcagccgagtgcccttggtgctcgtttccccaccctccctagttcctcaatgggctgcttcaattgtgggaagtctagacattttatcaaagactgcccatatccgaggcagaacaaatccaacaatcagcaaaactcagggagtttaaaccaaggcatgggaaacacgacaaataattcagcgggcaagaatataaagaagactaggcgaatatactacacacaagtggccactacaccagagggagagccggttatgatg

SEQ ID NO: 111667 - DNA, 519 bp, Zea Mays
aaacgaatgaactaataatacattacaacaaaatggaattgaactaacaacacatgacagagtcgaatcgagggtaaaatacacataaatggatccggaaaaatccgcatgttgtgagggcgttatgatggccaccgaaccttacactaaaacacagtggggtcgtacattattctatttagagaggctcgataggggaactacagcaggcaatcaaatatttcaagaataaccccaatctccaccaaaaaattgtagacatagaggtaaggccagtatttgggaacgggtcaaaatggatttattactggtaaaaagtcgcttattttacctgaactgtttcactggaagaagagtgggggatgtgtgcggcgcagacgcaggacaccggagagacgccgcctatggacggcaaagtcggcagatcctcccagcgcttttatagaggagaccagatggattctgaaggtgggagatccggccgccaaggtttagcgaacagacgaagggtttccgcgc

SEQ ID NO: 111668 - DNA, 356 bp, Zea Mays
taggttcttgactttcatgtgatgtgccacccgttactagatgaaaaggcacttgtccgcttggagtagtgaaaccaccaatatttttctgggccaaattaaattagtttcttatgggatccatcacttagtgacaaaaaatgggatgaaacaactttgtgtgcatgtggtatgttttgtagccctatgagcatgcaaatcaaactatgggaaagaggagagggtgttttgtttcatttactagtagaagatattaaaaagattcagatgttttgaatcacacttttttgttttaatacaagtgcaaaattgaagctaaataacacactagaatgaccatgacaacaagatctaat

SEQ ID NO: 111669 - DNA, 740 bp, Zea Mays
gtgccagagcaacagaatgctgctgagctcgaggagaagcagaacatgaagcggaaaattcttggatacaacgaaaggtaggaagaagaagaagaactgaacggagcgttcgccaggaagtgggaacggctggtgtcaaggaggaaggactgacgagcaccctgctggtcgcgttatctgggacggcccaaacagaggtggtggtgtacagtgcagcacagcggcactacttgggttgctggtgggttcttccgtggctatggaagggaggtgagctgatgccactgcgttcatggtttggtttggtaatggtttgccccaggaaagagccacctcagtatcgttccatgaacgtatttgcatcaggagttgtgcgacgtgagaacggtttgcatcaggagttggctcgtggtatgtggaactagtttgtttatgttgctatgcttgtacacaggaccgttttcactactacctcagatcaggtaatctcgtatccactagctcctcaaccgatgccttgcagtgcaaccctggacccggcgaccttgaacagttagttgactctcatgtttgctctgtcagatgtcaggatgcttatggcgcgcatgatctgagcacgagaattttcgtacaattttcttcttcagatgtaaagtctctccttcgctgccctgcttactcatattatttacgctgcacatgctcctggtgcctcctattaccatgtttatgctttcaac

SEQ ID NO: 111670 - DNA, 421 bp, Zea Mays
agctaattcataatgcttgaaatgacaggttgcatcaagattactgaattcaaactacagaacaaagggaaatgagctaccactacaagaaaagccatgagaagcatacaatagttccaagccgcggctcgaggatactgatgacaagctcggatccaatatgtaactgagcagcaatctctgccaaggcaatctgactgcgctcctgaagcttctcatttatctcttccgtcacggtgtcccagtaagattgtgacatgatctcgccatttatcagcattagagtgggatcatcggagacgaccttctgtgactgcctctcaacatggtaaaggtccacccccagggtatctgataagtcaactagagatgcacggcctctcttcttgatctccatcttaatctcatgcttcaaatggtc

SEQ ID NO: 111671 - DNA, 425 bp, Zea Mays
cataatctcattattaacctaagtccctgttgagcaagccagcaaggcggagcgaccaaccaagtccctaccgagcgagcatgtgaagcggagcaagcgactaagtccctgccaagcaagcctacaaggcagagctgctaagcaagtccctacgcctacgaggtggagctctgaacccagtggtgtgaacccacacccatcatgacaagacgcgtcatcagcatgctgcggttggacgtgcacacactgcatgaaacaagctcgggggaaacctcaacataggagtctcaatagtagcccacacatcggaaaagacaggacaacacaccataccgagagtatgtaccgcacacgatgggagatgacgtaggatgtgcagcgggcgaagccacgccgcgtacaaccgcaccatgggacaaactcac

SEQ ID NO: 111672 - DNA, 486 bp, Zea Mays
gctgtcttcctctttccgtcgtcctggtacccggcggaagcgtttttctcatcctcgacttcgtcgccgtcgtccgttcctttcttcggaccctactttctgttgtttcggttccttcattgcgtcatgtgtgttagctcatagtgtatgttgctcttgtagatctgctacgtacccaaagggcagacacaagcacatcctcccgctgtcctctcggtctcttctgcagctattcgaggtgagccactccttcctccattgctctcttttagatgttactttggtgtccatggatagattgtctgcatttttccaaattaggtgcacatcagtttcttatagctctgttttttttggggagaaacagggtgctgtcgtgtcgtggttcattttttcctacacgttttaccgctactttctcttctgcttgcatgcgtagatagttttttcacatttcgctgagcaagaactggacatgaggttcac

SEQ ID NO: 111673 - DNA, 1218 bp, Zea Mays
atgtttcttcatgattatttgtgccacttcttaccttgcaccctgaggacctattacattctttttactacatctcaacatacatgttagtcctagtgcttgtattgtcatctcaatcaccaagaccattcataatcatgcaatggttgcacgattcatacataaaatgatggccaagagggcaaaaacatggataagcaatttccatggcatcgactagctaactaatagcactagaatacataggaacatgataatggataggcttctggtcaccaagacaatatttctcttggctcttggtctacaaccgtaaaggtggtcacctagataggctcgctacatacaaaccaactattattctcataagtcattactagcctctctccttttcacatgatgtattctttacttgagcttgcgtcatcaaaataaggtatcttgcatcccctcacaagcttcttggtgtcgttctacaaaaatgaagaaggccaataatcttaaggggttcaagtcccatggtgctagtgcacaaatattattaattatattggattaatcatataaaaattttagttttctacctcagaacaaattggactcatgagagtggagttcaacggaatcccatggaattcaaagcaactacattaaataaattaaactactataacatctaacacggacaagtccatgaactaagcaaagatcacagtaagaggtgtctctagggccataatgtaagtcaagtccttagtccatgcatagtagcaatatttctttagggctcctttggaatgcaagaatttcataggaatgatttaggattcacaggaattagttcaaaaacacaggaaaacacaagattcaagaatttattctttgatcgataggaagcattagaatgtagacattaaattcatctagtatatcacactaacacaaaatcaagttgaagggatcatgatgcctaagagtgatctgaatttggcagttttaaaagtaatggcctctaaaaactactaattaaaacctatgcaagatagtatctacatatgtattatagttttgatatgtgttgataaatacaccaaggaatgattatcaatcttcttcaatattggtagataaattcttcatgacgacgagccaaagcacttggaaaaacttttgggacaactccttatgaaacatcatgcaactctactccatttgtag

SEQ ID NO: 111674 - DNA, 774 bp, Zea Mays
ctttcgagcagccctcactgcctgcatggtcagccgcaagcaatgcaagtatatcttcatctagttcactagaagatgagtactcaccatcaactttgaccaccaaaacacgcttgcttgggcagtcacgcatgacatgtccaaatcccttgcagcggtggcactgaacatctcttgtcctacctgtggatgccacagatgaaggggttctagcaggtttttgcgttgtctttgttgctaaatttgcagcgttgtcacgaggcttgtcgctagaaggtggggctgctgttcgagctgacgatgaataaggtgtagcagcacgtccagttgatggaatatttgagcggggctacatggaaaaattcctccttgcagaaatgttagtcctggtacttgcatgtcgtccctgcacttccctttcagctttgcaagcaagatggaacaaatgggttatgttagtgtactctttataagcaaggatgtcctgaatttcccgatttaacccacccaaaaatctagccatagcaggttccatatcctcctctaaattgcaatgtagcatgcccatttgcagctcttgatagtattcttctacacttttagtaccttgttttaactgttgcagttggtttaaaagatcacgtgcatagtaagatggaacaaatctagccctcatgatccgtttcaaagcatcccaagtttgtggcatgttatgaggatttttcttgccatgttctatccaccaaacagaagcaaaatcagtgaattcactag

SEQ ID NO: 111675 - DNA, 503 bp, Zea Mays
cgatccccgacggtgaaaggcgacagaccgagctccgacgagctcgtactggccggaatagagaacgactagggctctagcttggtgacacataatttaacccctaacaatcgtttccactcgatcaattgcaaggttctagcccccaaactctctgctcacggtgaccgcgcaatacgaggacaattcaaagtgttcccgtcgatctactccggttcagtgcaattgggttggtccgatgagcttcaagggcacacaggaatgctagaacaagagtgaggagaacatgatcggtcctgtggatcgctgaccgcgacgagctcacacacggtgttcttgaccgatttgggggaaatcccaaattggtgagctctggtggacgatttgaggcacgagttggtgtattgggtgcgtgactacctagcggggacaatggcacactcaatttgtagggcccgagggcggtggcctgtgaatttgagatggcgcggtggcggccgaag

SEQ ID NO: 111676 - DNA, 388 bp, Zea Mays
aaatatttctttgcttcagatgccatcgaggactcatgcacatgacagtgctggtacttaacgtggtcgggaagacacaaccaatccaccgtctgtaccgccaacgttggccgaggctatcgctacctcaggcaatgcgaccgccgacaacacccgctttttacgtgaaatgacgagaaatcaatttcagcaacaaggtggaagagcttatccgcagggaccccgtgaaacttcatacttgtatttctcagaaactcgtcccccacttttcgttaaagccgaagaccctctggaaggcgacgaatgggtacgggttattgagcagaaatttggactcatccgctgcactgaaacccagaagccgttgttcgcgactcaacaacaaaga

SEQ ID NO: 111677 - DNA, 275 bp, Zea Mays
tatttttctaatcacctcactatgccaaaggtcttgcaagctctcataatgaatgctaaatggttggggaggcaagacaatgaatgtagatgttggaggggtataaatagccacccaccaaaaactagtcgttattatttcggcacagtctgcgggcacactgaaatggtctggtgctccacaggtgtgccacaggaccttccaatgatgttagccaatagctagttctaacaactatccattacaacattggggttccagtgcgccagctacgc

SEQ ID NO: 111678 - DNA, 997 bp, Zea Mays
agagaaggttggcgtaggttttaagtgcaagtattgtacagaaacaaagagcggagggatggtacccgattgaaggagcatctcgcacatagagggaagaatgtcaagaaatgtctccctatttctctagacataaaggcatacttccaacatgacatagataagtcaaaggaaaaaacatgtctaggttcaggcaacaactgagggtagatgaggcagcacaaacccattttggttaatcaaatgacgatgagtatgaggatgaactttaggtggttttgcatcagtcacgtatggagcacagatttagtcagagggctggtgcaaggtatgacaggggtggtggatctggatcctccagccaaagggtatatcgagggccacttgataggatgatgggaaggagtagggaacaagtacctgagcgtgttaaagactacaatcttgctcaatcctctggaccaaagcaacagaggatagatactggtccctaaacaagtaagggaaggagctcgaaagagattcttggtagggcttgggcaaaggcttgtcatgccattggcatcccgggtcaaaaggtcgataacccatattttagggccgcaattatggagtcccaaaaacaaggtatattttcacccatgccacacaagattcttaccttgatgcacctcattcacagtgagagacaataagcggtcaacatcgttcggtttcatttctcgtctaagatggaatctgtagctcaagtagctccagttcttctaactgtccacctggacaagacccaatctataacccttatgcatggcaatggaacctggacaagggaccaccaggcgaagtaccaccatcgatcatgaatggatatggaccccctccactgccatatttaaatttgtcacatatatatatccaccaggaccacaatatgggtatggacatgttccccctacaccagtatgttatttttacttcatcgataagtatgtatttg

SEQ ID NO: 111679 - DNA, 551 bp, Zea Mays
gcagatgtaggagacttttacaacgtggtggtgcaaaggttgggctactacctctttgaaaattaatagatctaggtttattatcaaggaaatgcttctgtatgagactttggatgtacttgcagttaaatgagaaatttgtcagtatgcttgattatctgtcatttcaaaatcatcggtgtatagcttttgagatgcttggtcaaaacctataaccttacttctcaaaaacgttctgtgtaaaagcttcatcttgtttctaacgtaataatatgatctctgatcacatggacttgttctccctcaaaagagaagtcttggcttgatagttggtacttaatatcatgacaaaagagaagtaatgttgctatattctgttgcatttcttctgaatattgaaatacattactaacaccatcgataattagtacaatttcaccatgggttgtatgttcttccacaaaattggatatatgcatggttcgaaagatttgagcgtgtaggtatcacttggtacttctcatttttcctaaataacagtggaaaatttt

SEQ ID NO: 111680 - DNA, 778 bp, Zea Mays
tctctaaagagtgcagcttcgacctacgagtcaaaactttagctctttttagctttgacgaggtggaagaggtcgtagttgcgattttcctatttgctccttgtttccgagcgagaaagctgtaatcaggataaataaatccaatcacatcaaaaactatgttcagtctccttttgcctcgagcaccgaaagcagtgttcatggcttcgtcctctgccttcgtataagcccccaaaagctcatcactggtcgcctcaatggcttcaagccagtcatcatttggctcgtcaaactgacttctataatgataggtgtatttcaagtaaaccaggccacctttgttggagccagcagcggtctccttcaacatttctcaatcattaacaagaggccataccttaaaagcaatgtgctcctgaaccaaatctctagtgccaatgtaggtgcatactgtgttgaaagccatcaaactttcttgtgtttcatttccacccgcgatcgaaggcctcctgataccgaagcgtgatcgtatggggcgttggattatgcccttcacatgctctctcccactcagatcatttttgacataaaaccaatgcttcatccatgagcccgaccattttttcaaaatgttggcacatgacacttcacatcagatcgatacacgaagctataacattcaaagttgttatgatattgctctttcccaaccgccttcgtctagtaggacaattcgtgaatattgcagaagcagttggcgtctggctctagcccttag

SEQ ID NO: 111681 - DNA, 367 bp, Zea Mays
ccgaagcgtaagctcaaaacaaggagttgggtaaagaactggcagatgctcaggcacttttgaaggaaaactctagtcgattcaactagaaaaatgaagctttgaaagcaacacttaaggttgagactgagaaaaatacaaagcttagtgatgcgctgagggctctgaaggagaaatgcttcgagtttgcaagccaatgcaccgctcagttgagaagcattttcaattcagttggagctacatctaaggaaaccagcctcgctgctgaagatatacccggagcactcgaatgtattgaaaaggaggttgatgtccttgacgaagttataactggccatggagacttctgtgcgctggtagcttctcg

SEQ ID NO: 111682 - DNA, 458 bp, Zea Mays
cgagattcaaggttggccagcaaagagtttgggatacttggtttttagatcattctctcgctcctaggtggcttcctccttagaatgatggccccatttgactttgcacattctgatggtgttccttctagtgactttgtcgttgtctccagaatcttggttggcttctctatgtctgtcaggtcttcttaaacctccaggtcctcagttggtaattgttcctctggtactcgcaaacatttcttcaactgggatacgtggaacacatcgtgcaccgctgataggatttctagtagactgagcttgtaggccacttctccacgtcatgctagaatctgggttggcttctttatgtatgtcaagtcttcttagacttcatggtcctcggttggtaactattcctctggcactcacaaacatttattcaactaagatacatggaaaacattatgtacaac

SEQ ID NO: 111683 - DNA, 845 bp, Zea Mays
ttgcgctacccacttgagccggatcatctccggcaataccctcgggggctgggccgtggcttgcacttcccacccgagccgaatcatccccggcaacatcctcgggggctgggtaagtgtcaacaccatccttgaggaccaagttctctgcagtagccgcctctaaggctgaaggtccctcagttacttccatgagaacaagacgatccaagtcagtttcctgaccctcaagaccgcgctccaaggtcgatgaggcgcgggacgctgcccgggatgaccccaacccggcgtcgagcacatcagcacaaacatccgtcgcaccaccatccgctagctctgataacaaatcctctggaaccatatcttcaagagtctgatcaaagtttgccagggacaattcttgtagaccaatgagggcggacagaccaggagaaggaactccactactttccccactggcgacatattgccgactgttcttctgagtcaaagggacctcatcttcttcctccccatcgttttcatcagcaacacagacaacacccccattgggatcagcggcagatggagcaccccaattgggatcagcgatagatgaatcacacccattgggatcagcgtcagtaaattcaggcacaggcacttcctcagcagcgggaaccgaaggaccaccatcccgatccaaactagatactcgccgaagacgtctctttttctttttctgctcatcagcaggagaatcaagttgattggctcggcaagggcgtttcgggcgaacactgacaggtctctgaatatccaaggttgtaccagcttccgggagaggcgccaccaccaatgtccca

SEQ ID NO: 111684 - DNA, 544 bp, Zea Mays
atctcaacatcacttttgtttctagtggatgggagggatcgactacagattctagagtgctaagatcagctatgagaagagtttccacgttcattcaagaaaattctatctagttgatagagggtatgcaaatactccatcttttcttgctccataccgaggagttcggtaccacttgaaagaatttggggctggacatcgaagaccacagaacccaaaggagctcttcaaccatcgccacacactattgaggaatcatgtggaaagggctttgggagttcttaagaagcgcttctccattctaaaagttgtcacgttccacacattggaaaatcaagtaaagatacctatggctgctgccatcttccataatctaattcgatcacttcatggcgatgaggaatggttagatcatcagctagataatatcgatccatcaaactttgttgccctaccaagtggtgatcagatgaatgatcaaggcactacaaaaggcaatagtttaagagatatcattgcctaagaaatgcgaactcaatatcaa

SEQ ID NO: 111685 - DNA, 489 bp, Zea Mays
acacaacacaatccaattctactcattcaaccaaaacaaaaggtgagacaaggtttggaataagaaaagatataataaagtcaaggagtcaggtaagaaatagcaaggagttagaccagacatatttgttggtggccaagagtgaaataagataaccatgaactattaaagtgaggataaatgatacaaccaaggatatgaagtgagttggggagaaagcattatcaaggagtagagaggcaaaggtttaatacatcaaggtagatattgcgcaaggatggaaatacaatggcaagaaaacaatagtataagaagtcaagggttatatagcaatattagggattagaaaaccactataatataatatcgcccttaccgatctagtcaaaaatcttaatactaaagaataatcctatcaacctaaccaagaagtcaaataatagatccaggggatccataacaaaacttcttgaggagtagggataagac

SEQ ID NO: 111686 - DNA, 283 bp, Zea Mays
ctggtatgcaaaattatagcacccaaagtttttgtgcagatcatcggctctggccttcatctgatagtgaagttcgtgcactcggtagaacccttcggcattagcactttttccttggctttggagagcccatatgtaaacgctgagcctaacaatagcattcggggtcagctgatggagatatatctcaaatcttttcaaaacttcccctatatcgtacaaggggaaccaaagccctgccctgaagaagctcttaaacacaacaacctcatcttccttcggc

SEQ ID NO: 111687 - DNA, 789 bp, Zea Mays
cgttgccactgcatcaccgtatatctgtgtcatctcgcgtgtcgctagtttgtgagacatgagtttcttccatgttggactcgtcggttattttctgaaccgtgtggtaaggaaaagtcagaataaaatcacgagcatgtgtttctctatgaatagagattgtacccgaccggaatgtcccatgtggtttgatttgagatggcgtaaacgaacatggcctaaatctcctttgatctaccctaaccaaataaacactaagtgggggacttgtgcatggcagcgttggatgtggcctaaccctttcgtaggtgggttttttttagtacgtgctactaatctcttgtagtggtgtattttgtaacttatttttgttttaatgaaacaagcgttaacgagcatgaatcaccgcctaagcaaagctgcttgatggtatttccttgagcaccctggtcaaaacgcatcaaaacccggtcaaaagcgaacctgagactgattcttaacagctcaccgggaagagtcggtacactaatctactacgctgtgattcaataaacaaatcaggacaaaagacatgtacatttggatagatctccttagcactcaacgcaataatcaaatccaatcagcacctaccaaaaggaccgctagtataatagacagttgctccatggaccgataaaaaaaagtgatgaatcccggccgtgagaatgtatattttttcatacagtaacgccaatttccgtcatgatttagagagttcaaccacaaaattgttacccagaagcaatg

SEQ ID NO: 111688 - DNA, 280 bp, Zea Mays
gggaaacggcgcttagcggctattgatggggggagggcgaaccggccgccggtgaggttcgcggcggttctccgtcgttgctctggttcccgggcaatggggaggtgtgctagcacaaggagaggtgggtgttcatggggccagactcaatttggccggaggcaagctagggagggccagccacggtggggtggagggtcaccgtgatggtaatgccgctgacgaggtggtggtggttgattgggggcgtggagaggttcattgtggtcatgaggaagca

SEQ ID NO: 111689 - DNA, 426 bp, Zea Mays
gaggaaccggacgacaaaaatgcggccgagcgtattgccagacagtcggctcactacacactcattggggagacattatacagaaggggtgcatcaggcgtcctcatgaagtgcattctctcatctactgggaagcgacttctggaggaggtccatgccgggcaatgtggaatacacgcagcatctaagacactaatcgggaaggtcttcaggtcaggattctattggccaacaacgaagagtgatgcagccgaattagttcagaggtgcgaagcttgccagtacttgtcaaaacaacaacatttaccagcacagcaactgcagaccataccagtgacttggccctttgcgtgctggggactggatatgattggacctttcaagaaggcgcaaggaggatacactcatgtactggtagcaatcgtc

SEQ ID NO: 111690 - DNA, 513 bp, Zea Mays
ttgttccgtgatttggttgatcaccggcgagggcaccgccgtctgtgtagggcgcgccgccgggtgtgtcactcggttggggaagagggccagtgggccatcgatctagaaacgaggggccaggattgaatgtgagtactcttcgggtgagacgtaacccaggcggttggatggagatcgtgtggtcggagctacataccggatcagtgatcgatttagggccgtagatcgctgatcctgtgactctggtgcctaccggggctcggatctaatctgggccacagaaccggaatccaacggctgagaaccgataataccccttcggcccgtccaatttgcataagagccctcggagtttttagatacctacccgccgtcccccgcgggatacgcctgagtctgggaaatatttcgagattagcccctgcgtttctttgtttttgatgcccagtccagagaacaatggaaatagaaaattaattatagaaaatgatttttaatacaaaaataatt

SEQ ID NO: 111691 - DNA, 362 bp, Zea Mays
cggtcatattcattgttgctagaattctagcagaacaagcatgacaataagcttcgctgctgactctgcagatatccacctgcaatatagtgataaataatagaacatttgtgagatgtcgtggtgccctatcatgctttctttgctttccttcaaattcttcctatgatatggctaacaaaatgaaatggtagattcaggtgacttcacaaccttttgatgtttaggttagaacagtgtgatggtcaagttgtaaaaatggttgcaaaaatgctgaatacatgttgaagaaatggttgcacatatgattgattctggaagaaatgaaatcactagagagaagaaaataggcgctggaatgg

SEQ ID NO: 111692 - DNA, 871 bp, Zea Mays
ccggaaagctcggttgggttgctgaagaagcaaacatcatgttttgactctttgcttcctaacaaaacaaacgaacaccgatccaatcttcctagtttcttgtgtaaggtctcttgggtcaactgcactgaagtttgccaaagactttgcctgacttcctagctcttgacaaacaaaactaccatgctctagcatcagcacgtgcaccacacacattttttttgttgaaaaggaaatcttcctcgtatttcacatcattaaggaagtttattacttcgagtccaagttaattgacctcgctaagagaagattcaagcctttgctgggggttaaagacccactaatggagttcctaaagctgagcctggcaagagccaggaagcaagcagccatgtgacaagaggagaaaaaaaagaggagagattctaccattactttccatgacacgcaagcttgtagtaactgaatgacacattgacactgatgatggtgcatgacagtgtgagattggtgtggtacagaactacagacagtgacatgtccagtcctacggcaaaaaaaaaaaaaaaaacagacccggctggagtgttggactcgaactcctttgattaggtggagactggagacattatgactagatttgggcgttggttatctcactactaatttcatgcatgagtgcaagtgtcagcttgtcccataattaagacctggaagcttgttcaatttattatgctaaacaagttggctttttgtgaggtccatgctttcttcatctgattatgggaccctctgggcgtacagttttgcagtactgcctcttcactggccatcttaatcaaataatcaaaaggccaatatcaactgctat

SEQ ID NO: 111693 - DNA, 513 bp, Zea Mays
ctctccgatgatgaccaactctcggatgatgatcaactctgcgatgataactaacactccgatgaccaactctgacgaccaactctctaacaatcagctccagctgaccaattccccgtcgagcaacccggtgaggcagagatctaagtccagtgctactgatccacatcaactacgatgggacacgtcaccatcaagccacgtccggatatgcgcacaacacactgaatggtattagggtctctacaatgacccgtacatcgaaaggacggaacaacgtgccataccaagtgtgccctgcacacgttggcaggtgacaaagggcccatgacgacaggagaagccacgcccccgtacgactgcactttgagactgatctgtggaacccattacaaagacgtcagtgatggactcgctacaagagccagagcagcgggaaaggatgacgccatgccagaagtatgtctacgcacgaccctatgaaggacctatcacgccaactcggagagcaga

SEQ ID NO: 111694 - DNA, 2797 bp, Zea Mays
gtcgccgtgccggggatggaggagggcgccgccgcgtgctgcagtgtgtagtgctcttctagggtttcgtcttcatccaatagcccttcatcgagagcggcggctggctcctgatagtgttcacgtgtggtgtggaagctgaaaggcactgttggcaccggatgggctgggccggtgggccaaaatcatcggtcaaaaacaaaagtggccaaaatttcaaaaaacagtacagactgatcgtcccttagttaatcggtcgattaatcggacgatcagatttctacttaggtttgagtcagacagctttctccggctcgactgttgaccgcaatgtaagtcattccccctcttcgtctcttctatttttacctaggttttgtagatcttggtcaagaaccgcccggtgagagagagtgtgtgttctacgtctctgcatccgagttctactgtgacctgctcctgctctgcgccaatgcgctcgtcttcctcccacgcgttttgctcgaagcccatttccgtgttcttcctcaatccgagttccgcagcattgttttgtaggtcaccgtcactatgctcttcctcaaatttgtcgaagtgaactatcgagatcgtccaacgattcaagtgaattagatgctctttacactttctcatctaattcatgcatacactaggttctctcttatttattcgtataattctctagacattagcacaattcttcttaaatctccacggtgcagatcaattagaagcattccgcagccatagagcattagtatctcaatggatgatccaattgatcctagcacaggggaagtccacctcgcctcagacgagcatggacccaattatgctacaaatagagcggcaattccgaggagaaaagagtagaggatgatgatgagtacaagctgtttgatgaggatgagaccccaccaccgaaagtaaatttcagaaagaaaggtatcttctgcaaacacgagatgcatttattctatttttttagagaaaaatctagtcctctgctttattattggaatctactaacatgcccaccaacaagttcaggagtcttatggcttaacataaacccactactacttaaatagtttactaacacaagacagatcatcaaagtttttctccatgttgcattcttgctcaacctgctgactcaaacaccaatggagatgtactcattttatctgtatctctcgaagtagaccctccagcaggttccattccacctcctcggctcggacgcttgcgttcacttcagcctgggagtttgcctcgcattatcctctatagctgataggcatcgattcaacctgagagcaactccctccttgcataagcatggccatattcagcgtcctctccgctcttgctatgaccacacacacctccgactaagtcattccttgaaagcataaatagtttctcagattgcataatttaacaattaacatacgcaaatcaggtatacccgaagccctcatacctttttcttctgggttgtaggtaacctcagtattatcctttacaaactttgtttcgttataggcttatcgcaacattttctaagaacattattttgtctaggtcaaggctttaaatgggatcagataacatattgtgggaaacttgcggttggagagaaaggatctagttcaaagcccattatttctgacatatcctggaacacgtacaaaaaactgcaccctaatttgaccaggactgacaaagttctagcttgtacgggatcttttggtacctttttgttctattattcagaattatcggaggttgctcttgattctggtacgaaggggaaagaccttaaggaaggttgggacaagatactttgcgtattttacataaaaatgattttttaggctttacagtgactagaaagcttttgttgctgctgttgtatagattcaacgttcaaatgtctcagcaaagctatgcaagtgggctccccttaaattaggaagatggcttgctgtgggagctattatatctaatgaaagaggtagaatatatctcgctgactgcgttggcgctaaagatgaaatttatacatggactgaagtttttatggtaaataaatgttattttcatttaagttacatttatgttattttcgaaaacgaatgaattgaaatcttgcttgtctaagtgtattgtttttttgtagtttaatgtcggcaaaggaataaattcattgtcttggaactcgaaatgcaaatatctccttacaacatgcaatgatgttaacactgttgcgatattaaaacacttctcaaagccatcaaagatcacttgtaagattattattgttccatttacgaagaaacctcacccaacaactgctgatgtttttggagtattccatccgactcaaaagagtttttttatagtgacaaatcacggtgcagtttcggtaatacgaaatttattagatttttaggtttaatagagtttttacatcttttatttcataagtgattgtggtattatttttagatgtttatgtttgatgaaagatcaaaaaaataggcggtgggttcggaatggttaaacacaactaatcggtaagtctctctttaacttttagcatctagttacaccatcgttttaaacgtcgtaaggtgaggtgcggcgagcagccaccgcccagccacctaggtgacaccataccaatatattaatgtttaatgcagctaaaagttcagatgtaaatcattcatctaacaaatatggaatggccatgaagtgattgtaaaca

SEQ ID NO: 111695 - DNA, 311 bp, Zea Mays
cttcattctttggcactactatgcggtttttaaaccatatcacaccttgatcgtcttccttgaaacatttggctgttccagcccctatcttctctcgtaggtgcttcatacccagattatccttttgagcatcaattatcctttgcaaaatgattgactcaagctttagctgattcagagtcccttgttggattatccccaggtttaacttttccatctcttgacacaaagtgttgtcagaggtcttcaccataagacagtggcaggaagccttacggctcaatgcatctgccacaacattggctttgcct

SEQ ID NO: 111696 - DNA, 564 bp, Zea Mays
acaaaccctctctcaacccagtaccactccaccccacatcgaccgaacagtcccagcctgcctctccttctctcactgtcaagacgggtccgcaatccagtcaccaacaccagtgcacgaatcctgggctttctctgctccgtgggcccgcgttgtcagctgtttcctcaacccctctctcagtcggtcgtaaccaaagccaaggttggtgccgacccacgtggattgctaccaaagaaaatcccacctcatctggggtgtcgggttataaacgcgtgcacaaccccgtcgccctccctggacccagccacgccctaagcgaagtcgcgcgccatagccaagctaagcgtaaccaaggaaacagagttcctccaccgtggtggaatcacgggttcaccaccattcggggcctgggatttggcctgggagcttcagcccactccactgcatgtgtattgggcggaattgagctctgaggagtcaccgggtcacgggaattgctcgccagaattatctctcgatcgcagaactgcgtgtgcacgtgagcagcttccttcccatcat

SEQ ID NO: 111697 - DNA, 534 bp, Zea Mays
agcgccaccgccgttgcgttctataaattttagcctcctagagctccgctaggtaactgcgcgtccagtaaaccaactcttacctccaatcgttccccacaactccccaatttggaatttcccccaatttggtcaagaacaccgtgtgtttgggctcgtcgcggtcagcccgtcacaggtccgatcatgccctccttgctcttgttttagcatccttgtgtgatggtgatgcttctcgacccggtcaattaagttaagactccatagatcaccgggaacgcgctgggttggccgtagtgcttgcggtcaccgtgggcagggcgctgtagggctgtaatccagaaattgatttgggggaaacaattattaggtcttgaattcggtctcggtcaaagcaaggcgccagtaattgcgtgagtcggctggtatacgggctcgccggagctctgcgcgacgctgttcgccgtcgaggactccgggtggtaaagaattagaagtataggggtttttctacgaatgtcagtgagacgttga

SEQ ID NO: 111698 - DNA, 291 bp, Zea Mays
gaacaatatcataataattttggttgctacatcttcgtgcctcgcgctgatgtgagctatctagtcccaacattttggaagaggtggctaggagcctggatgcaagagtggttttatgtgaaaaataacttgattgaaagagaagatataaaggggatcattcaacgccctatctggtctcgcttcggcattaggaggccagccactgcccttggaaatgatattcaagcatgccagatggccttgaacaccgtatgcacttatattggcacaagggacctagtgtaggag

SEQ ID NO: 111699 - DNA, 319 bp, Zea Mays
gagagatattcccaaggtcagatcgacctggcccgggtttctgcttctttagacgacgcgaattccttgaattcctctcttaatgctcagcttgactctgaaagggcggttaatgaggtaagcttacttaattggatctgttgtgctttttctgatttctggatatttgagggttgattcttgtctgcaggaggagaaatgagcacttgcagcttctcgcgacaatctggataggttatatcgtgacgccagtaattctctaaccatcttggagaggagccaccgattcaccatggcagatctggatcatcatcgccat

SEQ ID NO: 111700 - DNA, 434 bp, Zea Mays
aaattatgtgctgatcgtgctacctgccgatgataatcttcattcattcaataactccctacgtgtacaatgaggtttgctaggaggtatagttgatggggcgcaaaacggattgctatgatctgtcacaacgaatttgtcatgagcatatcacaatctgtgttgtggaagggaaaaagtgtctgcatttaactggtgtgtctcataagagtattaaggcacttcttttttatgctatttgaattaacatgcttcattttagatacaacgttgtaaatgtggctgccaaaaaattatggtagcagcatacgctgcattttactaagattatgtaaattaattgtatggtttagacatataatcaaatatctctacaagaatctcgtagatcaaacataggatagttttctacacaggattcatgtggattggac

SEQ ID NO: 111701 - DNA, 566 bp, Zea Mays
gaataatccaggcggttctgccacagctggtatcggagcgaataccattacagagaaatcaataattcatgaatgccaacttttcaaaaaaattaaatttggcttagaaaccaatattggatcgtaaggaatagaacgctagacccagggcaaaaggccttaggaatagtggggaaaataggtggctatataagtaggccttataggccaaccttagaatagtatggatgccatagaagcacccctctgaacggtgagaagacgttcttttcggcatgcatgcatgcatcataaattagaagctaaggaaaatgcatctaagtatgaatgtaacaagcagggttaataatgaataacgaaatgagtagatgaatctaatttaacccaacttcttttaacaacctaggcacatgtttttcctttccactaccataacacttacatctaatcctctttcacagatgacttcacccacccccatcaatggaggagacactcgtttcagttttgactacctttctcacgagggttttccctccattttgtgggaggtgctctactccgcc

SEQ ID NO: 111702 - DNA, 567 bp, Zea Mays
ttttttcatacgattatggttaaactttaaagcatttggtttctcgaaatgcgaaaattgcattattttgtgggtggagagagtaataccattcctgtaaaccaaatttagatatgcatgatcaagtcaaattcacatgatgggcagaatttgaacgacaatatagatgtttagagtctggacacaaaaaacaaactgattcctttatgtatctagacaagcatcgtaaagaccaaacagatgcatagcatggtgctatgatgtttttttcatgttcagtttgtcatgtgacctaatatgggctaataagttcagttttcttgaggatagctaactgttttacagttttgcaacttcaacgttcaaccattttatttctgtcaggctgcattggacttgatggtcttaacttttccaggtatttgtgtaggcactagattactgattactgatagcgcaagaacaactcggtatgggagtgtaaaggttgggaggaggcatggacataggctggaaatgcctttggaattattgagagcttggggagacacgacctatgtggtgaag

SEQ ID NO: 111703 - DNA, 510 bp, Zea Mays
atgtttttatcttatatcaattttagggctttacatgcgagggcttcagaacccatcattcttatggatcgtctccgacctttttaggccttcacgtgctatgcgaagggtgcccctcgtaggtgagtccatccagctgtcttcgtcacctgagcgaagggggtagacatcgtcgcctttggggtccattgcttggccttcgcttcttcattggggtcgtggccctatacctgacacttcgatagtaggtaagtgtatcgagcgagagggatcgagcattctgtcttcgctccaacaacccccttctaattttatcaatcgaattgatcatccatttaggagcattcatagctaggagcaaataaaccgagatcacataaagtacaaacttcaccattaatgatctaccaacaaggttaatgagggatgccttccaattaggatgcttgtcgacaattttctcaatccaaggcatcgggtcactcctcttcaacttcttgttggatattg

SEQ ID NO: 111704 - DNA, 587 bp, Zea Mays
gccacatatatatatttagtcagccttcccagaactctagctttctctcgagcagaacaggtactcctttgcaatcacactcacgctcgttggacagtcacaccggtcatcgtttgccacctgcagtgctggtaagaacgttggaagagcgggataagacgcttcataatttgtattccaccaccaccaccctagagaatagttgtagggttcacattgtttgttgcctttttgtctctgttttgtgctaacaatgataggactaaagaatcaaatggacaaggacaaggggcttaagcttaacgacgatgagtgtgtctctcagctggaattgaaggagatgatgcgcgcgatgactgaagcttttaaaaaataccaggactctgcggcgacatcctatgagcagcttgatcgacaagttgctgaacttgttacacgcatggacgtactggaggctcgtcccccaccaccaactccagccccagctcactctcctgtggacgacgacgacgatgacgatgatgtttatgcaccgctgcgacaacgcctcgcacgtaatcgacaaggtatgggaggtaatggtagac

SEQ ID NO: 111705 - DNA, 737 bp, Zea Mays
ctgtttgaaggaagtgccttggaggtaggtgccgatggaatcttggggccattcaccgagttggagtaggttggtctgggtgccttcaactgagggcagttgttcttgaagtgactggggtctccgcagtgccaacaagcgtttgctggcggctggttgcttgcaacggagggtgcctgaagggagctctgactctgctgactatagtgtgatggagtgggtccatatggtttattgaagcttggtcccctgggtggaagcccaaagggtcgagctctctggtgacgttcttgctgttgagctcggaggacttggaatttcctcttgatgtgccctttttcttcctcttttgccctttccacctggatagctttgttggagaggtgagagaagttgtggaagtcttggctggcgaggatggttttaagctcgggtcttaatcctctcagaaaatgggccatttttctggcctcggtgctgacatcctcaggcgcgtagcgggccagttctgtgaacttgtgcacatactcactgactatccttccgccttgagttaactcccggaattcatcctccttgagttgaactatcccctggggtacgtggtgttcacggaaagctgcttcgaattctgcccaggtagcatctctgacggcttcactgaaagtgtcccaccatgctaaagccattcctgaaagctgatgagctgccagttgaacacgctgattttcgggaca

SEQ ID NO: 111706 - DNA, 730 bp, Zea Mays
caatggatgatgtattatagattggaaccttgttttgaaatccatctcctcaaatcttgcatacaattcattcaagtggggcatatacctgttttgcacatgccacaaacacaatcgatgtattgtgtttgggaatactctgcctagtgcgattggaatagcagggtcttgatctgaaatagataaatttacataacattatgcaagccaatatgatatcatatagtacgtgccttaataaatacgagccatttattacaacatacctgtcaacatcactcgtggtccgtcacatcccatgcatgttttgaacgtattgaagacccactcgaatgtatcaactgtctcgtctcctagtaaagcaaacccaaatattgtgcattgtaggtggtggttcgagccaacaaacatgcctagtggcttatcatacatattagtcttatgtgtagtatcaaaggtaactgcatcaccaaaatcaatgtactcggcttgctggctagcatgggaccaaaatatgcttaaaatcttcccttctttgtccagctgaaagtctgaaaaaattgtggattatctttcttgcataatgaaaaaaaagataatagcttcgacacatcatttgcatttctttccctttgccatgcttttttcctgtcagaaaaatgtaatgattatgcactatatctaactcaacacattacgattgtttctataatatataatacaattattg

SEQ ID NO: 111707 - DNA, 502 bp, Zea Mays
gaagaatgcaactccctatgtctgctagaggcagatcccattgaatggagagagttgatcattaggtacataaggaacgaagaggaaccagatgacaaggccacagcagagcgcattgcaagacagtcggcccactataccatcatagggggcctgctatacagaagaggtgcaggagggatcctcatgaagtgcatccactgggtagtgtggtgtccatgctgcatcaaggactctagtgggaaaagcttttagatccgggttttactggtcgactgcaaaaaatgatgctgccgagttagtctagaggtgcgaggcatgccaattcctatcaaaacaatagcacttacccgcgcaacagctgcaaactattcctgtgacctggccgtttgcatgttgggggtgggacatgatggggccctttaagaaagctcaaggaggttatacccacatattggttgccatcgacaaatttacgaagtggatagaattcaagccaatc

SEQ ID NO: 111708 - DNA, 291 bp, Zea Mays
cagctagcgtctgcttgtaacccgagcgggggcaataaagtggtgtggatgccaattgtggcgcttggacccgggcctggtactgcaatctgcggcccgcccgttccaagttggcagttgggttgtgaccgctttggcgaaggccatggcgtcccaacctctagagcggcgggcaatgcgtgaggctggtttcacagagcagcgaataccatccgcttccaatggtggaaggataacgagccactgcactccaggcccacctaggctcaagcactctttctggcataccac

SEQ ID NO: 111709 - DNA, 509 bp, Zea Mays
caatgagcagtgttcaatgacagtgttctcagctgctgctcatttttatgaaaacatttgtgtcatagttctcaggttgacaaacatttttatgcaagtatgttcaatgagcagtgtggtgttcaatgagtagtgtgctgaaataacacacctgctgaaagagcggtgtggagtttcctgctggctgccaaagagcagcaggggaaggagccccgtccgggttgacccgcccagggaatctggataacagggattatggcccctaggtgctcactcccctgggttatcctcccctagctgccaaaggagccctgactgtctggtggagcccgtgcgtcagccctctcttctcctccgcaacgaactgcgcggagttcgccaccatcatcaggatttttggcgacctcctccttttcccgaatcgagaccccaggaactaaattggaacccttgcgcccctttcctccactctactaacctcttgcgcggactcgaacacccgaaatcag

SEQ ID NO: 111710 - DNA, 277 bp, Zea Mays
cgtcaattaccctttctttgcttggcgctgcagccatttcttgctctacagccacatctttaaccacatttcatatgagcctatcagtatctgatgttgttgtttcggcttcatcagtgttttttacttcggcaacaacattagcttcggcactcgcagcggtcactattttagccgctgaggctaaaggcggtgttcactcgacggcttgcatcacgttaactattcgtcgtttcttttgcccttcaaccttctcctttgcagccgaaggttgttc

SEQ ID NO: 111711 - DNA, 338 bp, Zea Mays
aattgtccaattgtgatttttggctgaaggagattaaattcttgggtcagactatcctgagggtggaatagttgttgatctagataaggtgcaagaggtgatgaattggaagccgccaacaactgttcgtcagattcggagttttctagggttggtcgggtattatcggcgattcattcgagatttctcttgaattgctaatcccatggcagaattgtggaagaagggagcaaaatttgaatggggcaagaaatgtgaagatgccttccacactttgaggcaacatctgaccacagcacctgtgttagcgcagcctgacaacaacaagtcgtttgatg

SEQ ID NO: 111712 - DNA, 924 bp, Zea Mays
ataaactagatgctagggttctgtgtcaggtttattcgagagtaaacaaaaaatttatttaggcttttggtgccatggataagactgaaccactaattctatgtttccttgcgcaaaacaagaagtgggttgacattctgttcctcaacatttatgtagcggcagtagcgctcctacagggtagttctctgccttttttgttggcttgcatagaaatttccatatcctttagaaaccacaataggtggccaagttccatgtataaaatctagtgttgacagcgcaatatattcttaagtttttttttccattgctcctgcaagaaaacatgggttagtcctgttccgagcatacaaaaaactgtttcttatgcatgggataaatttggaaccagacataggaggctcactcccctttgcatgttttttgttcctacaatataatttagggggggctgattcagtttaattgcttctttgcctttgcccataagacattttcgcctttctgaagaaatgattcacagtagatacatacaactaagatcttcaatcttgggtcaatggtgtttctttaccctaatgaacatgttgaatgtcttattgctgtgtcctgggcttgcaagataccaagctgtttatggcctgtgttccctttctcattgattgactggaaagttcaatctatttagtttgtcaagtctaataacaagaaattcttatgttatccctctgttcatggatcgttgttatagagaaatagctgaaatgccttttcacttaatgaggccaactatttggatctatgtttatagttctcacttttttgatggaaagtggcatgcataataaaattgttgctatgtggtaacctggacatgtactttcaggtgtcaaggaaattcaatcatctctgcaatccttg

SEQ ID NO: 111713 - DNA, 280 bp, Zea Mays
ctgggagtcttgcacaagggagtaattaactgcaagaagctccatcgatactccaattgttcagcgacgttcgtcaccgcggcgggtccatcttgcaccatggaccggctccaccaggacacctatgccagtaagttccgtacccccgtaatcgttaggacccaagcatccttttgcaccatccgtttgagagttcgaagccttgggcgtggtgttggcctgcgctggccatggcgccgccgaggaaatatagttgggcggcacggccttgatgtcggag

SEQ ID NO: 111714 - DNA, 499 bp, Zea Mays
accaacactcttagatagagtgccaattattttagccccgacgcggtcacgaatacataccaaaattacttcatcaacctcgccgaagagcatagatcctagctgatagccgcaagatattccatattcttttagctcctccttatctgcctcggacaattcctgaccacccaggtgccgaaggtcaaaacctttttctcccaaataagtatcaacaacttttttccctttgtcaggcactgcggccatgttttcctctgcagtcacaactgtctcttccgcgaccatatctgatatatgagcttgtcaattcctgacattgtggtcgcaagttttgcagcttcggcttcggcacttgcagcagtcaccattttggacgctgaggctaaaggcggtgttcgctcaatggcttgcatcacgttgactattcttcgtttcttttgaccttcagccttctcctttgcagccgaaggttgatctttcttctgtaaaaattttg

SEQ ID NO: 111715 - DNA, 290 bp, Zea Mays
tgtgtccagcatggattttgattggctgatatcgcgttctgacctggtttatatcagctccagtcagctaggttagattgggttggcatagtctctgcttgtttgtgttttatcgaaccaattttttgaaagaggcagaagtaccttgtttttgtataaaaagcatacagaggtttgatacaaacgccgacacccatgctcgactagctcggttatccgtttatgatactgttggatcgtgcatatatataatcacgcaaaacattatttacgctataaactgtactagc

SEQ ID NO: 111716 - DNA, 341 bp, Zea Mays
cacgaccggatcaacgaaggcacgcagcttcatataaattatggttacatacatacagcgagggcatcacactttacattggctcaaccttcgggatgatacccatctccctgtagttgaacagcattatcctcagctcctcaccctcaaaaagatttcgcaactccccctcacctacactcgccctagccggcgaggacaacaattcctgtttgctagccccgtctacacgaagacgaccaccctccacctcactcaccctccgcttcgccagcactcacaccaggaagaacttcagcacctatcacacgcggagaagcttccgccgcaaccatatccag

SEQ ID NO: 111717 - DNA, 757 bp, Zea Mays
gggggaacctgctcgtcttgcctgcgacgaggtctagctgccatctgaaaacataaattttgtcgttgttacctcgattcagggttccaaacagagattttatatcatgagatgaaaaatgacataaacttatatcgatccaaatgaggataaacattcattcatcacatcgttcatacaagtttttctgggttacaacatattaggagatccaccctaaagcctacttcaaaagttggtaccaaaatctaagcttacgtggttttcccgttctcctagcatgtttaattccaacccgtctaaccctagttggtagaggcaatactggatgcaggtgtaggggcactccggagggggccgcgttcagactggaagctagctctatttccttgagatcctcctctccctcattagcgttcatgtcttgggggtgcatttctagatgaacgttggcctctgcaagctcttcctgcacatcatggagctagttttctaggatctcgatggtgttgtcccggatttccacttgctgctccaatgcttggaagtgattgctcatctattccacctgtagatctttctccaccaattccgaagacaggtcgactacgaagtcctccctatcatcgagtgtgatctttgcagcttgagagagtctggcaaggtgtgtcatggtgtcgctttgcatggcctgctggcggtacagtgcactcatgcactggacggtgattatcccaacctggtcgggatgcatggc

SEQ ID NO: 111718 - DNA, 335 bp, Zea Mays
cgcccggaccctaaggcgtggtaattaccaagtccgattcagacaaaggatgtcaaccacccaaaaccgacacaatgacaagacccaaccactgtgcgatcacgactaggtaaggtagcctgctccactccacccattcatgttatattcttttatcctctacaggaacatgacccctaagatccatgccaaaagacgacgaggagcatgctcgtcaggtccgagtaatcgtagttcgaaggttggcccgctagggctcgcggtcgctcctgaaatatcaaagtgagctgtgatcaagaagtggcacactagtggccaggaccctagagcatgaa

SEQ ID NO: 111719 - DNA, 761 bp, Zea Mays
tcgaaggattgagtaaatgagtcagatctctatagtcgatttgtggctggtttatagggctacaactattatatagatggattaagtagttactacatgaaattcaataatcatggcccctgaaattcctctgccagacactctaatggtgatcgccatggtacagtactgaaaaagatctccaggttcatcgctcctcgtcgccagtgacttagcgcccggattagcgccggccgctgtgattcgtgcccagtgcaagtagataactgagaggagtaaagatcttagcgctcggattgggtcgggctcgctcaccgttgagcccgccatacccacttggactgtggctggccggggtgatcctcaccagcattagccgcttaacgatcatgtgccacgcgtcttggaagcttagcacgtcgcaatgaatctgtgtagcaagcttgtccatcgcccgagaacttgccacggtgaaagccacgaattccttgcaccagtaacctcccctctccccggtcgcgatcgcttctcctccaaattgagcgccaccgccgttgagttctataaattgaagcctcaaagaactccgctaggtaattacgcattcaatgcaccagcacttgcctccaattcttcaccagagccacacaatttcccatttcccccaaatcagtcaaaataccgccgcgtgaacacctcgccgtggcgagccttttgtaggtcagttcaagcttccttaataggtgttctagccttcctca

SEQ ID NO: 111720 - DNA, 1152 bp, Zea Mays
cttctaattaggtagtaaacaccctagaggactttacttaaccatctcatgaggatcaagggaggagaaacttcacccccttatgcataagagcacaaaacaaagtgtcaaagaaaactaaccaaatcacttaaccacaagtggacccttaaacaaaggttgtggctaactaaatgcctaacaaaagttattaagggctaaacaccaaaagttgtggcaaaacgctaaataatgccacaagtgtgggaaaagaagagaaaaatcaggatttttattaattcaaaaacagccctataacaaagatcccacatgttcactaagctgcaaaactcatcccttagccctaattatgaaaaatgtgcctaattaccttagctacgccttggttaaatttgaaatcgatactccactgtttgacaagacaacacagtgattttctcttggatttgctcagtgagacaaaccccactttcctaccccagatcttctgaaccctgactccaactctcttgacccccacacaaatactctagcttaaggtgtaaggaacataccttatatagagattttgctaagatcgacactggttgaagctctatatgcaaaaaaaaattaggttcatgcttcggttgacatgcagagtacgcactagccatcgcggcacgcgccccgtgcgctgtcatcttggctgagtgtttcgctcagtgccagtgcctataaagggtagcctaggcctcaagggttgtcttcacatgcacccctgccaagttgcccgccggcgatcaccgaattcgctcgctttgtcacccgccttctccttccgagacacggttgatgtggccagacccaaccacacatcctttgccccggccgaagccattgacgcactccttgaggtccagtaaagctccctgaccacttctccccaccgcaggagctcgccaccactcattggagcccattttcctctggtgaacgtggccaacccaatatagcccatcgccaaccaattccttccacccaccacttcttcgtgaccttgtgaagctcctcggcccatcaatttgaacgctactgctaccgacaagccaaatcacttgctgtcaattagcccctctgcctgcgcgcatggaccagacgacctccggtgac

SEQ ID NO: 111721 - DNA, 567 bp, Zea Mays
tgataatgaagctcatgtgcccggcagaagccttcggcaaacggttctacccgctagcttcggagggcccagatgtagacgctaagcctaacgatggcgttaggagttagctgatgaagataaatcccaaacttccccaaaacatctgcaatcatctcattcaaaggaaatcttaatcctgctttaaagaagcttttaaaaactaccacctcatacttttccggcttcggagtaatttgctctccgccgaagcgaattagctcctttttggcctcactgaaatagcctaacttcatcaacttaggcatatcatcttcggtaacggtggacctcccaaactccaggtggctcggtttagatggcacgacactataatcatcttcagattcatcttcctcagcaccaaccttctcagcttcagcggcagatgcaccttcgtcaaaaacatcctccgacactatcagccccgactgtttcatcacttcggaaatcgaagcggtttcagcagtttcggcttcttctccgtcacgtgtaaccctagcagtggaacgtacccttgccatttgg

SEQ ID NO: 111722 - DNA, 336 bp, Zea Mays
atgggaatagaacgactatgatctcatccgctcactaatcaaacatatctctatacacttttaacgagcccaacacatattaattatgacagctaaatttagcgaacatgaattagtgtgcccaacattgatttagtttgttcttgtagtgattagttgttgccatttctttgttaatcaatacattccgctagcaacgcatattaagtgttgtcgcatcctatttaaacaacggatgttgctagcaacacataataagtgtttacacatcctagttaatgaacggatggtgctagcaacacatattaagcgttgcctccaccttaataacttaat

SEQ ID NO: 111723 - DNA, 1265 bp, Zea Mays
cgaggatgtttgcgttcggtggatccattttgttggtgtgtatggggacatgacacaaggtgggaaataccaagacgtgcaaaaaacggactcaatttttgatactcaccaccccaatccgtttgcacagccaagattttatgattaagtaatcgttcagcatgtacttgaaaatctcaaaaaaaatcaaagacctcactcttgtgtttgataagagaaatccaagtaaatttactataatcatcaatgaaactgacatagtaatcatatcaccctacagaagtaggtgctggacccgacacatcggaaaacaccaactctaaaggtgccttagagacactcacagacttaggaaaatgaagttgtttactcttggcttgctggcatgcatcacaaatatgaacaagctctttattggactcaataggtaaattattatcacgaataacacgacgcactgtaacggatgacggatgaccaagacgactatgccaccgatctgtggatgttttgacaacactggaaacatgcttgctactgttgtgctccaaggatgggatgggatatagtccgttcctacacatgccgtgtagaagagtttgcctcgtgtgacgatccttgacaagaaagaaatcagggtgaagttcaagaaaaacatcattatcagacgtgagacgatgaactgaagctaagtttcgagtagcttgaggaacatgcaagacattatttagagaaatgttatgataaggggtaataaccgtagattggcctatatgctttatcgtcatacctgctccattggccgcatgtacttgatcattaccattgtagtcttgccgcatggtcagtttgtcaagatcgccagtaatatgatctgtggctgcactgtcggcataccacgtcgtgtcaacattataggaggtgacagcagcagaagctgttttctcagggccattgaaattcttgtcaaaccgcttccagcaccgaagagcagtatgaccagttttaccacagacttgacattcatgatctctgtaaggattattgggattacctcctcgaccaagattgccacgtccagaaccattgcggcctccaggatatccacgaccagaatcaaaacgaccgcggccgtggccaccaccatgaccacgtgcaacagaattggccaccatctggaacgattccttgacatctttatgagactccagacgtgcctccgtagagagaaggcgcgcatacaaatcatccagactgattggagc

SEQ ID NO: 111724 - DNA, 439 bp, Zea Mays
gggaagggtcccacatatctatgtgtgagtgctaaaggttctacatatcgccctctcatcggaccgaccctccctttttacagatcaaggaggggaccgattacaaatatcttcactcagaaggaattgctacgctaggtaaagtggaatagttctccctcgataaaagttagttgatatttgtcctcgtatgactccatgtcttgttcctcttagtctgccggggtagtgtgttggtgatgggagtatgaacatcatcattactttctctatccatgtcttcccatgtcaaccctcagtcttcgtagtctgtccttgtagcttcctttcgtcgccttatacgcttcgtagggtgtcaggagtctcaggttgagggatcataggtcatgagtgggactcggaccttggacccataggtcatgagtgggaggcggaccga

SEQ ID NO: 111725 - DNA, 488 bp, Zea Mays
cgtttcggccctcggaggccgaagatgacaatcgatcagaatgacgaagcatgccaaaaggcttttagcaacgtctgtgccttcattggcacaagggatatagttcaagagcacatagcgtacaaaatatagccacttgtagaaaacagggatatgccgaaggatactactgccgagtcaactgaaggtgggttggtccgattgaagtataccttcagattcagagaccggtttgatgagccaaatgatgattggctaaaaagtattgaggctatcagtgatgagctacttggagcatatagcaaagccgaagatgatgccttgtccacagcgttcgggggctgggggaagaaaaggttaagcagagtatttgacgccatcggcttcgtataccctgattatcactacccactgcgaaggcaagggaagaaaagaaaagctatcgctttggccaccactgttgtaccgaagggcaagaagatgaaggt

SEQ ID NO: 111726 - DNA, 318 bp, Zea Mays
cccatcggccatcaccgagcctcactatcaaattgaacggggctacatggagctaatcaaacggtgaggaggatgaggtagctcataccgacgattgcaatgagatgaactccacccacggagcgcagcggagcccaaagcttcagcgagaaatcaccaggtgatgaggccggcgttgtccaaatcgatgccggtgaaggactccccacgccatggcgaccactcgcaagtaggtcgtgtacaccgaacgccagagggggcatggaatcgtggcggctacccattttctctctcttctctcggtcgctttcccgttca

SEQ ID NO: 111727 - DNA, 369 bp, Zea Mays
ggggactagacatgattggacccttcaagaaagctcagggaggctatactcacgtgttggtcgccattgataaattcaccaaatggatacaatacaaacccattgcttctctaacttcatccaaggcagtggaattcatacaagatataatattcaggcttgggataccgaatagcatcataaccgacctgggatccaatttcactagctctgaattctttgatttctgcgaacaacggagcatccagatcaaatatgcatcggtagcacatccaagagccaatggtcaggtggaaagggctaatggaatgatactggaagcactcaggaagaaagtcttcgacaagaatgaaaagttcgcagggaagt

SEQ ID NO: 111728 - DNA, 321 bp, Zea Mays
gtccaagcgggctccccttctcatacctccatggatgtccacgttgggtcttctcctccacattctaatggcatggtaacagcgcatgcttcaaatgaggaagtcgccttagaggtcagcgcaccggatgctagagttctgatgcctgctggtggtgctgagttgatccctggtgatgttcttcatattgccccggttgatatttcttcatcgagccaccacttggcttctcgtgatttgggatttcctttattcttctctaatcttcaggtaatttggcttttcctgttctggctatactctaggcaaattactgtcttt

SEQ ID NO: 111729 - DNA, 361 bp, Zea Mays
ggcactttgacgtggggtgcgtggctaccgccgacaatggcgccgccgtgggggaaacctctgcgccactgcgctcggattggctgggggaaggggataagtctttggccgtttgtctgattttgaacggctcggattgatgcattcgtacccgtgcgcgtcagccataggatctgaatccgtgggttaggaatggtccgggcctcataaaatttggggccgtcggatctcgatccaatggtgactgtcacgtaccagtttgtgatctaattccgaccgtcggattcagatcgcgcggctctgaataaacgataccccttcgccatagtctttttccttaagagcccctgctaatttaaca

SEQ ID NO: 111730 - DNA, 583 bp, Zea Mays
ccccccccccttcattatgaaatggagaattcagagttcttacagaactcagaaagattaagattttcatgtaaacctatagccaaacataccaaagacaaaaaaaacacccaacaacctacatatggagcactggggaaacatcccacgtagcactaggcagtctattacagctcaattttctgctatttgaagtaactcctttttcaaaaagctattgataacaagccaattatgaccagcaaaagaactactaaatccaccgtttcctcttgcatcattagccactaggtcttcaattcttcatcgaaggattcttctagatattggcgcccatcctttcgagcgatcaaaaacctcctttgccatccctttgattagctggcttccttcctccatcattcttctttccttccttttctgcaaaattgcccaggaatccaaccagtgacaagagaggaaaacaacatcagaagggtcaataatccgtttattgttgaaacatacatcatttctagtcttccagatccaccagagcacagatcctaatcctacaatcaaaaggttcctaattctcttatca

SEQ ID NO: 111731 - DNA, 2196 bp, Zea Mays
aaactttcatgtcgttaacctgattgatagctgaatactgttgactgtgggggagatggagaaagcttacaggggaagtaaaaggtaggtagcccgaggctgtgtgacgtttcctttagaaacctccattgctggctccccatcctcttcctgcttcatggtttcacctgctgccttctccttcctcgattgccgcagctgctatgggaataccatctttctacaaatgggtcgtcagcaagtacccaagcatcatctcccctgtgaaggacgaaccagaggagtgccctgatggcatcatctacgacaacctctacctcgacatgaattgcatcatccattgctgcttccacccacaggaccagctaacgcatgcagacatagatgtatccacacacctcaatccatgcgaatctggacggtataaatgtatgtgttgactgactgacacaccgttgcaggtgcgccctccgacgacggccaatgaggtgttcgagtccatgttcgagtacatggaccgcttgttccgcatcgtcaggccaacaagtctgctgtacttggcagtaggttcgtgcatagattgttacacatcaaactgaactgaattccgtgtttggtttgaggaacaaattctcacctctcactttttttatttggtttgtgaaatggaatgaaatgagttgatccatcatcatttcatttcttatatactaataattagtaactaataatatgaggaatgagtttattctattaccgcggtgtacattaacaaccagcaacaagtgttaaggatgatgtttgttaccttcagttatttgagcaacttagttacacatgcatgcacttccctatctgttccatctgcagacggcgttgctccttttgccaaaatgaaccgaatacgaaggggacgtttccactccgccatggaaagacttgctgtaatgacaaatatcagattctctcgtcaatgaaataattgcatatgatttttttctacattgacagtgtgatgtctgaaacagccgaaaaatgcgtccatgcttcgatttgcaggaggaaccaccgcgagagatttccgaagtttctgaccccaatgtcatcagcccaggtactgagttcatggagaaggtatcagaagccctcgagtactacatccgtgccagatttaacagtgacccctggtggagagacatcatggtttgctcctgtgctttactaaatgcaatttatgttcttctctctctctctcttcttaaagggaagttcatgttcatttcagcttcaaccattagacatacatgctgaatctaactgcagggtctataaagtattgacaaacattgacttgctgaatctaccaggtggatgttgctgacaagtttaacatatctgttctgaaggtaatactctctgatgcgagtgttcctggagaaggagagcacaagatcatgtctttcatccgtgcgcaatgcagcatggaaggctatgatcccaacactcgacactgcttgtttgggcatgtagggaacatatatatatatatattaatcggttttcttgatgatctcatcatttctaataatgttgtgtatcactgatccagttttcatcatgcctagctatctgtactggggattaactgtgaagaatcattgcaggatgcggatctgataatgcttgctttggcatctcacgaagtctacttctctattctgcgtgaggtctgttaatccctcgtcaatgttaatgtcatgcttaaacatattgcatcacatgcttgataatggtatgcaccgctcctctgtctatactactaacttggccaggatttgtgtaaagttttacctgtcagagtaactccagcactttataatggtatgcaccgctcctctgtttaacttcaacaggatgtgctctaccaaaatcaggaagaaacggaagggaatccgaagaaatcatttctggtcctgctcacctcccaactccagataatgccactcatttcctcattttgatacactaacagtgccatcttaatttccagtttttgaacatgtgggttctgagagagtacttggagattgaattcaagatactggacccagtctgcgagactgatattgagaggctaatagatgacttcatctttatttgtttccttatgggaaacgatttcatcccacatattcc

SEQ ID NO: 111732 - DNA, 883 bp, Zea Mays
ggaacacgagcttcccctgaatcttcaccttggacgagttgacaagcgggacaaggcattgcgtccactttgggggcagcttcccaatctacaaccacatcatagagaatgggacagagcaaattcgaacaaagaattcattcgcttgaacaatattcaagagtaaacgcgcatcataagatgatttgagtaaaacctctccggctcgtttggtggagaagcgaacaatctgtgctagagccagcgccttcttggcagtcatctttaacccgtcatagatcttctcttatgaaggaaaggcgaaatggacaatctccttggcatccaatctcctcctcgcacgattggtggatagcccgggcacataggacttgccgacgagcatccagtcgcactccacagtgaagttgacaaactcaccgttcggcggcgccaccaccatccttatgtgagtcactgggacagacgcaaccaccctgaggggccatggctgcaaccgatgctctcacatcttgacgtcgacgggcggcggtcatgtcgcctgttggtacatctcgatgaccatgggtgaccatgcaggtagggtggtccagtaagtcagcttagccctatcatatgaactcacagctcaattagtttccatcacggcaccaaatttttgatccacaaatattcctacccttgagacacgaaccaatctgggcttgcccctgaaactgtgacatctctagcagcaccaatctcctcataccaaattcacagcacaaaaaaatgggtgcggcaagattggatcagttcaaaaaaatcacagtcctagttaatgttactggaaaatctaaatgtattttatctggtagaaaatgtcctagaatgcagacatttg

SEQ ID NO: 111733 - DNA, 866 bp, Zea Mays
ctcaggctatcccgcaactaaacatacccataggactcctttggatcataacacaggcttcttaaaacatagcaataggaaaacacacagggttataatgtccatgtcattggaatcctacaggaatcataacacagggaagccacaaaacatatgttcagatcatgcgcaggaaaaacataggaatgataaggcagaaaggaaagaaaacatgaggttggacctcatgcatatctttctccaaaattgccacgggatataccattccatatgaaattttaaaggaattaacaggtttcaaatctcatgcttattctgttccaaaggctctcgtaggaaaacttttcatagggattgaatattctaaaaaattcctttgcttttcgtccattctaaaggaggccattagaatcctgtggaagagtttttgctgatctttatgcatatatatagttgggtagtcagtttttttttcttccagagattatatagctccagcttgatcccttggctatgttgtcccgcccatttttaagtggagggttcataccagtggcagtggcagtgcagagcgtgtttgaattacctaggacctggtctttgttggaacttaactactaacttaattcataattctcttatgatattattatcaaacattgaaatatgtaggatgcatgtaaccataggtatcctagcacctttttgtgtgtgtttgtttgtgtgtgtgtgtgtttttgtgtgttccataggtgatagttgaaagaagccggtgcgaggattttgcaatagccacacatcgacagtgctctagaacgtaactcagatttcggagagagcatcaagcgcactaaactgaatgtgta

SEQ ID NO: 111734 - DNA, 401 bp, Zea Mays
ggaaacacccattcttcatggtatatggattggaagcagtattgccagtggatttgatctttggagcacccaggctaacatttaaaagtatagctaaagcagaggcaaccagactggaagatgttgatatattagaagaacgtctaaacgttgtcattcaattggctagataccagcaaaccttgaggcactaccacgataaaagtatagctaaaccttgaggcatcgatccttcgcggtaggagacctattgctccgctgagagctgacaggagaagggcgacacaaattgtcacctccatgggaaggaccattcatcattgcagaggttacccagccaggatcctaccgacttacccaaatggacggaaccgaagtggggaattcgtggaatattgaac

SEQ ID NO: 111735 - DNA, 569 bp, Zea Mays
cgaaagtcttactcatcgcccacacgaatgtcggcaaggcgttttcagaccgtaaggcataacaacataacagtaaagcccgtccactgttacaaaagcggtatgcttcctatcttccctagacatatggatttgatggaaaccagagtaagcatgtaggaacaacaataggtcgcacccggaggtagaatccacgatttgatctatacatggaagtggatacgggtccttgggacaggccttgttcaggctggtgtagtcgatgcacatccgaagcttcccattcgctttggggacaatgactgggttggccagccacactgggtgatgaacctcttcaatgaagccagcgtctagcagcttccggacctccttttgaatgaagtcctgccgctcgacggactgtctgtgaggcttctgactcaccggcctggcgtcggggttgatcttcagatggtgctcgatcacctccctggggatcccaggcatctgcgacggctcccatgcgaacacgtcggcatttgcctggaggaaggcgacgagcgcgagttcctatttttcacccagat

SEQ ID NO: 111736 - DNA, 339 bp, Zea Mays
attatatgctcacagagtcacagtgtttaagcgtcatgaatagttgacaagaagacgatcggctttagttatgtttggagactaaccataacgtgagtgtagtgttgttcattgttcaatatgtctctttgcttgtgatgcataggcgtggagttcagagatggtgatcgacaatgatggtgaaggtccagcggattcatgctgtgaaaaatggacatcgaggactgcactgagggactgaagaagccgaagactgacgatggttgctgacacctggtgacattgacaagtgtagcagtacatagagaagtaaacgatcaagtcaaaaggacgattgat

SEQ ID NO: 111737 - DNA, 392 bp, Zea Mays
gcaccctgctactgaattgacgattttgtcgattctagggagggtgaagttgtctttgggtatgctctattgaggttggtgaaatctatatacacatactccatttgccattttttcttgaccatgaccacattagcgagctaggtggggtaatcgaccagctcgatgaatttggcttcaagtagtctatggattttggcttttgctgcttcagtcttttcatctgacattttatgaagcctatgctttttgggtcggatcgaggggtcgatgctttgcccatgttcgatgactgaacgactaattccaccgaggtctaaagccgaccagacgaagatgtctttgttgtgatttaggcaggatagcagtttagactcttcctcaattgtaag

SEQ ID NO: 111738 - DNA, 405 bp, Zea Mays
ctgggtcctgctcttccttgtcatcatctgtgtcacccttgatctcatcgtcagcaaagtctgtgacctccagatagaatagcctgggacagcggtggccgcgtacatagggctcgtcacaattgtaacatagcctttgtttatgttgttctgccatctcgacgggggtgaggcgcttgaacgggactggtgattgtgttggtggctgctggggtgtattcttggcggcattgtcgtcatgtgtgtgagcactggtggtcgactaaatggtttggggccctaccagtctgttgccgctgttgagcaccatcaatgacctgagagcgacgttcatatgcccttgctagtcgagaagcctgctgcagattctgtgggttcatcagctcgacatcgattttaatccgc

SEQ ID NO: 111739 - DNA, 455 bp, Zea Mays
gagcacgattgttattaccttgctggcagtgtggcataccttatgtgttttgatgaagacggcgacgtaggcgcaaatctctggtggccgcttcatcataattaccttcttcatcaaacatcgcatcatcgggaagacgtggacgaggaggtggtggtggcggtgcttgttgttgcgtctccaacacagcaagtctgtcgacgatctgggacaatcgtcgatctagcctctcgtaagtcttgccaaggttcatgccaatgaaggcatcatgcactgacttgtggaccatctcctccatttgctccttcaggagcttgttgtttgcctcgagatcttggcggctaacacattcatcgaagtcagtagggatccttgcttcttcgttgtcgcctgccatcgaaacacaaaaacaggaaacaaacgatgacggttatccctaataatttcactacacg

SEQ ID NO: 111740 - DNA, 651 bp, Zea Mays
cctgccgggctgatcgatctcgctttgttcgtttcccctgatcggcgacgtccatgccagccaagagcatcactcctttttctcctccggccggggtcttactgattctcgctttcattcgtccccatctagcaccgcatccaccagaccaccactagctacctagtatatgtagcagggaggccacagcttgcagctgcctgccgatactgctacttgaatcaacagttcagccgttagcatgcattcggcaaagttgacttgaactgctgctagcttgatgaacgagagatgtggtccgcgcgcgtacgtgccttgtgcgggtcgacatttgacgtgtttaatggacagcaagatgactggtgtgtggtttccacggagttccattgacacatgttcatcctcgtccgccatgagctcggtgctgccagagcccggagcctacaagtcactgaagatgatgtggtctccgttttaaatttctccgttcgccatccatctgatcacgcacgccatggccattttagtccctgctgctggagggcgttgcctgtaaaccgactacgacttgcaccatgaatcttcgctgtaatgctagtagacatgcctgtcaaccttttgcgctatggttcttcttcaattcgccaacca

SEQ ID NO: 111741 - DNA, 559 bp, Zea Mays
cacttctccatggacatcaccaaacatttctaaggtagcgatcttggtgtaatttgaaagtttgtaccatggatcaagtgcaacagccacaaagatgagaatattgaaacttgtatgatcaccccaatacttgttgtactttgctaacattctttttgccattttgttgcgcaaaggatcactgctttcacaccaagaccgcaataatatgttaagttcagcaacctcatgaaagaatatgtgagctgtagggtgaagagtggcagaaacacgaatgctcaacttgtggaagtgctcaagaaactcggccatcttcgctgcactagcccaatcatcagaatctggcactccaggctgtttttcaccatttaaatcaattgcatagtatggatcatcttctgcatacctctcaaacaccttctcatatgctactgctaccttgagcatattatatgttgagttccagcgtgtgacaacatcaagtgacaagaaagccttggtgttgaccttctctagctccgcacacttcttaaatttggcaatcctagaaggggagctc

SEQ ID NO: 111742 - DNA, 774 bp, Zea Mays
cgcgattcgtgtcgccggcgttaggattcgcgctcggggtgggtggataacgtcacgagatgaaagatctttgtcgtcggtgagatggaggtcactccggtgactcaccatcaccttctcctttctgttttgcggctgagcagataagctcgctggggaaccaccgtcgcacgaccttgcaccacgtatccgagtacctccaccacatcaccgtgattcgttttagcttcccgtcgatcaccggagtagtcgccacgacggttgccacgagttcacttgcaccagtaacctttcccctctccggccgccaccgcgccatcatcaattcaagcgccactgcccctggaatctataaattgagcccaccgttagctccgcaacctcatcacgcaccacaccgtctagtatcgctcccaatcttgcaaccgtgagctccaatttcaagttttccccaattctgttctgaaacaccacagggtcgagctcaccgtggccagtcctccacaggtttaatcataccatccttgttcttgttttagcatctctgtgtgctggtgatgctcaccaactcacccaattaagctaagatcctatgaatcaccgggaacgtgtagattgttagttcatccgcgcgctcaccgtggccagagacattggtgtagttgtttatgaaattaacttggggaaaaccttcactcggccctgaatttggtttagaccaacgtagagcgccagtacttgccccaatcggccgacctacgtgctcgccggagc

SEQ ID NO: 111743 - DNA, 349 bp, Zea Mays
cagagccgcctggaggagctggagaagtagaggcttctcttgtcggatgtggtgaacgctatgcacgggcgctttagagcactcccttgcctgggctcaaatcactcgtctccagccttgaaggccttgctagtctgttctaggagcttgaggactccttgtgccacgagatctgccaggtctttgtcactataacgtctcactatgaaggggggtcgagctggaggagttgagcgaaggctattgcgacgcttggagttattcgaacttcgctggcatggtgaaggccactaagccttttgcccagaagctatgtgttgtctcgcccaaacgacgtagtggctcggtg

SEQ ID NO: 111744 - DNA, 783 bp, Zea Mays
tcgatctcgcataccaaaattttcttcgatcatgtaggttttgctcagagcaatgtcagagcacataagaccctgccgattcctctgatcatttgctgctgctcaaagcattcatcaagattttactcgtcaggtttgtgtttactgcttggttaccatcgtcttgttgcaatgcgaactattgatgtgtgtgatctctcttgccgttctttcaaaagacttctttttccccttgggatcggaattgatgattttgatgagagtacggttccaaaaccttataatttcaataagaacttgtccatgtattttttatcaggacactgttctctaactctaatataaatatgaaatgatataaatataatataatgatgtaatatgttatgtatagggttagctaaggggaggaggaagatttgtgtcacaatgcaaggccgctgatgctttgccatgtggtgaagtttcagacagatcgattcagctagcttctttccatgattccatccacggagctcagctagctcggcatggacttcagccctcaaagaaagagcgccgaacgcaaccgcggcagcttcgaacacgatgacagtgatgatgacatcagagctgaatccaccgcctctaataagccatctgcgcattcgcacgacagcaccaaatccaagcccaagacgagccatggcggttcaacccgaagtagctccgaaccgacggcgggcaacaataatgctgacgccaccagcttggacagcggcggggcgaggaggagcaacagca

SEQ ID NO: 111745 - DNA, 453 bp, Zea Mays
aagaatgaagaggaaccagatgataaaaatgcagctgagcgcattgccagacagtcggctcactacacactcattggggagacattatacagaaggggtgcatcacgtgtcctcatgaagtgcattccctcgtctactgggaagcaacttctggatgaggtccatgctgggcagtgtggaatacatgcagcatccaagacactagtagggaaggtcttcaggtcaggattctattggccaatagcgaagagtgatgcagccgagttagttcagaggtgcgaagcttgccagtacttgtcaaagcaacaacatctaccagcacagcaactgcagaccataccagtgacttggccctttgcgtgttggggactggatatgattggacccttcaagaaagctcaaggaggatacactcatgtactggtagcaatcgacaaattcactaaatggata

SEQ ID NO: 111746 - DNA, 325 bp, Zea Mays
ggaaagcatgggtatctataggtatagccacttcattatgtaggataaatgatgtcttgaaagcatagataggtgtggtaagaaagagtagggtaagggaagattccatcaggaatggtgggtcttgattcatataaagatctggttctactcatatctttcatcgtcgaggttgacctccttcggtcttggtgtcttcatccaagatatggacatgtggtaagataattgggggtaggatagattccctaaggtaggttggtcagaatttctattttgttgttagcttgaaacagaggggttatgcaaccatctgatgggtaag

SEQ ID NO: 111747 - DNA, 601 bp, Zea Mays
gcggaaagccggaaacaagggaagaagaggaagactgctacttcagcgacttctagcacgctgaagtcaaagaagattaaagttctgactcagcagcctaggcacattgaaacggctgaaatgccgaagctaattgaggagtctacttctgtgtctgagccaagtcaccctgcaaccgtcaaagctagaacaaaaccagctaaggagccaaagttgaaagaagcagagcagccgaaggccctgagtccaccgcatgccacagaattgctgaaggaattaaaaattcctgcaataaccccgaagaggaggatggccaacgtattagacgctgttatagaatctgtaacggtatcaactcctgcctctacacctgatgcagagggtgaaaccctaaaagaatctagcgaagctagcatggcacaagatacttttgaagctgggccctcaaccctcaccgaagcaagaccttcggaggctaccgaaggaccattaatgctaggaaaagaaggtgctgctgaagaatctgagtcccctgctcccagagcacctactgaggaattggaattcatggtgcgtcatgctttggggaaatatttatcaa

SEQ ID NO: 111748 - DNA, 514 bp, Zea Mays
gtttttcatagctttggtagagattgctttagctttggcagcagcatcttttgcttcggcttcagtatgtttcacttcaattattacctgtgaagtggagactttttagcaagggttagtaaagcaatcgctagaatgagtacactaaaatttaacaagagcaaaaagtcaaataccttcgaatttcttgccttgaagcttcttcctaatgtccacaaccttttcaacagcttaccgtacctatagagattgaaattaagtatgaacatatcccgcgaaggtaaagatgaaggtagcaaagtacataccttctccctattctttatatattcttcaatgcttaattcttttccacccctcttccaaattttagataagaattttttggaccactccaaagcttcgacagtcgatctacggacatggtcagcagaaactttgaaattggggtatgtgcaagccctaacatgattacacctagcttttagcaaaactgaagcagtgcttcgggtgc

SEQ ID NO: 111749 - DNA, 452 bp, Zea Mays
tctgcgtcgctcggatttaaaggcatctcaaaatgaacttgcctctcgtcatcgaggatttcaccaagcgaaacaaccaaagcctcaacctcttcaggagagggtcgcactctaaggcccaaaccactgtcaccggcaggaggattataacacaaaactgatgaaagccttggaaggaggcagattccaggctgaatatgcaacaggagcaccgatattcgacaccttgcctctaagaatcatctcaagccggcttaccagatccatagcaggaatccttttgttggtaacccgggtcgaatcagtgaggccacgatacagataagctaggtacgctctgtccttcagtggctgaatgttcttaaaaacaaaatcggcgaccacagcctcggcagtcagacccttctccttcaacaatccaacctcggcaaggagaaccctagcctcagcta

SEQ ID NO: 111750 - DNA, 513 bp, Zea Mays
aatggtaccctactttgctctggccacggcgaccgagggtgttgcagacagatgggtgcgttcccggtgatctaaggctaatcagtgcaaattggtggttcggcaagcatcacagagttatgagaaggctcaaacgagggagaggggaggatgaactgaccggaacggggctggccgcggtgaggttggtttcacggtggcggacacccgaattgggggaaaccgaaattcgagctcactgacgcacgattgctagcgattctcggtggctgggtgggcgatgaccttgcggggttggcgggggcttcaatttatagggctcaacggcggtggccgggaatttcaatggggacgcgcggcggtcggaagggcagggagttactggcgcgcatgaactcgtgtctaccgtcgtggcgacctcaccggcgacgattagacggccacagagagtcacagcgacgcggtggaaaggcagagccacgcggcacaaggccgagaggcggtggttcaccg

SEQ ID NO: 111751 - DNA, 650 bp, Zea Mays
tatatgcttagtgttgtctttgtggtgaacatctctttgaaatgcttaaaactgaatcaaaatacttacacttcacatatcttgtgcatatgcctagtttgagcatctgctagcatgtgcatttattgctgcacacttagcacaacaccacttagagcatttttacactctggctggtataatcctgacgctcatgcattcataatctttgttgcatttctatttttttctcaggggaggttctcttgtcaagggggagtttttctttctacccctgtctgtgcttgatgagttcacttgtcaacaagggggagagattttgagatttcccggtttctctatctagggggagaattttgtcttccgggcttcctctcattcaagagggctagatatgttatttggagctattgctagttgtgttgagccgtttgcctccttttggaggaactagctttgattttagcttttgtgctgatcttatgctctgaattggttttttatgctctgataaagccttttgtgctccgatgagattttggcttctggctagtggtgttgaaccctgcttttgcctcttattgagggctagccttttcttgcttggtcgtgttgagccgctgtccatttttttggggaccaagttttgc

SEQ ID NO: 111752 - DNA, 785 bp, Zea Mays
ctcggacaagaaactacaaattattcggctataactcgctgaccgttcggatataatttgcagatcgtccacctgtattgatttgcttcagcccgaaggtgcaaaaagatttttggagctggcgcggaccgtctgggaccaaggacagactttccacgtctcgtcaaggggggaagacacccgttgatctagccgttgggttgtattgtatgacataactgttgtagtgtcagatccgaccgttagaggatcacggactgtccgggccctactgtccgcccatacacaatttgatagatgcgccataacaactatatggatggttgagggctataaaagacaccccaatcagctcattcacatgattcattgaaacatatcatacataagggttgggtattcactcctatctactaaagcaacatttctatacacatcgaagtctgtacaaaagagagatcaagcaagaaagatctactcgtgtctatctatcgatagtgttttgtgagaatcattgagagaaagtgtgtgttacctcttgttatcatttgagtgtggagtattgactcccattaatttgtaaagctggcaacaaccccttatcttcgtggttggccttgcggagacttcggtctttcgttgacaaagaagaaggaacactcaccggtcttggtgaccattggagagagggaaatgatggaaaaagtctcgtcctttgtggactcctcaatggagaatagtttcttggtgaatcgaacctcggtaaaacaaatcacacgtgtctc

SEQ ID NO: 111753 - DNA, 900 bp, Zea Mays
tttaaacgtacaagcgcactggtatccctaatctgtagaaagcagaaaaaaaacagacaactgattgacaagttttgtgcaaccaaatgagaaagtccgaacaaggttgaaaaacgcatgcgacaagaggcataatagctgatgacaccatgtgttgaggggtctattgtttcagctcagctatacaaggagagatcaatctagaggactctaaattctcaaaacttctaggatctatctccagtgatgtagctacaacttccactgcagggaaagaagtgtgtggctctagggtggtgattggtcctcataaccatttttccattattggtggaagaacaaatccattgggttcttttgccactcctgttataggcagcggatgacacttctttggtccctgcatcagtccagatgtctggagtttgatcaagattaagaactggaactggtggcagcagacagcagttgtgtctcaatattatcagacaccatcactagtgaataggttgtatgctgtactacacaagatagcaaaaggggaggttctggtggctatgactaccttggtttaccctccaatggttgtgccaggtcaggtgtggcagccatgtctaaattcgttgcatctaatgcaagcgatggatgaggagcttcctctaatgtcacatatatggcctcattatcggctgaattttgcaatacatgtgggtttgcagtctgcaccagaggtagagagggaggttgtagttgtgttaactttaaattttcaaaccccgaaagttaggtacaaacaataaaaaagcaaatttcttgttccataacgcacaagataatcatgaatgcaacatatgcaactgcttaatcactaagatacaccaagtattgtgggtgccaacg

SEQ ID NO: 111754 - DNA, 593 bp, Zea Mays
caagtttaatcacatatcccaatatgctatccatcaagtggacactgatttaaaaaagaaaaattgtttcatgaggggattgaatgaccgactccagcgcaaaatggatacgtgtctggatcttacctatagcagggctgtaagcgcaacactgtcagttgaagacaagaattcgggccaaggaaaaaccaagagatatgcgggtgaaggatcatctcaggggtctaaaaagcgaacaaggttggtaatccgtcccttcaacccaaatcgttcttctcctctcccacccacatatcccttcaggcaaaccgttttcatccatcccactcctaccctcgcctagaacaatcagccgagtgcccctggtgctcgtttccccgcctttcccagttcctcaagtggctgctttaattgtgggaagtctggaaatttcatcaaagactgcccatacccgaagcagaataaatcaaacttccaacagacttcggggaatgcaactcaaggaaagggaaacatagtcaatcctccagcgggcaaaaatatgtagaaaattgggcgagtttattataccgaggtggcgactacaccggaag

SEQ ID NO: 111755 - DNA, 1542 bp, Zea Mays
aagctccgctagaaacacatcggcatattcacacaccacatggatgtcctgcacccgcaaggcagcctcactctccaccaccatggagaaaaagattcctgacttccttgaccgacgatccggaagtaattgggacaacaaagatagagtgaactttggagaacttctcaagaataccacctccctacccgacgacgcctgcaataacactgtcttccaaaaacaggatataactatgcgatactgagttaaccaatccatacccaagataacatcaaacgaccccagggaaatcaccacgagattagctgaaaagacctcatcagcaagaatgacggaacaaccctggcagactgaacaacttctaatggagccattagctgaaataaccacgattggatgacccatcctctgcaccgaaagaccagcacgcaacacaaaattctcctaaacaaacaaataactagagtcagagtcaaaaagagcatgggcaacaaacgaatcaactaagacgtacatgtcaccacgtctccctgctctttgccatccgtagagggtagcgcataagctctagaaacatccgcggaagaggaagcccccggagtgaaattaacagaagaaccccacagagtcgtaggatgaggcagacgtgaagctccaaactgggatggtataggagttgttgatgcaggagtaggcgcggccaggtactgagggaaacctggcataggcatgaactaaggagtccctggcatatagaactgctgctgagggggtggtacagaaaattgctgctcagcgcatgacatcatgttgacagtgccctacgaagaggaagaagtcactggctcccatttgagtttaccattgggattcctcctacacaccgcatccttgtgatcctggctacagatagagcacatgccactccactaacacttggcacggtgatgcgcttcaccacaacggaaacacaccaaccctagcccgggattaggaacaacccgatacctttgagtacttcctcctgaagtacccgattcagagggtttgccatgatagagtggtggcactagtgttgtgacttcccctcttgtgggctagacccccagtgttgcccctcctcacgtcctagccatgaggctgatcaacacccgaagacttctgagattccatggtgtactgatgttgcatctccacgcccaatgcttgctccaccgcagtacaaaaatccactagcgaaaaggcacctagagcatgcctgatagagggtttcaggccctgacggaactggcttgccttctccaattcattgtaagccacatgaggaacaaagcagaccatcttgttaaagcccacttcatactctatgactgacttcttctcctgcttgaaagactgtaaatcaatcttcattttctctagaaagtgaccgggtagaacctcctttcaaactgcctgataaaaacgtcccaggtcaggactcctggtgaagaggagtgagctgcctgcatgcctctccaccaaatttgtgcctcctcc

SEQ ID NO: 111756 - DNA, 338 bp, Zea Mays
tgaggatatacggagggggtgcaattgctgcatgcgtcacatggcgatgggcgaggaaggagttgcacgacatcaggtccatctgtcagatcggaggtgggcagaacgtgtggcagaaccacgatgcacgatctatattatagtcttatagagtagtagagatatagatgaatccaaattaggtggggacctttcaagaaaacattaaagactggtttgatgacaaaagaatagaaaatgatcaatgggagaaaatcaactccaccatagatcccctacaatttccttatcaacaaaccagccctagtagtgatgattttgcacttatcgtattgttt

SEQ ID NO: 111757 - DNA, 396 bp, Zea Mays
aatgcctaaaacatctctggcagttgaaaagaacagacctaatatagtggtgagttttcaaccattccaaataaaccaaacaaggtagattggcaattttctaacttcatgatgacttctggataatcagtccagtgaacacatatacgttgtaggtgaattttattgaagcagaaatttgatagttagatggtgttttctatttgagcagtaaatggtgtttgttcttgtacttaatggcagatccaaaatagaaggaaagagaagcatgtgagaaagagaattgtgaacggatgcaactcactgtacacaaatcatactattagctaagccttaccactatcattagataaatagcatcaacctctatatacaggaagtatgcatataaacttt

SEQ ID NO: 111758 - DNA, 596 bp, Zea Mays
attcaacaacgccttcggggtcgcctcgtatgaagttttcttcagaagaataggcgcccactttggagaagctagtttttattttcttcacacaatccaaggatttttcaaagcacctttccttggactcgcgaagttcttcaacatttttctctaacttttttctccagtattcactgatctcttgattatgctctgtgagagcgcacttctcattagcttcggctagttgtctccgaaggtcttcaacctcagccttttgagcttcggcttgagcattgtatttagtctcgtcttcttttattttatctaccaatgaattcaaaatcttgtctttctctagaccttcatttcttagctcaatcacctcggcccgaaggttgttaagagctattgcacagctttcgtcctcggcgcttttctgtgccctcaaagcattactaagaattaagccctgcaaagaagaagaaagacttgagcatggcaataaactacttcattttctagcttcaaagtcaacttttatacctttatactgttgtacgcgaggctatcagcaagatcatccttcgacataaccgaaaggccatcttcca

SEQ ID NO: 111759 - DNA, 553 bp, Zea Mays
ccaactttctcgctatgcaccggaggaagttgacactgatgagaagcaccaagagtggttcttagaaggattgatcagacctttaaactatcagctacaaagccacaatttcctaaatttccagactctgcttaacaaggcaattggcctagaaagcaaaagaagggaattatcagaccataagcggaaattctaggaacagttcagcaagaatacccaacaaaacaactctcaaggttctcagcttcgctctggaaatcagagtgaaataacaattatcaaatacaacactctggatagcaaggagacatagaagcaaccaatactagaaccaacaaaggaacaactctcagaccagtcaaagttctagtggttaccaacagaatcgtcaaggaagcgtcgtgaacacacctgctaaaaataacaatacaactactccagtccaacctagtggatgtttcgagtgtggagaaattggtcattatgccaacaactgcccaaagcgcaacccatagacaccgcagaggaacaacagtcaaagatttgatcagaa

SEQ ID NO: 111760 - DNA, 520 bp, Zea Mays
cctcaccccccgggaggaaaagagtacgggccagaatgataatgtttggttaattacaagggcatgatggccctgaggagtcaaacaaaaaatttgcagagattatctatgttccaggaatgctccaggtcttcaccagattgcgttgttagcttgtacgtgccgggagacgacttcgtcttgacgatgaatggtccttcccacttcggctccagcttacctcgtgactcggtccgggttgttcggacgagtacgaggtccccttcgttgaattccctcgggacgaatgcgtggtcgcgccaggtcttcgtttgggcttgatatttattgagggcctgcagggcgaagacacggtttgcatcgatgagatctttggaggttagttcgtctacatcgggtgaggccgaagcgcttgtccttggggacccatgcttgatttcttgcggggtcatggcctccgaaccgtatagcaggcgaaagggagtaaatccggtcgcccgacattcggtcgtgttcagca

SEQ ID NO: 111761 - DNA, 331 bp, Zea Mays
ctttgagctcatgccaccagtgaagccccctcttccacccctttgtgcccatttaaaattcttgtgaattctagtgaaaccaagtggtcatatgtgttcctctgtgtgccttgaacattcttgtaggttctcagctccttagggagggttttcccacaccacatagtgttttcaccgaaaccctaaaactccgcccaccacgtgttcggtgaaatgcccaaaccagccaaaaatgctccaattgaacccagatttttcaggcaccttcacaacatctccagtagcatattcgcaaaatttcacgcccatccgatattccaggctttaattt

SEQ ID NO: 111762 - DNA, 374 bp, Zea Mays
tcacaacccaccgcccccagagccaataaattgagcacaccctcggctccgttaggtattcaagcatccaatccacctgctcgtgccttcaattactcacaagagcccacgaatttcttagttcccccaaatccgttttccgccaccgtgaaagagtcctcgccgtggctagcttgttccaggtctgttcatgctctctgctctcccgtttcagcatccttaggttctcctaatgctcctcgacccattcgattgagctagactgccctagatcaccaggaatatttctgttcatccgttgtctgcgctgtctccgtggatagggtgatttagagctcgagctatgcaattgatcaaggggaaacactcattag

SEQ ID NO: 111763 - DNA, 367 bp, Zea Mays
gcgtcgagtccctcgtcttcggagtcagatgaagagcagtctgaatcccattccttgacgatgtgcgcctcgaccttcttcttcttataaaacttctccttattccctttcttgtcttggtcctggtcatttacattatcgagacttaccacacttgaaagttgtaggatttccccttgatttgttcttgttggggtagtccttgcattccatcaagacagtcttgaagtgcctgatcacaagcgttatctcttcctcattaaggtctactgcctcgatttgtgcaactttgtcggggaacgctttcttattggatatttctttgagagcaacagattgtggctcgtagtgttgaggaagaggctcg

SEQ ID NO: 111764 - DNA, 657 bp, Zea Mays
tttctcttcaacctctttaacaaaggcaggtccttctagtgtctcttcccctacgttggaccacatgagaggggtctggcactttcgtccatacaatgcttcgaacggtgacatcttgatattggcctgatggctgttgttatacgagaactctgcataaggcaaactggactcccagtttctgtcgaacgttaacacacaggctcttaataaatcttcgaggaccttgttgaccctttctgtctgaccatctgactgggggtgataggcggtgctgaagtctagcttggtgcccatagcttgctgaaggctcatccaaaatttggaggtgaactgggttcccctgtctgacactatcttccttggaatgccatggagtctgactatctccttaagataaatccgagcaagggtggctcctccaaaggtagttttcactgggatgaagtgggctaccttggtaagacggtctattattacccagatagagtcgttctttttttgcatccggggtagtccggttacaaaatccacgcctatttcctcccacttccattcgggcactggaaggggttgcaataggcctacaggcttctggtgctcggcttttgttcgctggcaagtgtcacaccgagacacatattgtgctatctcttt

SEQ ID NO: 111765 - DNA, 420 bp, Zea Mays
agctatgtgtgcgaacatctggttgcctccccgaccgaggggggagagagttgcagttgttttccacgatgaaccactcaagacgccatcctttgatactgtccttgagaggaatatcgagatactccactttccttccccagcggagctctaaacttgtgttgccaacaagatggtgttgtcccccagccatcccaggcctacagtgataaagatacttccaaagtccgaagtcgaggagaatcccaagaaaagcctcgcacagatgtacaaaaatggcgacttgcagaattgaattagggttcaaacgcgtcagattcaactcatagaaatcaaggaggccacggaaaaagggggagatgggaagaccaagcccacagatgagaaacagaacgtaaatgacggattcatgagtgtcct

SEQ ID NO: 111766 - DNA, 556 bp, Zea Mays
aaatacgcggcatcaccctaatgtgcaaagtctattacgatccccttaaaggtgcaaagtctgcactatctgacacgatcgaacaaaaaccacctaagggcgcagccaggtacgtgtcccaagcgtccaaatatcgccgtggaaagcaaggtccccatcccattttacgcgccacatcaccatgattacaagtcgggacaacctcacaataagcgcaacacgagatgtcatcatagtttacatacacatagcgaggggcctgccggccacattgcacaaataatacaaatcacatcttgttaccctccctctctattgcaagccgggggagggcagcattttcactcactaccgcaacacgagagcgagggcaacaaacatgctacatcggctcagccttcgaaataaggcctgcctctcgaaagttaaacaacatcatcttcaactcctcaccctcaaaaagattccgcagatccccctccccaatacacgtcccagacgtcgaggatagcaaatctcgttggccgcctcgatctagccaaagacgggatcattc

SEQ ID NO: 111767 - DNA, 856 bp, Zea Mays
caccgttcacccaaacatcggagtaaaactttccacccaccaaagtagcttcgaccaaagggtctctcgtgtcgtcggtggagaaggcggcttcagactgggccacagctttaacgtggtcgcaaccagccttctccagaattgccacaatatctcgagcgccagtgaaagaacagatatccccgcgatcgctcaagatctcttcaaaagcttcggcctccccgcttatccaatcaataacaccctcggggtcacctcaaataaaattctctttgaaagaataagcacctactttggcaaagttgtttttcaattttcttacgcaatccaaggatttctcgaagcacctttccttggattcgcgaagctcctcaacatttttctccattctagcgttcgaccattcacttatttcttgactagcttttgcaagtgcaaaattttcattagcttcggcaagtttttttcgaaggtcttcaatttcgactttatgagcttaggattgagcgttaaatttctcttcaccttccttcactttgtccaccattgaaagtagaattttatccttctccaaggcttcatttatcagtttgataacttctgaccgaaggttgccgagggctatcacgcagctttcatcttcagcattcttttgcgccctcaaagcgttgctaagaattaagccctgcaagaagatagaattaacacaagaatacaagacaagataatctattttttaagttcatcacttttgtaccttcagactgttgtatgcaaggctatccgcaaggtcatcttttgacatagcggagaggccagcttcgagcttcagaaatcccatatttttggccatctc

SEQ ID NO: 111768 - DNA, 483 bp, Zea Mays
gcggtctctctccacatgatgaaatttcaaaccttcaaatttgtcttctagttttcggacagcagtacagtatttccccatggcgtcattcgagcagtcccattctttgtttatctgacttatgaccaccagagaatctccatataccattagtctcttgatgcccagtgatatggcaatgttcagtccatgaatcagagcttcgtattcagctgcattgttagatgccgagaataacaattgaagagcatacttgagttgttcacctccaggtgcaataaagaggatccctgcgcctgctccctgcagcttcaacgagccatcaaaatacattcgccacacttctgcggtttccgggttatctggcacctgctgctcagtccattctgatacgaagtcaaccagtgcttgagttttgatagcagtgcgaggtcgaaattcaatgtcatgagatcccagctcacaggcccacttggctattct

SEQ ID NO: 111769 - DNA, 440 bp, Zea Mays
tgcattcatcgtggtgttggttggatgtgataagtagattggaagtgtgggtttgcctgagcacggtgttgtcaaacgtgtatgccgaaatgcgtagtagtagtgattgcgttaagttgaaccgaagtgtctcgagtgcacgccacaatatggttatgtgcgagacatggcaaaaatagagtgtgctcgacatgagtgtttggtcaatataggtagaaattgtcttggcttaattagagaggtgatgtcatgccataagtagtcatcacttcctctacaattataagtcgagtctatacgcgttaggcgttccttaaattgtgcttcacaaataagtttatgattgtgcttatgacttgaatagatgtcttcgagtgaaataataggttcctaaggcaattaggtgtaatgtgtttatagtgacgctttatcacgaaagg

SEQ ID NO: 111770 - DNA, 439 bp, Zea Mays
gacctgctctcgctccccgttgatcgtcggagtgactgccacgacgtaggacacaaattcactgcgctagtgaactccccctcctccgaccgccgcacgtctttgttgcaattcccggccaccgctttcgatcagtataaattgagccccccgtaagctccacaaggtcatcacacacccagccacccagtatcaccctcaatcgttcgctgaggaactccaatttctaactttccccaaatcggttcgaatacaccgcaagaacacctcaccgcggccagcttgttccaggttagttcaagctcctcaatcatttgtcctagcatacttaagttatcctcaagctcctcgatccctttaattgaactatactgccatagatcatcgggaacgcgttgttcctttgattctccgcactgtcaccgtggacagaacaggg

SEQ ID NO: 111771 - DNA, 595 bp, Zea Mays
cgacaaatataatccactgttaatgaaggtcgattgagatttcaagaaatgaagattgacaaataatatgtccttgttgacacattaggaccggtagacaagaaagttttggttcgaccatattcgatcgataaacgcaaagtaaaaaatattatcattggtgaccctcgcgtaccaaatctatcatgtggagtggttacttggaagactctggacggaagaaaggctaataagacaggaggaggtgagggcatggtaaaccagatatacccaaatttaaaagttttggaggtgaaggtcgtgataaataaaaggataaaaggccgaaggttacttttgagcaacttctgagtaaatatcacaagcaaatcaaggcaaagggtattgtcaaactagcaatgctaagtcatctaaagcaccttcaaagtcatcaatatcaactccgaagcgcaaacttatcaatcaagattggcgaggagaagggtttcatgcatcaacaacatatccaccttttcggccgccaatggcaatgcaatacggttcagctccttcgtagtttcatccttatccatcttggggccggcatgattcaaac

SEQ ID NO: 111772 - DNA, 797 bp, Zea Mays
ctttcctattctattgataagtcgctatctttttggcaatttgtactttcttggtcttggtatgctcgtaccattggaatcttgcctactcttatttttatatgtgcttacctttatatcccaatatatgtttaaaacatttcagttaacgtgcccttgaccacccttgtttcttaaggatccatgagcggtcattctactttgcatatccttggtgatcccgttgtctccttgtaactccactcggtaatgaatatttacttcaacccttctattggaaccttactgatcttacccttgattgttttctccactttgtcgtttcgcaagtcttgtcttaactatatcctttgttatgctttttaattattatcatatgcacccttgacacctctatatcctacattgatgtttgtctcatacctgccttttaaaatcgcccctcttctgtctcataccttctttctcttggtcgtatcctcttctttggctcgcgagtttgtaacctcatcctttgttgtgcttttgcttcttattgcctttacccttctcatctctcaatcttaccttggtgattacgctatgttcgttatctaaaacctccaatctcccaccttagttcaagtgtggtctcttacttatctcacccgtggttatatcctatactttacctcttgcaagacttatcttatctctattcttgattgtacctagattcctggttttttatgcacatttacctcttcctttatatccttgcctattatcacctttgacccttgacctctctccatatt

SEQ ID NO: 111773 - DNA, 469 bp, Zea Mays
gttcagttagttcaagaggggaactggcagaccggggttaggatttgctactaaggatggaagtgtcgcttgctttgggaaggttggtgagtgcagtggtttgacacctttagagaaaccttcacccactcccaagcttatcaaaaccacccctgctaagcctatcacccctgtgagagatggtgtgatttatgaacctgtgagagctcctcctcataaacaagtgtggcttccaaaacctaactatctcaggaacacatttgacacctttcccgacatctctagcgatccccttcctagagcccctcagccatccaaaaagaaagccccctcccacaaataaaatccacccaagagagaggtgaggtaccattgtgagcattgtgagagggatgggcatctagcttctttttgctttaggaggaagagagatgagtggcgggtttctaagtcgagcaggaaggacatg

SEQ ID NO: 111774 - DNA, 334 bp, Zea Mays
ggttcattgggtctttctataagctttgctgggaagttatcagatatgatatatgcatggctcttcaacatgtgtttaatttccaagggcatggagtttattgaacacaacatatataaccctcatcccaaagaaggaaaatgcaaggacaacctcagacttcagacccatcagcctaatgcacagtgtggcgagaatcttatcaaagattctggcaaaaaggttagtacaacatctacctaccatggtttcgcactgtcagagtgcattcattaagagcagaagcatccatgataattatagatacgtgcaaggggcaataaaccactaccac

SEQ ID NO: 111775 - DNA, 648 bp, Zea Mays
tggatcttccagcttttctgcttgccgctggtgctgactcggaggtgcacctcacatatctgcctggccttctgactcttttgactaccagcggcaggtatgttgaggagtgggtccgagttttctacgcgactgtatggatagacccagatcaccactggatgaggtttcgttttgagcgagaggatgtcactattactgccagtcagattcgccagctctttggatttcccaagttgacgactcgacttcacagcctatgctacgacacctctgaccctcctcgtcgccctcacggcggtgtggctccgggtacagctcacgtcgcggctctgttccgcccgcccttcttagatgggtcgcgacgttcacaggcagatttcactacagcagccaagtacttatttgagcttatcagacggactcttctgccgaggatgggatacagggaggctaccacacatatccaactctggctccttggtgccctagtctctcactctgagtttgacgtcatggatttccttatctgtgagatcgaggacaccattttggatggcattcgtgctcgtcgacaattgccatatgctcactacctgtgtcacatttttgcgcagctgattcagcctccacagtttcaaggcacac

SEQ ID NO: 111776 - DNA, 721 bp, Zea Mays
caataagtctatctatttccaacatggttgtaccaaggggaccaccactgttttcagcttgttggggaccttcgtcagctacagcaggagtaacttccttttgaatctctggaggagtgtcaagaatagccctcatcacatttatcatctgtcgcttcttcagagcatttcctccgctgggtgccgaagggttctgtctacctctgcttcggcacttccctcaacatttttcttttgtggctgtaataagctcgttagatctgatcctcgaggacttagcattgggaaaggtaagggtgcagtcattacctctaggatttctatcactccaatggaagctggcgaaggggtcttttccaaatgcttcagcggagaagatccccttcttcttcgcggttaggacttgtaacctttcttttctttggggccaaaggctctggtgtcagctttagcttctttgtcaaccttttcttcatgcccgcttcaacggacctttgcgcttgccttatcagcacactcacaaccctctttctattcaatccccggcttattcgtcaagtttttcatagtcggggtactcgaagcctaggacacccatcactcgatttagtcttcgcttctctcgtgtgtcgaaggcggctgtcattagttgatcttccttctttgtataatttcaaagaatttcattgcgcatcttctctatcagttccaaccattcagc

SEQ ID NO: 111777 - DNA, 311 bp, Zea Mays
aacaacctgagatggatcctccaccaccgcctccaccaacaggagttgacccactggttgcagctcagatgaggatgatgcaacaaatggcggacactatggcagatatgcgtgctcagatgcagcaggaacgccaggagatgcgccaagagcgggaggagatacgtcgagagctgcgccaagaataagaagagatacgccagaaacggagggcgcagcagcagcaacaacaacagcaacaagtaccactgcctccaccaccaccaccagttccaccccgtgataagcaccaggagttcatgagccataag

SEQ ID NO: 111778 - DNA, 476 bp, Zea Mays
aaaaaacaaaacaaataaataagtgtgcatttatatggccagctggcactagcaaaatccgagcttggacgcctgaacaacgagaacaagcagctcaacgaagagaacaagcagctcaacgaagagaacaagcagctgaggagtatgctcagcaggctgaccaccagcttcaaccccatccagaagccgtcgatgcagatgcagttactctcactgatgcagcagcaagcgacccgtacccatcgaggccttcgtggagctccaggccatgaggtaaatcatgcacgcatgcatcgagtaccagtaccaccaccactccagcgaggcaaagtctgaccgagagagactgttgtgttgtgacttgctgcgatcgccaccaccaccagccgatgtacgccgatccggagaagaaggacgaccagaaggcgagccgcggtggcgcccacacgctcccgcagcagttcatcagcgtcggc

SEQ ID NO: 111779 - DNA, 399 bp, Zea Mays
ctgggtgatatttcttactccctctgtgttatccaactgcgctgagcacgaatccccatggcaggcgcgaatccgggcgcacggtcgccggcggtgagttctctgagctggcgttctgatctggtcactgtaccattgaaacccgattcagagcacctgttagaccgaattgcaatgtccagattttgaatttttgtgcaacaacttgccaatacatctgtagcaaacttgtagcccttcataccagctataattctgctatagcaactaccctcaatcgagcaatagatcttactctaattcgacccaaaagtctggccaatgtcactagtgaccaaaattcagtcagtagagtgactgacagcacaactttgagcttatttttctccaaactttgta

SEQ ID NO: 111780 - DNA, 467 bp, Zea Mays
tttggatatttcaatttttgggcatagaattgagcttctcgcttttctttttcagacaacctttttcccgaagcatgtcgtacaatataatcgagaatttcggaagatgcttcgggagtaggagttgcagtttgttcagatagaatatgttctgtagcttctctttccgtttcttctccagtttccagggatttctccttggcgggttctgaagacccagcttcggtctcggcatgactctttgcagcttcggcttcagtttgttttgtttcaattcgcgtttttgaagcttcggttgttttccctggagtagagcttgaagtctttattttctccaatacatctagtacgttgaccatccttttcctcttgggggtcgttgtaagatccttttgcgccttcggcactgtcacctctgccgaagggcttataacttctaatatttttgttctttcgacctctgcctc

SEQ ID NO: 111781 - DNA, 431 bp, Zea Mays
ggaacttcatcttcctcctcctcgtcgtccacattggcaacacaagcagcacccccattgggatcagcaacagatggagcacccacattgggatcagcagcggattggttatacccgttggggtcagcatcagtaagttcagtcacaggcatttcttcagcagcaggaaccgaagtaccagcgtcccgatccaaactggatactcgccggaggcgtcttcttttcttcttctgctcatcagcagaaggatcaggctgattggctcggcaagggcgcctcgggcgagtactggcaggtttctgagtatccaaagttgtatcagcctctgggaggggcgccactaccagtgccccagcaggagcagcatcagaagaatcttcagccagcaaatcaagcatagcgcttatctctgcatcactagggttcagggg

SEQ ID NO: 111782 - DNA, 611 bp, Zea Mays
ttgaggtattgggtaatccaactatgaagtccatgcaaacgtcctcccatttccaagatggtataggaaggggttgcaaagggcctgctgccttcaagtgactggcttttaccctctggcaagtgtcacactctgatacatacttggcaatttccctcttcatcctagtccaccaatacaaagatctgagatcatggtacatcttgttgctaccagggtgcatagagaacttggaaaggtgagcttcatccaatatcttctttttgagctcagggtccttgggaacaaccaatcgatcttcaaaccataaaattcccttgctgtcctgacggaaacacttatatttctctgccttcagcttgatcatttctttgataacctgaactcccttatccccaagctgtgcctgaactatttgctcttgcaatgtgggttccaccgcgatatatctcaattcacccggaaggacaacttccaggttcagcttgcacaactcgtcacacagggtggtcactcccacatccatgctcatgcaattacattgggcctttcggctcaaggcatctgccacaacattggccttgccaggatgataatgcacctccaaatca

SEQ ID NO: 111783 - DNA, 440 bp, Zea Mays
caactgctagtgctgtactaacagccctactgtatgtaaggtccaaacatgttgccatcttacgctgaagtttgtcatttagtcccctcccctcatgaaacaattcttctttttcagatttgtatccacgtgatcaatggcatactgggagaggtggttgaatttattgagatactgcatcacaatatctcccccttgcttcagtcggatgaactcttctagtttcatttgtaacacgccttccggaacataatgttccctaaatgccaacttgaattcctcccaagtgacttgatgtcccgcaggttcgatggcggagaagtttgcccagcaagtgctggcggggcctcttaactgttgagcggcaaataggggcttctgaaccgcggtgcatcagattagcccgaacttctgttccattactcgcacccattcgtcag

SEQ ID NO: 111784 - DNA, 388 bp, Zea Mays
cccacacccaccaaactgcagcggcgctgcttaacaatttcataactttaaaattatgacagcagtggtaacaaacaaaaactccagaggcatctacataaaattccccacaagttttgtatacaatttataattaaattccaaaatctaattagcccaaaacagtccacaagatcaaccctgcaatctgtttttttcttttgggcagcgacatacccagattcaaacagcgatatcttttaaaatataattccgaatcgagcgcataagtactcgttggaaaggtatgccaaagctctacatgattctcatatttattaccactaatttcctatgaaaaatccccagaaactgctactactactgctgttcgcccacctgcagaaat

SEQ ID NO: 111785 - DNA, 408 bp, Zea Mays
gccatcctttcctagctgccacagcgtgtggttggcctttctcttcaaattggctgatattgagttgcgcgcgcatgagtacccttattatcctgaaacggacggccagacagcgtgtggttgtcgttgaccaagttttgtggtataacttcagtgcccactacgcctggctttgggttgttcctccttcgaggtgctctatgggtttcctccgtgtcacctgggattcgacgttttcttagcgcttcccctgttccggagcttcacgcatggatggaactggaagagcatgagctgctgcaaagtcttgtgcggcaacacttgcagcggtctcgggataggatgtggcgccatgtagacagacatcgttctgggcgttggttcagttttactttacgtgtaatcgtc

SEQ ID NO: 111786 - DNA, 373 bp, Zea Mays
cggtgagagaaaagggttggggagaatcgcgtgtgtcgtccgattttaacggacggccgggattagagctggcgtacccgttcgccacaagtgaacggtagccgttgatctagatccgtgggccgcagcgagatctcggcttcattaaattcaagccgttggatatagatcagagcgctcgtgtcgcataccggttcggtatatattaaatctaatctgggccctcggttgggaatcgaacggctaggatcgcttcataccccttcggactggcgtgtttgcacataaaaccctctggttctaggaaaataacccaccatccactggagctgtgctctgtgtctgtggaatcttaccccgagccccctgtgct

SEQ ID NO: 111787 - DNA, 306 bp, Zea Mays
caagtttgtggtggtcttcattgatgatatcttggtctattcaaagaatgaagacgagcatactgagcatttgcacatcgtacttcagcgacaacgggatcatcacttatatgctaaattttccaaatatgaattctggctaagggagattaacatcttgggtcacaccatttctcaggatgagatatcagttgatcctgagaaagtgcaagaagtaatggattggaagcctcctaccaccgtacgacagattcggagttttctaggattggcaggatattatcggcgattcattctagatttctc

SEQ ID NO: 111788 - DNA, 324 bp, Zea Mays
ctcatcaaactcgcctctgtatctgaaggtatactttagatagaccaggccaccctggctagacccggcagcagcttccttcggcatctcccactcattcacgagcggccatactctgtaggcgatgtgctcttgaaccaagtctcttatgccaataaaagtacacatagtgttgaagcttctctggcatgcttctatatcattcccaagagcagtggctggcctcctgatgccgaagtgagaccaaatggggcgctgaataatcccttttatatcttccctctcaactaagttattcttcacataaaccattcttccatccag

SEQ ID NO: 111789 - DNA, 543 bp, Zea Mays
tgggtcggggcacctcgccctcaacttctagcctccaccctgagacatctttcgaggggagaaaccccatcttctctaagccacgaagatgactctcatggattgcataggggggaacgatgccatgcaagcaaaatggagaggcacaaaggagagagaaggaaaaagtagtccaagagggcacactcacaaacacgagaatacattaagctaaaaaaacaacaaaaaccctcccacttacttatacggaaatgcaggagaaaaggcgaacacctagatgctgtggaccctccacaaaatcagcgcgagggatcccctttaggccaatggtcaccttggccaaagagaatctttgtgattttgtgcaggaccccgctacttggggcaaggcgtgaaagaatgcgcgctagaggtcaatccagtaataagcaagatcgttagcctggtcggcacactacctgggctcaacacgacaagcgggtcgttccacgtccaatcaggccatccacgcctagcaaaataatgatgaccatcccacctcac

SEQ ID NO: 111790 - DNA, 447 bp, Zea Mays
ctaaaaccgggtgtgacatgaagttatgtattgtgtccacctaagttcagactcatatgtgtactgcatgctgaatttgaatgagttcgatttaatatatgaatgcttaattattacttcatgtattacctgttctccttgttggcatcataatcatttgttgtatcttttttgcacatattgaagcatggaaccatcaaaccacccaaaccaggctcaaccaggagacaccccagttccaaatgctcctcaacctgtgcaccatcctatgtggcctccaccttttttcgagcatcaatatatggactcaagcctgcgtggtactatgccttttcaagtgattccccaagtcccaaatacaatgtggtcacctatgcattctaacagttctcaatcacacaccacaatgttttggatcccttatggtgggatgatgactaattcata

SEQ ID NO: 111791 - DNA, 722 bp, Zea Mays
tgccccagaggaagtggatacagatgagaagcgccaagagtgtttcttggaaggactgattggacctctgaactatcagctgcagagtcatactttccccaatttccagactctgctgaataaggcaattggccttgaaagtaaacgaagggaattgtctgaccataaaaggaagttccaaggtcagtccagcaggaacacccgcccgaacaacgttcaaggttctcagttccgctctggaaatcagggtggaaataattatcaagtgcaacactctggacaacaaggtcagaggaataatcaaagtcagaaccagcagaggaacaactctcagaccaaccaaaggtctggtggtagttcgcagactcgacaaggtggcgccgtgaacacgcaggccagaagcaacaatgcaccagtccaacccaatggttgtttcaagtgcggtgagcttggccattatgctaacaactgccctaggcacaaccagtagacacctcagaagagcaacaatcggaggaatgaccagaacacccccgctcgaggatctgcacagaacaggactccgcagaaccagagtagaggaagagtcaaccatgtgacaacggaatcagtgcctgatgatgccgacatggtgtatggtatgttccttgttaactccatacctgcatcagttttatttgactctggagcatcgcattcatttataactgagtcattcgtgg

SEQ ID NO: 111792 - DNA, 883 bp, Zea Mays
gaccatctgccagacgggagaaaggattactactatgcatatgtcatttttttgcaaacatgttattttattcagcacaccagttcattacaagcaaccatcgtggattgcactacgcacgagcgtttcctactaatgtgtccccaaattccctgagaagatcatcaaggctagccagggacatttcctcgacgttagaaaggttctctatccctaggtaaggtagtgctggcagggcttcttccttcggttcagtctggcatccttggctttttgaagcgctttccagatcttcttgacggggcgagcctcttcagcctcctagcatagtcaatcttcaaggtccggtatgcgtcacgagtgttggctttcccgccttctgccatctcgagactgtcttgaagagctgcattttttccttcaattccttgatttgctgctctaggctttccacctgggagtttaggtgggtgcagtgggagaaaaggtcatcaaagtggttatcaagggtgtggatatatccggccatgtagattatggcagggtcatcttcattatgctctctccctgacagggcctggagtcttctcctccacgtagggttatttttgttgctgggtggaaagtagcggaggggtgtctcggagacttctttgttgtagttttggcatagttggcggagggatttttgggtagcattttggcaggtgtctgggaagcggtggccagtagcggtgatctaaaaaggagggtgattttgttagcttcgactttctcctaggttgactgccatagagcacttctcgactccattctcacggtattccttccagacatactctggcttcttgttgatccccatgcgaagcgcacaactccgaag

SEQ ID NO: 111793 - DNA, 580 bp, Zea Mays
gtcgttggccacaacgagatactcggtctcagctccggagccggaggtgacaggctgttgcttcaaggaccaagaggcgaggttgtccagaaacacaacatagccagaggtggaccaacatgtgtcggggcagctagcccaatcggcgtcggtgtagacgaccaactcagaggttggagagggccgaagaaggctgtggtcgagggtgacacaaaggtagcgaagaatctgcttggcagcagtgaggtggggctcctgcgggatgtgcatgtgaaggcacacttgctgaaccgcgtaggcgatgtcagaccgagtgaagatgagctattgtagagcccatgtgaggctccaataagatgtcacgtcgctgatcgaagtgctgccgttgtcgaagaccttcgcttgagtgtcaacaggtgtggagcagagcttgcagttggacatgccagtctgctccagaatctagatggcgtattggagttggtgaagaaagaggccctggggcgtcactccacgtccacggtgacctcgcgaaagtggtggagagggacgaggtccttcatcgcgaacttgcgctgca

SEQ ID NO: 111794 - DNA, 454 bp, Zea Mays
tgataaccgaggtgagattttataggcgctatccatgctacttgctaccacaaaagagtcagagcagtgacttatacaaagatgctcggagacaacttacagaggtggtctgtcctctataggtatgagggccatccacactcttggtttggcgtagtgctcctgatgcagttcgtagggtcgtgcgtagccatactcccgacacaagtatcgtcttgctcatttgtcatacgagcccctgtagcgagtcctccgctaacatcctttgtagtggtgtgtggcgggtctcgtgggtcagcatcatgatgcgaccatgcgtagcgtggcttcacccatcgtcacggacccgcgtcacctaccgcgcgtgcgtaggcatacaccagtatggggtatctgttacatcctttcaattatgcgggtcaccgtagagactacgatgctgagatcccttcaa

SEQ ID NO: 111795 - DNA, 751 bp, Zea Mays
gcttcacctctgaggtgcgggtctttctgactgctgaatcaagaatcttcactggcttctcatggtactgaaggtctttctgaatctgcactgcctcttcttcgatgtgactttctggtgcttgcaggcatttgtgaagctgggatacgtgaaacacattgtggatgtcggacatggattccggtaattccagacggtatgctgcgggtcctaccctgccaatgatgggatagggaccgacgaatcgcggtgctagttttccttttacttggaacctcctgacaccacgcattggagaaaccttgaggtagacgaagtctccttcctcaaatatgagttccctccgcctgttgtccgcataactcttctgccgactctgagcttcaagtaaccttctgcggatcagagcaactttctcttccgcctctttgacaaaggcaggtccttctagtgctttttcacctacgttggaccacatgagaggggtctggcatttccatccatacaatgcttcgaacggtgacatcttgatgctggcctgatagctgttgttgtatgagaactctgcgtagggtagactagattcccaacttctatcaaatgctagcacacatgctcttaatagatcttcgaggactttgttaactctttctgtttgtccgtctgtctgagggtgataagcgatgctgaaatctagcttggtgcccatagccttctgaaggcttgtccagaacttggaggtgaactgggt

SEQ ID NO: 111796 - DNA, 428 bp, Zea Mays
cgggaatccaaagacggggagagtaatgggcgacaacgtggaggtgttccatggggtcgtctgggcggtctccttgacccaaatggaggccgctgtcccccccgcatgcagccctagctagctgcctttttgtttgccatctacgcaaaaccctcgcgtgctggagcaggagcaggactactgtattcgatcgagatgatcagctcagctgaacagctgcattgttttcgcttggagtgttactaatacattcattcacaggcttgcggtagcactactagtactctcaatgctcctgagaagcttatttctgctcgtaacacctttgtttttttagaatgcagtgaaccaaatggtgttggtttgatcgttctctagcatatatactactagagatggcaacggacccattattacccgttactcgg

SEQ ID NO: 111797 - DNA, 409 bp, Zea Mays
gtcccacattccgaatagatttgattcggtcagggtctatctctataccatgttcatggatgatgaatcctaaaaacttaccagccgacactccaaaagcatatttacgtgggttcattttcaaaccatgccgacgcattttatcaaaggatttgcgcaaatcagctacatgagaactaaacttagccgatttgactacaatatcatcaatgtaaacttccacaatgtttcccaatagctcgtgaaagatctaattcatagccctctaataagtagcaccagcatttttcagaccaaatgtcacgacaacccactcaaataaaccaatgaagcctagacatataaaggccattttagacgcatcttcttcaaccatgaaaatctgattatatccggcattaccatcaag

SEQ ID NO: 111798 - DNA, 490 bp, Zea Mays
ctcgagttaagtaagaatgcaagtcaatcatgaacaaactgagtatctttgaagcctttattattgatgacatattccccgttttacagagtacatcgtcgtcccgatagcctttgaaatacagttagggataaaacttcctgaggtgttctatattccaggagttcccaatttctgtgccatccatttgagtgagacgatatgatcccggccgagtgacttctgctactatgaatggtccttcccataagggcgataacttgtgccgtccctcccccgttagaattcggcggaggacgagatctcctactaaaaaggatcgttgtcgcacggccttgtcatgatagcgtctcagagtctactggtaccgtgccgattgaattattgcgttcagccgctcttcttcgagtacatcgacatcttccagcctggttgcttcggcctctgctatgctttcaaagatcaaccttggcgccccaaacttgagatc

SEQ ID NO: 111799 - DNA, 418 bp, Zea Mays
ccccagtcctcactatagatatatcatggaaatattttccttcatcgcttcaatcttcccttgtttgacactttactttccaaaaacaacatggccgagcctccacggccgatcttcggcatcctcattaccactctccacatcaaagctataaatgtggctggaatccccagatagcccaactagcatttcattagtgatcttttcaacattggtcctttccattgcttcgtaaaaaccagcagctgtggggtctacaatcttcttatcctcaaccatttcgatgatggttgcagaaaatgccgaagctcaaataaaataattgtgctcgcaaaagaagaagctaaaatgacaatcacaacacaaagagctagatggcacggaaaatattcacaacgcatgcctctatatatatact

SEQ ID NO: 111800 - DNA, 586 bp, Zea Mays
caagtaaggagatatgtagatcgaccggatggtgaaggatccgggcggtggtagactaggtgtggcctgcagtggagacggggaggagctccttcactgttgtgctgatgagcgctcccctgcgtggtaaaccctaaccgactcacacttcttgcaaaacatatcgtaacacggcatcagaggtcaataattgaactgctcacacgtatcattgcgtcctatcagcttaagaaactgctctgcggacaagacgacatacacatccattgggtaccaagtctgggttttctggaaaactccaaaccaaataatatcaacaagttggctggtcaaaccttagtcaaccaggactctatcggttgaactcatccgactacttcagcaaaccttggctagacacgacccagccagataggtctcagtcgactaagctttagccggccaaacctccctcaagctaaatttagttttgacaacagagatagtgcccctgaaatccgggtgtgacaacagagatagtggtggatgcggtgagcgcagggtgaatcgtgagcggggaggacggggttggggagcacggtatcgc

SEQ ID NO: 111801 - DNA, 511 bp, Zea Mays
ggactatggtgctcgcacaaacatggacggagacaaccaggaatggtcggtcaacatgagtcatgtccatggcggcattcttgggcgacgatacggcgttccctaggctatggcgcagtagcgtttaactggccgagactgggagtttcactagcactagaggatgtagaaacatggatcagagagacgtgaatggacgtgagaacagctggccagagtgtgatgcctcaaggcggcgttccggccgatttgggggaaatccgaatttcgctagctatggtggatgatttgaggcgaggagtggtgctctgcgcatgtaacaagaaggcagagcggggagggcactcaatttatagaggtcagcttcggttgctctgaatttgggacggggatgaactcatggtgatgtcgttcaatgtggcgttcgtctaacgtggcattcaatgtggtaaagtctcgcggcagtaaatgggctgtccactatgacctatggcgatgtggtaacctggtc

SEQ ID NO: 111802 - DNA, 673 bp, Zea Mays
tacaagccaaaccctaagttttggactcatttgcaaaaaggcccctagttgtgatttcatgctaagtctgaatttcagattgatgagctcaactttggagccttgcaacttttaaaatatagggtttttgccctggggcaccacatcaaacttatagacctattaatggataacaagtttgcttaagagtgcaagccatgttcttgtgagaaatttggagataatcatgctcaaactttggctgtcaggctgattaagtctgaaaatcagactgacagtggactgacatcaacttcaagaccaagttcatgcatgatctgctgcctttttgtgacaacaccatacagcaaagttgtagttggtataatgctctacaagtttgctgcagagttggacttgtgttaccatatgaaattaagagaaaaattgccttcaacagggactgacaggctgtctgaatgagttagtcgccatcatacagtgtctgaacggataggatcggccgcagcagaaaaaaatcttcaccgccgacgaccctcgccgtgattcacgccaccgccgtaggattcgagtcgccgatgacccgatatggccgccaggtaaaagccaccccctggggataactccggtgactcaccgtggctgccccttctgctttgcggctggagcaaat

SEQ ID NO: 111803 - DNA, 453 bp, Zea Mays
aacaccaatgccagttacccaaagggatttccaagctagtgcctcaggacacagaagtaaagacgcattagggaaccagttataagtattggtggaagaataaaagtagtaaataagagtgtggagaagaaataaaatcattctttagaacaaaatgagcaactcatccagttaagcttgggcatcccaaccaaaaacatgaagaatatatgcatcaaatctacccgagtcaagaatcttatatgacatcaaatcgaactcagatttgtcccatcggtatcatgatccaggtcccaagttgaaatcacagcaaaagaaggatacatgaaggaaatagaatcatagacaaaagtatatgacagaatagaaagagtaatgtcacattgaatggctcagatttgccccaacatcaacacaacactcgcagaagaaacatgaactcctccctccaca

SEQ ID NO: 111804 - DNA, 402 bp, Zea Mays
tgaagatatattttgaagttctttaggactaccactatcatctcattcaggggaaatcgcagccccgctctgaagaagctcttgaaaaccacagcttcatccttcttcggctctagggtagtctcttctctagcaaatcgaataagtttgctttcagcctctccaaaatagcccagtttcatcatcataggcatgtcatcttcagacacagtagatttttcaaaatctagctgactaggattcattgggatcagaatattgtagtcttcttcactctcaacatcttcaccctcaatcacagtctgctcagcttcgacattagaagtaccttcgtcagccacaaccagacctgatcgtttcattacttctgaaattggtgtcgtttcagtggcctcggtttcg

SEQ ID NO: 111805 - DNA, 499 bp, Zea Mays
gggcggtccaaggcgaggtgctgggtctgatgtaacccttctccaacaactcgtctatttgcttcttgagtttcacgaattctggtccggacattctgtaagctctcctagaaataggggcggtgcccggaataagctctatagcaaattcaacttttctctcaggtggcatgcctcgtaactcatcagggaacacatctgggaattttgatactactttgatgacttcgagcagattgactgtctcactatgggtagctatctggtgacaacttcctttccttggttcagacaagaccaactccaccaacacttcttctcctgacaaggacaccaacttcacagtcctcttaccacagctaaggccttcttggtacttggtcaaccaattcatctctaggatgacatctatgcctacatcccgagtacccattactatcaggtcagcggggaactctatcccccttatttgaactcttgcacttggacaaaatttatc

SEQ ID NO: 111806 - DNA, 338 bp, Zea Mays
ccattctgcctagacatcaagaactttacgaaaggtgtcgtagtgatagatcgcccacctgcaacgatgactggtgccaaaatttgtcaagggatagatgggctcgtggccaatctagaaggtggttttgtgggatatggtgagcagcatatgtggacgcataagtcgggcttgactcggctcccctattatgacgacctgctccttccacacaacattgacgtgatgcacactgaaaagaatgttgccgaggcactttgggcaacaattatggacattcctgataagtcaaaggataacgtaaaggcaatagtggatctggcagtgttatgtgatag

SEQ ID NO: 111807 - DNA, 300 bp, Zea Mays
gccaagaatgttgtccactggatgatctctttggatggtatgatggactcgaggatgaggcaatgatggttgtctttgaatttgctcttcatcaccatcctcttgatcaagaggcacttcatcaacaacaacttcaagttcatcttccaccatggttggcagctcttggggttgatgggtttgcttgagtggaggatttatcacccaccacctttgcgcccacatcaaagacctcatttgtcatccaaaaggttccttcttcatcattcttttcttgtggtctcacttcacctattgcaa

SEQ ID NO: 111808 - DNA, 387 bp, Zea Mays
gtggcttctagtatttcttctttggataatttcttccccgaagcatgttgaataatgtagtcaatatcttcgttcggagcttcgggagcaggagcttcggtcttttctggtacaatctgccctgctgttttgtcttcaagcgcggcagcctttgtctcaatggacgctgaagacccagctttggccacatcttggactttggtagcttcagcatctttcttagtagctccagggctcaaggccttcgtagtctccaagacagcgtccagcacgttggccattctcctcctcttgggagttgtggcaagagccttttgcaccttcgacaaacttgcctcagctggtgggctcagaattttaggcattttctttattttttatgcctgt

SEQ ID NO: 111809 - DNA, 282 bp, Zea Mays
cggacagagtcccggggcaagctagagccaaaatgggagggccctttcatcgtcaagacgaaggcgtcccccagcgcgtacaggctcacaacgccatccggcgaagacttagaacattcttggaacattgacaatcttcgcaagttttttgtttgactcctcagggccagctcgcccttgtaatttgcaagacagttttcattccggcccgcactcttttcctcccggggggtgaggtttttaatgaggcagagccatgtaatatacacgcaaaaaatcccc

SEQ ID NO: 111810 - DNA, 488 bp, Zea Mays
gcatgtgtcaacaccatccttggggtccacattctctgcagtagccacctctaaggttgacgggccctcagctacttccataggaccaggacgatccaagttagtctcccgaccctcgagatcgcgctctatggtcgacgaggcacgggatgacctcaacccagcatcgagcacatcagcgcaaacctccatcacaccatcatccactggctccgataacaagtcctctggaaccatatcctcaagagtctgatcaaagttggctaaggacagttcttgcagactaatgagagcagacaaagcaggagagggaaccccactactttcaccgctggcgatgaactgtcgactatttttccgagtcaaaggaacttcatcttcctcctcctcgtcgtccacattggcaacacaagcagcacccccattgggatcagcaacagaagcagcacccccattgggatcagcaacagatggagcacccacattgg

SEQ ID NO: 111811 - DNA, 373 bp, Zea Mays
cgtattgctcacgccaaagcttggtggaagatctatcttgtatgcattatcattgatcttggcaagaacataaaatggaccatcgcctcgtggcatcaatttggatttgcgctgctcagaaaaacactccttgcgcaagtgaattcaaaccaagtccccgggttcaaataacactttcttcctatgcttgttcatgcttgcagccttgcgcactgctttgagcttaattgtttccttagtcttctcatgtatctttttttatgtatgcagcacgcttggaaccttccatattggttctttcctgtaatggaaggggcaacaaatctatcggagcaataggtttgaacccatatacaatttcgaaggggcataa

SEQ ID NO: 111812 - DNA, 458 bp, Zea Mays
gtcaaatcctcctgccggggatagtggtttgggccttagagtgcggccctctccagaggaggttgaggctttgattgcttcgcttggtggaatccccaatgacgagaggcaggttcactttgagatgcctactagcccgagcgacgcagaaataagtgtcatgctggatatgttggctgaggattcctctgactcggctcctgctgaaacactagctgtagcactcatcccagagtctggaaaaacattggacattcagagacctaataatattcgcccgaaacgtctccaccaagctagtcatccaacttctcctgctgaagggaagaagaagaaaaagagacggcttcggcgagtgtcatccttgaatcaggatgccggcccttctgctcctgctgccggggaagtgccagtgccagtttttgttgaagctgaacccaatgggtgtgacccgactg

SEQ ID NO: 111813 - DNA, 416 bp, Zea Mays
gtaatgcctcaatattctatgaaacacataaaagccaaactgaacctgtcgttcagtgtgtactcctgtgtatatggagtttgccagaaatcgttgaggattaaccatattggtttgaatgcttctacctgatgtagatgtggatatacccaggattaatatcatatccacatttgacttattggcatttgatctattccgtggggacgcctgcgaatatgatccatcagccttagtcaaaagcatatgttctgattgcagattcacatggtttgtaaataactctcctccgatgaacttgccctgctggtgatttgcctcacgaagaggttcatcttgatgatgaagttcctagcaatgcacgcaatatcattgtgctaggaatacggaacaatgaatctttcgttttaggaaat

SEQ ID NO: 111814 - DNA, 726 bp, Zea Mays
acgggtttggggagctaaaactcgatggggaattccccgttgccatccctaagcagggtctctcctgcaatatgtacaagatgatcagtcccacgtcaaatggaatgagcaaagtgctcatggtccaaaatgaagatgtaatgccgatgaaacttactgcaattggtttatgccaaagggatacacgcagcagaatatgtctgcaggccatctcccagctgacttaatgagatcaaattggggccagattgagcatcaggaacagttgacacgtcatcgatatcacgatcaaagtcttcagggggacggtgtactacaatcggacgcaccacaacctccatgagttacaaatgggtcttcatagccgaagtaacataattatcccaatccagttgagaatcaattgggatgactcgtcttatgacatttggtggatgaccaatgttaagcactccgtcaaccgcaatgtcatcatcttcatggtaacctagcttttgtttagcctttgtaaacacatcactcaaggagggtctaccaacgaatagtaccagcacgtgtcgcatgtcaatgaacttggcatttccatacggatcttcttccacattgcctccatgatataagctcaaaaaaattgtccatctatttgaaacacgaattaaacattcaatgtccattatgatggttattgcataaccacaacccactaataacgaagatctaactaat

SEQ ID NO: 111815 - DNA, 611 bp, Zea Mays
actttgagcttcaagcaaccttctgcggatcagtgcaactttctcttctgcctctttgacaaaggcaggtccttctagtgcttttcccccacgttggaccatatgagaggggtctggcatttccgtccatacagtgcttcgaatggtgacatcttgatgctggactgatagttattgttgtaggagaactctgcgtagggtagactggattcccaacttctatcaaaagctaacacacatgctcttaacagatcttcaaggactttgttgactctctctgtctgcccatctgtctgagggtggtaagcggtactgaaatctagcttggtgcccatggctttctaaaggcttgtccagaatttggatgtgaactgggttcctctgtctgacactatcttccttgggatgccatggagtctgactatctccttgaggtaaatccgggcaagggtggctcctgcaaaggtagttttcactggaacgaaatgggctaccttggtgaggcggtctattattacccagatggagtcatttcctttctgcgtccggggcagtccggttacgaagtccatgcctatttcttcccacttccattcaggtatcgggagggg

SEQ ID NO: 111816 - DNA, 794 bp, Zea Mays
tctcagacatctgctgctgggctactgccagatgagcctgctgctgagtaagagactggaggatcgcaaccaaggtcaatggcaggaggggaagtaggggcagcactggaactcccagcctcatgatcatgtgagcgtggaggcacaggaggcggaggcgggatcccaaaatcatcatcatcatcatcgggaacggctgtgccctgagcctcaaactgatggaatgccgcatcctctgcctgagtgtctggcactggatcaggtactggcactgggtcctcaggggctggacgataggatccaaaataatggataactacatggaaacctcacatgagagagagagaatccaggcaggagaggagactggctcacgggtaggcgagatcactgaaatgacagaagaggtgagaatgtattagtcacatagtcataagtatatgaaatgtgaataaatacatacacagagaattatgacacagaaaatgagtgatttggcgatatagaggtcaaacgacgcgaaaacgacgtttgaacgaggaatagtgccataggaggtttgatattggaattgaggcatgaaatgacttggaattgagctgatacttcacgagtaggtttatattggtaaatatgagtgaagtgtgcgcttggtttgattttaggcgaagaaagtggaattgtggcactcggctcggaatcgatcgctagaaatggggatttgtggaaatttggactctaggatatcggattggcgtgaaatttggcgaagatgttactagaggtggcatgaa

SEQ ID NO: 111817 - DNA, 435 bp, Zea Mays
cttttgttgtagggctgatatagagttgtttgagcaagatgacaaggttttgttgaatttcaaaatttgcatttgttcagacaagcagtttcaagcgtgtataggatttatcttttcttgtgagtatttgctttaaagttctagaattctttagaatacgcttgatagatagagaggaattatgatatagagaaaacaagtcgatttacataagaattaattagaggttcgcacaacagagattccgctggagaatgcggattcagactacgtatttggacatagaccgaatatcaagaaagcggattcagacatagatcggataacatcaccactgtcgagagtccgaataaatgagtctggacaagagtcgcgagatgaaattgactttcgaattgcatttgctccgagaaataaaagttttaacatgctcca

SEQ ID NO: 111818 - DNA, 661 bp, Zea Mays
caactaatacaatgatgtctaaaagcactaagggagtaagaggtgttctaacctcacttctaacattaggtctaaacctagagcaaacacaatatgcaacgatcttgattaggagatcctccactattatccgttggcaaagacggaattgactcagtgacccaactgtagtcggacgacgaccgtgtgggtctcagaattatcccacatttcttaacttgggaggaggaagccaccttaaaagggagagacactcttcccatatcagactaatcttttgggggtgattgggcctttctctgagttgagtgtgcttaatgaattgttgggctccgggcaaccctaatttgttgggcctcgggcaacctacctgggctgggtgtattctttggtatcagagctagggtctattttaagaaggtgagaatgatgaggacatcctctactattacccgttagcaaagatgcaattggcctagttgtcccaattgtagttggacgatgaccgtgtgagactcagaattatcccaccttacttaacttggcacgaggaagccgccttaaaagggagagccacccttcccccattaggatagtcttttggggtgattgggcctttcactgagttggatctgcttaatgaactgttgggctctgaaca

SEQ ID NO: 111819 - DNA, 523 bp, Zea Mays
gagagcaatgtgctaacatctggttgagcaatgtatggctgagatatatagtcttaaattatttggtaaggccttttgcttactaatagaatcctaatttgtgatgtcttctatgccaaaaaggctttcatgcattatattatatatcttcgggttacttcgggtaaaactttatgcatgaggagagagcagaaaattaacttatctgtgtttaattgtatttcaatttaatttcctagatttccaagcactatagagcttgatacagctgttatggccacttggcgatatatatagagcgaaacaaaattgtttatgaaggttgcgcgtaatgtgacttcaggggcttgaacaacccaccataatccacacgaatacaagctcaagcgtatccgacgtcaatgtgtgtcatccatcagggctacgacaacacaacaagccttcataataaacgcaacaggcgcagttgtgactcgatagtcggagtacaagacaagtccacacaacgtgcgcaataggcgca

SEQ ID NO: 111820 - DNA, 759 bp, Zea Mays
gtggagcagtggttcgtggagaacagatatcttctattggtctttgtgtagatctcatggctcgtcgtgcccttgccccgtctaatcgaagcagggcacaggagtaggttgcggtgtaggctgacgcgctacctcatgtaggggtgctcaggcggcggcatcctgtcttctccgcatgtctcctttcgcctcagtaacgcgctgactacagtgggagtcatgattatagcagcccaagcgacacagggagtcaatggtcttgcctcgataacgcccgagttactatgcggcatgtgtactgcgtacacaccgcctaccactgggtaggcaggtatacgtcttgtccgtggttaatgcagaggcgctttacacttggaggatgacgtcaggctttccccgatggcttacatcacacgtcatagaacacgtggcagtaccgagcctcgccttttgtagggagtagtgactaggaccacccttccttgtgacacctccaaaccgcccttagttggggggtccagacgatgttcgagtgaggtcgcatctcctcgggtgttggctagcacgtggcagcattggaccccttaggtcagaggtctagatggcccaccataagggtcgggccattcccggggttccacccccaagcgcaggtgccgagaacccttgtctttgagacacatggcatacctggaccctctctactagggttccagagcgctgattataggtgcttgtcttcactcgaggccagtggcc

SEQ ID NO: 111821 - DNA, 397 bp, Zea Mays
ttcgacatgaccagtccattatgcaacatgcagctcggctctccctaccagttagccgaagtagagttcagggtcgtggctgaacatatcagtacccgagacctggttcaagaatacttggcatataaatttttcccgacatcgagtggatgggctctaccgaagaagaaagaagaagggaataaatatgaacttgtatgacttccttaccattttaaatttcagaaaagcttcgacaaaccttgtgccgaatggttagaggtcatcgaaacaatgtgtaatgaagtccttggaaattacactaagaaagaggaccaactgatgaccgatgccattggcacacgagagaaacgaaggttgaatcgggtgatggatgccctgggcttcaagtatcctg

SEQ ID NO: 111822 - DNA, 1243 bp, Zea Mays
aaaactttgaggtgatcataggagggctcggtggaaaatagggcgctatatggcgtggaggatgcaagggttttggtggggaggcgattcacaagatatgtcgcagtatgaagaccctcaacccaataggccggagggagacttgcctgaaataaaaaggagcgcaggatattgttcagggtgggaagagagcgttctgctttcccattttgttgagatgtatatggacatgacatgcggagggtaacaccatgggagagaaagaacgtgcgggcctgagaattatcgaattcgcggccgttgtcgcactggaagctcttgatggtggtcccaaactgcgtgcgaacaaacgcaaaaaagttagaaagagcgaaaaatgtctcggatttgaggcagagcggaaaagtccaaatgtagtgggagcaatcataaagaataacgagataatatttgtatcctgacacactaacaatgggagatgtccataaatcacaatggattatatcaaaattatgaatagcgcgggagctagatgaactgaaaggcaaacgtgcatgtcgaccaagttggcatgcatggcagatgtgatttatgtcatctttattacatgaaatgacactggaactaataagtttggttaaagcttcacgcccaagatgaccgagacgttgatgccaaagggaggtgggtgcggcgaggaaggcggaggtgctggtggatggtgtatagaacgggtagaggtcgccggagctattgcacttggcgatcacgttcctggtttgcaaatccttcacagaaaggctaaaaggatcaaactcaatggagcagttattgtcggtggtgaaacgacgaatagaaatcaaattcttaatgatgttgggagacactaaaacattattgagaacaagattacgatgcggtaaagaaaatgtgtgagatccagtggcagtgacaggaagcaaagcaccatttcccacaatgatagatgaaggagtagatgaaaaaggcggggaaatggtggagagtttactagcatccgaggccatgtgtgagccagcaccagaatctgcataccactcagggcccggcggagtcagggtcatggtgttgaaggagtgcgtcagggagtcctagttccaggacccgccgtgagtgggattccagggcgccgctggatacgccggcgtgggcacctagaacactggtggtgcaactcccccgtaggtgctgttgtaggtgctgg

SEQ ID NO: 111823 - DNA, 313 bp, Zea Mays
tctgaagcatccgtgactagctcggtacggtggtcggagtaatttagtggccggagtatatccacggcgatgatatttactcaaccccaagctctatccaaccgatccgagcatgaatcacagcggcgaaagcacgaatccgcgcgcggctcgtcggcggtgagggacagagctggcgacctgatcaggacattgtaccatcggaactgcgattcagagctcctgacagcccaacttgtaacgtaaagaacacaaatttctatataaaaacttgctgattcgccagtagtaaacttgcagcccttcataccag

SEQ ID NO: 111824 - DNA, 392 bp, Zea Mays
aacagatcttctattctgggcaaggggtacttgttcttgatcatgacctcattcagagctcgataatcgatgcacatccttctggtgccatctttcttctccacgaacaggacaggggcggcccaacgcgaggtgcttggccggatgtaacctttctctgacagctcatcgatctgcttcttgagttcaactaactctggtccagatactctgtaggctcttttagaaatgggggcggtgccaggaagaagctctatagcaaactcaactttctgctctggtggcatgcctggtaaatcttccgaaaacacatctagaaattctgacacaaccttgataatctcgagtggatctgcttcactgctatcaatagccatctgataacaacttcc

SEQ ID NO: 111825 - DNA, 409 bp, Zea Mays
tctgtgcgctgcttggaaaatcattggatgtacataggcagggtttcatcagtcttctgccagcagctctggagatctcaagagtttccagggcacacacatgggccctagaagttccccacgaaaaccatgatcaggtcgtcctagtcatggatttggggtgggtggaaggtgctcgagccaggctcgggcgacgtcagacagaaacaagggcaaattatgaatgatgacattatcgttgtttgtacctcccaactaacaagccaggcagtagtcggtgagccatagctctagcttcatttctctcgagtacttggcgatggtagtcggtgcctggaaccgagccgggaatggcgccctttgtatagctcggctgaagacttgggggcctggtggcttgagtgagggg

SEQ ID NO: 111826 - DNA, 540 bp, Zea Mays
aagaaatccaggggctcttaagaaaacatgccagggccgaagaggtatcgagggttttcagccgcacgatcaagattctagggccccgattagatctagcttttaatgaatcgttatgcgctgaggattgtcgattacgccttctacggtcaggattttatgagacgaaagggtacgccaaaacagatcgtggccacccaaatctaatccgacgctcagcatctaattcgtcaagatctaatcctggccgttcactgcgatccgacggtgcacacaccatcttccttatggcgctccccagaaccgcatcaaccatctgaacagcggtgctcccaggtgagcacaccgttgaaaaccgatcccggtctgtccttcgccgctttcctccctagaaaatactatacggtgggcaagccaaggcgaattgatcccaataatccctaccaagtcggcacaaagaatcgcacccacacgagtaagcggcatgacggcgaaggcgcctccccgatgagcaatcagggcggcatcagtgcgccaaac

SEQ ID NO: 111827 - DNA, 797 bp, Zea Mays
ccagttgggtgaccctgtttggatgactgccctgaaaactatgagctaggcaagtacatgttaaccttgggcgagctcatggaggagctgtgggacgtgaggaagttccatctttggtacatggagacggcgaaagcaggtctatgttcttttgttatccacgtgtcacggaagtacttctccttccaatcagatggcatagtggtcgtagatttcgacgacatgcataggctcctgcggcgcaaggacctcgacctcactcaagtgaccttgttttctctttaagttaattacaattttcataccttacatcactcatgctactttaggaaagaataatagtaataatttcatgacatatgtccttgcaggatgcaagcatatgtatgcgagagattgggcgaaaatgttcattacctctcttcgatgtgtattaacgagagagtcatcagggttatgatatacctgacaatcatgacaagctagtcggcttgaagcccgaagagagttaggaagcaaggaaaatactgaagaacgagttgcgacataacgcgacgatgtacgtgtatagagtgatgaaaaaggttggggaagtggttgtgtcatggccgcccacctaagtaaaatgaatattgtgaaagttcaagttgatgcttgtataaccactaagatttaaaatctgaattatgcagcgagggcatcatgggccactggattgcatttctaatctatcctcaggatggtagggtcattgtactcgactctttgatacaccaaaagaaaacataaagaattga

SEQ ID NO: 111828 - DNA, 625 bp, Zea Mays
ccgccgcttctcgtctcatcgccgctgccgcggaggcctcgcgcctacgttccgccactgacgctgcgcagtggatgcgcctacactacggcgacatccgcgacgccgccgcgcagctcctgaacgggcttctcctcgccttctccgaagaggtaactgacctattcactcgtggtgcctctgattcacacattgctctgtcgatttgtgacatttgttgcggtttaggggccattgagagaggtgttcatggatattaagtgggaggtggaggaaggggaattgctgaaggattgcctggaagtgggagctaaggacttaaagggtttgcttgtcattgccaaagacctcttcgctggtgtttcaaggacttctacgcagcatagcgagctctgaggtttggtgactttaagttgccttttctgatcgtttcaggaactcacgcatgcttgtgtaatttagtttactttagaaacctgatgttgatccgtacagaaactaaacccttgtgatatcactgttgtgtctgctactaatgggctttgaattttgagctgtgcataattttgctaatctgaattcatttgtgatcatggcactaccaataactttggtcctttttttc

SEQ ID NO: 111829 - DNA, 625 bp, Zea Mays
gatggttaggccatctcccagcatttatcttcttcattttcacatagtaggaacaaacaaacacattggaatcaagacatggggccaagttccagaccaaactatcagacatatttccctgccatctttttgctcccattacctacaccctattttcccagcctaggccaacacaacttgatgtgcctgctagagtgctggagccacaagcatcgtatcccataatgtggagtggagcattgatgttatgacttctaaagcattttgagaaggtacaatttccaaatttggagtattttattttattgtttagtcaaaaggagcactttatttatcttaaatttgtacttctcaatactgggcacatttcagtagtaatctcaagcactagcctaccttgacaatgaacatagcaagaaacaactagttgtagatctatatgagcaaatacaaccaatactatcttgtaagtgttgtgcatgttttgtttgaagcagataatcaaagcacctaagaaaacaaagtgtgagcgctacattgatcactaatactgaatatttattttgcaacagacccttgcccacacgcacatttcatcaaacaccaaggctgcagtaggtagaaa

SEQ ID NO: 111830 - DNA, 579 bp, Zea Mays
aaacaagtttcgtgatttttggagctaccaaacgcaagatatgaattttagaagataatacaaaatctagaatttgaagcaacattacccttggccttgggcccacacgtcatggacagggggagtcttcttcttccttggtttctcacgtgaacagcaaatgtccagccatgggggcttcttgcgcagagagcaggggcgtccatggagctgcttggggagatggcatggagatggaagatgcagtggagagcggggcctgcatctccatgggaggctgtggagaggcaccatgcaccaagcatagggaggcaagtgccgagcgccatgggtagggagctccctgctcttgcgcttcaaatagagaggagccgtgtggggagaagagggagaacaaaatgaaaatggctgggagaggaggaatggctgctgcttgatttaaagagacgtccctgccagccattgggcgagatgggcggcattgttgcagagctctgcacatgttagcctgctggcaggtgatggcagagcgaccttgggcgcccatttttggcattttccttttggaatcgaacccgg

SEQ ID NO: 111831 - DNA, 570 bp, Zea Mays
tgcatggcgaacatggcttggtccggctaggattcaactccggcaggggtggaggagacgggtctacaactccgaggtgagatgtatgggggtagcggtgtggcggcatcagcgaagaaggacatcaaggtaagaggccagcttgatgtgtcctacaccaagagatagaaaagcaaattttcagataaacctgggtaattgtcttctctataccttttaccacacataattctgaaataataatgaacacataattcaaagttgttctttatagagaaatatcttttatcggtggccacttaatcttcactgaacactataaacatctgattgtatccacttcaatcaaatcactctatgtaaatggagcatcaagggccattcatggtgggtagtgacctattggtccctaaacaacaccttttacctctacagactaatagacacatcgaatcctaccaaattcatttgccataagcagaagtgcacacaaaggtaataaatgcttaagatattacatctaaaatatcaatttgttcacatttatcatagctgaatatttaagctagc

SEQ ID NO: 111832 - DNA, 408 bp, Zea Mays
atgtttgtgttatttgattgtgaatggtttgatcctcaacaaacgcgagaggatgaatttggaattgtggaggtaaagcatgaatcacggtttaaaggcagcgagtatagcaatgtttggtttgcacatcaagcgcaacaggtgtactatctaacacatcctcatgaaaacttgaagtcttgttgggttgtatacaaaattaatcctgatgtccatctattatgatattattattacaacacaaataacgaagatgatgattctgttaatatttatcaagaagaaggcgatcagtcaaaaaatagagaatttactatatccgaggatttagggctcaatgaagtagctaggctcgccatagatttgatggcagaagaacaaggtccttctagggcaaggactcgtaag

SEQ ID NO: 111833 - DNA, 537 bp, Zea Mays
atttggagaatatctcgcacctattgtgttttgcctctttataaagaaaataaagtatggtgtcatctactatatgcaaacaatgtgatgctctactctagttgccctaaagtcccgctcaagtttttgtctcaaattgtgctcaaagaaatactgttggatcagaaagatgatttggatatcatgctctgtaatctataaggttcaaaagatctctattaaggattacaacacttgtacactcttgtagtatgatgaagctaggcggaaatctgaaaccatccttggtccttgactaatcttattttggaaataaaaaaaattgtgttcgctctctatcttaatgtcatacaagcctcttatgcagtctgtctcactaactcttttatcctctgactagatgatgaaccccaatggaaatgaagtaaatggtgccaatgacaatattcctaccttaacaactatgaacgagaaaaatgagtcaccgagatattcgatgaatggaatgaagaacaacaaaaggaatagaaaaatgtt

SEQ ID NO: 111834 - DNA, 497 bp, Zea Mays
gttcaatgctgcaagtgaatgaatcactccaattcaagtggagttccatgattcaaacgacaaagctcgcaacgctttgttctcgtgcctctcgttgcgtgagtttgagcgagttggacatttggctatggctcacgatatctggtccaccctcgagaaattctatgagggcaatgatcatgtgaagaccatactctttgaggcgtactggcgagagtatgaaaacattgtttagtttgctggagagaccatacacactatgttttctcggttccagtccatcgtgaacaagatgtgtgccaacaaggcacaattaccctatgatgattatgagagagcgcacaagctacttcatgctctagatcagagggcttggaaggtgaaggtctcggtgatcatcgagtcgcccaactatgggactctcgccatggatgagctgttagcaagctcaaaattcactgagattgaataccagatccgagccaagattgagaacc

SEQ ID NO: 111835 - DNA, 420 bp, Zea Mays
gtccggcggtgatgcctggactgtccaatgatttttagccgaagaggccgatgctaaggaggttgggcaatacagccacctagctgtcaggtgcacaccggatagtccgattggtggcaccatacagtccggtgctgcccatactagcccattttcttctcttttgtgccaaacttctttagctccttttgacttgacttgagaggttccctagcatttagacaaacataattagcacataaaataattgactaagtacgtgttagaaccataccttttccatccaatttcttcagaatttgcaatatgcctaaaccaagcacaaacacactttccttgcaaaaccgagttaatagccaaaataaagtgctggaaacatagagtagggtgtatgcaacttatctaaacacttaaaccttg

SEQ ID NO: 111836 - DNA, 994 bp, Zea Mays
catgaagaaggctggcacattcgtcaagccaaaagacataactgtgtactcatacagcccatacttggtaataaatgtcgtctttgggatgtcctaaggtcggatcctgagttggtgataacctgaccttagatctatctttgaaaacacgttggctcctctcagctggtcgaatagatcttttattctaagcaaggggtacttgttcttgattgtgacttcattcagagctcggtaatcgatgcacatcctcctagtgtcatccttcttctcgacgaataggacaggggcggcccaaggtgaggtactcggtcggatgtaacctttctctgatagctcatctatttgcttcttgagcgccaccaactatggtccagataccctataggctcttttagaaatggggcggtgccaggaataagctatatggcaaactcaacttttcgctgaggtggcatacttggtagatctttagggaacacatctagaaattctgacacaaccttgatagcctcgagtggatcgacctctttgctatcaatagccatctggtgacaacctcctttctttggctcggtgagactagctcagtcaccacttcttctcccagtggggacaccaacttcactgtcctcttatcacagctgataactgcttgatacttatctagcaaatttatccccaggataacatctattccctgagtacccatcactatgaggttagcaagaaactctatccctcttatttccacacttacattcaagcatacactatcggctcaaacttttccaccagctgagtcaatttgaattggtgttgacatgggggttattggaagattatgcgcttctacctatgatgcagtaataaatgaatgtgttgctctagtatcaaataacatttctataagatgggatttgactagaaacatacctactatcatgtctggtgttccctggactgcttcggcctccaaatggttcagtctccc

SEQ ID NO: 111837 - DNA, 650 bp, Zea Mays
cggggggtacataagaacactcaaacgagggggcagagggcatgagcagacctgaatcgagctggccgcggtgaggattctttcacggtggcggaaacttagtttgggggaagtgagcaatttgtggtctctggtggacaattagaggcaagcgtgggtgcgttggcttcgtgataacatggcacaacagacccgaccatcaatttataggatcgctaagcggtggctggtgaatttggattgagcgcggtggcggttagagaagaaatgagtcactggcatggtgattcgtggccttcaccgtggcggcctccccggtgatcatgggacatgcataatactggtgattgcgatgtggtaattgctgaggcacgtggcattcggtcgatgagcagccaactctggtgacttatccgaaccggccgcaaagtaggaaggagtacggcggctagccgaaatagtgcccatagcccaacaacgttgaagatctttttaccccgcggcgttatctgggcataagtgaccacaaatcaccttatcggcgtgaatctacgcgcgaggtcactggcggcgaggggaatctgatcctgttgatattttggtattgtaccattggaagccctttcagttagcctgatagaacaaatttg

SEQ ID NO: 111838 - DNA, 543 bp, Zea Mays
gaggcttgcaggttttgctgactggatcaagagatagagaggggagaaatctggtttgtctcactaccgcgcacagagagaagatcacgggtttgacatgtccaaagcacacgtcctgatgccatcttctgacatgagatagaggggttagttaggcacaattttgtcaatggggtcattaggatttgagctagggatcaaggtgaacacgctcggtctttggctcaagggctgaaattcagaattctgaatttcagaaatccctattgaaccctcacttgagaagcttgtttggagtttttattaaactaatttggccaagcttccataatctttattgtagcttatttagtatacttcaatgtttataattggcctaggccatgattttatatctttcatggtcttttaccctttttcttcaattctacttaattagctcaattagggttggtattagggtttcaacatttctccctttttgaaaactttatttgcttggaacatgattctttaggcatacacttggtagatcttttattc

SEQ ID NO: 111839 - DNA, 423 bp, Zea Mays
tggtacattggcggtggtgccccttccagaggttgatacaactttggatgtcccgaaacctatcagtactcgcccgaggcgccctagccgaaccagtcagcccgagccttctgctgatgagcaaaagaaaaagagaagacgcctccggcgagtatccagctttgatgaggacgccggtaccttagctcctgctgctgaagaagtgcctgcaactggccttgctgacactgatcccaatgggtgtgctccatctgctgctgaccccaatgggggtgctgcttgcgttgttactgtggaagatgaggaggaagaaaatgaagctccattaactcggaaaaacagtcggcagttcatcgccagcagtggaagtagtggagttccttctcctgcattgtccgccctcatcagtctgcaagatctgtc

SEQ ID NO: 111840 - DNA, 638 bp, Zea Mays
tgactttttccatgtttccatttttgtttcttggacctgatgcgacgacggggctgaaactgtgtgcaggtgatagtccatccatcaatgtaacactcatgtgcttctttttggagctgggcatccttgtgatgtttgctttttggaatacctagaaattcatcgattgacagtgcattaggtattcaagaatctcctattagttgttcttggggagaccattgtctttttatgccagaaaacaaaatctggttcttctgttttgtagtttcactttcgtttgtactgacttggcgataaggaattccatagtactcacaacaacaacatgttccaagatcatttgtctattggtgtacatccttttgtgtctgttcatcagttgtttcatttctggtgatgtttcgacttgccaacacttactggaatgaggaggtgagttgagatgctttctgtattatcagagcttgtgcatgtaatagcttttctaagtcaactatcgagggtgatgttgtggttgatgtcatatggttaccggtagtctgctcaggtgctataaactctgctaaatcaacttgttggagtctagctacaacttgagaggttgcttgcagaaactgtgcatgtgccttcttgaa

SEQ ID NO: 111841 - DNA, 439 bp, Zea Mays
ggcgaactccggtgaggtctccgccgtcgggcctgtgcgccgccgcgcgtctggtggagatgaggatggggtcggccaaccgttagatccggtaggaacgcatccgattagatccgtggttgatagcgtttcagtcgccagatgtagcttgtgcggtcaggattggaatcagcataccccttcatcaaacggatccgagccgtaggatggtagttcgatgaccaggattagagcgcatcttcataacaccctagccgtaggatcttaatctgatgccccacgttgggtgccggttcggagtgaatcaggtctaatttgcaccgtccatttgcgattgtgcggcccagatttgatcataccccttcgcgggtatgttttactaaagagcccctatagttttacggaattaacccgccatcccctcggggtgtttactgag

SEQ ID NO: 111842 - DNA, 775 bp, Zea Mays
gaagttggaagccatcgcttgtcccgagaatcagcgtgttcagctggcagctcatcagctttcaggaatggccttagcttggtgggacactttcagtgaagccgtcagagatgctacatgggcagaattcgaagcagctttccatgagcaccacgtaccccaagggatagttcaactcaaggaggatgaattccgggagttaactcaaggcggaaggtcagtcagtgagtatgtacacaagttcaccgaactggcccgctacgcgcccgaggatgtcagcaccgaggccagaaaaatggcccgttttctgaaagggttaagacccgagcttaagaccatcctcgccagccaagacttccacagcttctcccacctctccaacaaagctattcaagtggaaagggcaaaagaggaagaaaaagggcacatcaagaggaaattccaagtcctccgagcgcaacagcaagaacgtcaccagagagctcgaccctttgggcttccacccaggggtccaagcttcaataaacaatctggaccctctccatcacgatacagtcagcagagtcagagctcccatcaggcaccctccgttgcaagcaaccagccgccagcaaacgcctgttggcactgcggagaccccagtcacttcaagaacaactgccctcagttgaaggcacccggaccaacttactccaactcggtgaatggccccaagattccatcggcacctacctccaaggcacttccttcaaacagccagcagagcaggactcag

SEQ ID NO: 111843 - DNA, 608 bp, Zea Mays
cacttacccaccggtcgcattacattgaaccagatgtggtgcctgagtttggcgaggaggcctcttcagctgctgaatcaagagaaactgttcctcccatgcagaggactgaagagccggctataataccgaaggtacctttggttgagctagttgaaacgaaggttgacaaagataaggctgaaaagtcaaaaactggagaaataacaaagatgccagagattttaagcccttcaacagaagcaacaatgccgaagacacaaaaaagttttgccacaactcctaagaggaggaggatggcaaatgtactggatgtcatattagaaacggcaaaaaccttgaatcctgctccttccagaaaaattgccgaagcttctaagggacaacgcgaagctgaaacgaaacaagcaaaagtcgaagcttcaataattcaaactgaaaccgaagctgggcctttagagcccactgagataaagcctactggaattgaagaaaaaacaacagaagaaaaggccacagagaaaatttcgtctgaaaatgttgcaactcctgctcccgaagctttaaaagagagcattgattacatcatccaccatgcttcgggaaaa

SEQ ID NO: 111844 - DNA, 447 bp, Zea Mays
ggggaaagcgcgcccgcgcgctggcatctttgcagaaagaccctcgggtttcaggctaactagaaacatgttctttaactatttctatgtgtcgctgacggtttgcaaataaccccttcggtttctaattcttcgcgacgcgaggtccacgacggcgttgaacgcaaccgaagtccggcgagctcctggaccggccgattggggctatgaccggcactcccgagcggctaacactcaattgaactctccccaaatgactctcctaagttaatttcacatttggtaaactatcctgttctgtccacgtgaaccgcggatgaggaagaaaatggtacgtgttcccagtgatccctggcggtccgggtcaattaaaggggtcggggagcatcaccatcatgtaaggatgctagaacagggacaagaagggaatgagcagacctggggaag

SEQ ID NO: 111845 - DNA, 663 bp, Zea Mays
tccatggccatgctcccctatagttctctgctattcccgtacatgcccgcctaggtgacatgatggagaaggtctagaatgagtaatagaaggctcaccagatggttccgaaccttgttcaccaaattgctccatctcctctgccatccttttcaacattaatgacaccaccctcttcccggtctcctcgatctgccgagccatcatatcacgatccttcactgcctgctcagccatagaaaacgacaacatatgttggcccatcaactgatgttgaacttgttccaccttgcctatgcgttggttgatcgacttcaactcgtccatgacttgggtccaatgatcgccctccatacgcaaagattcaaccatcgcatccagaacaaacctcatttgcactgaaggttttacaggtggcaccgtgatgacgccaaacaactcgcacgtcgaagacgcacgagcacgatgacaccagtcgtgatcgcaccaaaggacgacgacaacctgacgacgacgatgacgacatggaagccaccgaagactgttgaatccgataccaagtgtagcgcatgctgaccgccgacgaggacaacgttgggggtgtaagaacgcgcactaggaaatcaccaagaatagccaggtaagaaccctaactgaattggt

SEQ ID NO: 111846 - DNA, 551 bp, Zea Mays
attttaagcctgatttatgtgctagcgggcttaggtcgacacgatgttcatttttgggacgggattactggaccgacccgacatggttgggcccgtcctgtgtcgagctcgttcagagatttgagctcgttggatagtccgatccggtccggataactattcaggcttaaccatgacgtgcttcaacaggtccaggctagacttggttaggcagcccatttgaacatctctacttatattcgatccgtgaattgttacgggtcaaaaaaaaattataaccatatttactagttacattaacattagtcaagtcggagccgatcagacttttttcgagaggtggtcgagtcggacccatgctctatataccgtagaatcagcagccgtaaccttgaccacccatccattccaagtggtatcaccgattcaccgcgggcggcctacttggcgcaacaacttgcccttgcgttttttggctttcgtctcacctttctccgtcgctcagaactcctcggtgccaattgtggacgccgagacggaacccgcatcgg

SEQ ID NO: 111847 - DNA, 436 bp, Zea Mays
gagaaaaatacaaattttggtaaaaaccaaataacaaagttttagtacactaaataaccaacaaaatatagtaagaaagttttgccatttgaatttttcaaaatccctaaatcagcccctaaactaatgcacttgggaaaaattcagaaattcagaaatctgaatttcagcccctttccaaagatcaaccgcgttctatgcttttcaaaacttaaatcaaacaagtccaaatagcaaagtggcaccaaatttcctcgaacacaccatgacaaagtttggaaacctctctccaccgtttgacatggatttacctcgggtctcgaccttgtgacactgccaccttagcaacgcgacaactctctgtacacagccccaaactgctcgacttccacacataaacgacaaagctctgtcaggagagaaaatcttgtgtagt

SEQ ID NO: 111848 - DNA, 600 bp, Zea Mays
caccccgagattgctttggaaaaatatattaatcttttgtcacaagttataccaaggtggctgagaagtgaaatcatggacactaagaaatatgaaacgaaatgttattctgttgggttcatttccagggctgctacaagtgatcaacagaattattgggaaagtgaagatattaacagcaagagaaaagatggcaggaatatgctattattctggagcactgagaatgttgatcgtgccttagaaccatatctgatgagcaaccacaatccctaagaaaacactgaagaggagttccttccatgttcagtatgtgaatttattgaggatccaatgtagtagaaatatggtggtttcagtccatggagcaagctcgatgaaaaagctatgtggcaatgggatccagaatgtttattgcaagattctaatgttcaggcgatgggcttgctggaattatcattgagctctttccagtttctaatactggacggtgatggcttgcaagatatttcgtcggagcaactaattgactctggatcatacttggtgggtgctgatttcaagccatcggcatgttgaacattagtgaccagaaaattg

SEQ ID NO: 111849 - DNA, 703 bp, Zea Mays
ccaagggggcagaagagaaaaagtgcaacttctgggaaggatgttacttcagctgctccgagtgagcccgcgccgaagaggagaaaggtgaaggttcttactcaccgatcgcgctatattgaaccggccgcagtgcccgaatttggcggtgagacctcttcggctactgaagtcaaagaacatgcgcttacgcagaagattgaagagccggctgtaatgccgaaggcatcctcagccaaattagttgagccgaaggccaataatattgaagagataggggtcgaaggaacaaagatattagaagttacaaactcttcgacagaagtgacattaccaaaggcacaaaaaggtcttacaacgacccccaagaggaaaaggatggtcaacgtactagatgtgctggagacgataaagacttcaagctctactccagggaaaactgccaaagcttcaaaagcgcagactgagacaaaactaactgaagccgaagctacaaagagccaggccgagaccgaagctgggccttcagagcccgccaaggagaaatccttggaaaccggagaaaaggaaacggaaaaagaagctgcagaacaaattctgcctggaaaaactgccactcctactcccgaagcatcttccgaagtacttgattatattgtacgacacgcttcgggaaaaagattatctgaagaagagatttttg

SEQ ID NO: 111850 - DNA, 452 bp, Zea Mays
cgaatacgatgagtagatggatcataacaacgatatcctttgtgtttaggactgtatccaaggaatacacactctacagattgagcagtcaatttagtccgctcacaaggtggtaacaagacataacatatacattcaaacacacgaagatgatcatatcgtggagaagtcccaaaaagaacttcacccggtgatttgccagaaagtttaggtgatgattgtctattaatgagatacacgatagtggaaacaacttcactccaaaagtgtgaaggaacaaaagaagatatcaaaagagtacgagcactctcaatagtcaataatatgatgatgttttcgttcagcaacaccatttttggcatgagcaccaggacaagaaagttgagctagagtaccctctatggtcaatatctggcgaaaattatcagataaaaattcaccaccagaatcgg

SEQ ID NO: 111851 - DNA, 435 bp, Zea Mays
ggccgacctagtccctcacccgcacatttcctcgcatccacaccgcactcgaatgtcgctgacagcagggaccccttgttaggtgttctcttacctcgcgtcagagatgggccaacagcaaaccgaacaccgagattctcatgtcgttcgttctttcctcagccagcaccttgggagactatatatacacactacgctgcatccccttgacccataagcctcgtagtagatgagccgcgagcccattgaagcgagcgatgagagaacagagaggtagggagagccgtcagcatcaccctgtgtacgccaccgttcagaggctacaaggcaatcgaaggagttcgcgagggcgcggggatcgcgtgcgagaaaattgacggtcgcaaagttccactaatctgaaccacttgtgtctaatcttacaacacacagtgt

SEQ ID NO: 111852 - DNA, 293 bp, Zea Mays
ggtgcaggaacagaacttgtggcctaatgttggggctgaaaccattaatcttaccattcttttgattgttcttccaagattcgccatcttccaagtctccaagatagagcactcgccatcttccaggattaaccgtcaagttttcttcccttgctgctgatagagacaacctcatattcagtttgaaatctgtccagccaaggggaaccagtgtctgcacaagttgacaggttagtgactaatatagtacatgtttcagatttcacattagtttacaggttacacataaaaac

SEQ ID NO: 111853 - DNA, 654 bp, Zea Mays
tccgactgaagtatacctttagatttatggagaagtttgatgagccaaacgacgattggctgaagtgtattgaagctactagtgatgagctacttggagcatactccaaggccgaagataatgctctgtccgcagcctttggaggtcggggcaagaaaagattaaacagggtatttgatgctattggcttcgtataccctgattaccgctacctgttgcgagggcaagagaaaaagaggaagattgccgcttcggtcacctcagctgagccgaagagcaaaaaggtgaaggttctgacccaccggtcgcgttatattgaaccggctgtagtacctaaatttggcgtagggtcctcttcagctgccgaagcaaaacaaactattccgattatgcagagcactgaagagccgactgtagtgtcgaaggtgcctacagtagagccaaccttatctaaagatgataaggccgaagagccacagtcggaagaaacaatgaaaatgccagaaattctgagcccttcaacggaggcaaaactgccgaaggcacaaaaagcttctaccgcaactcccaagaggagaggaatggccaacgtgctggacgctgtgctggagactacgaaagctttgagccccgctccttcaaagaaaattgcca

SEQ ID NO: 111854 - DNA, 589 bp, Zea Mays
agtagattagtattactattatgcatcaaggcatggccacaatgctttgccagctaaacaatacactcagtgagatgataaccattttgcaaagaataatcaaatactaagcagatgaaatatatgcctatttatctaagaacggaattagttaataaacaaaaacaaattacacattgaaatctgagaacacacaaataaagtacaggtgttaacccataggccatagaagctaagagaatacaaagttgatctattagctaatgtgtgtatatcacagttcgactaacagacccacatacaacttgcaagaaatagaagaatctgagtttgaggacgcccaaaaaacacagtcactgtgtacatatatcactgtttgaagaatcacatctatttttcacttttgctgaccatcaacagttgcaaccagactttttttgttctgcatttaaatttgtgagcaactgctatgagttgcatttcaagtccaggactcaaaatctgaagactcaaaagtgattgaacgatggtgtcggtgttgactcaaacctgcaaatgtggttagccatcgttggtgggtcgatcgtcg

SEQ ID NO: 111855 - DNA, 393 bp, Zea Mays
accattcaaagctttatatgggaggaagtgtaggactcctctatattgggatcagaatggagaaagacagttctttgggcctaaacttattcaagaggtagaagaacaagttcgtataattccggagaatttgagggtagctcagaccagacaaaagagctacgctgataacagaagaagaccactggaatttgaggaaggagattatgtgtacctcaaggtgtcaccacttcatggaatgaggaggtttaaagtcaagggaaaattgtccccttcctttattggaccattcagaatctttaggcgagttggagagatggcataccaactcgagttaactgataatctatctgatgtgcataatgtatttcatgtgtcacaacttaagaagtg

SEQ ID NO: 111856 - DNA, 648 bp, Zea Mays
cggagttgtggttctcaagagcttcttcagagcgggattgcgatttcccctgaatgagatgataggggaagtcctaaatttttttgaaatataccttcatcagctgactcctaacactatcgttaggctcaacgtctttatctaggcccttcgaagccaagggatgaacccagatgccgaagctttctgccgcttgcatgagttgcactatcagacaaaggccagggcagatggtcttcacgaaaattttggttgttacaattttgtgtatcgcaaggatacgaaggcaccagtcctcagctaccgcacaaagtggccaaccggctggaaaaatgaatggttttatatgaaggctgatgagaaaaacagagagaagctaatgaccatagtcatgagtacgctgtctttaaactttggaatgaccaggcccctatgcaacatgcaactggggtcaccatgtcagttggccgaagtagagttcagagtggtagctgagcaaatcagtaccagggatctggtgcaggaatacctggccaaccggacgtatccaacgtcaagtggctcgggaatgccgaagatgaaagaaacgaagaagaagcatgaacttgttcgactagcttatcgtttcaagtttgaaaaacaattcaa

SEQ ID NO: 111857 - DNA, 423 bp, Zea Mays
ctaggattacatcaattctgtgggatggtagtacggctagatccaccaagaatactaccccacttaaaagaattttgacttggaagcatttgaggtggcatagaaggtatgaccctggggttcgagtgaccaaagggatttctaatgatgcagtggggatgccatgcttttccacaaaactagtggtgatgaaagaatgagatgctccagaatcgaaaagcacatcagtgggggtaaattcgactaggaactcattgagtactactccacgggcttgctgagcttcttaggcgtagacatggttcactcgagccctgtcgtggaactagttcttgcttaacttgctgttggtggagggtgccttggaggcaggtgtcgaacattcttggagccattcactgagttggagtaggtaggtacgga

SEQ ID NO: 111858 - DNA, 594 bp, Zea Mays
gttcgatgaaccaaacgatgactggctaaaatgcatcgaagttagaagtgatgaactgcttggatcatattccaaggcagaagataatgcattatccacagccttcggaggttgggaaaaaaagagattgaacagagtttttgatgccattggctttgtttaccccgactatcgctatccactgcgaggacagggaaagaagaggaaaactgctgcttcggccactccagatgagcctatgccaaaggtcaaaaagttaaaggtccttacccgccggccacgctatattgaaccggtcgtggtgcctgagtttggcggggaggcttcttcaactgctgaaccaagagaactcgttcctcctacgcagaaggctgaagagccggctataatgccgaaggcaccttcagttgatctagttgaaacgatggttgacaaagataaggctgaagagtcaaattttggagaaacaaaagtgttagaaattttaagcccttcattagaagtaacagtgccgaaggcacaaaaaagttttgccgcaactcccaagaggggaaggatggcaaatgtactagatgtgttagaaacagtaaagac

SEQ ID NO: 111859 - DNA, 424 bp, Zea Mays
cacattctaaaaaaataactattatattagttagattccaatttctcaaaatgaaggaaaccaaacagaccctaatgtaaaactgaagctttgttatagcattgcattgcaatatatagttatttgtgtattagtttgactagactaccagtcctattcttactacatgacatttcacggtggattcactcggcgagttcaatgacagatattgtgtttggagacactaatgtttctattcatgtagcaccgaaatgattgcatttcatctttgttactatatgaatactagataatacttggtgccttgctgctccaactctaagggctaatttggaaacataaatccttttgggatcctccttatttcttagggtttgtaaccccttggagggacatttaaacaagacatttagttatttgt

SEQ ID NO: 111860 - DNA, 397 bp, Zea Mays
gcttaaacaagtgtaaaggggtaacaagccaaggaccctactacaacaaaaccgtatttcagagatgtcgtaatgagtttatcatacaactttcaagtaggcagcagcacatattggggctgtggttctcggcatatgattcacaagtgtttactgttaatggatcatcttcctgatataataatagttctcttccttctatggttttatattttaccaaatttacacttggaagagtcagatgtgttactacctacagtgtttttgttattgaactcactgtaaaaatcgtttgaactgtattaaactggactcaagatatttttaggctaggttttttggacaaatgaaaatttaccctaatagtatccagttttaaaatcttaccctaatagta

SEQ ID NO: 111861 - DNA, 436 bp, Zea Mays
caatacaagcaaataaaatatagagctaaacaaaattgtttacgaaggttgcgtataatgtgactttaggggcttgaacaacccaccacaatccacgcgagtataagctctagcgtatctggcgtcaagcgtgagcggccatcagggccacgacaacacaacaagccttcgtaataagcgcaacaggcacaattatggctcggtaatcggggtacacgataagtccacgcaacgtgcgcaacaggcgcaattgtggctcaatgatcacggcagacagacagtgccgacagggcatgcgaaaaatacgcgactcagcgatggcggtctgactcaacgggagcgatccgattaatggagagcgcgacatagcaatcacatgacgcagccaagttcgaacgacacgaatactgcatcgtgttgccagggcgcagccaat

SEQ ID NO: 111862 - DNA, 760 bp, Zea Mays
gctcctctcaactggtcgaacagatcttctattctgggcaaggggtacttgttcttgattgtgacctcattcagagctcgataatcgatgcacatcctcctagtgccatctttcttctccacgaacaggacaggggcggcccaaggtgaggtgcttggcctgatataacctttctttgacagctcatcgatctgcttcttgagttcaaccaactctggtccagataccctgtaggctcttttagaaatgggggcggtgacaggaagaagctctatgacaaactcaacttttcgcttaggtggcatacctggtaagtcttctgggaacacatctgggaattctgacacaaccttgataatctcaagtgaatctggctccttgctatcaatagccatctgatgacaacctcctttccttggctcaggtgagattaacttggctaccacttcttctcctagtggggacaccaacttaattatcctcttatcacaactgataattgcttggtacttatctagccaattcatccccaggatgacatctattctctgagtacccattactatgagattagcgggaaacactatcccccttatttccacacttacattcaagcaaatgctatcggctcagattctaccaccagctgagtcaatttggatgggggttgacatggtagttattggaagattatgtgcttctacccatgatgcagtaataaatgaatgcgttgctccagtatcaaataacacttctgcaa

SEQ ID NO: 111863 - DNA, 275 bp, Zea Mays
actgcagggggtgttagagtacccgttagggttttgggtattttctaagtaattaccctcttgtccctactgtaatggatctggcctaactatcgagtctatttatacaattcctaaccccactgactcaggggttagggttttccatccaactgaggcaaccaggaggtcctaggccattatatttataagtttgggatttggtcttagcggtggaggcaaagcagggagtggtggacccagggtttgaaagataggtattccaaattgttaca

SEQ ID NO: 111864 - DNA, 461 bp, Zea Mays
ggctttcttatcctctttgcggccgaagcagattaacacgccggcgaccgccgcctcccggccatgcgccacgtggctctcgctttccaccgcaccgccgcgacttaccctcgctctccgtggctcaccggagtaaccgccacgcctctagacacgtattcaccgcgcccagtgttcttctccacctccggccgccgcgcgtcttgctcaaattcgcggccaccgcccgctagctctataaattgacctcgtccgtagctgcgccatgtagttgtgaagctgtagcacccgctcccaccctcgatcgtccaccagcacgcacgaatttctaattccccccaaatccattctccgccgccgtgaaacgtgcttcaccgtcgccagccttttttctggtcagtccagccctccctctccctcgtttaagtaccctgatgactctacgatgcttgccgaaccac

SEQ ID NO: 111865 - DNA, 451 bp, Zea Mays
gatgagttgagtggtggcactgttgtcctaattgacaatgagatcttgacagaagatgagaggggtgcaaagtcaggaatggataaaagagatacgaagttgggattggaagaaagtatcgaggggttaaatggttggattaagcagcatgatgataacaataatttggtagattatggtgcatcaacagatgaggatggtgacacaagttcaggttagttatcagctactaacatgctattattgctatattactcacataacaattcattaggaccgttttacaaaatttaaaatataaaatgcttacaagtgtgccttgtagttttatcagtttcctctcgataaaggcctaaaggcaatgaatagtccatatgtcacttgttttgtatctctggtttggacaaaatggaaaattacacttgatttttcttttatatatactaccctt

SEQ ID NO: 111866 - DNA, 274 bp, Zea Mays
tgcactaaaatggcctatttagggttatttagggtttgtgaattcttctcaccctgaggtgcatgacatggttaaggcataatccttaagatgaaaaagacttaattaaacctttgttcctaatttttgaagtcctttactcaatttggttcacatgtgataatggttatgagttacctctgagaagaaaccctaggtgacactggggtgtcacagaaagccggcaacggccttgctcgtgctcggctgctggatggcaatggccacctcaaat

SEQ ID NO: 111867 - DNA, 320 bp, Zea Mays
tggaatcactagtgctctaacaacattctagggtgctattaacgccacactcaagcctcccctccgtcgatgagttctagtattcttcgacgatatccttgtctgtagtccagacttccactcccatttcgactacctgcatcaagtgctgactttactagcagccaaaaactagaagatcaaactcaacaaatgcttctttgcccaatagtagacaacttacctgggacatttaatcagctgcaaaggtattgctaccgatccatccaagatttctaccatcgtgtcgtggccaactcccagttcagtcaaggaacttt

SEQ ID NO: 111868 - DNA, 340 bp, Zea Mays
gtctgaatttcagactgacagtgcaactgcagtgactttgggcatgaattcaagcaggattgagcaagaatttgcttaggatttctataacaatattgtagctagatcttagagctaaaactttgctaaagggtgatgatcatgtgactgcacaaaatcaggagtaaacaaccctgcaaatcgttctgtcaggtgactgaatgggctttcccatggtatagtaacctgaaacggatcaggacgccagctcaactcgccgccgacgatccccgccgcgattcgcgccaccgccgtcctgattcgtgcccggtgaggaacggataacgccggggatggataa

SEQ ID NO: 111869 - DNA, 330 bp, Zea Mays
tgtctatgacgtgtataaatatttaatacacgatgagctgaaaacatggagatgaaaggaaaaaaattagtacatataggatgaacaggtagcttagatttagatgaaaatacataaacataatgtcatacgtcatttaagatgttcacgacgattaaacccagaattcaccaaccaaaagactagtgttatgagaccaactaacatagcatgcctagtgttacgaacacacatgtgccaacagacacgcattgtagtgtttcatctacctaaaagcataaatagtactacatattattcattctactcagaggcttcattgtgacgatc

SEQ ID NO: 111870 - DNA, 295 bp, Zea Mays
caaacttctagcaactactttctcgtttttgcatataagaacaaatgaagcatcacatgtttgatagagcatagttggtccagttgatcctttcctaggcgcatgagaagcaacatgatggcgcctaggtctattcctaccaagagcatatgaagagctagatgcaaacatggcatgagaattaaatgcagcatcatgacgagtaggaaaaacaacatgattacaacacttatcatgatgagcagcactagaaaaattcttgacatgagcataaagataagcatggttcttttgg

SEQ ID NO: 111871 - DNA, 927 bp, Zea Mays
gccacgccctttacagcgtcagtctgtccaccatcgcctcggatcacatcagggagtgggcagagaacggtctgtggctgtgcatggaaatatgatggtggcgtcggtcctagctctggaggatggtgctgctgtctgtgttggtgatgggctgctgacctcacctagaccttcctcgcctcagcacagaagttcggctgagccgctggagaaggctaggttgagctcgccccttcctgccactcaagtgccatgcatgacaaccttgaagaatatcttagctgggccgtctgggtcggctgctgtggggtcgctggattctgtcctccctgtttcgccccagcgacacaggactgttgctgggtcgctggaacaggctggtgcgaattcgccccttcctggtggttcatctaatgctgtggcccccctgagagtctactcgagaagcagattcagaagcaaacacgccccaattcaggaaggacagttgatgcaggtcgtggaggtcaacattacagagaggccttgtctgaatcattcggagtccttggataactctttgtctgggtgcactgctgttgtccctgccctcggttttgctgctgaatcccaaccgcatgaaacagcaagctttgaagctagaaaacaagagttcttcaaaggaatctccaagttttcttctgggattcttcctgttccgcgagctgaaccgcacgttgatcctccaccttccccacctgctgctcccatgccaagaagaagtcgccgtgttgcgggagttggagtggaatttaatatccatgacctgggaggaagaactaccaggaaagtcatgagatcattgcatattatttccgagaatgagggaatttgtcaggaagccttggatgaatatactcagcttttcaagcgccccctgacccatag

SEQ ID NO: 111872 - DNA, 299 bp, Zea Mays
atactgattaatactaattactcccgaaaaatcctcagaaactgctaatactgctgctgttcatcccctaaaaatctgtttttttggacagccacataccctgtttcaaacggtgataacttttaatttataactccaaattgagcgcataaatactcattggaaaggtatgccaaagttctacatgattcccaaactgattccccttaattctccacgaaaaaatgcccagaaatcactaattctgctgctgttcgtccacccccttaaaattctggacagcccttctaccaaatcgc

SEQ ID NO: 111873 - DNA, 332 bp, Zea Mays
gtcttgatgaggtcgatcatcttctgtctttggtcttggtgttttcatctggtctaggaagtttagataggtagatgtttgtgaaacatgagataggtcaaacatggtttattttgcttttaggttgatatagatgaattgggcaacttatcagataggtcaggtagttatcattagaattaaggacatgtagttaagacatatttgttggtaactcggactgcttgataggtagagcagatgacttagtaggtggcttaagctaaatgagaattttagttgctctgcttctaggttggaatagataggttatacaactcactatgttggtt

SEQ ID NO: 111874 - DNA, 320 bp, Zea Mays
tccccaccttccagcacctgatcgatagggcagtcatgaccgagaagaagcgcaaggatatggaagatcggaagcgcaagatgagtggaccacagtctggaagcatcagccatccccgcttctcaggcagttcatctcagcaaggcaggcctggccacccaaagggatatcaacatcagagtcagcgtccgcatcagcagcagtttcagaggcagtacccacaacagcagcagtatcgtcagaacagccagcagggaggtaatcagtatcagaagcagaacaaccaggcacctcgccttcctgcccccgcaacaaatcag

SEQ ID NO: 111875 - DNA, 834 bp, Zea Mays
ccctgaaattagactgacagtggcctagaactaggtttgagagccattttgagctagatctgttgctcgattgatggttgttgctatagcataattgtaactggtatgaagggctgcaagtttgctactagcgaattagcaagttcttatgaagaaatctgtgttctggacgctacaagttgggatgtcaggggctctgaagtgcatttccgatggtacagtgtcccgatcagatcgccagctcagtccctcgccgcagacgagccgcgcgcggattcgtgctgtcaccgccgtgattcactctcagatcaactggataacgccaggaggtcagtaaatatcacaccacggatatgctccagccactaaattactccgaccaccgtacctgagctagtctcgattgcttcggatgggttcgccaaagattgtcatctcgcggtcttgcgccacatgcccaggcgccttaccatgtcgcggttagacgtgttaggcatatcgggtgatcctcggagggaccgccacggtgaaagctactaagcgcttgcgccagtaacccgtgttatctccggccgccgcgcgtcgtcatccaattcaccagccaccactcacaggctctataaattgagcgcactgcgagctccgtaggataattacgcatccatagcacccacgcttgcctcgaatcatcccctagaactctccaatttcccattctccccaattcggtttctgccgccgtgaatgcatcctcgccatggccagcttgctccaggttagttcaagcgctttggtcgtttgttctagtctccttaagacctcctaatgtcgttc

SEQ ID NO: 111876 - DNA, 686 bp, Zea Mays
tggctcgtcagactccagtgattcagactctgaggatgagacacccaagaagaagaccgatggactttgcttcatcactgacgccgacaacaatggtgggatatgtactatggccttggaggacgatgtagaagccgacaaaaacgacgaaacttctgatgatgaggtagatacttctacagaacaaagaattactgatttaactaaaattgttcataagcaaaataaagtgttggctaaacttaaagctgattatgataaaacttgtgctgaattagctactctgaaaaatgctacatctactcctgttgaacctggtgaatgtgaagaatgctcaattcatatgatttcgctttctgaattgcaaaccaagtatgcttccattgttgatgatcgagataaacttaatgttgaattaaatgaacttcgttctcggtcgaatttgcttggtgcttgtgtttcatgcccgcttttgaaagttgacttggataatgctttatgtcgggtaaaaaatcttgaagaacacatttgtcctgatttgccggattgctcgaattgtccaactttacaatctaaattaaatgttgctgaatcacgtattgttgagttgggaaaacatacttgtccagttcttcttccatgcttaacttgttctaattttgttgctgaaaataatgatttaaggg

SEQ ID NO: 111877 - DNA, 453 bp, Zea Mays
cttttacacacagtttaatcctgctccttcaggactcccttagcagcttcgtttagaagtttttctacagcttcatctattgctgcattcactattctgatttcatcgaaagtaccttttagggttgatcggtgtcagggttgtatagctctggaggagagagttcagctacaccaaaatataagtttttgtcagatacgaagctaaaatatgacaaacatacatatacgtctttcgcgctcagtggcttctttagcttttctcgcttcttcggaggcaagatgagattcttcttcgcttttcctaatagcttcgtcttctatctctcggccgtcgttcatccacacttcagaatagaattttccaccaaatgttgtagcttcagctgaaggctctttaatgtcatttgctgaagctgagaagtctggctgaattacagccttagcatgttca

SEQ ID NO: 111878 - DNA, 416 bp, Zea Mays
gaaaggttgacgtagtcaccctcgaaaatcatgtagcaattgtgcacgtcagggaagccatcgcccttgtcgtcttctccataaccgggagccttcttgtttcctccttctgccgtgggggtcgggcttgttgtaaaagtgtcgaagcatgtcacattcgccaagcgagtgtttaatcgagcccttttggtaagggcatgactccttcaatattttgtcaaagatgcccggcccccttgagggcttggggattgtgtttctcggttgcaacgatgagctcggtggcgagggcctcgtgtggcccctgacgcgccttcttcttattgcccttcttcgggttccattgggtgcacgcctcgggggtgccctccttctgcttcctgtcttccttgtccttgtgaaagagggcctcgact

SEQ ID NO: 111879 - DNA, 376 bp, Zea Mays
gcagttacgatgtgccataataaaaacctgagacgaatgcctgagagaagacagatgtggcattgcataggtgcttgggtgcaaggtgacctacataggccggacggcgacaagcacaccggagccacaatcagacgcagatggctgaaggcaaagtcaaacagagagcagacgacataatctgaatttccattactgctgacactctgaaggtttacagaccatggatgcgccagtgttggatgagcagctgtaggtggcatactatggccgatggtgacaccaagcaaagtcaaacagagagcagacgacataatcttagggtgtgtttggttcaacgtacaatgaggggtgtaagaggacggccacattttat

SEQ ID NO: 111880 - DNA, 395 bp, Zea Mays
aaacgggtaatctgagtgaggccatggttccttctgcaagatccaagcgcggggttcgcaggggaccgtcctcatactcccaggcacccactcatatatttgtcgactccgttcgaccggacccgacgccttgctacctctcttcacaataaaccatgagtcagacttttctatgactcgaacacgagctagtgacgcccttagcgcttcgcgcatcagggtcttggctgctagtgtacccatcaccagctgcccctcgctcttattttccttgggcagtcacgagccctttacggaccagcctttcgaaccccagagtccacaactatattgccatgagttttttggtcccctaaggaaatagagagtctaaggccttacccggtcagatgttc

SEQ ID NO: 111881 - DNA, 412 bp, Zea Mays
ctcgaagaacgaagaagagcatgccgggcatttgcatgtagtgcttcaacgtctgtgagagcaccatctttatgccaaattgtcaaaatgtgatttttggctaaaggagatcaaattcttgggtcacactatctctcaggcaggtatagctgttgatcctaataaggtgcaagaggtgatgaactggaagccgccaacgactgtctgtcaaattcggagttttctgagattagctggttattaccgaagattcattccagatttctctcgaattgcgaagcccataactgagctgttgaagaaagaagccaagtttgtttggggtcataagtgcgaagatgcctttcatgcattgaggcaacatctgaccacagcaccggtgttagcgcaacccgacagcagcaagccattt

SEQ ID NO: 111882 - DNA, 698 bp, Zea Mays
cagaaacagtgttggctaccagacttcaccgccgtgcaggcaaggtggttaaacagttgctgatcaagtggagcggttggcattcatatctagccacatgggaagaggaggctgacatcaagcgaagcttcccttccgccccagcttggggacaagctggctgtccaggggggaaatgtcagcgactacaccgaggaagagaagcaagacaaaggtactagagacgtcggccaagaggtgggccaggaagatggcgctcgtgggctgagaggagaacaactcaggagaagccatagagtgtcgcggcccaacaagcgcttcactggtgaggaatggcgactatgatggaaggcccatggggcagtgcgagacgtagcctgtaaataaccctggcaattgtgcggggaggggcagacgatatatgaactgggaaccggctgtgtccggaggctggcggctggcggtgcgccgtgtaaagaacctatagctaccttcaatactgagaacttcgagagaggcgacgggtgccgggagcggcgcccaactcatccccatatcagttgtcttacacgagcacccaatcgtacccagcatggcccggcgatgctcccgcgcagtggatttggttccttggtgagggctggtgggcaatcggcgttcaaccgcggcggaaatccctcaactctatgacagctcac

SEQ ID NO: 111883 - DNA, 508 bp, Zea Mays
tgtgccgaaggctacgggcaaaaagatgaaggtacttacccaccggccgcgttacattgaaccggctgtggtgcctgagtttggcggggaggcctcttcagctgctgaatcaagagcaactgttcctcccatgcagaggactaaagagtcagctataatattgaaggtaccttcggttgagctagttgaaatgaaggttgacaaagataaggctaaaaagtcaaaaactgaagaaataacaaagatgccagagattttaagcccttcaacagaagcaacaatgccgaagacacaaaaaagttctgccacaactcctaagaggaggaggatggcaaatgtactggatgtcatattagaaacggcaaaaaccttgaatcctgctccttccagaaaaattgtcgaagcttctaaggcacaacgcgaagctgaaatgagacaagaagaagtcgaagcttcaataattcaaactgaaaccgaagctgggccttcagagcccactgagataaag

SEQ ID NO: 111884 - DNA, 1146 bp, Zea Mays
gtccatgaggctcctatatatatagtcatctccctactgtagtactcacttctcaaatctccaaggttagtaacagccgtccccactactactgaagtgttcaacgtctcagatccccaaggttaataacatactcaaagggggggggggggtaggtggagagcagaataggatgtgataaacttacgattacaggactcatctactcttcatttggtaaactcaccttgactttttcagggaatattgaaagaagtgcttcagagtattcttctgttagtcttcctgttctatcaagagtggctttgagtctcagtgcccaaatatactttccatcctcattgcctatgtacatgacaacagtagttgaagggtactcctcaccacaatgagcacacaagtagggatacatattcatgcatgacatatataaaaggagaagttgtaccttcaaattcagatagacctttctgcttccaagaaagaagctcattcactattgcagaacactcatttggtttccaacctgaaaagcaaacttgatttatgccaatgataagggcatcaagggcatcatcccatagacttgtatttgtaggaagaccctctgcaagtgaagctgatccacctaaagcttcaagagcattgatgtatctgttatggtaccatagcaacaaaaataaaaacacagtgcttccatgagaaaccaagtatgttggaagcatcatagttgaaaaagaaacaaatttatttttaactatgttattacctacttaacaatacaaacgaataatcctcaagcccaatttcacaaagacgccactgcaaaacctcgacaatgaatttaattgaaatacatgcatccaatttcaacacatactttctcaattgtgttttgacaaaataaccttttgtcgcattgcaatagcactatctggagcatcatttctaaggccactttccagacccttcattagaattgatcttagataagataatgacagcaaggtcttcagcaaaacgtgaacgccgccattttcatccaaatcttttgcatcttccagttggtctaaattctgaaataatcaatagaatcacatatacacgtataaaatggccattacactggtgagcatcaggttcatc

SEQ ID NO: 111885 - DNA, 641 bp, Zea Mays
tgcggaatttgaagcagctttccgggagcaccatgtgccccaaggacttgtacagcttaaggaggacgagttccgagaactgactcaagacggaagatctgtcagcgaatatatgcacaagttcacagagttagcccgctacgcgccagatgacgtcagtaccgagggcaagaagatggcccgtttcctgaagggactcaggctagaactcaagacaattctggctagccaagacttcctcaatttctctcacctttccaacaaagccatgcaagttgaaagggcaaaggaggaagaaaaagggcatctcaaaagaaagttccaggttctccgggcacagcagcaggacaggcaccagaagactcgatcatttgggtttccacccaagggaccaaacttcagtagaccagctgaaaccgccccatcgcggttcagccagcagagtcagagctctttccataccccctcagtggcaagcaaccaacccccagcgaatgcatgttggcactgcggtgatcctagtcacttcaagaacaactgtccgcagttgaagccactaggacccgcctactccaactcggtgaatggccccaagaatacctcggcatccgcccccaaggcgccctcctccgtcagccaac

SEQ ID NO: 111886 - DNA, 406 bp, Zea Mays
aaccatggacaaggttgatgccctggacaggatggttggactcgagatgagagaactggctcaatgtgttttccgcagcggcggcagctccgtggacagagagacgaggcagacgtttctccacgtgaccaagagttactactacgttgcactctgctcgccggaaacacttgagcatcacatctccaaagtcttgtttgaggatgtcgtctagcaacgatgtttatattagagctcaaattccagtgtatccttgtgcatgcaccgtgaaggtgtcatatgatgatgttgtgcctagcttttctcttacgatatgtaatcaatttatattgattggtgatgcttcagtaattaatctggggtttgtcagatttacttgtgtacgatacatactgacaggaaaatg

SEQ ID NO: 111887 - DNA, 421 bp, Zea Mays
gatcatctcataaagggggaactgaagtcctgccctgaagaagcttttgaagactacaacttcatcctcttttggctctggaatcacctcatctccagcgaaatgaagcagctcgtcatcattttgtccaaagtaccctagtttcttcattaaaactagatcctctaccttaactgtggatctcccgaattcgatatgactgggtttgctcgggcttaggatgttgtcatcatcctcactttcattgtcgctttcaacttcggcagcagtctattcaccttcggcatcagcagcaccttcggtgatcgtctcctcttgcacaatcaatctagaacgcctcatcatctccgaaatcggtgttgtctcagaagtcccaacttcatctccttcacgtgccaccctagtagtagatcttaatcta

SEQ ID NO: 111888 - DNA, 707 bp, Zea Mays
tgaaggccaagccatgttgtcttcgaaaatccactgttaagaaaagggaagattgaggcaatgaagggcaaatatttccatgatatatttgtaatgagagctggaggagagagcattgttcctcttcctgaggtagacgaagtgatggtattccaaattttcatgaaggatgggcttcgctttcccttgcataaattgctagtcaaagtgctgaaaagattcaaaatataccttcatcagcttcttcttgaagctttgattaaagttggagttttaagcccctagctgccgagtgggaaatgtcgaaggatgctagggctaatacaagttagaatgctggaaagagcagtttggttcatttgaagtattcttatcgatacagaaatcaatttggcgatcctgacgatgactggcttgatgccatcgaagcaacaagtgatgaactgttaggagcgtataccaaagctaaagatgaagctatgaattctgcctttagtgcccgaggaaagaggagattaaacagggtttttgacgctattggatttatttaccctgattactgcttccctgctcagaagagggggttaaaaaggaaaagtgcattaaaagcttattccactgcaccgaagcagaagaaagtaaaggttctgactcatcgacgaaaaacatattattcggagagagcagcagagttacctgccttgctg

SEQ ID NO: 111889 - DNA, 355 bp, Zea Mays
tgattaccatttttcagctgtcggtcacttgtggtgtgaccgtccgagtgtgacatttaacttgaattggttgtggaatattttcagtttcgattgttgagtatcaaggacgcatgtaccttgagaatctctgttttgcctctttttccttaagctgacaacttaagttcctgtttggctgtttattttgtacttagaatttagcatgtgagctctttgttgagcaaacaggcaacactggttccagaaatgtctgtctaccacaagattctgatgatgtgcatcattctgttacggcatcaagtattgaccagctagtttctggtcttaaagactactcactctcccatgtaaa

SEQ ID NO: 111890 - DNA, 431 bp, Zea Mays
gttgatccgtccaattggttgtggtgaggtgatcaagttcgtcttgttagttgaggtggagtatttttatgctaatgatgatgactaccgtgtactttgttgcttgcggactttttgtaaatttcaattattggttttaccatgcgtatgaaaaggaggacagttttgtattactattcgatgaacttgttcatgtgacaagtgctgtaatggcttgtagaaaaacaacatgcttatctgtttttactacgtatctgtttccgatgaaatcataatcttgtctggttgatatttagcttatgttcgattcaactgctgattgtcctcagcacattgtttcctctgtattatcggcaacgtttagtagtctgaagttatgtcgtctcctaagatgccctgccacatacggctgctatatgtatacgtcttcc

SEQ ID NO: 111891 - DNA, 350 bp, Zea Mays
ccgccattaacggcaagaacttggaagcttcaaattttgccgtgattttatgatgattcagcaggatttcttcccctctcctctccctataagtagggtggcagctcgcccttttctcccctcagccggacgcactggctccgcccgaacgtgcacacagccacctcgccattgtttctgtccgcgatcgttcttcgcgcgccacgacgtctcgcagccgtcaccgaaggcctcgctgagcagcacctgtctccttctccgtgttgagcttcctattcgagcgtgcctctactcgctcattgccgttgacgccgagcactcgttgaggctgtgaccgccctgccagcaat

SEQ ID NO: 111892 - DNA, 277 bp, Zea Mays
ttcttctcatgacgagcgttgaacagcccttacagtaataaatatgtccagttcagtgaaaagggcaagatcaaatgtgtccagtttggtatggctgccagattttcggacagctgcgagatttcagttttaacacatctgcaatttcagttagcttcagtttagttcactctgctctgaaaatgcaactgaatttctgacagaaaaccgagcagactgaaccgagcagcctgaatttctgaagtagcagaaaaccgagtaggcaatagtgtgaaat

SEQ ID NO: 111893 - DNA, 299 bp, Zea Mays
cgcaaacgacacacgtgaatggcgcgcgcgctcgaaaacggcatgcgcgacacacgcgaaatcggcacgcgtgacacgcaagaataactaactaacatccagtggccgcgacaaactaagctaattagttacaacacgcgtcgcgaccaagtaatattactagcactaaattgatgttgatacgaagatgacgcgactgaaacgaatcaaaatagatttatgacgcataacccattgaataatcgacaatttgcagactataaacagcataatatacacgatctgctaaacacacatcg

SEQ ID NO: 111894 - DNA, 287 bp, Zea Mays
gcacttcactacttacttgtggtactagctttccttgaagtgtaggatattattaagacaggaacttcaattccactgcaacctactcgaagggttcttcactccactgcgatcctgtcttcgagtagagtaagatttaagttttaaagtgataattttttattcgcctattcacccccctctaggcgacatccagatcctattcccgggtcaaagggaactttcaagaatcataaccaccaaaacaaattaaggctagcacgttccaaggaaaaacaatataaatc

SEQ ID NO: 111895 - DNA, 432 bp, Zea Mays
gttcagttcgtgtccgtggtcgagtcgtgttgctggtttagggtgtatcttcgtcgtagatcaactgccctcgctagccgctatcccatccaccattacccaaatcacaagtcgatccacccattaatcgacttgccctcgctagccgccgccgcgccagccctagataaattgcagatagggaagttttgccctaaccgcgccgccttctattcgtgcctcccaaaaacataacttgaggtaccttccttaaaccgggcataacttttcgctcggttgttcaaaaaatctgaaatttttacaggagcttggtgacgccattcggaggccaaccaaactcgccaatggcctctttggtttctataaaattgtcaaaaaaattcaggaaaataaagaaaaaaatttatcaaagctcttgcacgctttttagag

SEQ ID NO: 111896 - DNA, 579 bp, Zea Mays
atggtctttcatcccttttcttcatttctacttaaatagcttaattagggttggtattagggtttcaacatttttccctcttttgaaaacctcatttgttttgaacatgattctttagatataaacttagtggatcttttattcttaatttgatttggtgcttcatgctttctttggcttacatgaaatgatggttcttgagttagcactaagaaaagccctaggtgacactggggtgtcacaacccgggccactctcctgtcgtctctcctgctgtgcgcgtgatcgcgtcgtcactgccagggcgggcccgcaattcagccatctcacgcacgtgtttttccgcagcctcttacgcatgggccgcctgggtcagtgacctttgcccctcaccctggttcctagaaccgcagacatgtggaccccccaacacgatagcttcttcaccctattgatcggaacggacttgcggccatcgcatggttgttacggctagatcccggcgagatcttcgctgggctataaaagccaaagccgcagcccctccttgactcacaacccatggtcgatgttgtgccc

SEQ ID NO: 111897 - DNA, 297 bp, Zea Mays
tattatttcatagttttaagtaattgcttataatcacgccataaagaataattcattttaggagaatatcatttatgaatgtgtgatctattagaggttaaaatcaataataatgatcctatgttgttttgcttatttttacagaagtaatacatattcccttttaagaatttataaacagtggaaggtatcctgaatattgtagttcatgagagggctatcccattctaatattttaggatttatatttagttaataacattttagtattgccaaaacttatttatttcatgattt

SEQ ID NO: 111898 - DNA, 857 bp, Zea Mays
cgacaagtacgtaatgttgcaatggttcatatgatatgatctttatgtgcgcataacagttgacatgtcttgctaggggatgctatcaattattgggccaagtaagagtactcgggccacgtctatgtgtatgtgaacctatagggtcacacacttaaggaagcctaactcggattagatccaaaattagcctagactttaaggttactgattgagcctcggagtcagaagcccaccacctgcaaaccagcagtcatgcctctctcgccctcgccaagccgctgtcgcacctagcagttcggtatgcggcacttcctccctctatgtgtggatacctcggaggtgctgcatctagagcactgagacgaaccacacgaggacgtgaaggacgccgatgattgcacaccactgcttaacgcgtttgtcaacatcgagacggcttctgctgctctgcgcgtctagtggtaattccatgacctataacaacagtagatcttgatttatggggttaaattttttgttttgagctactgtagcctcctcataattcatcacctgtgtcccaagttcttcggtcgagtcccagagattcaccatttggagtaagtctgcacaagcatcccccatcgaacacaaatctattatcccccggttttcgaaaccatgacactcctgctacgagtttagtctataccctgtataacccaccagtttcaactttgcaaaacccacctaaccaaatcaccccactcataacctcctctaaacccaccaaatgaattacacccacacataaacacgccttcaaaaccaatagttttaagtcactgaataactcatctctctcttatccactc

SEQ ID NO: 111899 - DNA, 290 bp, Zea Mays
ttcgttgtacaccacagatggcttgaattagagtgctattaatcaaacaatttagggacaatgtcctcatattcgttgtacaccatagatggcttgaattagagtgttgttaatcaaacgttgaggttcgaggcaaagttaggcttactgataaaccaaacatatggtcatatgttgatgttatatgagaccacagtaaaaatatagttactgtgctaaagactaaacgtagaaatacagaccaaacatacgtttttattgtgactgctgactggaaagtcaagcaggca

SEQ ID NO: 111900 - DNA, 575 bp, Zea Mays
gggacacactgtacagaaggggtgcaataggagtcctcatgaagtgcatttcctcggtcactagaagacaactactagatgagattcacgccggacaatgtggaatacacgtagcatccataactctggttgggaaagtcttcagcatttaccagcacagtagctgcagaccatacccataacatggccattcacgtgctggggattagacatgattggacccttcaagaaagctcagggaggttatactcacatgctggtcgccattgataaattcactaaatagatagagtacaaacccattgcttctctaactttagccaaggcagtggaattcatacaagatataatattcaagtttgggataccgaatagcatcataaccgtgggatccaacttcactagctctgaattctttgatttctgcgagcaacggagcatccagatcaaatatgcatcagtagcacacccaagagctaatggtcaggtggaaagggctaatggaataatactagaagaactcaggaagaaagtcttcgacaagaatgaaaagttcgcaggaaagtggatcagag

SEQ ID NO: 111901 - DNA, 417 bp, Zea Mays
catgcttgcagaacatatgcatttttagcatcatccagagaaattgcactggccataaatgaatcaatgaaatggggaaataaaaagggtacttgttcttgcatctgaggacctacaatccttgtagagctttaggagcatgggagggcggcgtccagatctgcaggcggaggactagctcgcccgattagctaggagaggctaagccaaggaacctttacaaggggaatcaagtagagacagaagggtggaaaggtggatggattgaggatggacgaagcagcaagaagagggacgaggaggagaccaagcacgaaggaagagacacgaagcaagcaaagtcgatgtcaccattcccttggccttgatcgtagtgtcggtagcattgaccacatacctccatctcctcacgtcgat

SEQ ID NO: 111902 - DNA, 528 bp, Zea Mays
gctttatagaaagcaacgttttgctggggagaccagcttacaaagggtagcattgagttatgccattacatgtttaaagtgggattctctctaaactccctcttccttaagcaaaaccagaaaggtaagatacccaacattgcattcaaagctgacacactgccaccatagctctgttattcagctaactgtctgcagcaattatagccgatccatcacgtcctccgttaccctttgcacccagctctgttattctgccttgcggagaatgttccatttctgtgcataagaattaaagcacgatgaacagccacaatgggtgaactcagggttcaccaaaccggttcaggggtcaaaaccggccaggaccgataagcggtttaccacgataaaccggtagaaaccggccgaaatcgaggtggaccagtttttgaattctaaacggtttcaagccgataaacctgccgataaaagccgacaaatcggctcctggcctgataaatcggccgcatagaaacagaaaccgag

SEQ ID NO: 111903 - DNA, 380 bp, Zea Mays
ctctagtcaatcaacaggatatttatttatccaatgggaatggaatgcaatatttgacaaagcaaggcatcgattcaccatacaacagaaatcatgacgacaccgatagatgctatcaactaatcattaaaaatattaaacttacttctcgctttgccactacaccaccctttagtcacatgaccatcgtgagcatccttcacacaattatacgacagcaacctaaacgctgtgttacacaatacatacatctttcttcgtcgcgagtataaccatatcacgtcatatacccgcacacctaaatcaaatatcctacgccaccactactataatacacaacggcacacacacatacgtgtactaattcaatcctcacataa

SEQ ID NO: 111904 - DNA, 775 bp, Zea Mays
ctaggatatccacatccactaagagggacatgtgagacgaagaagcacgcgaaaacctagaccatcttttgaacatcaagcataaatgaggtctagtgaacaacttgccatcattgagaaccctagatgttgtttcctcatccgacagaaacaacaagaaatcctccggcgaggactggtggatggacatttcatcaatgttgacatcgaagctacgagccacctcttccaacacctctgatccttgcaccacatgcctagttcctgcagtggtgacgaacaaggccttacgtaatttgatctcctcccttgccatctcatcagtgaacataaggacacatgagacatctgttgatgggagagtagcactctagctttccaccttcaacaaagtgagatgaacttcaatatcatcaaatgatatgggagagtccacactcgcaccagcacgcacattcatcatccatgggaccttttcctttcttgctcttggaccttcatcatggggcggtaatctgcaaagcgggagagatacacacccagaccaacttcttcttctaatgatgagtaacacgcctagctctgccctacagtgatgagaccttctgagacgatagtctctagaacactaggagacaatccttgggcccttcaaaacgttgccagatcgacttcttccccctcaagtaggtaccttggatggatggtcgaccggtgtctaatataatggtgttgtttgtaactttatcaatttttagatttatcgattcggtct

SEQ ID NO: 111905 - DNA, 373 bp, Zea Mays
aattaggatgccgaagctggttcgaaccacctgcgaactccatgatcgggggttgtgggagaggcgactccagtttgcctccaccattggtttcaccaaacccgtctgccccatcacatgcttcttctcaaacttctccacttgaatctagattccccgcatagtgtctgccatctccttcatctttgactctacctccagcttccacttctgtagatctcccttctccgacatcacccccttcactatggttgccatgtttcccaaggcattctacatcaattccatcatcctatgagtctcctaatttccctcttcaatcttagccaacaattgcgccaagggttcctctgtctttgacggcgccatcccg

SEQ ID NO: 111906 - DNA, 276 bp, Zea Mays
tagctagttgcaggtgttatcgggccagagccagatatcatatctatccctgtcacgaggccttgcctgaacccggccgcgacgagtagtggcagcaccgccggatcacgctggcttcgcttcagctgtttggttgttcttgtccggccgttttctttcgatcgcgagtcattgttttgccgcctgaattattcgttcggtccgatcgtattagggaccggaccggaccggacgtacgtacgtacgtgctgtgcccagccctcgtaacgtgactcg

SEQ ID NO: 111907 - DNA, 541 bp, Zea Mays
aatggatcgaagatataaattatgagacatgtgattagtgtttttaagatgagatgtgcgaatgatcggttagtgtttcacttgtctagtcgataaatgttgtcataaattattatgctaaaattggtcatgagaatgcagtgggcacgtggtgtgtttggatgtgacaagtagattggaagtgtggggtctgtcgaagcactatgatgtcgaaagtgtatatcgaagtgcattgtagtgataattgtgttaagttaatcggtagtgtctcgggtccacgccacaacatggttgtatgcgagacaaggtaatataaggtgtgctcgacacgaatgttcggtcgatataagtagaaattgttttggtttaattagagaggtggtgacatgccaaagtagtcatcgctttctctatatttataagtcgagtcgtgtcgatgcgcattatgcgttcgttaaattatgcttcgcatatagtgtatgattgtgctcacgactttgtgtagacacttcaagtaaatcaagtaggattgtgatacaag

SEQ ID NO: 111908 - DNA, 500 bp, Zea Mays
ggagactacgatcgcgtccttgcttcgcttacatgagggaccagcgcgccaggtacgtcatcctcatcgaagtccatcgctgggcgattacagcaaacccaggatccgcgcggccggttgtgatcggctggttattatccgattcgcctcgcagggtgtatatataagccctgaaccacctcctcatccatcaaatcgaaccatcgcgacgacccaattggagagcaccttcggtgaggatcagagagggagaaagggagaaggatagccgtcgtcgacatcattcgcctccgccaccatccagaatccccaatgtgactgaaggcgttctgtcaggtgtatggtgcgtgctcggggaagcagtggagtgtgcgggaccacagagccatggcaattcgtcgccggtgacgggagcgccactgcggaacgcacttctcgatgggcggaggacgacgcgatgtaatcctcggtaagagcacccatatcgatttcgccttagc

SEQ ID NO: 111909 - DNA, 976 bp, Zea Mays
cttgtgttgatcctggggtgccattcgaatttgatgaaaaccagcacgcaagtccagtgtagaaaaccatgcagccccatgcaactcgtctaaaaactcatcaataactggaataggaaaacgagtcttgacagcgagagcatttaaatgacggtaatcaacacaaaaatggtagctgtcgtccttctttttcaccaatataactgacgatgagaaatcactccgactatgttgtatgatacccgactgcagcatgtcccgaacttgtcgctcaatctctgacttcaaggcgggagcatagcgataagggcgcatacgaaagggttggcctcctggtattaaaggaatctgatgatcatgatctctctcgggaggtaagccctgaggtactgtgaagaccgactggaacttgttgagcaaagactgaagctcctctggtagagtggacaatattccttgctctttttctgataaatcaatcaattggcaaaactctatgactgaacagtggtctgttgctgtctgcaggccaaacaatttgactgtagacccttggtatgggatggccagccacttttctgcccagtgaaccatcataggactgtaaagttccaaccaatccatgccaactattaagtcataagtttggagaggcaaaatacgtaagttggactggaactcacacgctcccaatgaccaaacagcttggggtatgtgctgcatacactgaatacgatctccattggccacctgaacggacatcatctgtggcaaagaagataccccttgaatatgttgggccacctgagcactaagaaatgaatgtgaactacttgagtccaacaagatcagcagttccatgccctgaatagtgcccataaacttcatagtgcgggacgcggaatcatcctgaattgcagccttggacaataacattgactgaatttccccctctggttcagactgacagtcagct

SEQ ID NO: 111910 - DNA, 367 bp, Zea Mays
attatacagtgattgaacaagatcataggttcactacacctcaccgccgatgatcttgcaccgtgattcgtgcttcggttgagatatgtgcacacgcaggcgagtgtggataaccatcaggggtaaaaagatcgtcgagggggtgaacttgggcctatgcggtcgtacccacttgcacggcgacatggctgaacgaccaccactgtggtggttgtcatctcccgtggttgtgtcacgcaatgaccgattcgccacgatgttgggggtcatggcgggtagatagttactgctcaaggtcattgtttcaccatatgccacgacgggcaggcctcggtagtaatatctcgcagccgccgtgaactcaacc

SEQ ID NO: 111911 - DNA, 399 bp, Zea Mays
gggaccccggtgttcccctatgggagcggctctgaactatcaacgaccactaccatcatgaccacttctatcgtcgcagcaagatacaagaacaatttctcacctggatctagagccaccagcaccggtagggaagcgagatgttgcttcaactcctagaaggcttgttcggcctctttagtccaagaaaatggatcggacttcctcaactatttgaagaaagggagcgctctctcagccagccttgaaatgaagtggctaagggcagccaacgatcccatcaacttctatatgtccttgatgtgggcaggaggcctcattgccttgatggctctaatcttgtctgggttcgcctcgatgccccgttgtgaaactaggaaccttagcaacttcctagcc

SEQ ID NO: 111912 - DNA, 274 bp, Zea Mays
caatttctcaggatgggatatctgttgatcctgagaaggtacaagaggtgatggattggaagcccccgactacagtaaggcagattcagagttttctgggattggcagggtattatcgacgatttattccggacatctccagaattgccaagccaatgactgaactattgaagaagggagtcaagtataattggagccaaaaatgcgaagatgcctttcatacactaaggcagcatttgacaacagccccaatgctggctcaacctgataacac

SEQ ID NO: 111913 - DNA, 598 bp, Zea Mays
gagcaggagttttaaccttttcagacgcaatttgctctgtcgccttttcttcaactacgacaggctctgtctcagtgggcactgaaggcccaacttcggtttcagcctaaattgttgcagcttcgacttctgcctgcttcgtttcaactttgggttgtgccttggaagcttcggcaatttttcttgtaggagcaggactcaaggtttttgctgtttctaacacaacatctagcacattcgccatccttctcctcttaggagttgcggcaaaactcttttgtgccttcggcactgttgcctctgtcgaagggctcaaaatctctggcatttttgttatttcatcaatttttgacactttagccaatcatcatttggttcatcaaacttatccccaaacctgaatgtatacttcagccggaccaaaccatcttcgctagagttagtgatggtctccttcggcatctcccagttttccacaagcggccatactctgaatgctatatgttcttgaattagatctcttgtgccaatcaaggagcaaacagtactaaaggccttctgacacgcttcgacgacgtcatcaattttgtccttcgac

SEQ ID NO: 111914 - DNA, 287 bp, Zea Mays
ggatagtctaggttggggttgaataattgctagttcgagggtatcattgtcgcaaagaatgacattttttgtgttaggtggttgacccttgggatacgttgagcacccttgaggacttagtgtccaaatgtggaagtgcttgagagccctctaactcacttgtgcttgtggagatatcatacaaacgtgagtgagcgatctaatgtgttgtattgagcaattatacatcgactcactctagatggccgagttccaggctattggtgcctgttattcttggatgttat

SEQ ID NO: 111915 - DNA, 418 bp, Zea Mays
tacacaagggaatgtatcaggtgcaaaccaaccacttggtgtaaaccgtgcaaattaacacgttggtggagttgggagggtgtatttgaaaatatcattgttttcaggtagggcgaacagctggtcgttccagaggaccgaccaggcgcctaatcgtgattagggcgacaattaggacgcctaatcggttctggtcgacctctggtcatcccctaactgtcctatatatttctggacatatgtatatacaagaaatattgcgatatgcgttatataagtctgaaagtctgaaattgaaactgagtaacagactgaaaggcaatataggcatatagcactacatcagaactgaaattgaaatattgaatacaaggctacaagcagtaatgcagtacctactacctagagcagatcatca

SEQ ID NO: 111916 - DNA, 626 bp, Zea Mays
cctgcgcgccagcaaactattctcgcgtgtttccctttgccacaagcctctcccccagtcggaggtcctctgtgtggtggtcgcggcttgaggttgcggtggcgacagtctgatgaatttgagatgcagccaccgaggtcagttggcccgggccagtaggggcaaggatgacgcgactatgagcagatgtatcgtgtctagtccgtcggtgtccagcacacccaatggatcagcagcgacgagcagatgcatcctgtcatggtctcatggaaggtcaggtaccagaccatcctcatctggctacccttggtgacgagcattcagatcccctttggcagtcccgttcccttgcagcgacgacctgtcagcaaccttcgaacacgcgaacaccggcaactcatttgtcaatggtatgaattttggattctttgttttgatgaaatgatatggataatttactaccttgcccgcctagcttacacatcaggtcttttttcaataaccttgcagggtctataagtttgtacttaagttttgtccatttagaaattctcagcttgttaaacattcttagatttaaatttcgggtgtgctcagaatggctcataaatggtgtttgttttgtg

SEQ ID NO: 111917 - DNA, 900 bp, Zea Mays
tttcaaacctttggcacccttgtcaaacctttcatagtctggatattcaaaatttagcgtgtccatcacgcgattcagcctttgttttggcccgggtgccgaaggcagcggtcattaactggtcctccttcttggtgtagttgccaaggatctcattccacatagtttcaatcatttccaaccactcttggcatggcttcttgaactctttctcaaaattgaaacggtaagggagccgaacaagttcgtgctttttgcccccatccttcttcttgggcattctccagccactagaggtcggaaatactctatttgccaagaattcttgcaccagatctctagtgctgacttcggtcgctaccactctaaactccacttcggctacttggcatggggagccaagctgcatatggcacaagggccttgtcattttgaagctcaatatcagtggactcatgaccatagtcatcagcttctccctctttttctcgtctgccttcatataataccattcacttttccaaccagttggctacttagtacggtagctaagaaccggtgcctttgtatcctttcaatacgcaaaattgtagcaaccaaaattctcatgaaggccatctgccctggccttcgtctagtaatgtagctcgtgcacctaacagaaagcctcggcattaggactcatcccctcgctccggagggcccagatgtagacactgagtctaacaattgcattgggtgtcagttgatgaaggtatatttcaaagttcttcaaaacctctcctaatatatcatatagagggaatcaaagccctgctctgaagaagcttttaaacacaacaacttcatcatcctttggctctggaaccacttcctcgccagcaaaacgaacaagtttac

SEQ ID NO: 111918 - DNA, 624 bp, Zea Mays
ggggggagcaacaaaaggacagaaaggtaaagagtacattaggtacgaaaattttgtaatggagcccctatgtgactttagtaaatgtgcctcgactcgggcacaatgatgttgactgtgcgagcttcggattcttcatgtgcttcgcgttgttgttgtgcttgactatgcccttctggctgctgattgtgggtcaaagtcggtgccataggtggtggtggtgctaatggaacccatgcagcttgagagtgacttgccgaagcaactgatgctatggctgttggttgcccacatactcaggaatgtatggagaatagcacgaagcaatatgcaggacctactttggctgattttgccttgcttcggcttcaactatctctttttgtttctggatcatgacttggcacgtccttattgtatgtccttttttctgcagaataaacagaacaacctcctgggttgggagctaaaccttactctaaagcttcttcttcctctgcctcttggagctggtggcctgtaagagctttgttgtatccctgaagtctaggagctttgctgatgcccttaagcgtggtttcctctgtcatcacttgagctaggattgtggattgtcctaacatg
